United States Patent Application Publication US 2026/0103690 A1 - sequence listing, part 23

SEQ ID NO: 100729 - protein, 341 aa, unidentified
MQITTIGLDIAKNVFQVHGIDGDEKVVVRKQLRRSQVIRFFQELAPCLVGLEACATAHYWARELMKLGHKVRLMPAKDVKAYVKRNKNDAADAAAICEAVSRPTMRFVPAKSAEQQAELMQHRARDLLMRQRTQLINAIRAHMAELGISAPQGREGIKQLLAIIAADEDTRLPADARASLIVLAAQLQAIQTTIGSLERRIVARHRSNQDSKRLQTIPGIGVIGATAIAATVTDPTVFRSGRDFAAWVGLVPRGDSTGGKHKLGPISKQGDRYLRRILVGGAVSILRRAKLNPQRYPWVTRLLARRPFKVVAIALANKMARVAWALVAKGGIYRIPRLAAV

SEQ ID NO: 100730 - protein, 516 aa, unidentified
MVPKECANILGDTWDGRVIPFGRMQRAHLRARRVPMNPRCKGEAPMSTTPTRAKRRRQVRIASKPKVPLPPQLQRVNLNAAGIDIGSEEHWVAVPPGRDREGQDVRRFGAFSGDLCALADWLQRYEIETVAMESTGVYWIALYELLVERGFEVLLVDARRVRNVPGRKTDVLDCQWLQELHTYGLLRGAFRPADQVCVLRSYLRQRSMLVAYASHHIQHMQKALEQMNLKLAHVVSDITGVTGMGIIKAILGGERDPVKLAKLRDPRCNSSEATIARALEGHYREEHLFALQQALELVEFYQRQITACDRQIEACLQQFEDRSPKTPLTDRPRRRRRSGVAFDARSYLYRITGVDLTQIDSIEANTALTVIGEIGLDMSRWPTEKHFGSWLGLAPGSKVSGGKRLSGRTKPSANRAAAALRLAAQSLNQSQSALGAYFRRLKARLGAPKALTAAAYKLARILYRMLKYGAGYVDQGETVYEERYRDRLLRNLKRRAAELGFQLTEINSSTGQPALT

SEQ ID NO: 100731 - protein, 362 aa, unidentified
MTKVTCFVGLDVHASQTHAGVLDRETGELRRRRLSGDPLVALSLIEQLGSGALAVYEAGPTGFGLARAAAERGLDVRVCAPGLVPRRPTDRVKTDARDAERLARLLAAGELSFVRVPTVPEEQLRDLVRAREDLRGDLNRARQRLSHFLRRRGLRFVGPGRNWTHAHRAWLRGLEFADRASAVTFADYLAAVDAICQRRDTVDATLAELAPESPWAQTIARLRCLRGIDTLAAVGLCAEIGDFDRFAHPRQLGAFLGLVPSERTSDEKRRQGAITKAGPKHSRRLLVEAAKHCWRRPWISDDLRRRQAGQDPRVCAVAWRAQRRLHRQWHKLAVDRGKPANVATVACARELAGFVWEVALID

SEQ ID NO: 100732 - protein, 417 aa, unidentified
MKKDNNSGKNREWNSKRAKSGSTAQRETKEVLAEVVGRLREKLNPTMGSVGSGKERPRRGLRPNLDRLTVGVDLGDQWSNYCILDLEGETLAEGQLRTRQEDFAEFFQSLSEARVVIEVGTHSAWTQEVIGSCGHEVVVANPRLMEGSKRRKRKNDRIDANKLARLGRVDPQSLHPMEHRGTEVRQDLVLLRARDALVAARTELINTTRGLVKSMGRRLPKCSTRSFASQAEEELPVEIRKALLPLVQIADALSDCIKEYDGRIEELASQKYGHTKLLRQVKGVGPITALAYVLTLEKPERFVKSRDVGPYLGLAPKQEDSGESQPQLGISKAGDRMVRKLLVGSAQYILGPFGPDTDLRRYGLRLCERGGKNAKKRAVVAVARKLAVLLHRLWVTGEVYEPLRNRLVLPSLTAAAA

SEQ ID NO: 100733 - protein, 393 aa, unidentified
MICVGIDVAKDKHDCVILNSEGKILAGVFTIPNNADGFDTLLQKIRSCTSSDDKIKVGLEATGHYSYNILGFLLDKGLPTYVINPLHTNLYRKSLSLRKTKTDRVDARTIAAMLMSDVDLKSYTDTVYHNEELKSLTRYRFDKVRERAKLKQSVSRLVTILFPELEKLVSSLHSASVYALLSEFPGAKQISSTHMTHLKAVLKNASQGRYGQEMAETIRNAARSSVGSVMPAKSLELQHTIRLIRELDAEIEDIETAIQAIVDEMQSPITTIPGMGVRMGAVILAEIGDFSRFDSPDKILAYAGMSPSTYQSGQLSLSGAYSHMEKRGSRYLRYALYNATKHVCHWDPTFAAYLAKKRAEGKHYNVALSHAAKKLVRLIFAMEKSQRPYCAAA

SEQ ID NO: 100734 - protein, 408 aa, unidentified
MKENTTNGPAALVAIDWSDQKHDIALLPAETERVEYLHVAHRPQDLTDWICALRQRFGGKEVAVAIEQKRGALIHALMGYEFLQLYLVNPATLASLRKAFKQSGAKSDLLDRDLLLELLQKHRDRLTQWEPDDVQTRHLALLVQDRREAVNECTRLGEQLLDTLKNYFPAMIDLAGPDLTTQLACKLILRWPDLAALQRAKVQTLRRFFYAHNFRRPKSLDKRLEALQAALPLCEDVAIIGAGRLKAIRLARAILALLPAIKQYDQQIAELFKVHDDAAIFASLPGAGPALAPRLLVAFGSRRDRWRHSLDVATYSGIAPVIEQSGKRSIVHWRWACPKFVRQSLHEFARSSLRFCPWANRFYQTQRARGKNHHGAIRALAFKWIRILFRCWQNRCPYDPTKYAPANL

SEQ ID NO: 100735 - protein, 316 aa, unidentified
MTTNSVFVGIDVSKQWLDVALHPAGDSFRVPNDQEGIAALGDRLQTSPPTLVVVESTGGLETLAVSALTAQKLPVVVVNPRQVREFARATGHLAKTDAIDARVLAQFGEAVRPQPRPLPGPDALVLRETVSRRQQVVKMLTEEKNRRQTASEALKSRLDAHICWLQDELAEIDKQLRALIKRSPAWRERDQLYRSAPGVGPVLSGTLLASLPELGRLDRKQIAALVGVAPLNRDSGLFRGRRTTWGGRSDVRAVLYMSTLVATRHNPMIRTFYRRLVSAGKPAKVALVACMRKLLTTLNAMARTSTPWTEPLQPSS

SEQ ID NO: 100736 - protein, 369 aa, unidentified
MADRITYVGLDVHKESIVVAVASGGLRGEVREYGRIANTATALDRLLRKLGDAGMALRFCYEAGPCGYGIQRHVSARGHECVVVAPSLIPKRAGDRVKTDRRDAASLAKLHRAGELTAVWVPDPQHEAMRDLVRARLDAVHSLRRSRQQLSGFLLRQGCHYGRPAWTKLHRRWLAGLIFDQAIHHIVLEDYIAAVEAAEARRDRLTAQIETMLPDWTLAPVVAALQTMRGMAMVNAATLIAELGDLSRFADPRQLMAYLGLTPSEYSSGSSVRRGGITKAGNGAARRLLIEAAWSYRFPARLSRELLLRQESQPKPIRDIAWKGQVRLCARYRRLARTAKPANVVTTAIARELTGFVWAIARQVTVTPG

SEQ ID NO: 100737 - protein, 347 aa, unidentified
MEQISRIGMDTSKHIFQLHGVNAAEEPVVRKKLRRAQMVAYFEKLEPTAIAIEACGASHHWARLLASLGHEVKLIAPQLAKPYVKRGKNDAADAEALCEAMSRPTMRFVPMKTAEQQAALMLVGVRERLIRNRTQLANAIRGYAAEFGLTAARGMANLVPLLDRIQADETLPTLARELFALQSEEYLKLQAQIGEVDAKLMAWHRADERSRRLAQIPGVGPIGAALLVMKTPAAEVFRSGRDFAAWIGLTPKDHSTAGKVRLGVITRAGDEALRSVLVVGATSVVRQVRSGRGGGAFAAWLAQLLKRKAPKLVAVALANKMARIAWKLMVSDQAYRKTAMTAPAAAA

SEQ ID NO: 100738 - protein, 337 aa, unidentified
MSEVSTVGIDLAKSVFQVHGSDAGGGVVFRKKLRRDQVLAFFSQLPACVVAMEACASAHYWAREIAAFGHDTRLIPPAYVKPFVKRQKNDMADAEAICEAAQRPTMRFVQGKSAEAQASAVVFRTRDLLIRQRTQLINALRGHLMEFGYIVGQGVGHVGKLVDIVGDLASDIPAEARPVLAVITDSLQVLQSQIALLDREIASRAKTDPVAKRLMTIPGVGPVIATALVPLAPAAVTFRRGRDFAAWLGLVPRQHSSGGKERLGRTTKMGERSLRRLLIIGASSATKAAARDPDNASAWLKSPRSSVPSRRADLSNTGMCVSMPLSSTSQARFSADP

SEQ ID NO: 100739 - protein, 318 aa, unidentified
MSHGYDTFVGIDISKDALDVHGLTDGSPSRFDNTAAGRAMLLSLLPQAGACLSVVEATGGYERDLVAEAVTAGHHIAVVNPRQVRDFAKALGLLAKTDQIDAAVIARFAETTRPVPKGYEERQEQLRELIVRRRQLLDHRTAEKNRAEMAHSSLVRKSVLKLIEMLNKDIQRIEKAILQLVESNDDWRGRFERLKGVPGVGEQTAATLMAELPELGRLNRQQVAALVGVAPFNRDSGQFRGRRAIWGGRQSVRNALYMAALSAKKHNPVIRAFAARLLAKGKPPKLVLTACMRKLLIILNAMLHSGDSWSPRVATLTP

SEQ ID NO: 100740 - protein, 350 aa, unidentified
MAHRNLPRPAAVYGIDIGKNIFHVVGLSCDGTPVQKVRFRRDTLLQFFARADPSIVGMEACAGSQWLARKIQAFGHKVRLIPAQFVKPYVKSNKSDIIDAEAIAEATTRPTMRFVGVKETDQVDLQALHRIRDQMIGSRTRLINQMRAFCLEYGVPLRQGAGLFKRDLPHALNDEENDISPAMRRLLGDLYADLSRLEERIRQVTMEIEAIAEREDVTRRLMTIPGIGALGATALLAAVGNGRQFRKARDLAAWLGLVPRQYSTGGKQTMLGISKRGNRYVRKLLVHGARSCFRHLDRTRDRLGSWLDGLEARMHPNKAVVALAAKMARIIWVVLNKPGALYERRAPVFA

SEQ ID NO: 100741 - protein, 367 aa, unidentified
MDGHPWQAAGDRIEPTQSSLWLPRSVIASAPSSDPDGCRNNLVRFHKAGSRKMTQTSMTTAGIDTSKAKLDIAVHNRTERWQVVNALPGWRALLANLTKAGVTRVGIEATGGYERGVVEYLRAAGLTVLVLQPIQVKAFGRVHLRRAKNDTLDAVLIAACAAAIDQPRIAPDPRLAELAENLTFLEQIEEDIRRFKTRLEHIDQPRLRRMVLGDIARLKARRVAQIRDIAKQLRCHHDLAARLDLVLSIPGIGERTALALIIRMPELGRINREEAAALAGLAPFDSGQQKGQRRIAGGRARLRRSLFAAALPAAFRWNKALILLYARLTAAGKHHNAALIACARKLLVYANTVVQRGTPWSERPLRV

SEQ ID NO: 100742 - protein, 347 aa, unidentified
MEIRTLGIDLGKSVFHLVGVNSVGKVVVRKKCSREKLLHFTANLRVERIGMEACAGAHFLGRALRAQGHDVRLMPAQYVKPYVMTNKNDYIDAEAIAEAVWRPKTRFVPIKTDDQLDMQSLHRVREGWVHRRTSLVNQIRGLLLERGITIRKGRRHAEEALSEILEDPDTNLSWPLRTLLAQLQDELSQLQRQIDEADAIILKTAGEHEACRRLMAIPGIGPVVATATIAAVGNGADFEKGRGFAAWLGLVPRQYSTGGKQKLLSISKRGNRYLRHLFVHGARAVLRYREKQSSGLSAWLGKLISRVHHNVAAVALANKLARMAWAVLAKGETYRPPLLIAVDPVAA

SEQ ID NO: 100743 - protein, 376 aa, unidentified
MTQTDVQYPTIHLAIELSRSAWLVAARLPGVEKPSLHRIEGGDTAALLALAAALRARAAARLGTPVRVACCFEAGRDGFWLHRLLTAEGIAAYVLEPTSILVNRRARRAKTDRLDALGMLRVLAAYLGGDRQACSMVRVPTPEEEDAKRPHREREELVRERVRLENRIAALLATQGVRERPSLRSWERDLAALRTGDGRPLPPHLRAELDRLRRRLVLTLGLIREVEAERDAALAAGPRDAAGRKTAALCRLRGVGANFAAVLTREVFYRAFANRRQLAGYVGLAPVPHQSGEADRDRRISRAGNARARTTLIQLAWLWLRYQPDSAPARWFRDRVGALRGRTRRIAIVAMARKLLVALWRYVETGLVPEGVEVAA

SEQ ID NO: 100744 - protein, 387 aa, unidentified
MAQVIIGMDPHKRSATIEVIDDREKVLGQGRFGTDRAGYQTMLKLGRQYKDRIWAVEGCNGIGKHIAQRLVADGEIVVDVPAKLSARARVFDNGQGRKTDPADAHHIAVAALRSKGLRQVVVDDATVALRLLVDRRDGLGRAHTDLLNRIHKLLLELLPGGAKKYLSATQARELLNTVRPRDLVGRTRRRLASELITELVQVDKKTKAADKELRELVEATGSTLQDLHGIGPPGAARLIGDVADISRFASRGHFASWNGTAPLDVSSGDQNRHRLSRAGNRRINRTLHIMAVVQLRNDTEGRAYYRRKLAAGKTPMEAMRALKRRLSNVVYRQMVNDAKNLETGPGGHVGTTLQSSAADLNPMIDTSEKSLPGPAKPQPRTPLLTAS

SEQ ID NO: 100745 - protein, 341 aa, unidentified
MGEYIGLDVSMKDTAISVRRDGKRVWRGKCASDPEAITRTIRKHAREPDRVIFETGPLSVWFYHALRDQGLPVICVDARHAKAALDMAANKTDANDADGLAHLAEVGFYREVRVKGFDSMLTRTLVAARTRLVRIQTELSNQIRGLMKTFGLVVPAGKGSTFETNVRGRLDENQELAAIVRPLLEAWCSIRLRAAELTRRLIDDARQSEACQLLMSIPGVGVVTASAFATAVEDPANFRSSRSVGAWLGLTTRRYQSGQVDYNGHISRRGDHQVRSLLFEAACVILTRSTADSALREWGLKLRERIGFKRAAVAVARKLAVIMHAMLKSGELFDRKLVAPA

SEQ ID NO: 100746 - protein, 315 aa, unidentified
MSTSTVIGIDVSKASLDGFVTTGERRLSAANDEAGIRILLGELAEHRGALVVLEATGGYEFAVAAALAQAGFEVAIVNPRQVRDFARALGQLAKTDRIDARVLALFGERMRPESRPLPDAARAALEALVTRRRQLLDMLTAENNRLRLVRDRIVQRSLKRHIAWLERQLHDVDQDLGSSIKQSPLWRAKENLLLSMPGVGTVLSRSLIAQLPELGQLRGKQICALVGVAPLARDSGTHKGRRSVWGGRAALRSVLYMATLSAVRHNPVVRQFHTRLRAAGKPPKVALVACMRKLLLILNAMVRSNQSWNPRIAEA

SEQ ID NO: 100747 - protein, 377 aa, unidentified
MHSENIAVYVGLDVHKETLAVAIAAPERLGEVRYYGTINNEAQAVRRLFQKLQELYGNILSCYEAGPCGFGLYHQLTAMNIKCQVIAPSRIPKSPTDRIKNDHRDAISLARLLRAGELTPVWIPDLTHEAMRDLIRARAAAKRDSRVARQRILSMLLRTDKHYAGKHWTGKHRTWSANQSFSQPSQQIAFQHYCQSLEQIEDRILQLDQEISRLLPEWSLCNLVCQLQALKGVGQLIAITLVAELGDFSRFSNPKQLMAFLGLVPGEYSSGNSIRPRGITKVGNSELRRLLYEAAWSYRTPAKVGAWLIYYRPDSVTQYSKDIAWKAQQRLCSRYRSLTAKGKKSQVAITAVARELTGFMWDIALAAQSSFSQQKQN

SEQ ID NO: 100748 - protein, 362 aa, unidentified
MRNTTTGEAGDRLTIGLDMGDTYTQACVLDEDGEVIEESRVSTTPKAFRRRFASLPPARIILEAGGHSHWASRLLGELGHEVIVANPRMLRFIYGSDSKNDKADAAYLARVGKLDPALLHPIVHRSEQSQADLTLIRSRNALVRVRAALVTHVRGLVKVFGTKLPSCATEAFAIKAESQVPELLRPALEPVLAIIASLTTQIREFDRKIRALAKESYPDTSLLSQVGSVGRVTSLAYVLTLEDPSRFPRARAVGSYLGLRPRQADSGDLKPRLRITKAGDEMLRRLLVECAQYLLGPFGRDSDLRRWGLKLVERGGKSAKKRAVVAVARKLSVLLLRLWQTGEVYEPLRNARLRGELTPSPS

SEQ ID NO: 100749 - protein, 311 aa, unidentified
MTNNTIGVDISKDHLDAHRMSDGATRRFANDRHGHQALIAWLAEPDVRVVYEPTGPYHRTFERRLAEAGVALVKVNPRQARRFAEATGTFAKTDRLDAAMLARMGALLELEPRPARSAMLNDLKDLHMAREALVKNRTAAKNRAKNLSLSILKRHNTEQLRQIERQMAAIEKEIMTLIKANAGLCERFDILVSIPGVSAITAFALIIDMPELGTLENGQAASLAGLAPIARQSGQWTGRAFIRGGRANLRQALYMPALVAMRFNPDLKAKYEKLVAVGKPPKKAITAIMRKLIVLANALIRDSRKWTPRLA

SEQ ID NO: 100750 - protein, 341 aa, unidentified
MDHYAGIDVSLECSSVCVVDATGKIVREAKVASEPAALIGWFRAAGVSLVRIGLEAGPLSQWLYPAMKEANLAVELLETRHVRNAFKTMPVKSDRKDARGIAELMRVGWFRPVHCKSLGAQETRAILTARTLVDAKLHDIEASLRGLLRGFGLKVGATTPTRFARRIKDLVTGHPSLEIITTSLLLVHEVLLREFKSFEKRVRLMAREDARARLLMTTTGVGAIVSLTYTSAIDDPARFKSSKQVGAHFGITPRKYQSGEKDVTGRISKIGDKSVRTALYQAAHIILTRPVKASALKSWAMRLAKRAGMNKAKVALARKLAVIMHRMLVDATPFNPAAGAA

SEQ ID NO: 100751 - protein, 305 aa, unidentified
MDHYAGIDVSLEYSSICVVDATGQIVREDKIASEPEVLIAWFGSLGYALTRIGLEAGPLSQWLYAAMKKAGLAVELLETRHVRDAFKAMPVKSDRNDARGIAQLMRLGWFRPVHCKSIGAQEIRAELTARKLVESKLRDIANSLRGILRGFGLKVGATTERSFPDRVRELVKGHPVLEAIAEALLSVHEVLLREFNGFQKRVQSAACSNVKARLLMTTPGVGPVISLTYAAAVDDPARFKSSKKAGSAFRADAEEVPVGGNRPQWPNQQNRRRLGSRHPLSGRPCDTDQTGQGLPGIEELGHAPC

SEQ ID NO: 100752 - protein, 362 aa, unidentified
MHSENIAAYIGLDVHKETLAVAIAAPERLGEVRYYGTINNEAQAVRRLFQKLQGLYGNILSCYEAGPCGFGLYHQLTAMNIKCQVIAPSRIPKSPTDRIKNDHRDAISLARLLRAGELTPVWIPDLTHEAMRDLIRARAAAKRDSRVARQRILSMLLRTDKRYAGKHWTGKHRTWLANQSFSQPSQQIAFQHYCQSLEQIEDRILQLDQEISRLLPEWSLCNLVCQLQALKGVGQLIAITLVAELGDFSRFSNPKQLMAFLGLVPGEYSSGNSIRPRGITKVGNSELRRLLYEAAWSYRTPAKVGAWLIYYRPDSVTQYSKDIAWKAQQRLCSRYRTLTAKGKKSQVEPPRESWRLNSLRKR

SEQ ID NO: 100753 - protein, 377 aa, unidentified
MHSENIAAYIGLDVHKETLAVAIAAPERLGEVRYYGTINNEAQAVRRLFQKLQGLYGNILSCYEAGPCGFGLYHQLTAMNIKCQVIAPSRIPKSPTDRIKNDHRDAISLARLLRAGELTPVWIPDLTHEAMRDLIRARAAAKRDSRVARQRILSMLLRTDKRYAGKHWTGKHRTWLANQSFSQPSQQIAFQHYCQSLEQIEDRILQLDQEISRLLPEWSLCNLVCQLQALKGVGQLIAITLVAELGDFSRFSSPKQLMAFLGLVPGEYSSGNSIRPRGITKVGNSELRRLLYEAAWSYRTPAKVGAWLIYYRPDSVTQYSKDIAWKAQQRLCSRYRTLTAKGKKSQVAITAVARELTGFMWDIALAAQSSFSQQKQN

SEQ ID NO: 100754 - protein, 354 aa, unidentified
MSEKLNASIAVIGIDIGKNSFHVAGHDSRGAIVLRQKWSRGQVESRLANLPPCLIGMEACVGAHHLSRKLQTLGHDARLMPAKYVRPYAKGQKNDFRDAETIAEAVQRPTMKFVATKTADQLDLQALHRVRERLVSQRTGIINQIRAFLLERGVAVRQGLRFLRAELPSVLATRTDVLSPRMLRVIEDLAGDWRRLDERIEGLTGEIEALARHDSACERLMTVPGIGPIISSAMVAAIGTGDVFSKGRDFGAWLGLVPKQISTGDRTILGKISRRGNRYLRVLFVQAAWVVLIRPKSWERHGLKSWIEAAKKRLHHNALAIALANKLARIAWAVLNKGRDFECVRTDATASRPA

SEQ ID NO: 100755 - protein, 416 aa, unidentified
MLFIGDDWAEEHHDVEIEDEDGRRLARARLPEGLDGITRLHALVAEHAPASWAQLEPEQAAAQVVVGIETDRGPWVSALRAAGYQVFAINPLSAAQYRQRHSTSGAKSDAGDAHVLAEIVRLDRDHHRTVAGDSDLADSLKLVARAHQTAVWERTRHVLRLRSTLLEYFPAAVHAFEDLAASDALSLLARAPTPGRAAKLTQHQLVAALRAAHRHHVETKAQELLKLLRASALRQPVTTEAAYGAVVAGQVGIITALNTQIAGLEQVVGEHFHRHPAADIYLSQPGLGMILAARVLGEFGDDTGRFTHARSRKNYSGQSPITRASGKKKVVLARYATNRRLGAALHQQAFCALNASPGARAYYDALRARKIAHHAALRQLANRLVGILHGCLKTSTLYDENTAWQHHHTDTQPLAA

SEQ ID NO: 100756 - protein, 339 aa, unidentified
MTIQSKKIAQETKSLFAGIDVGAEELILLVRKNGTSYKPQKFANTPADRARLVKKLVNMPGIIVCLEATGVYHFDLSIALHDAGVALMVVNPKSSHNFAKVLMKNSKTDAVDAETLAQYAGRMDFVAWTRPSDEKIALRSFARRIDALTRQKAAAKNQLHALSASKENPKAVLRDVGLAISQLEKRIACLSKEALALIGKHPDLERVFLLLTGIKGIAQTSAIALMGELLLLPPGLSHREWVKFAGLDPRAFDSGKSVHKKTRISKAGNRHIRSALYMPAMSAKQHDPYVKAYFQHLVDNGKKPLQALCAVMRKLLHAIHGMLKHDKPFDNTRFYAIPA

SEQ ID NO: 100757 - protein, 347 aa, unidentified
MKSATITKETVITRMGIDISKNVFQFHGVDGHEKIQLRKAVKRDNVLEFMANKKPCFIGMEACGGSHYWGREFEKLGHTVRLMPGQHVSPYRKNNKNDSRDAEAICEAVQRPTMLFVPIKTQEQQDMQSLHRARQEMVKIRTMHANQLRGLLLEYGIAIPEGISQIRKTIPCLLEDAENSLTSTMRFLIHTVYEFLCTTDKNIAEITDKIESFTKSNDLCKRILQIDGFGPLSSTAFVSAVGSGKQFKCGRDASAWLGVVPRQYSTGGKTVLLGISKKGNRYLRSLLVNGSRAVVSRAKGKTDKQSKWIQELVNKKGVNKAVVAYVNKMVRIAWSMIQSGEEYRKAA

SEQ ID NO: 100758 - protein, 314 aa, unidentified
MSETTVGIDVSKQTLDVALGATGEQWTLPYTDPEVKQLVMRLREVEPRLIVLEATGGLEVPLVAALAKCGLPVVVVNPRQVRDFAKSVGRLAKTDRLDAGVLALFGERVRPEIRPLKDEETQALEALLQRRRQLVEMLTMERQRLLQANARVRKDVKAHIAWLVRRVKDVDGELGRAIQSSPVWRVKEDVLKSVPGVGQVLTLTLLAQLPELGRLNRREVAALVGVAPFNCDSGQLRGRRRVWGGRASVRTVLYMAVVAAIRCNPVIRMFYERLRQAGKPAKVALTACMRKLLTILNAMLRDGVRWDPSVAKTT

SEQ ID NO: 100759 - protein, 324 aa, unidentified
MIDAILGIDVSKNTLDVSISRCTKVRTKSFANSSDGWHHLLDWLTTQKIQRVHACLESTGRYSLGIACALYEAGHVVSIINPAQIRDFVRTKLGRNKTDGIDASHIREYCELFKPSPWAPPSEAHRRLGELQAIRAGIIAGLTEWKNRKNSGIVDAGAQALADATISHFTSQLGAVDKAIALTIDNDSDLRSKCDLLLSISGVGDTLAGVVLAELPGPDVLRSSGEVIAYAGLNPRQHQSGTSVDRATRISKIGNAVLRAALYMPALSAMRYNPAIVALVTRLKSRGRLKPKQIVVAAMRKLLVLCFGVLKTGKPFDPAIAMGC

SEQ ID NO: 100760 - protein, 371 aa, unidentified
MRFYQGQHAFYAGIDLHARTMHVCILDQAGNTVFDKGVACRPEAFLRAIQPYRDHLVVGAECMFAWYWVADLCVEQHIAFVLGHALYMKAIHGGKAKNDRIDAGKIARLLRGGNFPLAYVYPKGMRETRDLLRRRTYLVRKRAELLTHLQILNAQYNLAPFPKKLSFAANRTEMDIAARFPDPSVQQSAAVDLAVAERLDELIGELELYLVRTAKVDDVQTFYRLRSIPGVGKVLALVLLYELHDIGRFARAGEFLSYARLVRCAHTSANKKLGCGGKKIGNAHLRWAFAEAACLFLRGSERAKQWKQKQAAQRGEGKALAILAAKLGRAVYHMLRKGEAFDEARFWGGRVAAAATGSSSLSRAEASHAGD

SEQ ID NO: 100761 - protein, 344 aa, unidentified
MLKSNIFGIDLAKTVLQVCQISQHGELVMNKAVNRQKLKELLANAKQSIVAIEGCGSSNYWGRYAEQFGHEVRIISPKKVKGFLQGQKTDANDALAIANAALQIGLKYSKPKNEEQQSLQSLETSRVFLSRNITSLGNHIRAMLYEYGITSSRGALGLKKAVQDTIDEPSLIPACLISTLRQLWEQYLHLKIEFTKLEKVKNTLVRQLKPCKSLMDLEGVAEICSGMLYSTIGDGKQFTSGRQAAAFVGVTPKQHSSGGKTNMTGIIKNGGVKELRCALYQGALSYISRLPEEPTTLKQAWLIQLRERLGIKRTCIALANKTVRTAWAILRYETKYQQQLLVTE

SEQ ID NO: 100762 - protein, 350 aa, unidentified
MLYTGIDYHRSFSYLTTMNEKGEIINQKKLPSNGEIIDFLKEFGEEMEVVVEATPSWYWLYDHLEDEGFEVKLSHPLKTKAIAYAKVKTDKVDSATLAHLLRSNLLPLSYVPEKAVRLNRELLRYRASLVKIQTRVKNKIHTILAKNNVSHSYTDLFGKQGMAFLHSLTLVENYKIALEGYISVLDAVRQEIRVASKKVQQLAEEDADALLLMTIPGMGYYSALLTKSEIGDVRRFRSAKQLCSYAGLVPSTYASGNTCFHGHITKQGSRWLRWILIEAAIHAVKRPGVLRRFYFKIERKKGGQIAKVAAARKLLEWIYHILKDGRTYQEMERLADLLGRGEPGNPSGSA

SEQ ID NO: 100763 - protein, 372 aa, unidentified
MNHTTVYVGMDVHKESFSLCCYTIEDDSAKYVQKIQANYKLVISYISKMRSIYGDTADFICGYEAGCLGFSLYHQLVDHGQKCIILAPTTMMAEKGRKRVKTDKRDAVVIARCLACHTYHPVHIPTDQDEQVKEYIRMRDDHKLQLKKIKQQILAFCLRHGYVYDDGRHWTIKHLQWLRSLTPEAIYAEVLSEYLLTYTNLSDKLERYDKRIGELASKDEYKASVNKLSCFLGIKTATALSTIVEVGDFKRFAKPENFASYLGLTPGEDSSGGDRNRLSITKAGNTHVRRLLVEAAQSFGKGQIGYKSKALKERQSANPPETIAYADKANERLRRKYYRLTLHHGKKANVAKTAVARELACFIWGMMNEQYA

SEQ ID NO: 100764 - protein, 325 aa, unidentified
MSIPILGIDVSKKDLSLALIFKDSSKKLKISNDPKGFKDLTAWLEKQNILHLKACMEATGSYGEEIADYLYEQGHDVYVVNPACIKAFAKSKLNRHKTDEVDSLLIAEYASKNTLRLYSPRDPTYKELRALYRCSQNLKSQCTQVSNFLENKNRLPKSVLLVYQQLQDHLNDQIESLNITIETLLATPESLKQDYENLQTIPGIGQTTAIAILAETPTFSNLENARQLAAYAGLTPSQRTSGTSLKGKSRLSKIGSAPLRKSLYFPAIVGKKHNPLLKEFAKNLERKGKHTMVIIGALMRKLLHIIFGVLKHKTPFNPHISDFYA

SEQ ID NO: 100765 - protein, 437 aa, unidentified
MDDDVEEIDAGEDEEVLERVGAIDVAKASGKVCVRLPGKQRRITRVFDVAATTNAIMALADELAEMGIERIVVESTSDYWRPFFYLLEARGLVVWLVNARDVKNVPGRPKTDKLDAIWLAKLNERGMLRPSFVPPREIRELRDYTRLRTELIEERSRHKQRVEKLLEDALIKLSTITTDLFGKSGRAMLEALIAGERDPEVLAELALGKLRPKRAALREALTGRFDAHHAELAGMLLDQIDALGEKIDRLTTRVDELVEQIPEAHSHDASGESRGPSALERLDEIPGVGVRAAQIILAEVGLDMTQFPTAAHLVSWAKLSPRTIQSGPRTRSGRTGKGNPYLKGALGEAAAAAARTDTFLGERYRRLVRRRGHQRALVAVARSILVIVWHLLEDQDVRFVDLGSDFYERRLNKERRARDLVRQLQALGHQVTLTPAA

SEQ ID NO: 100766 - protein, 402 aa, unidentified
MNAVGIDVSKGKSMVAVMRPFGEIVFSPFEVSHTDKDLTDLVRKLKSLPGETRVVMEHTGHYHAPIAAALHEAGIYVSAVNAMLVHDYGNNSLRKAKTDKKDAVKLANYALDRWLSLPQYHPAGDTRLMLKTCCRQYEQFSKISVMQKNSFISLLDNVFPDVNRLFTSPPRSDGSEKWVDFVAQYWHCECVSGMSVKAFTRSYEKWCYKHGYHFSEDKALDIYASACGHICLMPKCEATRQLVQQAVSQIRASSAALATLKQQMQELASTLPEYPIVMQMYGVGKSLGPQLMAEIGDVRRFHSKSALVAFAGIDAPPYQSGTINVRSRSISKRGSPRLRRTLFLVMAAILKSSPPDEPIYQYMNKKRSEGKPYLVYMMASANKFLRRYYATVKAYLDGLDFA

SEQ ID NO: 100767 - protein, 410 aa, unidentified
MKPLYVGIDVSSKTNVAYLMNPDGSKHSSFTVQNNNGGAKILSDKIVSALTAAQLNDVIIGLEATSIYGDSLVYALREDGSIGQFHRKIHVLNPKQIRKFKEAYPDLPKNDFVDAFVIADHLRFGRIASEVYVDDYRYKALKTLTRARFYAVQNLTREKQHFANYLFMKCSGLAQEKILPHNTSATTIALMEQFETADDLAYADLDELTSFIAKTGRGRFSDPTATAKAVQAAARGSYRLPKTITNSVNQAISVSVAAMRALDSQIKTLDKGIEQQFEIIPNTLTSVPGIGKVYSAGIIAEIGDIRRFQSHAAVAKFAGLVWSQHQSGNFEAESSHLIKSGNRFLRYYLLEAANSVSRCDSEFRRYYDLKFREVNKFQHKRALALTARKLVRLVFRLLKDNRLYIPPEEH

SEQ ID NO: 100768 - protein, 416 aa, unidentified
MTDQREWYAGVDWASESHHVFLTDADGRRIAERSFQHGGEGLAEMAAWLMATSGAAAAFQIQVAIEVPHGPVVETVIERAFKVHAINPKQMDRFRDRFTLAGAKDDSRDAEVMASALRTDPRCFRLLASADPGVVELREWSRIAEDLGAERNRLTNRLREQLWRYFPAMLELENDLGAEWLLDLWEAVPTPEKSARIRQTTIAKLLKRHRIRRFDAAHVLDVLRRPPVQVAAGTTEAASAHIATLIARIRLVNRQIKDAHQRLDTLTTRLIPTEEAGPGQKKQHDVEILASLPGVGRIVLATLLAEAFDVLQRRDYAALRSLTGVAPVTKRSGKSCIVIRRQACHDRLANAMYHWARVAVQHDVTSRAKYTALRSRGHSHGRALRSVADRLLNVACAMLKTGTTFNPSLAAQKTSC

SEQ ID NO: 100769 - protein, 339 aa, unidentified
MKLYVAIDLHANNSVLVILDEADRVVYERRHPNELSTILPELAPYRENIQAIAVESTYNWYWLVDGLMEAGYEVKLVNTAAVKVYEGLKYTGDEHDARHLAHLLRLGILPTGYIHPKKDRAVRDLLRKRAQLVRCRTTQILSIQSLVSRNSGKGISTDAVRKLNDETIGQVCGGDDIRALAIKSNLAVLRCLDEQVSGLESIVLKQAKLKPEFKKLLTVDGIWHILGMTIMYEAGDMERFAKVGQFASYARCVGSSRWSNGKKKGEGNRKNGNKYLAWAFIEAAHYAARYNERIRSFYQRKQAKTNKIVAAKAVAHKLARACYHVLKEQKPFDEERAFA

SEQ ID NO: 100770 - protein, 352 aa, unidentified
MSQITEVGVDLASRVIQVHAIDASGHVVLARAMKPERFIEWCRTLPTGTAVTLEACGGAHHMARRLALMGLSVKLVAPPFVTPYRKQGASGKNDANDAAAICEAGSRPSMRFVSVKTAAAQGWQAIHRLREGYKEERTALVNRIRGLLFEFGVLAPTGIEALRRDLASLIEDGSNELPGVLRLGLQRAQLHWIDLDVQLAWCDEQVARHVAIEPQAQAATQLCGVGPLTASALVAQAGDLKQFRSAGQFGAWLGLVPSQHSSGGKTRLGRITKRGDDYLRTLLIQAAKSAVMTAHRRADRLSRWVAQLKERVGWQKAVVALANKHARILWAVLTKGRTFDPNHVSVMPTVAP

SEQ ID NO: 100771 - protein, 343 aa, unidentified
MQSISTIGLDIAKSVFQVHGVDAAGQVVIRRQLRRQQVVAFFQKLPPCLIGIEACASSHYWARELQAVGHTVRLIPPAYVKPYVKRQKNDAADAEAICEAVTRPNMRFVPVKTVEQQGCLVLHRTRHLLIRQQTATINSIRAHLGEFGIVAPVGRRGVEHLLEVIADTNDTQVPEVARACVATLGVQLQQLKAQILELDRRILVWLRSSEVSRRLNHIPGVGPLLATALVASIADPKTFRSGRDFSAWIGLVPKQNSSGGREKLGNISKRGDRYLRSLFTAGALAVIRYAKLHGINHRPWLVALLARRPTKVAAIALANKLARIAWALMTKGSHYRQPAALRV

SEQ ID NO: 100772 - protein, 341 aa, unidentified
MQIKQIGIDIGKNSFHVIGLGMEGDIVLRRQFTRSGLIAFFKQKTERLEIAFEACSGAHWLAHQLVAMDHDVRLLTPESVRPFAKAQKNDWNDALAIAEAAQRPGRHAVGVKSQEQLDIQALHRVRQRLVTARTAIINQVRGLLRERGLVFGSGRMRFDRFLRELLTGQEIQLNSVCRALFATLAAEYEAVDARIEEIDAELATFAKSSSACRALLSVPGVGVIVATALFSAVANISDFRSGRDLAAFLGLVPRQRSTGGKTTLLGISKRGNTYVRTLMIHGMRSAFYNRKKRENGLSTFMERLVERGMHANKIVVASANKAARIIWAILTQNISFQPNAA

SEQ ID NO: 100773 - protein, 385 aa, unidentified
MIYVGIDIAKLNHFASAISSDGEELIKPFKFTNDNDGFQLLISKLDSLDKDSLIIGLESTTHYDNNLVRYLVAKNYKVCVLNPIKTSTMRKNNIRKTKTDKVDTYIICKTLMMQESLRFVTFYDLDLMDLRALGRFRQKTINQRTLLKIQLTSYVDEIFPELQYFFKSGLHQKSVYALLKEAPTPEAIASMHMTHLLKVNSHGRFDKKMAQQLRVLAQKSIGASDSSLSIQVTHTIQQIELLDSQLERVEAEMTEIMKFNDSVIMTIPGIGYINGGMILGEIGDIHRFSSPNKLLAYAGLDPSVYQSRNFQAKKTRMSKRGSKVLRYALVNAAHNVVKSNATFKTYYDAKMAEGRTHYNALGHCAGKLVRIIWKMMTDNLEFNLE

SEQ ID NO: 100774 - protein, 365 aa, unidentified
MYIIGIDIGKNHHEASIVSPEGKQIGHSLPFATTHKGADSLMSFIFNNIGNSSCIFGMEATGHYWYPIYSFLKARGYTIYVINPIQSDSLRKMYIRQTKNDSIDSFLIAEVIRFGQFTTTSMADENILAMRQLCRYRDSVISSRTEIKLRISTIMEQIFPEYEKQFSSLWLSTSMGILEKYLTPENIENAPIDELFEIIKDKSHNKLTMKKAFSIREAAADTFGIKIAQDAFSFQLKQLIDRMNFLDKQIAAATILAEIGDINRFKSSSALVAFAGIDPTVRQSGEFSSTHNHMSKRGSPYLRHAIFLAATTCSFHNSPLNAYYKKKREQGKHHLTATGAVARKLTTVIYAVLRDGKPYEPKSFC

SEQ ID NO: 100775 - protein, 329 aa, unidentified
MKVQHIIGADLSKRSIDLVYHLSKAYIKIDNSINGFNDLMQWLQKLNINTSETMIVMEHTGLYSYCFESFLHQRQIAFCKVNALEIKRSIGLVRGKTDKLDAARIAEYGHEKRDRLTVDQPISNGLKRLQVLHSTYQRLVRHRAALINALKEYKHIGIAEKDLVIQTQRQLIKNFDKHIQKLMSEIEMVINQQSALKQNFLLLQSIKGVGKILALTVIIKTHNFTRFINARKFACFCGTAPFDHSSGTSIRMKPRVSHLADKQMKTLLDLSAKSAIQYDKELKEYYLKRTQNGKSKMSTINVVRNKILYRMFAVVKRQTPFTESYSQAA

SEQ ID NO: 100776 - protein, 387 aa, unidentified
MQKPHDDSKACLTAFIQDNTIVVVLELSLSSWLVAGMIPGLSREPLKKIAPDPEVLLRLLCRWRDEAIKAGKEITRISVGYETGRDSFWLARWLRARGIDAHVIHATSVAISREHRRAKTDRIDTAMLRRGFLGWLRGEPGHCSMAIVPTLAEEDAKRPHRERESLVQERTSTINRMKSILIQFGVRDFNPVLRKAAQKLHAVQTPEGVPLPPNAASALRRHIERLRLINEQIKAIERSRVQHLKRDPTDKYNAMVFLLVRIIGLGVETAEQLVREILSRNLRNRKAVARYAGLTGSPDESGARRREKGLSRSGNGRVRSILIQLSWRLLQFQPDSELVLWFNKRTAGAKGSRKPMIVALARKLIITLWRYVNTGMVPNGFKLRSAG

SEQ ID NO: 100777 - protein, 333 aa, unidentified
MDLMIDRCAGLDVGKNEVVACARTPGASGRGRTSELRTFLTFTSGLEDLADWLSAKGIVEVVMEATGQYWKPIWYLLEDRGFDLKLVNAKHVKMVPGRKTDLADAAWLAQLLEHGLLASSFVPPAPIRELRDLTRYRKRLIQDHTAEMQRVQKMLEDAGIKLDSVASEVLGVSGRLMLRALIDGERDPEVLADLAKQRLRKKIPQLREALRGRFHEHHATMLRVILDHLGYLEGAIATLDAEVDRVMLPFSQARDRLDTITGVGKRAAECIIAEIGVDMTRFPTAAHLASWAGMCPGNNITGGKRHSGKTNNGNRWLGEILNQCATAASQLRA

SEQ ID NO: 100778 - protein, 343 aa, unidentified
MQAVTTIGLDIAKSVFQVHGVDAEGKVIIRRQLKRRYVLAFFEKLPPCLVGIEACATSHHWSRELKALGHTVRLMPPAYVKPYVKRQKNDAADAEAICEAVTRANMRFVETKTPEQQSCLMLHRTRQLFIRQQTSVINAIRAHMAELGIIAPVGRKGVEQLLAVSTDTSDKRVPEVARACIAALGAQLQMLKAQILEFDRRILAWHRSNETSRRLDAIPGIGPALATALVASVADAKAFRSGRNFSAWIGLVPKQHSSGGKDKLGGISKQGDRYLRSLFTAGALAVIRYAKIHGTKHRPWLTALLARRPTKVAAIALANKLARMAWAMMARGERYKEPVALAT

SEQ ID NO: 100779 - protein, 344 aa, unidentified
MRISVLGVGLGKNICSVVRLDPSGAVVLRRRAKRETVIALAAKLSPCIVGMEACCGAHHLGRVFAAQGHDVRLMSPEYVRPYVKAQKNDDRDAEGVAEAATRPTMRFVELKSQEQLDMQTLHRSRDRLVGERTALINQLRAILLERGIVAPQGKRKLEQFLVGLMDEQGGAGLSPRMIMLVTDARIQWSELDRRITAFDAEFVRWTKENEDARRLATIPGVGATIASALIAAVGKAETFERGRDLAAWLGLVPRQFTTGGKTKLLGISKRGNKYLRKLLIHGARAALPYVAERDTPLGRWAKALLSRAHPNVVVVAFANKLARIAWAVLRRGEPFAAKGAPLAA

SEQ ID NO: 100780 - protein, 347 aa, unidentified
MTFVGCDLHTRKQQMAVLDTTTGEIRELQLPHDGDAVEKFYAALPRPVTVGIESTGYAVWFHTLMQRLGHTLLVGDAAKIRAMVVRKTKTDRRDARHILDLLAHDRFPTIWVPDPATRDLRALLTHRMRLVRIRTMVKNGLHAIALNHRLARGSNLLRQAGLAQLQALTLPPHTAQRRDQSLELLAWLNTQIHQLDNAVTTAALAHPDAPRLITHPGVGALTALATVVVLGPVARFSDSKHAVSYVGLAPALNASADKYRLGHITKQGSALLRFALGQAAPHAARADTDLKRTYFTLLHRRGRSKAKVAVARKLLVRLFIMLRDQIDYDEFRRRGRDRLPVPPVSET

SEQ ID NO: 100781 - protein, 324 aa, unidentified
MIDGVLGIDVSKNTLDASMSSCNKVRARSFANSPDGWRHLLDWLITQRVRRVHACLESTGRYSLGIAGALNEAGHVVSIVNPAQIRDFARTKLGRNKTDGVDASHIREYCELFKPKPWAPPSEAHRRLGELQTIRAGIIAGLTEWKNRKNSGIVDTEAQALADATILHFTSQLGAVDKAIALTIDNDSDLRSKRDLLLSINGVGDTLAGVVLAELPGPDVLRSSGEVVAYAGLNPRQHQSGTSVDRATRISKIGNAVLRAALYMPALSAMRYNPVIVALVTRLKSRGRLKPKQIVVAAMRKLLVLCFGVLKTGKPFDPAIAMGC

SEQ ID NO: 100782 - protein, 367 aa, unidentified
MRDSITVVGLDVHKNSIEIVTADTDGAMEVRHFGRIGGTMDALDRAVRRLVSQGSTLRLVYEAGPCGYEIYRHLTGKGFSCKVVAPSKTPQKRGDRIKNDRRDAETLARMERAGELTAIYVPREEDEAMRDLTRAREDAVKALRTARHQLNAFLLRYGKRYPGKASWTPSHLRWLSDVTLPHPSQQIVLQESIMAVTGCTERVARLTDQILKLLPAWRLFPVVQALQALRGVAPIVAATTVAEIGDLSRFENPRQLMAYLGLVPSEDSSGESTHRGSITKTGNGHVRRVLIEAAHAYGFPARVSRHLLKRHEGLPQPVLAIAWKAQVRLCGRFRRLMARGKLKTKVVTAIARELCGFMWAIAREVKV

SEQ ID NO: 100783 - protein, 341 aa, unidentified
MHSIGFDISKSTISIHVPLNALDLEIENTSKAIKSFYSKLKKLYQKELDSIVFVYEPTGSYSALLTKFCAQHGIKAFVINPKQSANFARALGHRSKSDRIDAQMLSKAIAVAREDEIRVPIVDNTVETIKELMSYYRFTVKQRVAMTNHHEALRHKEGNAYTLKDLTKRIKESKEKEAEILAKIKALIESDERFATAFFNIKSIPGIGDIAGIVLLHLFIKYPQANQRQIVSLTGLDPIVKESGTSVRSRAKISKAGSRIYRGNLFMATMVAIKFNDEMKDLYNRLKENGKHSTAAQIAVMRKLIIIAHSLYKNNRSYDPKIYRKACGNIQRKSQIEESVA

SEQ ID NO: 100784 - protein, 403 aa, unidentified
MNAVGIDVSKGKSMIAIARPLGEIVAKPFEVIHTAANINSLITYLHTLEGDTRIVMEHTGRYYEPMAKQLADAGFFVSAVNPKLIKNYGTNSLRSVKTDKADALKIARYTLDNWQDLCQYTSMDTLRNQLKTMNRQFAFFTKHKTSLKNNLIALLDMTYPGVNNLFDSPTRGDGSQKWVDFAASFWHADCVRSIGLKTFTERYCKWCKRHGYNFQQHKPKEIFEASKTLIPVYPKDEMSKLLIKQSIEQLNSVSATVELLRTEMNRIASKLPEYPVVMAMRGVGTTICPQLMAEIGDVTRFNRREKLTAFAGVDLGANQSGAYEAQSVATTKKGSPYLRRTLFLIMECLIQTKPIGDPVYAFMDKKRAEGKPYYVYMTAGANKFLRIYYGKVKEDLASLPASE

SEQ ID NO: 100785 - protein, 373 aa, unidentified
MKKRSISQKMQKRTVKTKRVQESVTIGMDLGDRTSRYCILGSEGEILREGQVQTSKAGMMETFGSLGRARIAIEVGTHSPWVSRLLRTLGHEIIVANPRQVKLITESSRKDDRLDAQTLARRARIDPQLLRPIQHRCEAAQTALTVIRVRAALIAVRTSLVNTARGLAKAMGERLPKCDADQMGVLRAESLPPKLRQLLEPLLKEVESLTEKIKDSDREIEQIARKDYPETALLQQVGGVGPLIALTFVLTIDNKNRFQKSRDVGCYIGLRPRRSDSGQRQPQLRITKEGDPYLRTMLVQGAHYILSRRGPDTDLKRWGLRLAERGGKRAKKKAVVAVARKLSILLHRLWVTGEVYEPLRNQNLRDLCKKSAA

SEQ ID NO: 100786 - protein, 358 aa, unidentified
MNRNTGMNAGQIIGTMNGLQVVGMDIAKHVFQVHTVDMGTGEVSNVQIRRAAVTEHFANKPSCLIAIEACGGAHHWARELKKLGHTVRLIHAKTVRPFVAGNKTDVTDARAIWLAVQQPGVKFVGVKTAEQQATLTLHRQRELLTKMRIMQTNALRGLLYEFGATFAKGSKALFKDVEQALEDLADKLPQMVRDSLREQVQRIKGLSQDMQAIEKRLALQLKVDPQMQRIAQIPGVGILTATAAIATMGEASAFKSGREFCAWLGLVPTQTGSGGKVRLGNISKRGDTYMRTLLIHGARSVLRHAKDPGPWLAQIKERRPANVVIVAQAAKMARTIWAVTAKETDYQRGFKSVRPLAA

SEQ ID NO: 100787 - protein, 406 aa, unidentified
MRVLYEHCCGLDVHKQSITACALTPEGKEIRTFGTLTDDLEELVDWLKEKQVTHVAMESTGVYWKPVYHLLEAEPIEVLVVNAQHIKAVPGRKTDVKDAEWIADLLRHGWLKGSYIPHRAQRELRELVRYRRSLIEERARELNRIQKVLEGANIKLSSVVSDINGMSARLIIRSLIEGKDDPAALAQLAKGRLKQKTEELRRALKGRIGPHQRMMLAEQWRHVEYLDEAIARLDREIEERTRPFHEALELIDTIPGVGRQSAEQMVAEIGTDMSRFPTAAHLASWAGMAPGNHESAGKRLSGRTRKGNKKLRSCLVECARAAARTKNTYLSAKYHRIAKRRGANRASVAVGRTILELIYYILTRKEPYRELGADYWDRQREASLVRQTVKRLEGLGYEVKLEKTSA

SEQ ID NO: 100788 - protein, 336 aa, unidentified
MRPVVGVDPHEHVLSAVALDGRGGVLGRWSGGAARPGIGALQSWAARQAPGAVWAIGGSNALGRRLALAPVAAGADVRDVCPTRTADRRRKRPGRGKTDAVDAEAVARELLADPGLPHAFKAAAPGLPDPAREALAVLVRARHRVVDHHRRLLTEADAVLGELPAAVAERLPGGAKTPPRLRAAARRRRTGERATDLRLRLLRAHARRERVLAAERDALGREIEQLLGELGTSLPALCGLGPLGAADLLAEVGDPRRFRSADAFASDTGTAPIPASSAEDGGQARHDRLSRYGNRRLNSVLHVMAVTRLRTHPETQAFVARARAAGKSTPGWSGPR

SEQ ID NO: 100789 - protein, 380 aa, unidentified
MGTHRIIALDLGKFKTVACIMNAADRSHVFESIEMSPQAVHDLLARHATTDPHETRVVFETCDCAGWVHDVCVSLGLPAVVVSANAEAWRWQRVKRKTDRDDALKLARLCLLDQLTAVHVPDPKRRQVRRLILHRRSIVSRRTQSRNAIRSIFSQQGIALARGNKQWTQAGIAQLKEYARPLSECADELDLWRGRLHVELALIEATDAQLKVVDRRLDELQRHDARVQLLRTVKGVGPRVAEAVVSHLGDPKRFKTANRVAGYAGLVPKQIESGQMSRRGHITRRGPALLRSMLVEAAWVVWRHNAWAQTFVNKVSRGSRARRHIAIVALARKLLVSLWAMLRDGTRWRDPCDRAAYAFSPPEGTGPVNVALSSVAGILA

SEQ ID NO: 100790 - protein, 370 aa, unidentified
MKMSIGVDLHKTQFTVCMISEDHKIIESGIYPTGEDGYKKFLEVVDSFAERGYEVTAAVESTGNTRFFMNKLLRGGIEVKVVNTLKFKVVNESVKKTDRHDAMILAEFLEKDMLPESVLCSQDSEDIRRVIKTRAIMVKSLVSMKNQVHGLLLGYGIETKRGQLQSKKERQRILRGLEDHRSYGRAAKAVEPLLDTINQVSLEVKKLEKVLEDLVCEDEDVKLLQTIPGVGLITASIIRAYTDDINRYESARKYASHAGLVPWVQNSNMTVHHGHITKRGPVDLRTAFVQIVMGMVRSRKKTASYRIIEKYNEMKKYKGSGKSIIAAVRKMSNVVYVILKTREPFDPLRMAFRKEYEEMQAAAWNVARVG

SEQ ID NO: 100791 - protein, 352 aa, unidentified
MNETIYAAIDLHSNSSTIGYMSPDGTYHGSRTFATTEKNLISHIKRMDASNRYLVIEQCNQAHWAACLLHNYVDELIICDPGANKKVYSGVQKNDASDTRDLCELYRLNGLKPIYYASELGNRKLLFHQVKEYERLKKMITSNKDQFQASLRNWGYPIKMNKTLYVHPDRVLSQIDREDLRQQFTRKLSLIVRLQQAKDAEKTQFMELGASFWEIDEFKKMPGCGDVSSHTISAYIQTPHRFRKRSEVVHFSKLAITQFTSDGKPVKAETLARSGHSSLKSATHQIWKSALRRHDDNEVKRFYRQSIERSENETNARLNTQRKIIKSLWKNNQPYRPEMFLAPTAGDGVCTL

SEQ ID NO: 100792 - protein, 334 aa, unidentified
MENIALIGIDLGKNSFHIHCQDRRGKAVYRKKFTRPKLIEFLATCPATTIAMEACGGSHFMARKLEELGHSPKLISPQFVRPFVKSNKNDFVDAEAICEAASRPSMRFVQPRTESQQAMRALHRVRESLVQDKVKTTNQMHAFLLEFGISVPRGAAVISRLSTLLEDNSLPLYLSQLLLKLQQHYHYLVEQIKDLESQLKRKLDEDEVGQRLLSIPCVGTLTASTISTEIGDGKQYASSRDFAAATGLVPRQYSTGGKTTLLGISKRGNKKIRTLLVQCARVFIQKLEHQSGKLADWVRDLLCRKSNFVVTCALANKLARIAWALTARQQTYVA

SEQ ID NO: 100793 - protein, 326 aa, unidentified
MSKVIGIDISKQTFDVSFREENKLLHEVYANNLKGFKEFIESDYCKSDPIVVMEASGPYYVCFASYLYDHAIKVCVVNPLMVKRFGQMKFYRAKTDKKDASVIMEYGETVIKSLSLWKPETKGVQSLKQMRTTVELLHKQERQSKNQLSAFKSSGFLNHEVERGLKSIIRSLEKTISKIEDQMLVVCNSCYKESLELITSVPCVGEKTAMMLIAITDDFSKFEHYKQLIAYVGFAPRVYQSGTSVRGKGHICKMGKSQTRKLLYMCSWTAKKYNKTCKEMYERLKAKGKPERVIKIAIANKLLKQVFAVATSKQKYIENYQPNICF

SEQ ID NO: 100794 - protein, 439 aa, unidentified
MRKIRKNAAGIDIGAKKVFVYVEGQKVKSFYTFTEDFDILCKYLLKHNIKTVAMEATGVYWSILYEMLEETGIDTWLVDGRQTKQVPGRKTDVKDCQWIQELHSLGLLNRCFVAKDDVKELRSYNRLREDHIRTASMHVNHMQKALTEMNIRLKEVISQIHGVSGIKIIEAILNGERNKTALLNMCDARIIKNKKKEVLKSLNGRYTTTGIFALRQAFDGYNFYQGQIKQCDKEIETIIHRMGKGGLNNNLPTKRKAIRHNKPEVDNLGANLINIFEGRDATIISGITDYSWMQLLSEVGTDLSRWPTEKHFSSWLGVAPGQHWSGKMNRNKKKLGHPKAGQIFRQIAQGLLASKNIALGSFGRRIRSRKGPAKAIKAMARKLAVMYWRVMVKGADYAELGIKKYEEQLLAQKQKSIKRMARELNLQLVNIQPSENSCH

SEQ ID NO: 100795 - protein, 650 aa, unidentified
MKTEPEEIPDADHELIIERVAAIDVAKASGKVCLRLPRPGRPGHRVSRVWDVEATTAAVCELADHLVAGQIERVTVESTSDYWRIWYYLLEAAGLSVQLVNARDVKNVPGRPKSDKLDSVWLAKLTEKGLLRPSFVPPAPIRQLRDYTRLRVDLTRERSRYWQRLEKLLEDALIKVSAVASTLDTLSVRDMLEALIAGERDPRGLADLARGRMKTKRAALIEALTGRFDDHHGELARMLLDQIDALSGQINTLTIRIDQLLATIANEVPGHDDGDSGAGGQPSADLTVVQRLTEIPGIGPTGAQVILAEIGLDMSRFPTAAYLVSWAKLCPRTIQSGAIQRSGKTGKGNPYLKGALGEAAAAAAKTNTFLGERYRRIVKRRGKLKALVAVARSILVIIWNLLSDNHTRFRDLGPDCHATRINTERKLRIRARWSASHGGHSPTCGSSSAAISQGGSDAPAGSGGGAASGGGGTGVGAASAGGGESIEGSAGSQVPSATAGSTGSSTGSSVGGCSSASAAGSTGSSLPSSGSSSSSSSMSSSISGGSMSGVSPKPSSTEPSRLPNTSASCWPSPDRPLPTSGIPPSDGADGGAAIAGAVEPAPTGGASGAADIGANAAGAGMGGVAAGALHVGDAMTGGDATLAAAGTVAA

SEQ ID NO: 100796 - protein, 378 aa, unidentified
MLNNGMDAPFLNWHRGAKVEVQNRATLLRGSVTVKITTIGIDLAKAVFQVHGVDGRGKVLVRKQLKRKDVVGFFANLEPCLIGMEACGSAHHWGRTLSGLGHTVRLMAPQFVKPYVKTNKNDRNDAEAICEAVGRPNMRFVSIKSVEMQAVLALHRARQGFVKGRTAQANQIRGLLGEFGIVIAKGIGHIGERLPAILEDGENALPGMMRQLLARLGENLKELDQQVGELERQITLWHRDNEQSRKLEAIAGIGPITATAFVATVGDVKSFKNARQVPAWLGMVPRHEGTGGKATLGCISKRGDVYLRTMLIHGARTVVAQLERKRDATDEWLRKLVARRNKNIAAVALAAKNARIAWAVLAHERSYQHNYVANRAGA

SEQ ID NO: 100797 - protein, 417 aa, unidentified
MAEEIEWFVGIDWASQTHQVCLVDAHGECLGERAVAHGGPGIEELCDWLITRTGATPEVIGVAIEMTQGPIVEALLERGFCVYGINPKQLDRFRDRFTVAGAKDDRRDAHVLGDSLRTDRHAFRRLSNDEPVIVKLREWSRMADDLQQERNRLASRMREQLWRYYPQLLELADDLAADWFLDLWSRAPTPAMAVRLRETTIERFVKAHRLRRWQASEVLSILKQKPLSVAPGVVEAASDHIRTLTVRIRLVNQQLKAAHRKLDELCAQLIPSEEDEPGQQCEQRDVVILRSMPGLGRIILAVLLAEVWQPLRRRDYHALRSLSGVAPVTRRSGKTRVVVRRYACNKRLANALYHWARLATQHDALSRRRYAALRRRGHSHGRALRTVADRLLSVACTLLEQQTLFDPTYEVRDAASG

SEQ ID NO: 100798 - protein, 347 aa, unidentified
MTLYIGVDFHPHQQTVSYCNNEEGEVHQTSLVHNVEQVRRFYKQLPKAVVGIEASCTAQWFEQMLSELGHELKVGNPTSIRARARSRHKSDKRDADLLLDLLVKDEFPELWRRPLPSQSVLEQLRFRHHLVKLRTQICNRLQALAHAAGLPKKGIQTKRARLALMAANFTETQNYQRDQLFEILDDLTERIKQIERWLEEKAEGDVKVQLLLTHKGIGLLSALAVVHTLGDINRFPSSKEAVAYTGLDPLEQSSAGKVRFGSISKAGSAVLRHLLGQAMHVAARYDGQLKTFYQRLAMRRTKSIAKVAATRKLLIRLFIMLRDEIDYAEFKRRGATVGMPVLSHGLK

SEQ ID NO: 100799 - protein, 370 aa, unidentified
MLVLVPAIILLAPGPTRIISLTHQRFLTEQVFYKSIKHKFMKKHRFIMGVDVSKNTLDIYCTKINEHLQIQNGTVGFREFLLWCKTQKVDMKNCIVVMEYTGGYEYKLVQFCESKKIPFMRIPGLAIKHSLGIIRGKNDKVDSKRIAQYAFEKYSSLQASKPLDQRIVRLKELLKFRKRLVRENAGYQATIKERKHIYPDLGKDIIIKELGKKLGNNEQAISKIEAEIMKIIEANDDFKINYDLVTSIKGIGKVNAWMTIAYTENFTSFPDGRTYAVYVGVIPFDHSSGTSIKGKKRVSNLANKELKSELSQAAKSAMQWDKEIREYADRKLKEKQWGTVVNNVKFKLILRMFAVVKRGTKYVDNSQIAA

SEQ ID NO: 100800 - protein, 347 aa, unidentified
MVTFGGDSHKRTHTLVAVDENGRQLGERTVATTPGGHIDALGWASQWPERRWALENCRHLSRVLERDLLKAGEAVVQVSPKLMGMARRTGRELGKSDPIDAMAVARAALREPHLPVAQLEGKEREVKLLVDHREDLVGERTRIQNRLLWHLHELEPGYVVVASGLLRTVVIAEVRNRLEGHTGVVAEIARELVERLVELTQSVKRLQRRIEALMQELAPTLLSLPGCAGLSAAKLVAETAGVGRFRSSAAFAMHNGTAPIPVWSGNHERHRLNRGGNRQLNVALHRIAITQMRLGGAAAVYIARRLAMGNTKTEAIRALRRQISDEVYRRLRQDHSGRSTALVAVAA

SEQ ID NO: 100801 - protein, 379 aa, unidentified
MIESLPEAGCGRSIDLRYTETVGQRGRLTQISNKARAVVRVNQTRMMQGRAKREKRPMTEEAVYVGVDVAKNILDLAVSNSKETRQFKNDHKGILSAISYIASLRPVKIILEATGKYEIPLAAELQANRLPVVIVNPRQVRDFARATGVLDKTDRIDARILALFGMQVKPEVRLLPDQKTREMSGLLARRRQLIEMLTAESNRLLQADIGIRPGIEIHIKWLKEAISAINDDLDQHVRSSPSWLEKGHLLKSVPGVGNVVSTTLLIELPELGTLNRRKIAALVGVAPFNRDSGTLRGKRTVWGGRAKLRSVLYMAALVGVRRNPVMATFYERLLKAGKAKKVALVACMRKLLTILNAMIRSRTAWRLNSIFQNVTVEVK

SEQ ID NO: 100802 - protein, 416 aa, unidentified
MTQPILPTVERHLAVDLHKHYLVIGGVNARQEVVLSPRRVDLDDWPSWAKANLKPSDVLVVEATTNTWWFYDQTYQSVGQLLVADPRKIAWIAQTKVKTDAHDVMKLARLSAASLIPLVWVPPLAVREVRALLAHRRRLVRTQTVLKNRLHSLLHRLQIAPPDGDPFCAKHRAWWAALQVSPTERLHVRHDLATLDQVVGQLGEIDDELRRLSCAEPWSEVMPYLLHLPGVGLIVAMTILAAIGDITRFSTSKKLVGYSGLDAGVHDSGQTHRTGHITKEGRKELRYVLVEAAWHAVETNDFWKAEFERLCRRMEKNKAIVAIARQLLVVIWHVLTERVTDQQADPDMVAFKLMTWSWKLTPEQRGGLTTRQFVRYQLLRLGLGHSLTHVMRGGGKYLIAPPDEVLKLKPELQPVT

SEQ ID NO: 100803 - protein, 320 aa, unidentified
MTQPVPQYTVGIDVSKRTLDLYELATDRSSVIANDTESIKQWLDRWSGPLRLAMEPTNTYHLAIAHAAHARGHLVYLVDPYRLTHYRAGVGQRVKADCQDAKLLARYLQHEAAELRLWEPLQPGPQEFWRLLKRRATLVQTVTRMQQSLTDLGSLQADVDALIEQCRSTVKKIDQALLAQAKALGWAAQVRRCQGIPGVGPLTALAMVATYQRAQFRNDDAFIAFMGMDVRIRESGQYRGRRKLTKKGEPELRRLLFNAAMQGRRNLHWQPYYLALRERGLSSTAAFIALGRKIARLCFVLLRKEVDFEPNFHSGACMAT

SEQ ID NO: 100804 - protein, 367 aa, unidentified
MEKSSKVFVGMDVHKESIDITLAEEGGEVRRLGQIGGDRVSLLKMVRKQQSKGGERVFVYEAGPCGFWIYREITALGERCMVVSPALVPKRAGDHVKTDRRDSERLASLARAGELAAIHVPDIRDEGIRDLVRARDDAVIAQRRVRQQLKALLLRNDIRYVGKTSWTGAHRRWLSELKLPEPAQQIAFEEYVDAITVATGRIERLTRAIQTEVLTWRFAPVVAGLQAMRGIQFVHAVTLIAELGDLTRFGSARQLMGYLGLVPRENSSGEHRRQGSITKAGNSYARRALIEAAWAYRHPARVTRIIATRQTGLPKAACDIAWRAQLRLSAKYRRLNARHLNHNKIVVALARELSGFVWAIGQSVKPL

SEQ ID NO: 100805 - protein, 414 aa, unidentified
MDVVHPCVAGLDVHKQSVVACVRRIGEGGRVWKEVRTFATATRHLEALRAWLQAEHVTHVAMESTGVFWKPVYNCLEDHFAQVLLVNAQHIKQVPGRKTDVKDSEWIAQLLQFGLLRGSFVPARAQRDLRDLTRHRTTLVQERNRVVNRLHKVLQDANIKLSSVVSDVLGVSGRQMIEALGRGENDPHVLAEFARRRLRGKIPQLREVLEGHVREHHRFLLRLLLEQLDFVGHAIDETSARIAEIASPPVRAAVALLTTIDGVGPRVAETIAAELGTTMAPFPSHKHCASWAGVCPGNHESAGKRTSGRTTKGNRWVRRALAEAAWAASRTKGTYLAAQFRRLARRRGSKRAIVAVSHTLLTAMYHMLAQHVPYADLGATHFDRLQPERRTRYHLTKLRSLGYNVTLVPIEEVA

SEQ ID NO: 100806 - protein, 330 aa, unidentified
MKSTLAFEQARQAIVGIDVAKAKLDVALRLASGKWRTKVVTNTTAGFQELRTWLAKHGVSCAHVCMEATGVYWEALAADLADHGFAVSVTNPALIKAFGESRGARTKTDQVDAKLIGEFCAERAPALWQPPSKSVRRLRALVSRREALLDLRTQESNRLEVAATQEVSSSIQAVIAHLDEQIARIERQIKKDIDDDPTLKAQRDLLDSIPGVGEKTISMFLSHYGGELRFGKTRQAIAFAGLDTKKHESGTSVKGKPRLSKMGHSQIRRGLYMPAVVAMSKTEWGKAFSSRLLAAGKPKMLILGALMRKIVSIAYGVLKSGTPFNPALHA

SEQ ID NO: 100807 - protein, 357 aa, unidentified
MDDNHHGIVGGVDTHKDIHFAAVVDTYDRVLASNSFSTTRQGYKSMLMNWMQSFGEVKRIGIECTGTYGAGLLRYLQQFDVEILEVTSPDKMDRRRRGKNDTIDAENAAHAAFAGIRTVTPKTRDGMVESLRVLKVCRKTAIAARRIALQMIQMNIISAPESIREPLRALTRMQLIRTLVTWRPDLGGYRNISTAYKIALKSLARRYLELHDEIADRDVMISAIVDELAPDLIAGKAIGYESAAQLLITAGDNPDRLKSEASFAALCGVNPIPASSGKVNRHRLNRGGDRAANSALHIIAIGRLRTDNKTKEYVDKSLTQGHTKLEALRCLKRYIAREVYYILKKRNNLINSIQIAA

SEQ ID NO: 100808 - protein, 306 aa, unidentified
MTIVGCDFHPSWQQIAILDMETGEVRECKLVNGNGEAERFYRQLPSPSLIGVEACGNSQWFVDMLQGLGHEVWIGDAAQIRASYVRKQKTDRRDAGHILKLLMEGRFPRLWTPSAEQRNLRQLLIHRHKLVGIRVQVKNGLQHLMLNRGVQLKEKLWSQAGQKALRELTLPGWAAQRRKDLLSLLASLNEQIGQLDQATEKAAEEDPQARLLMTHPGVGPITALAFVLTLGDVKRFKRGKQVSSYLGLVPREHSSSGKQRLGIHQQAGKQLLAHVAGGERTVGHAFGRRISQAIPTPLSLQGERSR

SEQ ID NO: 100809 - protein, 346 aa, unidentified
MKQIIRIGMDTSKHIFQLHGVDSDEKPVLRKRLRRKEMVLFLAKLPPTVIGMEACGAAHYWARVLRGLGHEVKLMAPQHVKPYIKRNKNDGRDAEGLCEAMSRPTMQFVPAKTEEQQAALMLAGVRQQLIARRTQLSNAIRGYAAEFGLTTAKGLDKIEPLLARIAQDNRVPELARELFAFQGRDYARLQTELKVIEARLMAWHRANACSKRLAQIPGVGPIGATALVMKTPDPGAFPSGRQFAAWLGLTPKDHSTGGKTRLGKITRAGDEVLRSLLVAGATAVIQQVRKGRGRPSPWLLDLLKRKPPKLAAVALANKTARIAWKLMATGESYDSARMTDISISAA

SEQ ID NO: 100810 - protein, 437 aa, unidentified
MRTSPNEYVLAFDFSLDTLDIALADPDGNWIIPHQAYDNNLPGFRGLKQDVLAHLSNIDEARLTTAGESTALFWWHAFYQISTDPDFAPYDPSLALLNPLYVKNFRRAQPEEDKIDPKDARLVGTYYRTMGVKHYHTFDPRYLPLRQLSRAYFRLTHTLAAEKSFALTLLYLLGSEYRRIKPFSDNFGVTSAHILTEYPDIAAISAIPLDHLAEILDTLSRGHLKDARHSARKLHQVAKDSYPLPDFLAPTVHTVFGMTLDHVRFLEHQQKTYEHLIETELDHLPEAAFALAEPGLGPILVAGCLGEIQDTRRFTTGRKFDRKKKRWRERTYRDGQAGVARLAGLWWPRNSSGRFEGDDRHLARERDPYLRYWFVQAAYSLKRNRGDYATYYQRKHDEVPKHQHKHALILTARKAVRLIFALLHKGQMARLEEQAAT

SEQ ID NO: 100811 - protein, 402 aa, unidentified
MAAGQLWAGVDVGNEHHWVAVVDSACTMVLSRKLANDEQQISKLVAEVDRLGAQVSWTVDLTTVYATLLLAVLAEAGKSVRYLSGRSVWQASVIYRGGEAKTDAKDARVIADQSRMRGDDLPVLHPDDDLVTELRMLTAHRADLVADRTRTINRLRQQLVAVCPALERAAQPAQDRGWVALLARYQRPKAIRHSGITRLTRVLADAGVRNAPVIAQAAVTAAKTQTVRLPGEEVAAALVAQLAQGVIALDERIKQIDADIEDRFRRHPLAEVITSLPGIGFRLGAEFVAAVGDPALINSADQLAAWAGLAPVPKDSGKRTGRMHTPQRYSRRLRRVMYMSALTAIRCDPHARSYYQRKRNEGKRAVPATICLARRRTNVLYALIRDNRTWQPDSPPITTTAA

SEQ ID NO: 100812 - protein, 348 aa, unidentified
MAHSLTAFQNHWCVGVDLHKAQMTIAVLDPATGQVAFTTIACKCRAQVVAFFSALPRPHVVAIEAVGFYRWLWDLLEPIVEKLLLADATQCRALAGRRIKTDRHDALNVAELLAAGRLPIAWAPPSQIAALRDVTRHRHYLSRQHARCLHRVQAIMHQVNRPGPARMKAPQLMRYLKAQRDKLPAHLVSQLEMAVDEMVLVERQLDQIAASLKATLAQPRWADEAQRLMSFPGVGVLIAAAVLAEVGDFDRFADRDALTRYAGLNPRTFSSDTTVRTGKLAKAGSRELRWALVQAAWVAVRCDDSVKRLWLRIRKRTGGKRAIIAVARRMLLWMRAAHKKGAAYRHAA

SEQ ID NO: 100813 - protein, 405 aa, unidentified
MWYAGIDWANDHHDALVIDDQGVMMVGSLRVDHTPQGMTRLNTFLEQIVGAESKDQMACIIETTHGLLIAHLLEAGWPVYPVNPRTVDRRRSASGAKTDTIDAYLLAKTGRADLADLHRLTPDSEKIAELKLLTRDQDALIRMQTRLVNQLTACLKAYYPVALELFTKLPQKSTLRFLQTYPTPQAAMAVSAEQIQQVLRQAKHSNPTAVAATIFERLHQPHLQADAVITGSKSRLMLALVSQLLPLIEQIAQYEKEIKTLFLTHEDHEIFASLPRAGKRLAPRRLSEIGDDRTRYQDESLLQALGGTSPVLFQSGMYSKAHRRLGCIKPLRNALHQFAWQSTQSEPWARQYYQRKRAEGKSHTVAVRALANVWVRIIFAMWLHHQCYETATFEQAQQQHARRAA

SEQ ID NO: 100814 - protein, 400 aa, unidentified
MMTPDDIDVWVGLDVGKSAHHAHALDHDGNTLYDKPLKQDEKAIRTMLGKLSKHGRVLLVVDQPNTIGSLPLTVARNMGIAVAYLPGTAMRRTAQLLPGDAKTDRRDAHVIAWAALKLPETLRDAGPDDETLAALKLLAGHDEDLAHESTRHVNRLRSLLLQTHPAFERALKGERITRDATLALLERYGGPMGVKRAGIEDVKDWAKSNGLRAGRIIDDMFKAIGEQTVTVPGTLMAETIIPSIAHDIKTIRDRRREVGRQVEKLLEDHPLLTVLTSMPGIGVRTASSILLGIGGDIANFKSSAHLAAYAGISPVTGQSGTSIKGERPSRRGNKRLKNALWQTAFVASTKHPPSVAYYKRKREQGKHHNAAIICLARRRCDVIYSMLKNGTLYQEPALVA

SEQ ID NO: 100815 - protein, 407 aa, unidentified
MFCGIDWASQRHAVCVLDDAGKTITAFQIAHSADGFDQLVSRLRRLGDPAGLPVAIERPDGRLVDRLLEAGHPVVPVQSNAIKAWRDAEVLSGAKSDPGDAAVIAEYLRLRHHRLRPLQPFSPQTRALRTVVRTRDDLIAARVAASNQLLACLEAFWPGAKAVFADVCSPIALDFLTRYPTPESAQQLGERRMTAFCVKHGYSGRRPAAELLARLRAAPAGLAGTVEVDARRDAVLALVGVLRALNQSIKDLDRSVVAHLGEHPDAEIFTSLPRSGRISAAQVLAEWGDCRQAYDGPDAVAALSGIVPVTKASGKHRVVSFRWACNKRFRQAICTLADNSRHASPWAAKVYADAIARGCDHPHAIRVLARAWVRVIWRCWIDHVPYDPAKHGATRKLTEMAASAGQG

SEQ ID NO: 100816 - protein, 347 aa, unidentified
MDHIGIDVHKKESQICILAEGSELIERRIPTQPGRFAEELGARSHARILLESATESEWVARCLEGLGHEVIVADPNFAPMYATRTRKVKTDRRDARALAEACLLGAYRPAHRLSDAQRHVRARLIVRDTLVRTRTRYISLTRALLRQHGWLVPSGSAEGFPRRVMALPLPGRLRSEVAPLLAMMRHLQPQLAYSDERITAVTQTDERVRRLQSVPNVGPVTAAAFVAARDDAARFRRAHEVEAYLGLVPRELSSGETQRRGRITKAGSSRVRWLLIQAAVSMLRLRDPRTTALREWAGRIAARRGKSIAVVALARRLAGIHFALLRDGTVYESRQRALAAVPQAVPA

SEQ ID NO: 100817 - protein, 318 aa, unidentified
MTSIILGIDISKKTFDAALLIDKKNKNKKFDNASKGFHELNRWLKANKVGTAHVCMEATGSYGLKLAQYLYENQFKVSIVNPARVKGFAQSKLCRVKTDKADSELIAHFCKVMNPDLWQPTPLHIKELQDLVNRLESLIANKTQETNRLEKGLSALVEANVKSHITFLNQQIKEMEKLIAAHIKSHNDLSDQYILLTSIPGVGEKTITIVLAFLSNVQKFDSAKQMVAFVGLNPKPRQSGTSVRGTSRISKTGDADLRRAFYMPAIVSLKFNPIIKDFTERLSRAGKSKMVIVVAAMRKLLHIIYGVLKNNTPFNQNI

SEQ ID NO: 100818 - protein, 349 aa, unidentified
METAYGGRQVVGMDLHRHRSVLVRMTEDGRRLGMARITNSPQELRAQIARAGKCPRVVLEATYGWYWAADTLAAAGAEVHLAHPLGVKAFSYRRVKNDERDAADLADLLRMGRLPEAWIAPARVRELRELTRYRQKLVHLRTSCKDQVHGVLAKLGVPVTCTDIFGVAGSAWLDALRLPQPYAGKVTSLRQLTGELTTEITMLSDVIADLLAGHRGYHVIQQLPGIGPVLAAVIVAEIGDVHRFKKPGQLCSWAGLTPRHRESDTKVTRGRVTKQGSRMLRWALIEAVQRAGGDTVTGATRDAIIARRGKQTRNIAKVAAARKLLTLVCYGLRDGQIRCLSSTPAGQAA

SEQ ID NO: 100819 - protein, 337 aa, unidentified
MINNFLGIDVSKERFDVFLSFISKKGKRETRKRKFKNDDSGFQGLANFLQKHNIEEVKACMEATGCYSEALAEFLHNAGYFVSVVNPYCIKSYARSKLARQKNDQSDAEIIADYCQRQEPSRWTPPSPEKKKLKHLYRCSDALKDELTLANNHLEKKERLPEEVVNAWESLAMNIEQSIETIKNSVRELLNQHKELLEDFQLLLTIPGVGEESAIAILAEIPGIKVFINARQLAAYAGTIPQNITSGSSVHAKPRLSKTGSRILRKATYFPAIVAKNHNPIIMTFCEKLKEKGKHNMAIVGAAMRKLLHIVFGVLSSKKAFNPDHIKNYRVRRFTEA

SEQ ID NO: 100820 - protein, 331 aa, unidentified
MYFSQFVGVDISKNTLDAAIYPAKDKKLDFLHFDNTQKGLGEMLSWLKRRGVKPSEMVICAEHTGVYTNPLIAFVDKKGLALSLNSPLDIKHSMGIARGKNDAVDAGRIAEYAHNHRDKLRLYEKPSEAIMKLQYLLTERRQYMRQRTALINLNSAMGKYETPEARYRNESAIHHCEKLVKKVEEQMMDVLCSEPEVKQNFDLVSSVKGIGLINAINTVVYTNNFKAFETPRRYACYIGVAPFDHTSGTSVKGKTQVSKICRTQQKAELSMAARSAVVHDPGLKRYYQRKMKEKGGGKDAHGVVLNAVKFKLILRMFAVVRSRQPYKVLNY

SEQ ID NO: 100821 - protein, 345 aa, unidentified
MNVKVLGIDLGKTVFHLIGMDEHGKIVLKKRYSRSQLFKFLANTPVCLIGMEASCGCHHVGRTLSSFGHDVRLIPAQFVKPFVKSQKNDYRDAEAIAEAVQRPTMRFVPIKSEEQLDVQAVHRVRERLLAQRTSLVNQLRAFFLERGLMVRTGRAYLWRALPEVLARAEETVSPRMFRLMQSIVQQWRNLEMQIVELEEEIARVAQADPACQRLQTVPGVGPLAATAIVAAVGNGGAFRKGREFSAWLGLVPHQCSTGGQTKLLGISKRGNEYLRRLFIHGARSVCLHVNRERHAWGGWITELKDRKPSNVATVAMANKLARIAWSVLYRNEVYRSHGSGVPATA

SEQ ID NO: 100822 - protein, 386 aa, unidentified
MGQRPFIPQEYDVFAGLDVDKKSISVTFSNHQQGFVRSLHMPYSVEQLTQHVRKRFADQKVAFVYEAGPTGYGLYDGLVAQGYKCLVVAPSMIPRAPGQRVKTNRLDSRGLSENLRGGQLKSIHVPSPIYRELRHLTQLRDTLVSEVAGMKQRIKSLLLFEGIAFPVAPAGSQWSLKVKAQLRKLQCSKSVRFKLDQLLDSVEFSEKQVVKVTKEIRRFCQNDPELSQCIKYMMSVCGIGWIVASQLLARIGDWRELQNVRQLGGFLGLVPTENSTGDKTDRGSITHTGDGRLRSKLIQASWSAIRQDGELREFFRSVCQRHPRGVGPRVAIVAVARKLSARISAVLMEQRPYVVRQKVHSAPLTQEETSPQGTTRRRGEPGEKNS

SEQ ID NO: 100823 - protein, 341 aa, unidentified
MKNLFIGVDFSKEKVDVAIIFADGLTETAARVFNEFKTTVSGYKQLVKWVEQNSYGIDSSQWLFCGENTGDYSKGLCNFLYGKGYDMWLENAKSIKDASGLRRLKSDRADASMIAEYAMRNYDKAIMYEPLSESLAQLRELFLYRQMVVRHRCSFQVRRGEKRLTMEKSPIKTMISQSGRHIVSELNKEVEKIDKRIAELIKSDEELTEVFTIVTSVPGIGTQNAVSLMVYTDNFRRFNYDSRKIACYYGIAPFGKDSGTSVHSDPRVHYMANRQIKAMLTQAALAAVNFNPIMARYYMRLVERGKKKQVALNNVKNKLVHLITAMVRNRQLFTTEYKITA

SEQ ID NO: 100824 - protein, 345 aa, unidentified
MDFIGIDLHKVSSQVCILSEDGELIERRIKSTRASFDEVFAGRPQARILVEASTESEWVACHLEQLGHEVIVADPNFAPMYATRDKKIKTDKRDARALCEACRLGAYRPAHRTSERQRKVRAQLLIRSTLVRTRTKYISLIGALARREGCRIASGGSNNFIARVEAANLSAHVMTAIVPLFESLRLLNRQIDEADALLEKIVKEDVVVKRLCTTPGVGPVTATTFAATIDDASRFGAAKQVRSYLGLVPREYSSGERQHRGRISKAGGSRARTLLVEAAWALLRWRTEKNKALYDWAMRIAARRGKARACVALARKLAGILYAMWRDGTEFDPHAFKYSDAAAVA

SEQ ID NO: 100825 - protein, 411 aa, unidentified
MSDSDKLPNAEYAVFCGLDVGKGEHHACALDPAGRRLHDKALPNDEAALAQVFTGLQAHGNVLVVVDQPASIGALAIAVARSLGIDVAYLPGLAMRRISDLHPGEGKTDARDAYVIADAARTMPHTLRRVGTDDETLAGLSVLAGYDDDLAAQSTRLTNRLRDALLHVHPALERLLGKHLDRIGVLDLLAVASTPAALRDLGADHIAEIMRPRSPRLAKTLPTKILTALDAQSVVVPGTTDFGRVIAGVAVQLRDTHIERSALAADLEARLEAHPLAEVLTSMPGVGFRTALKLLTIVGDGTAFPTAAHLAAYAGLAPVTRRSGSSIKGETRSQSGNHALKSALFLSAFASLSDPTSRAYYDRKKDQGKRHNAALICLARRRVDVIYAMLRDRQPYRPPITQDPLPAASAA

SEQ ID NO: 100826 - protein, 370 aa, unidentified
MLDTTTFVGLDVHARSIKAVSLDVMTGEVRCATFGYDAGAVAGWVRSVDPKARCVYESGVTGFDLQKRLSGLGVDCAVGAVSKMIKPSADRRRKNDRNDAEFLARMLSVGNVVEVWVPDDECEAARDLTRALEDARDDLSRAKQRLSKFLLRHGLAFDERTPTGRRKGNWTRAHWSWIESIRFAEGADNDVLAYYVDAVRRAAEEKARLEGLVEAEARKPRWRRRVDSLRCLKGVDTATAADLVFEAGEFSRFGNARSFAAWVGLTPSEHSSGESDRRGAITKAGNKHLRKALVEAAWHYLTCSGRPKGLARGQAPDRVARRHAAKGVRRLVERREALLARGVHGNKANVATARELACWVWAVGLMAEGA

SEQ ID NO: 100827 - protein, 346 aa, unidentified
MQYYAGIDISLEQSSVCVVDAAGKIIKEAKIASDPCVLATFFKGLGFPVTRIGFEAGPLSHWLYAGLTQAGFDVVLLETRHVKAALSAMVVKTDRKDARGIAQLLRMGWYQSVHAKSASSQEIRALLTGRRLLLDKLRDVELSLRGVLRGFGLKLGKVTQRAFETRVRELVANHPMLQQITGSMLLARATLQREHNMLHKALLKIVRRDKVCRQFMTAPGVGPIVAITYKTAVDDPHRIKKSKGAGPLFGLTPKRYQSGETDVIGGISRSGDAMVRAMLYEAANSLLSRTTRFSALKRWGLAVAKRRGMKRAKVAVARKIAVILHRMWIDGTGFRWSNKEKGAAHA

SEQ ID NO: 100828 - protein, 421 aa, unidentified
MKGEGFLKVVYPVCCGVDVHKTFLVGTIISTTDGVQPHYQKKRFSTYNSDLCKFADWLHLNTCLDVCMESTGKYWVPVFNILEECGIHVTIANPKWVKAVKGNKDDTKDSKWIGDLFRLGLVPGSFIPSKEIRILREFTRYRYKLVSMKSSEKNRFQNAFTVCNVALDSVVSDMFGKSATAITDYLISEDTFNPEHCVSLLHRSLKKKADSVLESIEGYSITPEQKFRMQIVRSHLEYIESAIAQMDSEIDAMVAKQESLISLLCTIPGVDRNSAITIISEIGTDMDQFGSSKRLCCWAGLTPGNNESAGKKKSFRITRAGVYLKPALVQVAHAAVKATDSSYYRSKYEQISKRRGKKRAIIAIARMILTAIHQMMTTGEVWNPTDLFKLDMPETLKEKQLAKAVRQATKFLEKQGLTVAS

SEQ ID NO: 100829 - protein, 385 aa, unidentified
MIIIGVDPDKRLDVASVVDPATNRQVTTLQVEASLAGYRRLLGWAGGFGERRWAVENAHGLGRHLAQWLLARGELVEDVPSTATARVRQLSRGRRKNDVIDAAAAASVAALQGEANPVQAEDITTMLGLLDERRTNLTTQRTRLVNQLHAVFRDLLPGGAAQHLTATIASGLLAGIRPAGPVESARKQLAGDLVVEIRQADQRLKALTTQIADMVAATGSHLMEVDGVGPVVSGRLLARTRRMSRFPTAAAFASYAGVAPVEVSSAEPIRHRLPSGGDRQLNYALHVVAVNQIRMPHSAGRAYYDSKIAAGKTQKEARRCLKRRLADHIWRLMIRDERHGAAGPGGQQGAAMPSSAAGSTPTTSSSDKSLPEPATPDSTTGQTAA

SEQ ID NO: 100830 - protein, 346 aa, unidentified
MLYAGLDLSRKRLDVHLLDQAGATVEVKAARPDADGLRTLALRLGRFGVPIRAAIESMNGARFVHDQLERQGWEVEIADAVKIKGLAPLACKTDRIDAWVLAELSRRELVPAIWLPDPAVRAERERARFRLHLVRHRTSLKQRVHAVLLAHGRPCPVSDLFGASGRKLLARLQLPEPWAGSVEASLYLIDELEREIDACERELQRLGAEHRYVPLLRSVPGIAWVLAYTIAAEIGDIARFPTPRRLVGYSGLCPRVYQSGDSDRRGPLAKQGPKYLRWALVEAATGACRHPVYRERYERTKARLGKQRGAKVAQVDLARRLAEAIWHMLSRNRPFAPAGATCPLAA

SEQ ID NO: 100831 - protein, 381 aa, unidentified
MKKTIRYVGLDVHKDTIVIAVAEQGRDGEVRAYGTISSDWHAMERALTKLRADGAELHIAYEAGPTGFVLCRQLRKMKIDCIVVAPSKMPVPGGRRQKTDRRDAELLARLLRAGELTAIHVPDEVDESIRDLARTRADAVDDLTRAKQRLKSFLLRAGYRYSGKADWGEKHQRYLRELTMPMVAYKAVMEEYLIALDQCIERVKRLDDLLAAHVPQWCHYPAVKALMAMRGFQLVAATVLVSEIGDIHRFSHPRHLMAFLGLVPHEHTTGDTRRIGAITKAGNGHARWMLIETVQSAFFPPKVTAALTLRQEGQPVAVKELSWKAQTRLYKRGWHLSARGIMKPKIIVALAREMAGFVWAMLHLVPVPKEPLPAGPVLRRA

SEQ ID NO: 100832 - protein, 333 aa, unidentified
MNYTGIDYHKRYSVACTLNGQGRLVKQVRIDHNAPEAFAAYFEALDGPSEAVIEACWNWATLYDLLEDTPKVSKVILSNPAKNRIIADAQIKNDRVDAKALATLLRGNFVSTVHVPGKEVRQKKNTVRQRLWLARVRTMVRNRIHIVLDRHPRIERPAPDRQLLDEDLELHELLDRHIRALEDRIESDNAAHVDAVRLRTLPGVGKVLGPVIALEIDGVARFQSADRLCAYAGLVPTTHSSGGKTSHGRMLPFCNRWLKWAFIEAAWVAIGCSDYFGSFYKRHRARGKGANEAITITARRMAKIAWKMLTEHRDYSKVPIVAKPLSPAALVTD

SEQ ID NO: 100833 - protein, 401 aa, unidentified
MAAQRDKAWVGIDVGKTHHWACVVDAEGKKLLSIKISNDEADILALIATAGSQARQLDWAVDIVGAPSALLLALLARADQSVRYASGRVVAAMSAAYAGEGKTDAKDAYVIAETTRLRRDLSVIDTDTDLVRNLAVLTGHRADLIADRVRMINRLRDLMTSVFPSLERAFDYSSHKGALILLTGYATPDRIRRIGQTRLTSWLRTRHVRGSADVAARATTAAKAQTVALPGQDLTSSIITELATTILALDDRLKALDAQIEVTFAEHPQAAVIQSMPGFGPFLGASLLVGANDLRAFPSAGHLAAAAGLVPVPNDSGRRTGNLHRPLRYSRSLRHVFYLSAQTSMMRAGPNRDYYLKKRAHGATHAQAVIALARRRIDVLWALLRQNRTWTASPPPLVQAA

SEQ ID NO: 100834 - protein, 426 aa, unidentified
MRVLYDRVAAIDVHKDMVKVAIRVPGAKRGTRKTDVLEFRTFYGVLQAMARELRGRGVTHVVMEASGVYTDPVYYALRELDFEEVMVINPAHAKALKGHKTDAKDAIRLLDLYECGLLSGSYIPDPDLREVRDLARYRMKTVQARTSEIQRLQKTLETAGIKLSSVVSDVTGGSATAMIEALISGERRGAVMAGLAQTRMRTAGKMADLSMALTGRFTDHHALMCRLHRDRITIFDDAVKDLDAKIAPLVARYAREAELLKTLPGFGDVIVAGWLGAIGPAPHQHFATASRLASWATLCPGNYMSAKKSKGGRTGDGGAYIKPLLIQAAWAAVRVPGRLQARFRRLVRKFGGPKNKGAQKRAITAIAHTLLKIAYSVLKTGMPYADLGADFYTRRESPDARQDYLMRQLQKLNPGCIITITPPEAA

SEQ ID NO: 100835 - protein, 340 aa, unidentified
MRGLYAGSDLHGNNNLLGIVDEQGKRIFKKRLPNEPQLMLDVLKPFQEEIIGIVVESTYNWYWLVDALMEEGYKVHLANPSAIQQYSGLKHADDNHDAFWLAEMLRLGILPEGYIYPKEERPVRDLLRKRGHLVRLRTSLVISLQNILSRNLGRKVNVNDVKSLREDRITPLLEMNEDLTLAGRISKEAIDHLTHQIYKIEWVVQKKIALKEEYRYLLTLFGVGKILSLTIMLETGPIGRFPTVGDYVSYCRKVPSQWTSNGKKKGSGNSKNGNKYLAWAYSEASEFARRLYPEARAYYQRKMHKTNAAVAHSALAHKLARAAYYVMRDHVPFQPEKLFG

SEQ ID NO: 100836 - protein, 463 aa, unidentified
MRRRIGRSIKKRMRQGLVVLEPNVAGVDCGSREHWVCAAAKESGQLSVKGFATMTEQLEALADWLHQQGVVSVAMESTGTYWISLFDLLEERGFEVLLVDARNLKKVPGRKTDILDCQWIQQLHSCGLVEGCFRPPAVIRELRALARERSNLKADSGTVVQRMQKALDQMNVQLHHAVTDLTGVTGMKILRAIVGGERDPQHLARYRDRRCGKSQAQIAQHLKGTWRDEHLFTLESNLERYDHLQTMLEKYEQQIILRLQQLSPPERQDRPVPTHPNARKDKDMRRRGEAPLRTALWRFSGIDLTRIDGLGSAAALRVISEVGFDLTSFPTSKDFVSWLKTCPPLNRSAGKNRKGRAKGFGSSRIAQVLRMGALSLKNSPTALGGSYRRMARRKGSSIAIGATARKLAEHIYRALRWGIQYLDQGAEAYEARFQNNRLKYATKIAKSMGYTLVPLENPNEVSA

SEQ ID NO: 100837 - protein, 415 aa, unidentified
MIEEQQIAACIGLDWADKEHSIHLRADGGKLEHIRLEQKPDLLHEWIAQLQRRFQGRKVIIAIEQRKGAVIHALMMYDFIVLYPINPTALARYREAFRTSGAKDDPADSELLLDLVSKHRDKLRAWVPDTVEARKLQLFCEQRRKIVNHRVALTNRITSLLKQYFPQALDWVGDVASIQACDFLSNWPALSMVQRARKDSLRNFYRRHNCRKAAVIDERIDQISNAVPLTNDPAIIEPLSLSVQTYAVQLCSFIRAIQEFDKRIAETFAQHADHDVFDSFPGAGQVCAPRLAAAFGTDLSRWESAVEMQSHSGIAPVTERSGDSKWIHHRLACPKFMKQTFHEFSDQSIRFSKWARAYYDQMRSRGKDHHAALRALAYKWIRILFRCWKDRKPYNEEKYLQALKSRGSSLIEKIA

SEQ ID NO: 100838 - protein, 357 aa, unidentified
MERYIGLDPHGTSCTFGVIGPSGRKLRHDVVETSGAALVSYLRSIPGKKHLCLEEGTHSAWLYEILSPHVEEIVVAGISESRGQKSDVLDAFRRAEELRTGTIKTPVFKAPRRYRRLRELARVHSMLVRDVVRVQARLKVMYRARGIATPGKSVYSPSGRDQWLKRLPVSSRWATEKLHEEYDRLLDLKQELEQELKAEARKHRISRILATAPGLGPIRVAQLLPIVVTPHRFRTRSQFWSYCGLGIVMRSSSDWVQTRTGGWVRAQIQQTRGLNRNHNSTLKDIFKGAATTIVTRLDTDPLYEHYLRLTSAGTKPNLAKLTVARRVAAIVLRMWKDEKEYDPGKLKQQTSLVSAMS

SEQ ID NO: 100839 - protein, 368 aa, unidentified
MNRKSSKLYVGMDVHKESIDIAVAEEGGEVRHHGQIGGDTNALWRAVRKLESSGRELVFVYEAGPCGFGIYRGLTGRGHSCWVVAPSNTPRRVRDRIKTDRRDSLKLAGLARAGELTPIYVPDVRDEAMRDLVRTREDAVMMQRQARQRLAALLLRNDVRYAGKTAWTAAHRRWIADLRLPQPAQRLAFEEYVQAVEEASARVQRLSQCIEQELATWRWCSVVGALQACRGIQLIHAVRLVAELGDLSRFSHPRQLMGYLGLIPGEDSSGEHRHQGAITKAGNSSARRALVEAAWAYQYTAKVSALIARRQADVPKAVLDIAWKAQVRLCARFRRLAARGVNRNKIVVAIARELAGFVWAIAQHVKPI

SEQ ID NO: 100840 - protein, 390 aa, unidentified
MDVLYQSCAGIDVHQANIVVCILHGPLTSTRPKREMATFDTTTKGLRACHDFLSQFHVEAVGMESTGVYWRPVWHALCDDFELILAQPAHMKAIPGQKTDKKDDYWIAKLTRIGLLPRSFVPDEIIQELRELTRQRKHYVESRNRETNRIHKILQSGGIKLTTYIEDIMGLSGRNLLQLLVDGTPITPRIVHQSVYTSLKKKVPQLLEALDGYFSDHHRFMLKQSLEIYDFYQKQIELLEERINVYLSQYEKHVEILDSIPGIDVITASVIISEVSVDMSQFPTAGHLASWAGLCPGNNESAGKKRSTKIRHGNSYLKKCLCQAAFAVKKQKGSPLAARFYQIQSRRGSQKATIALAHQLLKIAYILLKEQITYPEFLAQKKTTRDELVA

SEQ ID NO: 100841 - protein, 353 aa, unidentified
MREVITLTTKRVCGLDLGDKTSAVCVCGRGGEIEWEGRVRTTVAGLAKRFQGVEPMRIALETGMHSLWVSRQLRQWGHEVIVAHAAKVRLIGNSRRKNDRLDARTLADLASVRPRLLSPVEHLSAEAQAHRGVLRSREALVRSRSSLILHARGSVKAWGGRLPSCSAESFVKKAQGAVPAELLPALAPIFEMVGELTVRIRSYDRQIEELLRTHYPQAQRLRQVRGVGPITTLAFVLAVGDPQRFARSRTVGAYFGLVPGQRDSGSLRPQLRISKQGDPYVRKLLVQCAHYILGPWGVDSDLRRLGERLSEVGGKNGKKRAVVAVARKLAVLLHRLLVSGQTYEPLRQAGLAA

SEQ ID NO: 100842 - protein, 316 aa, unidentified
MAMHVDVQLGGVDVAKATLAIASSATESVITVANDAKAIRGWLKTLSGPVCVAVEATNIYHVALVDLIHAAGHTVYVVDGYRLKTYRESIGGRAKTDVSDARLLLRYLRNEREDLRAWRPPPKGYVVLQRLLRRRAVLVQAKTTLRQSLACLPELKTSTTALMRHLARLDRLLKKRLLKTLTDLDWQGQATRCQAIEGIGPVTSAALTMIYHRGSFVSADAYIAFMGLDVRVSDSGTFKGRRKLTKRGDPELRRLLYLAAMTARRSTTWRDFYERALARGLKPIQALVALARKLARIAFALLKTGSTYQPKLPEIA

SEQ ID NO: 100843 - protein, 319 aa, unidentified
MNTTSKIQKKHTQRHVGIDVGKSTLDIYIFEKDEYFQVENNPSGITQLTKKLKRYKLTRVLVEATGGYERAVAEACAEQALPIIIITPIRIRQFARAQGIIAKTDKIDARLIAHFGVVMQPEVRELPTKKVRKVKDLNARKRQLMESRTQELNRQHKAQPYMQSTHRRMIKVLDKEIEWINQQLAKEVDKIDEWKRTQDILLSAPGIGCGVAYTLLGELPELGQLSHRKIAALCGLAPFNHESGSIAKKRRIRGGRAPIRTVLYMAMMSAIQHNPIMKTFFNKLVAQGKHKKVALAACMRKMITILNAMVRNNQEWNMA

SEQ ID NO: 100844 - protein, 334 aa, unidentified
MNRTTLIGIDLGKHSFHLHGQDKNGKALYHKKMTRTKLLEFLAVTPNATVVMEACAGAHFMARKIAALGHETKLISPQFVRPFIKSNKNDFIDAEAICEAASRPSMRFVQPRTESQQTMRALHRVRESLVRDKVKTTNQMHAFLLEFGISMPKGIAVIRQLSEVIAENDLPSYLVQLLQRLHAHYLYLVEQISEIEQELVLTIKQDEGAQRLLTIPSIGPITASVLASGLGDGKQYSHSREFAASTGLVPKQYSTGGRNTLLGISKRGNKQLRKLLVLCARVYIQKLDHPSGKLAEWVKKQLTRKHSCVVACALANKLARIAWAIITKKGVFNQ

SEQ ID NO: 100845 - protein, 306 aa, unidentified
MQETNNVKTFVGIDAHARQCSIKAVGEQGESLLVKDVPTRESSLRRVFKGLPPPVWVMVESSSLAPFVKDCVDGSVDRVIVCETRENRWIAKSEDKSGQADADRLARLLRMGEFKDVHVPKGLRRDRREVLRLYQKAQGDASRTKNRIKSKHREHGVAVEGKGVYTKNGRDKYLEKISRPNVRFLFDVLYAKLDSDEAACGALLRRLVSIMKGTREHSLLKGIPGVGNINSSIMVCVIDDPHRFEGKRKLWSYSGLGLRSRWSRDRGQSPWGQWPLKALDLISRPRKFAGPYDLIGEKSRIDASAA

SEQ ID NO: 100846 - protein, 438 aa, unidentified
MSNKIIFNLDELFISVGIDVGADFSWMSIALPNQQFVGKPYKILHSSMDSLTTAVSKIKEAEELYSLESRIFLESTGIYHYPLFCYLRDKGFNCSVINPIITKNSTNMNIRKVHNDRFDSKKAALVGLKPDLKLSLMPSDLALNCRNLCREYYDLMDNRNAYVNKLQGELRMAFPQYLGIFSKVTINTSLTLLETYTSPSAFLEADKQEIIGIIKSTARFGLTYAQNKYNAIIQAANEANEFGYIIDSNIKRIRLYISFIRKYDEEINRILDSLHELVDANEDTDFVKQIHLIETFKGAGFLSAVSLMGEIGDFSAFSKPKQLFAYFGLDPAVKQSGKFEGTKVQMSKRGSAIARRVIHTLTLQSISTSRKGDAKNPVLRDYYLKKCESKPKLVAMGAVSHKVCNMIFAILRDNKPFEIITPQEHIKQYNAAKCDVAA

SEQ ID NO: 100847 - protein, 312 aa, unidentified
MNPPSPVCPAYVGVDVAKATLAVCGPGMKKLHTNTPLGHAGLLKALPPNAHVLMEATGGYERALALALHAQAIPVSVLNPRHVRDFAKAMGQLAKSDRIDAQMIVAFAQAKRPAVDTPPSQSLIELEELMARREQLVALRTMEKNRQEHHRQKLLQVRADKLLITINLQIEELEQKVQQIIHADPELKHKRQRMLQVEGIGEITVATVLAFMPELGTITRAQAAALLGVAPYVCESGMERGKRHVWGGRANVRTCFYMAAMTAMRDNRVFREFYQRLRTAGKPGKVAIVAVMRKLVCLLNHLLKNPNFLLAN

SEQ ID NO: 100848 - protein, 459 aa, unidentified
MKEIGFLGIDVSKGYADFLLIDADQNPLEKGFQLQDTKEGRQQLKHLIEQWYQSGLKTLCCGVESTGGYENNWYYYLINLGKTYDVKVTRLNPKAVKSSGDAQLIRTVTDGVSASLIAGYLVRYPDRVLYANTAYDASEDLKHGRQQQRFIHLLLKQKVQLSNQLEKVLYQQFGEVLVFCRHGIPVWLLRMLSRYPSADRVLRAGVDRLAKIQGISRSKANALIHKAQRGKTNTSAIVKHLIQSLAKEIMHKHLFIQQEKNLLIQTFQHHPDVPILQSIVGVGLESAVEIMLEIEHIDRFSECKKLCAYFGAHPTYKQSGDGIWKPQLSKKGRSAMRARLYMIGLSAIRYAPNIKKLYHRMRATKGMNHYQAMGVVMHKMLRIIYGVLKSRKKYDPEVDELKTKNAETKRLEYSKKLKDQNGVLETAKYRYQQPILDAPVSRRTARKRKGQIASQFTNQ

SEQ ID NO: 100849 - protein, 355 aa, unidentified
MITIGVDAHKRMHAATALDEAGRMLGHWQGANSPEGWAALRAWGEARSAAAPRQWGIEGAGNYGRGLAQALLTAGETVYDINPRWTALTRRQSRKAGKSDRLDAQAVALYLWREAAQLPPLAPEDETVILDLLRQEREAALAEATRLRNQLHALLLQVDPQYKEHLPALTSAAGIAALRTYTAPVMGDLPAQRAATVRRLAARLQLATEQAAEVQAQLEARAQAGFSPLRELKGVGRLQAGVLAGLLGAGQRFASEAQLAAYAGAAPLEASSAGHMRHRLNRGGNRQLNKVLHQIALTQARCYPPAKAYVARRQQEGKTSKEALRALKRYIVRAIWHLWQRCLALRQPSAAMAAA

SEQ ID NO: 100850 - protein, 475 aa, unidentified
MVKLKEIFLEKINEKKDLNKREKKLFVGVDIGRLKNQVAFLSKDRNADLRKREKVENSFWGFMKLLEYIEELIAQESITMENVIIGIESTGHYWKNLYNFFLEKNIEVVMVKNKTVKLKREIKYPYKGKNDSLDSVCIALSLKDDDYIRIRKSNENYESLRILSKIKDERVKANTQNKNRIIKWLDKHNQTYLKTFVDPYCKTGIALLKCFPGEADIKEKTVDEIIEILRSNNSKNKLQYRKISEYYELLIDILNNIKEIPIGARKEIENLIRLFEDTENYLETLQKDIDELSNEMELPVERFSRLKGLGKNEILDLISEIGMIENYKTSKHLQAYCGLRVIAYKSGEYQIKKPKISKAGNRKARRILFYMALILIARNPDWRKLFAYYLSYNRENQKSKKEMLIAVASKLCRTIFGMLKNDTEFDRKLLFRGLDFSKCNKERFINEYVGEKRNWVITDEELEELFGKSNTKKLF

SEQ ID NO: 100851 - protein, 330 aa, unidentified
MKKYDDVVGIDVSKLTIDAHMYKRSIHQVFSNTSKGYKALVKWLNKNLEGQCYFLCFENTGHYSTNLSIYLSQNDMDYVEESPLAIKRSAGIVRGKTDRLDSEMIARYAWLHKEELVLSTPKEKDIQEIGRLLSLRDQLVRDRTGKMSTLKEAQSLLKSPSTDSCCKIATKTIAYLTKQIAALEDRIKILMQSEEGLDKNFKLLNTIKGVGLILASQLIYHTNNFQRFDGWRQFSSYCGVAPFSHSSGTSIKRRNKIHHIGDRKMKTLLTMASVSAIQCDSELKLYYQRRLAEGKPKLVALNNVRNKILSRAFSVIKRGTPYVELQQFAA

SEQ ID NO: 100852 - protein, 344 aa, unidentified
MEFYAGIDVSLKDSSVCVVDATGRIVREAKVASEPQALVAWFRGLGLEVTRIGLEAGPLSQWLHAGLSEAGLEAVLLETRHVKAALSAMVVKTDRKDARGIAQLLRMGWFRPVHRKTVDAQEVRALLVGRKLLQSKLRDVELSIRGILRGFGLKVGEVTKAKFAARVRELAAGQAMLETVTEAMLTARESLLAEFMALHRRMLALARADAVCRRLMAVPGVGALVAITFRTAVDDPGRFHSSKAVGAHFGLTPKRYQSGETDVAGGISKIGDAMVRTALYEAANAVLSRPVRFSGLKRWALEVAQRRGLKRAKVALARKLACILHRMWLDGTEFRWGKKTTAAA

SEQ ID NO: 100853 - protein, 369 aa, unidentified
MQESTMFVGLDVHKDSIAVALAPAGQGEVRAYGDIAGNLEAVDKMIRRLRQSHEKLDFVYEAGPCGYALHRHLTSKGLPCAVVAPSMIPRRPGDRIKTDRRDAVSLAKLHRAGELTAVHVPDPQDEAVRDLTRAREDAVLAHKRARQQFAALLLRQNIRYSGKRAWTQGYKNWIARITMPQPVQQIVFQEYMNAIDETNQRVERITEQIRLALDAWRMAPVARALQALKGVSLIASASIVAELGDLTRFDHPRQLMAFLGLVPSQYSSGPRQRFGSITKTGNSHARRMLVEAAWAYRFSARVARGLSERQENLPQAARDIAWRAQLRLCKKYRRLVAKGKIKQVVTTAIARELLGFMWAIAKEVTPLAA

SEQ ID NO: 100854 - protein, 359 aa, unidentified
MEKRVTKQADMLKDKKFSKHDRLYVGIDVHKLNHHVAFWLNGKIIQTFVMPADNFKVAQMLAPCKTALRKVVYEAGPTGFHLARFLQSCDVPVEVIAPSEVPETRSSKAKTDRLDCKKLATYSATGLLKSVSIPSQKQEVDRQLSRLRDQLVAKRKRVKQQIKSLLLQYGIAEPEGLKNFSIAGIEALKNLEVCDELLFCIGSLTDQLAYFDTALKHVEKRLNDLFKHSEHKQAFTIVTSHPGIGDITARQFVLEVHTPQRFNKPAEIAGYLGLCPKVTQSGQKRKDGSVVMTSKATLRANLIESSWAWIRKDRHAYAVFLRLLHNTGQVKKAIVAMARRLAIHLWKMLCKQEYYRAAA

SEQ ID NO: 100855 - protein, 361 aa, unidentified
MPMPMPMPMPAVPSPTAPLKYVVGIDIAKDTFVACFGRIEASQQLHFGKETTFDNTLAGFSALLAWSARQQAAPAPLWFVVEATGVYYEALAYFLADNAQALSVLLPNKVKHFAQSTELKSKTDQLDARLLCRLGLERALPAWQPPTPALRQLRALARERARLSDQGGRLKTRRHAYQHSYQPDARTLERLAAQQQLIVQQLKAVDQDLAALLAAEPELARKLAHLTSVPGIGLTTAIVVVAETNGFILVENERQLASYAGLDVVQRQSGLSALATRISRRGNVRLRTALYLPAVSSLRYNPQQKVFYARLRARQPSGKPGVIAVMRKLLLLCYSLWKNDRPYDPHFHPARVAEKEIAPAA

SEQ ID NO: 100856 - protein, 438 aa, unidentified
MEKIRKNTGGIDIGSQKIFVYTENGNEVKSFLTFTEDFEQARDYLIQQKTESVAMEATGVYWYILYHILEEAGIDVWLVDGRETKQVPGRKTDVKDCQWIQQLHSHGLLNRCFVVEADIKDLRTYQRLREDHIQSAAMHINHMQKSLIGMNIRLDEALDQVHGASGMAMIEAILKGERNKENLLKLCHSSVIKNKKEEILKALNGRYTHSGLFALKQAYDAYNFYQQQISECDKMLDMIIKKMATKQTDDGDNEQKSHAPRKPIRHNKPEIDDLWKCLIKIFGGKDPTVLGGITDYTWMQLLSETGTDLSRWETEKKYTSWLGLAPGQHSSGKMKRNKSKAGHPRAGQIYRKIAQSLITSKHIALGAFGRKLRARKGSAVAIKAVARKLAELYWRIMVKGLDYVEKGIKKYEEQLLAQRHKSLARLAKELNVEISYNV

SEQ ID NO: 100857 - protein, 349 aa, unidentified
MIYVGIDIAKLNHFAAAVSSDGEILIEPFKFTNDYDGFYLLLSKLAPLDQNSIIIGLESTAHYGDNLVRFLISKDFKVCVLNPIQTSFMRKNNVRKTKTDKVDTFVIAKTLMMQDSLRFLTLEDLDYLELKELGRFRQKLVKQRTRLKIQLTSYVDQVFPELQYFFKSGLHQHSVYALLKEAPTPNAIASMHMTHLAHILEVASHGHFGKDKARDLRVLAQKSVGVNDSSLSIQITHTIEQIELLDSQLFHTELEMANLVTCLHSVIMTIPGIGFVNGGLILGEIGDIHRFSEPKKLLAFAGLDPSVHQSGNFQAKKTRMSKRGSRVLRYALMNAAHNVVKNNTTFKDL

SEQ ID NO: 100858 - protein, 456 aa, unidentified
MIRPPGIRHARHGPAEATKGKGQAVAAVMIGVDPHKGSHTAVAIDQREAVLGQVRVRASAAQAERLLAWAAAWPQRTWAVEGAAGMGHLLAQQLLAAGEPVLDVQPKLGARVRLLATGATHKNDPNDARSVAIAALRSAAPMPVRPDDHAAVLKVWSKRHKDLSRARNQVVCRLHAVLCDLIPGGVSKEISAPGAARVLDRVRPSGAVQAARHELAAEFLADLRRIDAQLRQTRKTLATAVRACGTTLTEVFGVGPVIAATVIGDVRDISRFPGRDCFAAYNGTAPDEVSSGGRVIYRLSLRGNRRLNHAIHMAAITQIRHRHSRGRAYYEKKLAEGKTHKEALRALKRQISNTFYQHLKADAARAAGSQGPGGHPGNGSVARAAGSHPEHRLFGPATPGPAPTLRSRSVTAQAARRAPQGQAPGLPALPAPRGRRGSGVTGRPQAVARSAMRKHP

SEQ ID NO: 100859 - protein, 379 aa, unidentified
MTTSPTATSGEQTLHAALELSKNSWLLAIQFPGRDNPSLHPIRGGDTDGLMAKLDAARDRLAKVSGQVPKVSLCYEAGYDGFWLARFLEQHGIECLVMEPASLQVNRRARRVKTDRIDVEKLLHTLIAWGRGERHVCSMVVIPSVEAEDLRRSHRERDRLVHERTAHINRIKGLLFGQGIRGINVKLRYKTLKPVNLVTGDGRPLPERLGREIVREIARLALVQEQIVEIERERDLAPTPCAATERKRHQLLCLNGIGEASASVLAREVYYRQFANRRQVGSYIGVTPSAYDSGESRRSQGISKAGNGLARRVMIQIAWLWVKHQPESELTKWFHRRTQAQSRRMRCVMIVALARKLAIALWRYLETGLIPEGAIFKAK

SEQ ID NO: 100860 - protein, 427 aa, unidentified
MNETQSNRVDEFRQFKSQIRGSREYLIVGLDIAKRKHHGFLGDANGKTILKGLIVENSAEGFGHLLSQVCFYMQRDGFSRVVFGLEPTSVYHKPLAEHLIEQGHLVVYATNEAIKKNRSLIDGRWDKNDTKDSANVADLVAQGKCHYYDLPDQRLRDLRSLLLLRKRLKKQLHSCRVRIRNNLVAQYFPELDLFWNNAEAENLAIVRWFLDPASIRQLTCERFIAQVSTHNGGLRQQRRLRHIWEAAGNSIGCRPGAAMQLEAGLLVDTLKSIQEQLDHVEKATQRLAEGFEEYGYLKSIPGFGPYVSAMTLAAIGNPHRFENRAQLIRLAGFDLCASRSGEKSSTAVPVISKKGKADLRYALYQAALVASSLTTHFRVHYNRLLEGRQREKGIRTKMLVKIAAKMLVIAWTLMKRKEPFNPAYIQA

SEQ ID NO: 100861 - protein, 377 aa, unidentified
MSKIRFVGLDVHADTIAIAVAEAGGEVRSQGIIPNRLESIRKMIGKLGPVGDLKCCYEAGPTGYVLYWQLTQLGVACELIAPSLIPTKAGDRVKTDRRDAEKLARCYRAGELTPVWVPDAAHEALRDLVRAREAAKKDQLRHRHRLGKFLLRHGKRPQDAGKAWTQKYLTWIRIHVHFEQPALEATLKYYREEVDHIAERIATLEQAIDEAVRQAPPEIRAVIEALQALRGVAQTTAATVVSELGSLSRFPNPSQLMGYSGLVSSEYTSGNRVQRGRITKSGNAHLRRVLLEAAWTYQHRPNVQGRVLRRQKSLALSEEAKRIAWKAQQRLHKRFAALTGRGKETNVAATAIARELLGFMWAIAVDAEAQFKLNKAA

SEQ ID NO: 100862 - protein, 423 aa, unidentified
MDVVGIDWAWDFHICYSIEKNKIYRIKDNEAGYRELLNEVSKEAVFVIEESFNRISDFLLSEGREVYLLPPKRSKEARGYHSNGIKTDSLDARSIALTYSEHPEYCIRARNNEEGRSFREQLRVYRYYKDEASRLKNKLHNELHDHFPEFVEVMGNWKKNKGKILLLSITDELKSLSIEEIHNYFKENQIAFTNSLRKKAKELKKREWHITKYTLMMVANAARHLLEVERGKQEMKNEMERNLKESKYRVILSLPGVGVVTGVALVAAFLNHEFGNYRNFQKYCGTVPIIIQSGNFRKCVMRKHCDRNLKGVLHMMALSAVNKGSWMKGYYARKIKEGKSFGHALRALANTLVKIAFAMLKSLKPYDEELFLSSRGNKSPQSNYTTKTSTLETEKKTNEKSSLPVSVAQTNCHLGTDSGRLSP

SEQ ID NO: 100863 - protein, 367 aa, unidentified
MEVQKKRYVGIDLAKKTMEGRILSETGKTVSNWNGKTDLKGRQRLMSILKTGDMVFIEACQLAFKIAREIKAQTDAQVYVLNPRKLHIIWQSVKKTDSEDALKLARMGLRFPVEELPIVPLPTEEEEKLREVVHELNSLKRQRTRSINRLHAIYTGAGITTLTKKHLKTGKARENSVKQLTERKYKEAVRIHQRLTILEEQIEEVEIEQASLVVNNDSAKYIMSITGVGVGFAAVFIAFVGNGERFSNSKQVANYSGLVPRVDQSGDKTYYGGIIKESNSAIRRVAVLGAWALTRSKHGGSLLEKYEKKAKERCKSVAIVMLARRMVELCYCLVKNRTYYDNGALVDENPKLKKLKAKIAKKEKKVA

SEQ ID NO: 100864 - protein, 341 aa, unidentified
MKCNVISIDLAKNIFQICALDEMRQVLFNKKVKRSELIHELRQFEPSLVVMEACYSSNPWGRRIEKLGHEVRLIPPFVVKPFVIGNKNDANDALAIAEASLRPKVRFVAVKSNEQQDIQSLQRIAERMIKVRTGDVNQLRGLLSEYGTVVGLGVPTLMKAIPDIIEDASNELTATARTFVRRLYRNIQRTTIQIDEIKTQLNALVKDKDEYKLLLTVPGVGPVIAAALMAAVGDANAFKNGRQLAAWIGLTPSQYASGEINRMGKITKRGNSTLRKYLIHGARTVLNWCDKKDDVLSCWLKKLKERMHGCKAVVALANKLARIIWSVLSSKQPFNIAKACA

SEQ ID NO: 100865 - protein, 341 aa, unidentified
MDTVSLIGIDLGKHCFHLHGQDASGRMVFRKKLTRSQMFTLLGNFPRCIVVMEACAGAHWIARRLQALGHEAKLISPQFVKPFRQGNKNDFADAQAICEAAARSSMRFVSPHNEAQQIVSALHRVRERLVRDRTGTINQIHAFLLEFGISLPRGMAVIRRLPAVLEAESLPPRLVVVLERLQAHFKYLDEQIHQLERELLTQLHEDERSERLLEIPGIGPMTASVLMSELGDAQQYGSARQFAASVGLVPRQYSTGGKPTLLGISKRGDKELRRLLVQCARAVMQRIEHRTDALGVWIRSLLARRHSNVVACALANKLARIAWAILAKGTHYRSIEAVPSV

SEQ ID NO: 100866 - protein, 431 aa, unidentified
MLKINPLSTLYVGIDVSSKSNYVCALDFYKNKYINSSFANNQPGAEELALKILECLNQHPDLTMVVAALESTSVYSIHIANYLSSCEELMRFKPYVFVLNPKCTANYKKSYIGLGKSDPIDAFVIADYARAGNIESEPWRGSQFLALKRLTRHRLHLVECMTREKTYLISNLYLKFSELQMLEGDDQPFCDIYGATSSSVLMEYFSPEEILDSSEEDLIAFLAKKSRNRIKDISKTADLLKKAARDSYRLDKALYEPLNVSIASSFNCIETFKREIKVIDNAIEKEIKGLNPNAFIILQSIDGIGPVFAGGIIAEIGDITAFHSSDALAKYAGLTWKSNQSGDFDGEDTPMIKAGNRYLRYYLGEAANSMRKHNVEYGTYYRKKYNEVPKHQHKRALALTSRKFVRLVYGLLARNQLYSGVSLDTSIKDSN

SEQ ID NO: 100867 - protein, 375 aa, unidentified
MRQDRAGEVIASYYGIDLHKDQITWHCIHKTGNGETARENGRISIDRILEELVPMLSVNDSYLIVEASGSSFFFYSLVESHCKKALVVNPVAFRELYMTGKKTDRIDAKKLAERLKYHIECGDTESGFPEVFVPDAEIVKIRKMVTAYELVVKQGTQIKNQAKSVFRSKLMSVAVDIMEKGLEDALKDKRIDEADRSILIMLKRIYDTLMEEKEEIKKQILLLGSFRFREEVKLLMSIPGISLMSATVFMADICTVERFKSEKKMTSYLASVGTVDSSGGITRNGGLSRRGRRTSYRYILQGLEHIVNGNKDFQKFKERHALTRSNKVRAAIVRKTFVSMYFMLKNKETYRYLNEAIYTRKIRDLKKYGIDFKCA

SEQ ID NO: 100868 - protein, 386 aa, unidentified
MEGETFTPREYDVFAGLDVDKKSIAATFSSQQGFIRSLHMPYSIDYLLNHVRKHFGDQKVAFVYEAGPTGYGLYDGLVAQGYRCLVAAPSMIPRAPGQRVKTNRLDSRGLSESLRGGQLKSIHVPSPIYRELRHLTQLRDTVVREAAANKQRIKALLLLEGIGFPPATAGRQWTLRVKAQLRKLRCSRTVRFKLDQLLDSLEFCEKQVVSSTKEIRRFCKEDVELFQSIEYLMSIPGIGWIVASQLLARMGDWREIDNVRQLGSFLGLVPTENSTGDSVDRGSITRAGDGRLRSKMIQAAWSAIRQDGELREFYRSVCQRNPRGKGARIAIVAVARKLSTRIYAVLKKQRPYIVRKQVHSAPLTQEETSPQGTTRRCAEPGETDNS

SEQ ID NO: 100869 - protein, 382 aa, unidentified
MTGTEPHAWGTGLMDDIIFVGLDVHKATVCIAVAEGGRGGDVRQLGVFENRPEILNKVVSRLSKGGRRLSFCYEAGPCGYGLHRLLTGYGHECVVIAPSLIPMKAGDRVKTDRRDALMLAKLHRAGELTAIWIPDAAHEAMRDLVRARATAVRVLVKARQHLQGFLLRHDRIYRGARAWTLAYRRWLSTVRFEHPAQQIVLQDYIHAVQEAETRRDRLTQQIEELLPNWSMAPVVAALQSMRGVALVVAVTVVAEVGDFRRFANPRQLMAYLGLVPSEHSSGSSVRRGGITKAGNALARRVLIEGAWTYRMSARVSRKLHDRLEGLPAAVRDIAWKAQLRLCARYRRLAATGRPKVVVTTAIAREMVGFIWAIARLAQPALV

SEQ ID NO: 100870 - protein, 613 aa, unidentified
MQQPQQVEDEDHERVWERVAAIDVAKASGVVCTRVPDEGRPGRRRTLVWSVTAVMGAVTELGDHLRCEGIEVVTLESTGEYWRIWHAVLEAAGLTVQLVNARSVRNVPGRAKTDKKDAVWLAKLTERGLLQPSFVPPHDIRRLREYTRLRADLVHDRTRCWARLEKLLERALIKVSSVASTLDTRSVRAMIEALIAGERSPRILADLAVGRLRAKRAELAEALDGRFEDHHGELARILLDQIDALTRQITALEEKAGGLIAQIPAAWGVDADGATGPAAGAGPDAAALPAVARLDEITGCGTIAAQAVIAEIGLDMTVFGTPARLVSWAKRCPQTRQSGKKNTAGKVPKGSPWLNGVLGEIAASAARTDTFLGERYRRLARRRGKRKALAAIARSILVIIFHLLADPAARFRDLGPDHYDNRISRERKISNHVRQLQSLGLTVTIEEAAALPAWSKIARGGFGARLILLPVPDRCRFCERAARVKGRAAPAERRRRLPLTRGAREPDHVGGRGRGAVGCAGWVVRFGVAGLLVAGRAQPWRPGQARGQPALPWPAGHSLVSRRHDDGLGVPRLRGMRPLSLKRPSARPLRAGSALTAARRELAAVVPHLRAWL

SEQ ID NO: 100871 - protein, 356 aa, unidentified
METAYDGRQVVGMDLHRRRSVLVRMTGDGRRLATARIINSPVELRSQIARAGKHPEVVLEATYGWYWAAGTLAAAGAEVHLAHPPGVKAFTYRRVKNDERDAADLADLLRMGRLAEAWIAPPEIRELRELTRYRIKLVHLRTSCKDQVHAVLAKLGVPVTCSDIFGKAGPAWLDALGLPQPYAGKVTSLRQIIGVLDAGITMLGEVIADLLAGHQGYQVIQQLPGIGPVLAAVIIAEIGEVTRFKNPAQLCPWAGLTPRHRESGTKITRGRVTKQGSRMLRWALIEAIQRAGSDSVTGAVKAAIIARRGKETRNIAKVAAARKLLTLIYYGLRDGQIRCLPAPAPEPPVTTPARAA

SEQ ID NO: 100872 - protein, 330 aa, unidentified
MTTNPPQIVFNHILAFEVSKEQLLVHTLPADEQCAIDNKPQAVRRLIKAEIKRNRNKQLGQMLVVCEATGGYERHVLDAAVEMGLSVHRAHGTRVRHFGGYCGLLAKTDPIDARLLAQYGLKTENIRLYSPPPPETAALRALHARRTEIQQMMIAETGRLDHAQHKNVLKSLRDHIASLKAALAAIEADIAQLVEKCEVLRKKVALMQTVIGIGPISAMVVLAYLPDIGRLTRGQAARLAGLAPINNDSGKKRGARHVEAGRTAIRRALYMAAGVAMRTNPVVKAFADRLRGKGYPFKYVVTAVMRKLVVILNAVLRDGQSWRGAQVALV

SEQ ID NO: 100873 - protein, 431 aa, unidentified
MDDITRFDRFCKLRSQIRGSDKHLIVGIDIAKDKHHAFFGTAKGQTLWRRLIFTNDLVGYLRLIEQVDTLMVQHQLEKIVFGLEPTSNYHKPLAHWLTGQDHLVVLVAGKAVKDNRELLNGRWDKNDTKDSANVADLISQGKCLFYENPATNILSLRNLISVRRQLKKETHRLRMRIRNGLLAKYFPEMDCYWGKCIAENLAIVRWYLDPRKIAETDFDVFVRHVTTTDRGVSQKNRLRKIYDAAGYSIGLPVDSVARYGAKMLVERFKAVENELDQVMDKINTLCRNLPSYQLLLTMPGFGPYIAPLVLSVLANPMRFKSRKQVIRLAGLDLNASRSGKKSQQSVPVISKKGDAELRYGLYQAALIASYHNDAFRRIYNRMLEGRQGERGIKTKARVKIAAKMLVIAWTMLKKNEPFNPKFLSAEPVMAR

SEQ ID NO: 100874 - protein, 405 aa, unidentified
MAVILDQQDIDVFIGLDVGKSGHHAVALNRAGKKLFDKALPNDEARLREILDSLSGHGRILLVVDQPATIGALPVAVAQAFGAAVGYLPGLAMRRIADLHPGQAKTDARDAAIIAEAARSMPHTLRTIALDDETLAELGVLCGFDDDLAAQITATSNRIRGLLTQIHPALERAVGPHLDHPAVADLLTRYPTPAALKTAGRGHVKTRLKKHAPRAAERLTDAIFTALGEQTVVVVGTGASGIVLPKLAEQLLSLRHQRDDIAAQVEALVEAHPLHKVLTSMPGIGVRTCARILTEVTGKHFASAAHLASYAGIAPVTRRSGTSIRGEHSSQRGNKKLKRALFLSAFAALHHPPSRAYYDRKRAAGKRHNQALIALARRRSDVLFAMLRDGTLYQDPEPRNLPSAA

SEQ ID NO: 100875 - protein, 455 aa, unidentified
MRRKKASTKRHVNSGFPTIHPNAAGLDIGSREHYAAVPADRATPSVRSFGCTTSELKEMAAWLKSCGVDTVAMEATGVYWVPVYEVLEDCGIEAFLFDSRQTRNVRGRKSDVLDCQWSQKLHSYGLLTRAFRPAKEIASMRSYWRQRGSIVEECSRQIHLMHKALEQMNVQLHKVISDVTGVTGMRILRAIVGGERDRYALARLRDRRVKATEEEVARALEGTYREEHMFALKQALESYDFFQEQLVACDHKLEGYLAQLPSASNTPAVPKASRYRRKNQPHFDLRSELARIAGVDVCQIEGIEALTAQTLISECGIDMTPFPSSKNFASWLGLCPNNRKTGGRIRSRRTRRVTNRAADAFRVAAQSLHRSDSALGSFYRQMKARHGAGKATTATAHKLARLYYRLMSHGETYFTQTQAQYEALRRERDLRALHRRARRLGLQLLNTSTGELIEA

SEQ ID NO: 100876 - protein, 342 aa, unidentified
MYDTMIGVDLAKRVFHLHVASMTGHVRDRKKLTPLQFRRYMADAPNCVVVFEACGSAHYWARQMMELGHEARIIPAQYVKPFVKRHKNDRNDAEAIVVAAQRPEMHFTTVKSEQQQARAVVFRARERLVNQRTELVNALRSTLYEYGHTFPVGFGHVKRIAELVEAPDCDLPALVVTECQDLVAQIAEKTERITAKDKLIKQLAKESAVARRLQTMPGVGPMTALAVEAFAPDMEQFSCGRDFAAWLGLVPLQKSTGGKSRLGKLSKMGQVDIRRLLIIGAMSRIIGRARHTIPDDSWLGRKVAMKPKMLVGISLANKMARQIWAMLTKNEDYRDPALVGAA

SEQ ID NO: 100877 - protein, 404 aa, unidentified
MIFVGIDWSETHHDACVLDVDGRVLAKGRVPEGVDGVGKLHEMMGAHAEDPSEVVVGIELDRGLLVGALVAAGYAVHAINPLSVDRYRDRHRTSGAKSDPGDAKVLADLVRTDRHLHRGVAGDTELAEAMKVLARAHQSLIWSRQRQLNQLRNALREFYPAALEAFGTDLASTDALAVLEVAPTPAEGQALSTTRIVAALKRGGRRRRITERAEEIKAALRSSQLEAPAVLARAYGDVVRSIVRIVAEMTAQIESLAGQLEASFEVHPDAEILRSLPGLGVVLGARVLAEFGDDPFRYGDPKAGKNYAGTSPITKASGRSKVALARFARNRRLADALQMWAFCSLTSSPGARRYYDAHRAKGHTHQRALRSLANRWVGILHGCLHHRERYSEATAWPATIEDAA

SEQ ID NO: 100878 - protein, 365 aa, unidentified
MQKAELSVKADSENYLGGSSKTMYYIGLDVHKRTISYCVKDAAGRVHMEGKVGATRRELDAWIKTLPQPRTIAMEATIFTGWIYDHLLPHAEAVKVAHPLMLRAIAAAKRKNDRIDASKIADCLRCDFLPECHMASTEIRDRRRTLRYRELLVKQMVQMKNRVSGLLLEKGVTHTKRRLHKVGYFAELMAGSEEIDHSIRPLLKLSREHIVRAQKLDYALVSSLERDPMLAERLRRLRTVPGVGPITALTWALEMGDVARFRSIKQAISYCGLCGAEKSSADKVMRTPISKQRNKHVQHVLIEAAKLAPRLCHELALLHEKEMQKGNRNRATLAVARKLVCWMLAVERREQDFVPAEEFGGKAAA

SEQ ID NO: 100879 - protein, 338 aa, unidentified
MALYCGIDLHSRDSWLAILDEGLKVVQEAKVGNDLEAILHVLKPYREDLEGVAVESTFNWYWLVDGLMDAGHCVHLTNTWAVKQYEGLKHTDDRHDARWLAHLLALGILPEGYIYPKEERSARDLLRRRAFLVRKRTSFLLAMRGAFECRTGLRINSNDLKKWKAKDVEAHMEDPTEAFSITCLLEPMHALSAQIKKIEKGALARGRLRPEFAPLETVWGIGKILALTIMYEVGDVTRFRKVGNFTSYCRLVNTARLSAGKRKGSGNPRNGNPHLSWAFSEAAHHAVRHYPEAQKFYQRKRTKTNGIIAIRALAHKLARASYHVMRDHVDFDPEKTFA

SEQ ID NO: 100880 - protein, 409 aa, unidentified
MEVVHARCAGLDVHKKSVYGCVICWEANGEKRQEKRSFGTVTADLLRLADWLREHGVTHVVMEATGVYWRPVWAMLEGQFELLLVNPHHVKAIPGRKTDAKDCEWIAELLQHGLVRGSFVPPTEIQDLRDLTRYRVELTQSQARMANRIQKLLEQANIKLSSVASDTLGVSGLKMIEAIIAGEQDPEQLADLAQKRLREKIPELRLALEGRVRDHHRFLLKEFLEQWRALGARIRRMEEEIDRRMVPFEDAVRLWQSIPGMERLTAYNLVAEIGVNMAQFPSAQHLASWAGLCPGNNESAGKRMSGTTRDGNKWLRRTLCQGAWAVTRKKDGYLASQFRRVAARRGMKRAVMAVAHSMLIIAYTMLKTGRTYHELGGNYLERINADQLQRYYVKRLQKLGLTVTVAPAA

SEQ ID NO: 100881 - protein, 365 aa, unidentified
MKKSSKKQSEKTMNDVVAIGIDLSDRTGKFYAIDEEGKKIAEGTIALRTPELEKWAQSIPATVIAIEAGTHSPWISRLLARCGHEVIVANPVKVGLITKNVQKTDPVDAEYLARLARFDRELLFPIQHRGEQAQIDLQVIRTRDIAVKMRSTAISHVRGAVKSLGGRLSKCSTEAFVNTARKEVPEALKTALDPMFDQIDQLTKTINGYGREIEKLVEQRYPEVERVAQIKGVAALTGLAYILVLEDAKRFAESRSVGAYLGLTSKKDQSGDSDPQRGITKAGDRLLRRLLVQSAHYIQGPFGVDSDLRRHGEKIAARGGKRAKKRATIAVARKLSVLMHRLWVSGETYEPLRNSTDAAEATKAA

SEQ ID NO: 100882 - protein, 396 aa, unidentified
MLYLAIDQHRKQLTVNLRNEAGDVILKRQVSTEWARVREFLEEVRNRSVPEGGFVAIVEVCGFNDWFLKLLADYGCKEVVLVQPEKRSKNKTDRRDANALGELLWTNRQRLLAGKKVQNVRQIVPPSPRDAEDRQLTALRQRVGRLRTRAINRVQHLLLKHNLQQECPTKGLQTQAAKRWLAKLPLGRIDRMELDQMLAQWQLLDQQLKELEAEIVPRQAKSLTAPIIATIPGAGAYGSLALASRIGSIGRFPRARSLANYFGLTPGCRNSGDATRRLGSITKEGSAIARFILAQMVLHVLRRDARMKEWFVRIKRRRGAKIARVAAMRRLATIIWHMLKQQQPYRPGGKREKGGGPEDACLLPDRRAFLEALQERARGGKQKGCPGLTTEAAARS

SEQ ID NO: 100883 - protein, 336 aa, unidentified
MNLTQNDRLKQVTSDTLIVGVDVGSQTHFCRAFDWRGFELSRRVFKFSNTGMGFLTFLRWTEEIMNKTEMKKVIVGCEPTGCYWLTFQKFLQDHDVQLVTVNPFTVNRSMELDDNSPEKSDLKDPKTIALLVKDGRFSTSYLPSGVYAEIREASVCRDQIMKQNVRLSNQIQGWIQKFFPEYFECYADWDSTSGLMLLREAPLPPDILKIGAGGINQIWRDAKVRVAGIKRAQTLVEAAQNSVGLEAGEAARLEIWVLVNDYILKAEQLKRLDEYLEEKVKEVPNVEKLLAIKGVGMSTVIGFIAEVGDIGRFTDPKQIQKLAGLEIVKKGTAKNQ

SEQ ID NO: 100884 - protein, 322 aa, unidentified
MDNSTHLGLDVHKDTIAVAILRPGDLSVDQRVIANTPEALRKLVARCGDPASLLACYEAGPTGYDTHRLLTSLGVRCDVIAPALTPRRVGLRVKTDRFDARNLARLHRAGELTAIRIPTPTEEALRELMRTREGLKADCRIAQQRIRSFLLRQGRRYPQARSGWMESFDRWLRSQRFAEPAAQTTFLHLLAAYSVRRAQLDSMDAEIISAAKMPELAGPVTLLRCFRGIDTLSAVTLVTETGDFRRFPSAACFMAFTGLVPSEHSSGLSFRHGSITKTGNAGGSRLVLPPPPLCWPGIGQAAGKSAPGDRCLLVGRPVSSGA

SEQ ID NO: 100885 - protein, 349 aa, unidentified
MAAASVITLGVDTHKDLHVAVTLDALGRRLGIASFPTDDAHHADLWQWVAGFGQLAQAGVEGTGSYGYRLAQFLTGRGITVFEVNRPDRAARRRRGKSDPVDAENAARAVLSGDATATPKTRTGPAGQLRALLVARRSATKSRTQAELQLRSLILELDDDQRAQLDRRRTDHLAAACATLTGADGISLALASLARRWQFLDTEVRANTAQVEAIVRQTAPRLQNQPGIGPITAAQLLATAGDNPDRLSSEAAFAALCGVSPVEHSSGKTQRHRLNLGGDRAANSALWTIANNRLMHDPRIREYAARRTALGSSRKEILRLLKRYIARQVFTEIRRALTPPKINHTRDLT

SEQ ID NO: 100886 - protein, 360 aa, unidentified
MIVQGTSVGLDVHALSVVAHAVDEETGKVARARLCPDHGEVLGWLHQLRAPVRVTYEAGPTGFGLARAITGAGMECLVAAPSKLQRPAGDRVKTDARDAAHLARLLRLGEITAVRVPEREIEAVRDLVRAREDARADLMRVRHRLSKLLLRQGIVYSGGTPWTCVHEEWLRRHRFDDIHLKAAFDHSFDAVLAATAARDRLDEQIMVVAASPRFADPVNRLGCLRGISALTGLALTVEIGDWSRCSGSSIGAYVGLVPCEYCSGNSRVQGSITKAGNTHVRRLLIESAWHHRKSYSTSGPTLRARWAKVDPALRARGHAGNRRLNKRWRSFTERGKNPLVANVAIARELAGWCWSLATMH

SEQ ID NO: 100887 - protein, 340 aa, unidentified
MPLYGGIDLHANNSVIVLLNEQDEVIYRKRLPNELPTILGQLAPYNTEMQGLVVESTYNWYWLVDGLMEADYRVHLANPAAMQQYSGLKYTDDHSDARWLAHLLRLGVLPEGYIYPKAARAVRDLLRKRAHLVRQHTANVLSVQNIMARNTGARFSVKQIQELTKQELTTLLAEETQVLAVTSSLVVLDCLRQQIKTLEQTVHKRLHHTPSYEQLLTVQGIGTILAQTIALETGAISRFPTVGNYASYCRCVDSKKISNGKRKGTGNVKNGNPYLAWAYMEAAQFAMRFQPAAQRFYQRKLAKSRNNTVLARKAVAHKLSRACYYIMRDLVPFEATKAFG

SEQ ID NO: 100888 - protein, 345 aa, unidentified
MEQISRIGMDTSKHIFQLHGVNAAEQPVLRKKLRRKEMFAFLETLAPTVIAIEACGASHHCARVLQSFGHSVKLIAPQLVKPYLKRGKNDAADAEALCEAMSRPTMRFVPVKTAEQQAALMLVGVRDRLIRNRTQLSNAIRGYAGEFGFTAAKGKAHLYPLLERIQADETLPALARELFAAQAAEYAQLQAQIDQIEAKLMAWHRADECSRRLTKIPGVGPIGAVLLKMKTPEPELFRSGRQFAAWIGLTPKDHSTAGKVRLGVITRAGDEGLRSVLVVGATAVIQHAQRGGRPSPWLSQLLKRKPPKLAAVALANKIARIAWKLMVTGEHYSAKAASAALAGAG

SEQ ID NO: 100889 - protein, 393 aa, unidentified
MKKHTLYVGLDVHAEMIAIAVADEGRDGEVRSLGRIPNDRASIGKLIKKLGGSKQLRMCYEAGPCGYVLYWQLVELGVECEVIAPTLVPVKAGDRVKTDKRDAIKLARCYRAGELTPVWVPDRAHEALRDLVRAREAAKHDQRRARHRVGKFLLRHGRRRQQKTKAWGATHMDWLRMQTFDEYALQATMTDYLTEVEHASERLKLLEAAIDQAVEEMPEESRALVQGLQALRGVAKLTAVTVVAELGRLSRFDKPSELMGYSGAVPSENSTGGPGKERRGKITKTGNGHLRRVLVESAWSYRHPPKLRGDLRRRQQGLSDEVQAIAWKAQHRLHNRYRHLRGRSKESQKVVTAIGRELLGFIWAIGVQVEKEQKRESQPQPSRRYQLKRKKAA

SEQ ID NO: 100890 - protein, 396 aa, unidentified
MPVGGPISELPAAALDSGGVRNLPRRREPLFVGWDWASTAHDVTVIDSAGERVHRMAIPHTEDGIARAVAKLADYGDPGELPVAIEATRGLVVDRLLGVGHPVIPVHPNAFHAVRPRWGAARAKNDPGDSFKLADYARTDIHRLPVLAPTLPETLELQALTRQRDCQLALRFAAVSQLAALLDQHWPGGKTIFALLHSPIALDFLDRYPKPQAAASLTPARIEAFCRRRGYSGRRSGAELLDRLRSAPISASRLGEPVVAQMIRGQVAVVRALQAGIDALDIVIAEKATAHPYAGLLADLPRIGTLNLAQIIGEVGPILERATSFDQLAAETGLAPVTRSSGKTHTVAFRYATNRRARQALHTWLDNSRRSSDWAQQRYAAARARGQRHPHAAEAF

SEQ ID NO: 100891 - protein, 342 aa, unidentified
MGEVTIIGVDLAKNVFQVHGAAADGSVVYRKKLSRPQFARFMADQPPCLVAMEACASAHHWAREMARHGHEVRLIAPHYVKPFLKRQKNDAADAEAIVEAALRPTMRFVEPKSADQQARAVAFRTREQLVKQRTEAVNALRSHLYEFGHIAPEGIGYLPRLAKVVVDLSTDLPELARDICRMLLDQIAQLTGRIDALKARIAAMSQEADLPRQLQTMPGVGPITALAVETFAPPMEQFRRGRDFAAWLGLVPRQHSSGGKQKLGKTSKMGQRDIRRLLVIGATAVIRWAARRGAPKGSWLARMLERKPIPVVAVALANKMARGIWAMLTRGESYRGPVLIGA

SEQ ID NO: 100892 - protein, 420 aa, unidentified
MDVVVERCAGLDVHRDDVVATVRVPGEGRRRWDQQTRTFRATLAGLADLAEWLAASAVTLVGMEATGVYWKTVFQALEERFECWLLNAQHLRHVPGRKTDVKDSEWICQLVQHGLVRPSFVPPPEIRRLRDLTRLRKAQINERARSIQRLEKVLQDAGIKLSSVASATYSKSARAMLEALLAGVSDPHQLAELSKARMRSKIPQLREALQSRFQIEHHGIMVAQLLAHIDTLDAAIENLTERIELVLTPHADIIELLCTIPGVQAHAAQVLIAECGLDMTLFPTVSHFASWAGVCPGHHESAGRRRSGRTRPGPRWLTDQLTECARAAVRTKGTYLAAHFAQLRGRRGEPKAIGAIRHDLQVAYYHIVRDQVPFRELGPDWQRKRYSPEHRARRLQRQLEALGYAVTLDQVDQPQTEQAA

SEQ ID NO: 100893 - protein, 363 aa, unidentified
MHYVNNTELSSHEETRSQFNGGTGAIKLGIDVHQDFYVVVMQEGGSNPKPPQRFGREAFLHWAAKLARSLAEVHAVYEACGFGFALQRKLSALGIGCYVVCPQKLDEQNKRVKTDGLDAKALCLKLDRFVQGNRDALAIVRVPTEEEEQLRAIHRQREQLVKARKGLEAQGRSLMVNHGLEPVQNWWKPRTFAALQVSDWIKELLQNSQPILVALQQKIVALTVQLQNAASPDQPRGLGKMTSVVIDREIGDWKRFNNRRQIASYTGLCPGEYSSGNTRLQSCVTKHGNPRLRAALVELAWRLVRFQPNYKPIRKWNATLRKGALATGAARKKAIVAVARQLAVDLWRIKTGRLRPEELGLIK

SEQ ID NO: 100894 - protein, 344 aa, unidentified
MILIGVDPHKSSHTAVAVDAAGHQVAQRRFVVNAGTFRQLMGWCEQWPDRRFAIEGAGGLGRSLAQQLAAAGENVVDVPSTLSARARLLATGGDRKTDAKDALHVAQVALFRPDLRPVTREDQTTILRLLTERRDDLVHERTRVLNRLHAVLRDLLPGGAPTALSADKAAALMKGIRPLTATDNCRRDIARDLLADLRRLDRQVKDNEAEMREAVAATRTTLTALPGLGTVLAAKVIGHIGDISRFPTEHHFASYTGSAPLDASSGNNVRHRLNTGGNRALNSVLHTIAVCQIRGGGRGQDYYLRKISEGKTPSEARRALKRRLSNVVYRIMKRDHRNHLAQAA

SEQ ID NO: 100895 - protein, 347 aa, unidentified
MDHYAGIDVSLECSSVCVVDGQGKILREARVASEPEALIAWFRSLGFGLARIGLEAGPLSQWLFAAMKAAGLAVELLETRHVRKAFEAMPVKSDRNDARGIAQLMRLGWFRPVHCKSMGAQEIRAMLTARKLVQSKLRDVENSLRGLLRGFGLKVGDTTARRFAGRIRELVVGHANLERIAEALLAVRDVLLREFKGFEKQVRMLARSDTKARLLMTTPCVGPIVALTYASAIDDPTRFKSSKRVGAHFGLTPKKYQSGETDYTGRISKIGDATVRAALYEAAHLMLTKPIKGCSELKSWGMRIAKRAGMSKAKVALARRLAVILHRMLVDAKPFNPTAKATQVAAA

SEQ ID NO: 100896 - protein, 328 aa, unidentified
MFYLGIDVAKAKLDCCLLLDPESTKRKSKVVANTKAGFITLLQWLGGKGVSLPQLHAVMEGTGVYHEQAALALADAGVTVSIVNPAQIRDFGRGLAVRTKTDGVDSFVLARYGALLKPATWQPPAPESRVLRALLARREAVAQDLQRELNRLEKADATETPVLIRQSIDGSIAFLRKQLAQLQENIDHHIDSHPNLRCDMDLLTSIPAVGPQTASNLLAIVHLHRFDSAEQLAAYLGLVPVERQSGSSLLGRARLSKAGPPRIRAVLYMAAIVATKYNPHVKAVYDRLLARGKAKKAALGAAMRKIVHLCFGVLNTRICYQADYVKNG

SEQ ID NO: 100897 - protein, 412 aa, unidentified
MAITCGIDWAENHHDVALVDEAGQLVAKRRVNDDAEGYRQLLGMLAEAGDSLQDPIPVAVETACGLLFACLRATGRKVYSINPMAVARYRERYRVGRAKSDHADAMALANILRTDADVHRPLPADSELAQAVSVLARAQQDAVWNRAQLNNQLRSHLKQYFPAALAAFQVRGVGLDSREARTVLSAAPDPATAARLTRTQLRSMLRKSGRQRNIDTWTDRLKSVFTSDYLRQLPLVEEAIGRQTAALVLQLDAACQAADDLAAAAAEAFAQHPDNEIISSFPGIGPLTGARVLGEIGDDRSRFRDARALKAYAGAAPITVASGKSHAVHHRRVKNQRLAAAGYVWIFGALPSPQVKEQYDRRRARGDRHTAAMRNLFNRLLGCLHHCLATRQNFDPAKAFPALATTAGPAAT

SEQ ID NO: 100898 - protein, 348 aa, unidentified
MSLALQSLLPYPNSCEGASPHQQGRDTKMLSFCGIDVSKDRLDVMVLPDEYSSSVPNDPAGWAILVEQLRGFSITAIGIEASGGYERGAVRSLQAAGMPVRQVNPFKLRQFAKASGVLAKNDPLDARMIASFVGIMPTRPAQRTTPAAEQLVEMLAVRRQLSAEKTAAENASRLLEDLMLQRLSRRRIARLAADIELLDKRLVEIVATDATLAHRYRLLTSMPGVGPVLACTLIALLPELGGMSRKQVAALVGVAPYAFESGTLKGRRCIWGGRANVRQVLYMAAMSASNWNPVLKLFHDRLKGAGKLPKVVIVAVMRKMITTLNAMVRDDIAWADRLSGRHSVTTAR

SEQ ID NO: 100899 - protein, 400 aa, unidentified
MVSVGIDISKGKSTVCILKPYGEIVCSPFEVMHVEKELESLAELLQRLDGEIRIVMEATGIYHLPILTFFQEKGYFIAVVNPYAMKKYAKDNSIRGAKTDKLDSITIANYGIDKWFKLQKHESDEEIYAELKLLGRRYRHYMEQHVKALQELIHVLDYTMPGIKKLLKSWNEANNKDKLSDFVDVFWHFDTITSMGREDFLSAYMEWARERKYHQSQSKATEIYELASNGIPTLSSSTPSTKMLVREAVSVLRIIDSSLSHILARMQELAKTVPEYSTVRAMGGVGDVLAPKLIAEIGDVRRFHSAKALTAYAGIDPPPYESGQFVGSNRRITKRGSSTLRKVGYEVMRVLKSHKEPEDHAVYRYILKKESEGKSKKLAKIAGLNKFLRIYYARVNELYS

SEQ ID NO: 100900 - protein, 411 aa, unidentified
MQVIYERCAALDVHKKMVVTTIMITQADGSVQEYVRTSSTMTADLLALDDWLSSHGIEVIAMESTGVFWRPVFNLLEEGREVILVNAQHMKAVPGRKTDVKDSQWLADLLRHGLLKASFIPPKPVRELRDLMRYRKTIVQERADEVNRLQKVLETANIKLASVATDVLGKSGRSMLDAMLGGQEDPEALAELARGRLRAKLPELRLALDGRVRPHHQVLLTRILAHIDFLEESLVQLQQEMEQYLDPFEEAMGLVQSVVGIKETAAASIIAEIGTEMTRFASDKHLASWAGVCPGNKQSGGKRLSGKTTKGNPYLRAILFEVAWAIAHTKDNYLSAFYHRLARRHGKPKAIVALAHKVLVIIYHILRTKKPYTDLGADYFDQQDRERIERHHIHRLEQLGYTVTLLPKEAA

SEQ ID NO: 100901 - protein, 316 aa, unidentified
MSAEPVFVGIDVSKASLDVAVHLPATRWTVDYTERELTPLVARLTALAPALIVLEATGGLEIRVVGVLAVAGLPVVVVNPRQVRDFAKATGHLAKTDTLDAAVLAHFAAAVQPAVRPLPDAATQGLAVLVTRRRQLVDMLTAERNRFSCAPPGLRTELQAHIRWLERRIAGLDTDLDQTIRTSPLWRAQDDLLRSAPGVGPVVARTLLAQLPELGTLSHKTIAALVGVAPLNRDSGLFRGRRQVWGGRAAVRAVLYMGTLAAVRHNPVLRAFYQRLRAAGKLPKVALTACMHKLLTILNAMLKHQRRWDPTYAQTH

SEQ ID NO: 100902 - protein, 347 aa, unidentified
MKYFIGLDAHSSTSTFAVLNEIGDCILRKTVDTSEKNLWNVIESINGERILTFEESTISQWLYISLKQKVDRLLVCNPTYVAKKSGAKTDFRDAIHLANELRCGHLKEVFHDNSHWAQLRTSVSGYIDIVQEIVRFKNRLKSVFRAEGLKTDENNFYKNKDRCIELKNESARFVATNLFSQVEFLENEKIKYLDWFKNNQKKYRPIRNLMTIPGISIVRANVIAAIVCQPERFRNKHQFWGYCMLVRHIQISAGKIYGNKRVHGRRELRDVFIGAAESAMRTETTLRDYHDALRAKGISAKDAKVALARKISSLSLHLLKNNDTYNDDYEEYLKERKRLRLLVGQKR

SEQ ID NO: 100903 - protein, 316 aa, unidentified
MLYVGIDVAKNKHDVTALNVPGKTVLKPLTFSNNKAGFELLDLSLRQLNQDCLIALEDTGHYAFNLLNFLHEQGYKVYTYTPLLIKEFAKSLSLRKTKTDKKDAHGIALKLLSDPNREQFQHDNRQVELKILARHIHRLKKKQSDWKVQYTRCLDIIFPELDKIVGKHSEYTYQLLTCYPNPQKRLEAGFDKLIEIKRLTASKIQDILSVAPRSIGTTSPAREFEIIENIKHYKMLIDKAEKCVNDLMAEFNSVITTVTGIGNRLGAVILAEIRNIHAFDNPAQLQAFAGLDSSIYQSGQIDLAGRMVKRGSPHLR

SEQ ID NO: 100904 - protein, 343 aa, unidentified
MNNILKQVLGIDVSMDTFVVRFGTTDTNQDQKISNSESFKNTTAGFKKFIQWTKKHIISNDIPLFFVMEATGVYYENLAHFLYPNNFNVSVVLPGKIRNYAKSLQTKSKTDPIDAANITSFGLERKLNLWKPANSIIKPIKELCREYHSTKIMITEIKNQLHAKNHSYQPDKQTILRKKQAIKLLEKQTKEIEKQIKAIIEKDKELSEKIDRVIKIKGLGFISVVTIVAETNCFELVSNQKQLASYAGLDVVFNDSGIKKGKTSISKKGNKFLRKAVFMPALSASKHNQKMKELYVRLVSKGKNKKLALIAVARKLLLLIYTIWKNNTDYIPDYNPNQQNVPC

SEQ ID NO: 100905 - protein, 425 aa, unidentified
MNSISNKKINQVTDQTLVVGMDIAKKKHYACFVDERGRVLKKSFPVPQSREGLEWLYQCIVKAMEEFEKTEVIVGIEPTGHYWLNLAYFLDEKGIPLVMTNPMHVKRSKELDDNLPTKHDAKDALVIARLVKDGRFSYPRILKGMEAELRVGATFRSKLVEEQGAIRNQMIRWLDRYFPEFSQVFPSFGKMALAVLEYTPFPSDLAGKELEEVLALYRQSEGLQSPQKPKAKKLMELAQHSIGVTEGQQMARIEIATLVRRYRQLEEEIEALTEQLIELVQTSVEYEWLKTVPGLGDATIVELLSEIGSFSHYQDPRQLIKLAGLTLREHSSGQHKGQKRISKRGRRRLRALLFRVMMPMIRHNEAFRQLHDYYTTRPDNPLRKKQSIVVLCGKLLKVLHAVCTKHQAFDAKRMMQDIFGLETAA

SEQ ID NO: 100906 - protein, 344 aa, unidentified
MNKYAGLDVSLEETAIAIVDEMGRTVREAKVASEPEAIDTWFRAKGAGIARLGLEAGPLSSWLYAGLQARGWPVVCIETRRLRAATRTMPVKSDRKDAEAIAQVMRTGWYRAVHVKSLASQRLRVLLRHRQILQTKRHDLENELRGTLKAFGLKLGKVRPAGFAEHVLELVAGEPWLERLARPMLAARAALRESFAELHALLLKIVKNDAVCRRFMTVPGIGAVNALAFKTGIDDPTRFRHSADVGPHFGLTPRRYQSGETERIGPITKAGDAMVRSLLFEAAMALLHRVKAASSLKRWARTLAKRVGARKAAVALARRLAVIMHRMWLDGTDFKPELLRVAAN

SEQ ID NO: 100907 - protein, 429 aa, unidentified
MCMPYRIAGIDVHKAMLAVVVADVEVEGDWQFERRQFGATPSHLRLLAEWLVEQEVEEVVMESTAQYWRPVWDALECGWQRTRRARVDAGPATGALHLAQAQSNHGPHGRKRDFPDAERLVKRLVAEELTLSFVPDVAQRLWRTVTRRKYQLTRNRVQLQNRLESLLEEAHIKVSSLVSDLLGASARRMLHAIADGETDAAKIAALGSARLYATAAQLRDALGASTDLHPLYRRLLAMRLAELKVLEEHMQQLDEELAGLLGAHQEAVQRLAAVPGLGVDSAQQIIAEIGPTATTFSTAKRLASWMGACPGHDESAGINRSHRSPNGNRQMRRLLNQAAHAAVNTKGSLFELLYRRFVVRLGHAQAIGAIAHRLCRLVWKILHDGVTYEERGPAVSKERAHRRAAKMIRELRSLGYRVEAAPTPSGNLL

SEQ ID NO: 100908 - protein, 410 aa, unidentified
MRFYTTPHRYYCGIDLHARRMYICVLDAEGQIRVHRNGPATPEHFLTTIAAYREDLVVAVECIFTWYWLADLCAQEGIAFVLGHALYMKAIHGGKAKNDKIDAHKIAVLVRGGMLPMAYVYPREMRATRDLLRRRCHFTRKRAELLTHIQNTASQYLLPTLGKIAYHGNRVGVAEHFRDPEVRKSVETNLALIDEYDRLLTELELHLTQTAKVHDVNAFYRLRSVPGIGKILALVLLYEIHDIHRFPRVQDFVSYCRLVKCAKQSDGKHYGYSGTKIGNAHLKWAFSEAAVLCLRKNPPAQRYVARLAHKHGKGKALTILAHKLARAVYYMLRRGQAFEVTKFFSGTAGGDRPPRAPRMAAAPAGNDLDGGRYLDPPEIKRRGARRRRHERDGVTTKRVVDAAARVAEER

SEQ ID NO: 100909 - protein, 353 aa, unidentified
MQIVGALDVHRRQITHKTLDLASGDVRRGRLSPANRQSLREWLERFRGCEAEFALEGTTGWRYVAEEIARAGHVAHLADPAETAAKRGRKRRAKTDRADCDLQLKLLLAGELPESWIPPAHILELRTRVRTRKTLVDQRSAWQLRLTAQLFHQGVPAGINPRTRAGREALARVELSPAGRELVSIALRMIEALDLELLPLDRELRAFAARQPGCRALSERLYGVGPVAATAILAELGDCRRFSSSDDAVRHAGLDVTVYQSDSKRAAGHLSHEGSPVLRWALYEAGQQATRQTSPDHEYFLQVRERTDHKSASLSVARKLCRRAYHILRELGEQAIAPVDVDAHVEEAIDAAA

SEQ ID NO: 100910 - protein, 411 aa, unidentified
MIKENYVYVGIDLHKETHTAVMIDCYNQKLGEITFPNRPADFPKLVTKVKKCNTDGKEVVYGLENAYGYGRALAVWLIDKGYLVKDVNTAISHRQAKHRGAMYRKSDSDDAKAITLATLNMLDKLPDACPNDAYWSLGHLVHRRDNIMKQRTRLVNQLHEQLCIAYPSYKSFFNDISRPTALYFWEHYPFRKYLRGKSVEDLRKELVPVSHNKCSTKTCEKILDAVASDKVKNIDYQDARDMVTLSIVSDLQHYDSQLAEVDKMLEQMYKMLGCTLTTIPGVNVIIAVKILAEIGDIKRFSNANKLAQFAGIAPLHLSSSGKGKDVATKQGNRRLQAAIYFLAIQMVQLSSKGTPRNPVVRAYYEKRKAEGKTSQQTLICISRRLISIIYGMLKNGTEYRMPVVENAGEKL

SEQ ID NO: 100911 - protein, 389 aa, unidentified
MSIIDRPDALAATTVENGIVAVSLELSRSKWLVTSLLPGSEKMSKYVVAAGDGTALLALLERRRRQAEGQVGGPVRVVVIEEAGLDGFWLHRLLDANGIESHVVDAASVAVPRRRRRGKSDGIDGETLLRTLLAWRRGEPRVCSMVRPPSPREEDRRRVVRERAVLIRERIAITNRIRGLLMSQGVTDYQPLRRDRRQRLETLVTGDGRTLPPQIKRELLRALDRLDLLLEQIKAVEAERDAVEETAAGEAATTDDPTRLLLRLRAIGPQTAAVLTLEAFYRHFDNRRQVASFAGLSPSPWQSGAVAHDQGISKAGQPQLRKTMVELAWLWRRHQPGSALSRWFAERARGQDPRRRRALIVALARKLLVALWRYVNTGVVPEGAAFKAV

SEQ ID NO: 100912 - protein, 359 aa, unidentified
MASKVKKSKINFKGKTVSIGIDMHKKSWRITALVEEEIVLGITLARPTYDAFEKILARFKGNHVRIVYEAGPGGFDLYDRLTDDGIKCIVTPPSLIPTESGNRVKTDKKDSLKLAQMLERNMLKAVWVLSPEERAHRQLVRTRRQILNHRSDVMRQIKSLLLFNSIEIPFKSTQHWTGVFINWLLKLDLGHEALNRSLKAQVDLFNYLNAEKKLLTKDVLQLAKDEKYAQRVDLLTTTPGIGPLSAIEILVELQDITRFKTADELAAYLGLTPSQYSSGEHIRMGHITHAGNSRARTTLVECCWILIGKDPEMGRKYERIKNRRGGKRAIVAVARNLSGRIRRILLDQVPYELDFQRAA

SEQ ID NO: 100913 - protein, 410 aa, unidentified
MESFQLYVGLDCGGDSHHACVLSETGALISDRVVAADAEGLAAFADWLLTLMAEYAPSRVAIAVEHPRGAVVETLLERRFALFAINPKQVDRFRDRYTVSGAKDDHRDAWVLAHALITDLAAYRRIRPDDPAIVQVRALTRLDGDLGDQLRQTANRLREQLLRYYPVLLTWCAGADEPWLWQLLAMAPTPAEGARCSRAMLERLLTRARIRRVTASELAAALARPPLRVTAGTVTAATMHLQILLPQLQLLHRQRRDVLRQLRRRLTVLAAEPAGDGREHPDVTILLSLPGVGVRIGATMLAEAAHALQARDYHGLRLLAGAAPVTRASGKRRVVLMRYACNQRLRQACYHWGRGAIQRDPVARRHYRVLRSAGHSHARAIRGVTDRLLAVLIGMLRSGTLYDHARRHIA

SEQ ID NO: 100914 - protein, 342 aa, unidentified
MHHAAIDLGSRESQICIRQPDGAIVEERKHPTRKLTELVKTWPTSRVVMEASAEAFKIADAALAAGHQVRVVPGKLVRLLGVGDRGVKNDQRDARQLSQASWQTDVPSVHIPSATARELKSICGARDVLVATQRNLSNNVRGWLRTQLWRLPGGTMVTLPERLRTHAQASGRELPEHIERQLTMLTQVTEQVQAATKQARRLATEHPVCRRLMTVPGVGPLTSLRFVAAIDDPSRFPTAHRVQSYVGLTPGEHSSSQRERKTGITKAGPSELRRCLVQAAWSVMLARRSHPMLEWVRQIAQRRNRPVAVIALARKLAGILFAIWRDGTTYEANHAAGRSALT

SEQ ID NO: 100915 - protein, 368 aa, unidentified
MTNRTAIERDVFWVGFDDHADKVVAAVLVNNEERIHERFEVVPDEKGLRQLIKKLKGYEGEVRCIYEAGPCGFVLQRRLVKEGILCSIAAPSLTPRQAGNRVKTDRRDAKKLVFLYRSGTLTTIHIPDEEQEALRDLVRAREDAVEDARRARNRLGKFLLRHGYRYRGKTTWSREHWRWIRSIEFGQQHSRQALEAYIAAVIGTEDQLKNLDQQVSEAADACEMVVRAYATLRGIDRLSAVTVHAELGDLKRFSGAPEMMSAVGLVPSENSSGNSQRRGSITKTGNAHVRRVLVEAAWHARHRPAVGEALRRRREQQPAKIVAIAKQADVRLHRKFTGLTWRNKRSTVAAVAVARELAGFLWAIGQAL

SEQ ID NO: 100916 - protein, 330 aa, unidentified
MKVTDIMGMDVSKNTLDCHLFVQQLSLAPVSNDLKGFKAIKRWLTKELKKKTEGLLVVMEYTGIYTYGIERFLNEQGVNYVKRPALDIKRSLGMIRGKSDKADARFIGRYGWMRRDDLQPMVPLSDGQLALQQLMSHRDKLVADKSSYQCKLKELRSQMGDKVNEKMAASMEFVMQVLAQEVKEAEKQIKDLMKADQSLQTNYDLMCSITGIGFATAVHLLIATENFTRFTDVRKLICYCGIAPFEHSSGTSIRGKVRVSQLANKKLKSLLTMAAISAIQHDPELKTKYEQKVKEGKAKMSVINIIRAKLLTRIFAVIERQSPYELRLAA

SEQ ID NO: 100917 - protein, 413 aa, unidentified
MEVVHPRCAGIDISKKDAKVCVRIQGRGRTRTAVTVTTWGAMSNQILALRDHLLAEKVTCVVIEATSDYWKPFYYLLEDELDVMLVNARAVKNMPGRKSDVSDAAWLADLGAHGLVRASLVPPPPIRQLRDLTRARTVITRERSREAQRLEKLLEDAGVKLTSVVSNITGVSARAMLEALIEGEQDPAAIAELVHPRMRPKIPALTEALTGRFGEHHRFMTRLFLDRIDAHNADIARLDARIEAAMEPFRSARELLMSIPGISRIVAEVFIAETGADMSVFPTAQHLASWCGVCPGSNESAGKVKSTSTRPGDRYLKGALGIAALSVVKRKNTYFWAKYHRITARRGPMRALVSVEHAMVVAAWHMLTNGEFYREPGLDYYTRRVPAKTKARALKQLESLGYKVTLEPLADTA

SEQ ID NO: 100918 - protein, 403 aa, unidentified
MNMNAVGIDVSKGKSMIAILRPYGEIVSSPFEIKHTSSNIQSLIEQIRSIEGESRIVMEHTGRYYEPLARELSLAGLFVTAVNPKLIKDFGAHSLRKVKSDKADAVKIARYTLDSWTELKQYSLMDELRNQLKTMNRQFGFYMKHKTAMKNNLIGILDQTYPGVNTYFDSPAREDGSQKWVDFATTYWHVDYVRKFSLNAFVDHYQKWCKRRKYNFSKDKAEEIYGAAKELVPILPKDDLTKLIVKQSIEQLNTASKTVEELRTLMNDTAAKLPEYPVVMGMKGVGPSLGPQLMAEIGDVTRFTHKGAITAFAGVDPGVNESGTYEQKSVPTSKRGSSSLRKTLFQVMDCLIKTKPQDDPVYAFIDKKRAQGKPYYVYMTAGANKFLRIYYGRVKEYLMSLPE

SEQ ID NO: 100919 - protein, 404 aa, unidentified
MNAVGIDVSKGKSTVAVLRAYGEVVASPFDVAHTESELKELANFIKKLRGETKVVMEATGNYYEPIAHYLHEQNIFVSVVNPVLISDFGGNTLRKPKTDKKDSLKIASYALSYWVDLKEYIPQEDLRKSLKLLNRQYQQASKLKTMMNNNLISLLDLTFPGINKLFTSPSRESDGHEKWVDFVIAFPHCDMISKLTFKAFSKNYKKWCTGNSYYFTEASCEKIYDFSKECISSVSSAESTVFTVIQAAKMLNSAAENCQAIQYEMNRAAAQLPEYDTVMSMYGVGKAVGPQLIAEIGDPRRFHSRKAITAYFGYDSENNDSGQKVSISNSMTKKGAGALRRTLFIIMQVLLQTKPIDNPVYDFLIKKQCEGKHYYSYMNTAANKFLRIYYARVKEVLTAAEVKT

SEQ ID NO: 100920 - protein, 381 aa, unidentified
MRDKTFVPRDYDVFAGLDVDKKSIAATFSSHQGFIRSLGMPYKVEDLLNHVRNHFADQKVAFVYEAGPTGYGLYDGLVAHGYTCLIAAPSMIPRAPGQRVKTNRLDSKALSESLRGGQLKSIHIPSPLYRELRHLSQLRDTFVSAMMGMKQRIKSLLLMEGIEFPPAPAGSQWSLIVKAKLRKLACSNTVRFKLDQLLDSLEFSEKQVLKTTQEIRRFCRSDPELSQCIKYLITIPGIGWIVASQLLARIGDWREIKDVRQLAGFLGLVPTEHSTGDKTDRGSITHIGDGRLRSKLIQGSWSAIRQDGELREFFRSVGQRHPRKVAPRVAIVAVARKLSVRISVVLMKQRPYVVREKVHSAPLTQEETRPQGTTRRRGEPG

SEQ ID NO: 100921 - protein, 324 aa, unidentified
MTISTLGIDISKLKFDVALLRDNGKFKHRVFPNTPAGFLQLSAWLEKQKVERVHACLEATGTYGQALATNLHDAGHVVSVINPAAIKAYGQSRLSRTKTDKADATLIAQFCQERRPPQWQPLPVEIRELQALVRRLDALLEMRQMEANRLEVSTAATAVRESLVGHLAFLDEEVATTEELIRTHIGTHPGLREQRELLLSIPGIGDTTAAKLLGEIVDVKLYESARQLAAFAGLVPRLHESGSSVRRKARLSKSGAPRLRKALYFPAIVAMRHNPLVRVMSERLKKRGKCPMQIIGAAMRKLVHLAYGVLKSGKPFDPELMKTA

SEQ ID NO: 100922 - protein, 411 aa, unidentified
MAEGYDFYIGLDWGTARHQVCVLDAAGRRVAEQTVAHSGAGVAAWLAELARYAPTERLAVALEVPRGAVVDALLAHGCHVYALNPKQLDRFRDRQTVAGAKDDRRDAGVLAAALRTDRGAFRALQPEDPRLVPLRELSRLARELRTESMRLTNRLREQLVRVFPQVLTLCPAADEPWLWTLLERASTAPEAARLRPNALRALLAEHRVRRVSGADLYACLQAPPLPASPAALAAAGEHIAFLLPRLRLTFQQRGQCERRLEKLLDALAAGEPAPGQPLEHRDVTILRSLPGVGRVVAATMLAEAWPALAARDYQMLRTHSGVAPVTRQSGKTRLVTMRRSCNGHLREGVFHWASNSLRLDPRCRAHYDRLRRQHGHARALRGVADRLLGLLVALLQAGTLYDPARRHVAAA

SEQ ID NO: 100923 - protein, 361 aa, unidentified
MAKVRSWAGLDVHARSVLTVTLDAESGEIRSSRLSGETARAVEFLAKLPGPTRAAYEAGPTGYGLARALIAAGIGCVVAAPGKIERPAQDKLKTDQRDAERVLRLLMIDALHPVRVPTVEEEALRDLVRAREDVRGDLMRARQRLSKLLLRHGILYEDSASTWTQRHRSWLRAQQLGGGAQATLLDYLGAIDTLELRRGTLEKTIGELVPASSYAQAVARLRCLRGIDTLSAAGLCAEIGDFTRFERPGKLMSYVGLVPSENSSGESRRQGPITKTGSRHARRLLVEASWHYRKTPSRGITLQRRQDGQPANIIAISWQAQQRLHRVWQRLAEQRGKRRTIVAVAVARELTGFCWALARAD

SEQ ID NO: 100924 - protein, 450 aa, unidentified
MSPLALDVVTKTGKTPVLGRMLSKYVGRKTSSIENDITKARNHLRQRGKIMRVVFGIDVSKASSEVAILVNGEKIHGYTIPNDAIGFNRLLGDLGTVYQPEIVFEATGVYSRRLQAFFEDNSYAYIRLNPLESKKQLDSLRVRKTDKIDAEKLATSQFILNRKPSYVQEALYQELRDLSRFYQNLTEDIVCSKNRLHKVLQVTFPELENILSSPTGKQYWNLVMAFPCNSFVLELDDAALRAIIRQSTSKHISENRVTYLVDKLTKLANQSYCAVKKTSPMMEEVKYYAGELLRLSEYRQSVLEKMITLAQPLPEYEILLSIPGIAETTATSIIGELGDIRRFHSANQINAFIGIDLRHYESGNFLAKEHITKRGNPYARKILFKCIHNIASASHTNPCHIADFYEKRKRQSQVTSTKPHTIASIHRLIRTMYYLITHNKLYDYTSIQNR

SEQ ID NO: 100925 - protein, 377 aa, unidentified
MKRIKFVGLDVHAETIAVAVAEQDGEVRSVGVIPNRCESVRKLVKKLGAVEELHCCYEAGPTGYVLYWQLTALGAKCEVVAPTLVPVRAGDRVKTDRRDALKLARNYRAGELTAVWVPDAAHEALRDLVRAREAAKRDQLRARNRLTKFLLRHGKRPPQGVNPWTLNYMNWVRKEVHFEQSAQAATLLDYLHEVEHMAARVTRLEQAIEEAVQLAPQQMREVIEALQALRGIAKVSAVTIVAELGELSRFGEARQLMAYSGTVSREHSSGENCKRGGITKTGNVHLRRIVVEAAWAYRHAPAVTQCLRKRQKRVSEGVKEIAWKAQHRLHGRYRKLTARGKNTGKVITAVGRELLGFIWAIGVKVEAEQRKALGQAA

SEQ ID NO: 100926 - protein, 361 aa, unidentified
MSQNSHARATASAAMPKVTIGLDLGDRTSRTAEVTADGQCVREATVRTTVAGLTQYFGGRERCRVVLEVGTHSPWISRLLTDLGHEVIVANPSAMFAGRPRRRRNDRLDAEFLARQGRADVRLLYPITHRTGVAQQHLELLRARDQLVTGRTAFINHVRGAVKSWGARLSACSADAFAARGATDLPAALRSVLTPLLEVIADLTRRIKHADREVAQLAATEYPITLRLQQISGVGPLTSLAFVLLLEDPRRFAVSRDVGAYFGLVPRLDDSGDAMPQLRISKAGDAFGRRLLVSAAHYILGPFGPDCDLRRHGRAIAGRGGKTAKKRAAVAVARKLAVLLHHLWVSEVPYDPDHLAKQRAA

SEQ ID NO: 100927 - protein, 343 aa, unidentified
MPIVGGLDIHRKQITFDYLDTETGQVCRGQVSPADREHLRAWLARFAGTCDVAFAVEGCTGWRYVAGELAAAGATAHLAEPADTAFARGRKRHAKTDKTDCRHLRQLLSEGRLPECWIPPSRILEYRALLETYHDLRREHTAQAQLRGAVPPRRPGPGRGHPAHRAGPGRAAGGLGRLPVPGRAAAGRHRPGRARGAGGRMHTVRHQLLDAARHLTGAKVLAERLYGVGPFAALAMTCWLAGKDRFSSSRQAVRLAGLDVTVWSSDRKGPPGRLSRQGPPVLRWALYEAGKTHARAPAPDHAYYAQVKDRCNGKRAALSEARKILRQAHHILAGLGDDALSAT

SEQ ID NO: 100928 - protein, 389 aa, unidentified
MEARTVNNLPPAGTYDDAVRCLIAIELSKKSWIVAVNTPLSDKISRHTLKACDGKELLDLCERIRTRVARETKKRVEIVSCYEAGYDGFWLHRLLEAHGIRNYVIDPASLQVDRRARRAKSDGIDVEKLLRSLMAYLRGEPKVWSVVRVPSVAEEDDRRLHRERGRLINERIQHVNRIKGLLAIHGIYNYQPLRRDRMQQLERLRTADGRTLSPRLKAEILRELQRLELVIGMIKTIEAERDAIASAKTEAEHTSAKKIQDLAKIKCIGPEFATTLVGEVFYRSFNNRKQLASYVGMTPAHFQSGAMCRDQGISKAGNAKARTVMIELAWLWLRHQPDSPLSVWFRERVGKLKGRIRRITIVAVARKLLIALWRYLETGLVPTGAALKV

SEQ ID NO: 100929 - protein, 411 aa, unidentified
MDEIFACCAGLDVHKESVEACVRGMEPTGRVHQQTRPWPTMTRDLVAMADWMAAQGVTHVAMESTGVFWKPIYNILEGRFTVLLVNARHLKQVPGRKSDVRDCQWIAQLLQHGLLKGSFIPPRAQRELRDLTRHRVQLVEEKARTVNRLHKVLEDANIKLASVASDILGVSGRAMLKALMEGQENPLQLADFAQRQLRGKIPELEKALQGHLTEHHRFMLRLLWKQLAQQEELLAELESKIEEQTRPFKDEIERLDAVPGVDHCVAQVMLAEVGDNMQAFPTHQHLASWAGMCPGNEESAGKRRRRRITPGNRWLKRTLAQAAWAASHTKNAYLASQYRRLAGRRGKKRALIAVGHSILVIFYHLLKSKTRYADLGGDFFDRLEPQRLTRYYVRRLQALGHKVTLETCVAA

SEQ ID NO: 100930 - protein, 402 aa, unidentified
MNSVGIDISKGRSTVAVMRPFGEVVISPFEVRHTDSELSELARQLKSLDGETRVVMEATGNYHAPVAKLLHDAGLYVSVVNAKLVHGYGNNDLRRVKTDKKDAVKLANYGLDRWLTLPRYVPEEDTRLLLKNCYRQYRQYSKVQTVLKNNLISLLDTVFPNVNRLFSSPIRGDGSEKWVDFVAEFWHCRCVSEKSEKAFTNKYQRWCKTHGYNFSEAKAHTIHAEASGHIGIMPKSETTKLLVEQAVVQLRATSAALIALKREMLTLAAQLPEYPVVMGMFGVGPTLGPQLIAEIGDVRRFYSKKALVAYAGLDAPPNDSGDMTGRHKSMSKIGASSLRRTLFLVMGIYLQNAPLDEPVYQFMDRKRAEGKPFRVYMMASANKFLRIYYATVKAYLESLEQV

SEQ ID NO: 100931 - protein, 378 aa, unidentified
MPSENTVHIAIELSFSSWLVAARLTGAKKSRLHRIEGGDTGALLALIAELRSRALTELGGAAEVACCFEAGRDGFWLYRLLTAHGILVYVLEPTSILVNRRSRRAKTDRLDAEGMLRVLAAWLGGDRQVCSMVRVPTPEEEDGKRPHRERERLVQEKLRIENRIEGLLFTQGIRARPSLRSWERELTELRTGDGRTLPPLLRAELDRLRRRLVLILELIRELEAERAAALAAAPDEAMAQKITSLQRVRGIGANFSAVLVREVLYRSFANRRQLASYVGVAPMPFQSGGMDRDRSISRAGNARARTTLIQLAWLWLRYQPGSALATWFRERVGTLQGRTRRIAIVALARKLLIALWRYVEAGVLPAGVEIRTGTVPAA

SEQ ID NO: 100932 - protein, 413 aa, unidentified
MRVMIERCCGLDVHQETVVACLLIGAPGVGPTKEVRTFRTMTRELEALRDWLKAAGVTHVGMESTGVYWRPVYAVLEGHFELIVGNARHIRNVPGRKTDVKDAEWIADLVRHGLIAKSFVPARPLRELRELLRYRRKLVESQSAERNRLLKLLETANIKLASVASDVFGVSGRAMLKTLSEGNATAEEIAGLAKGQLRRKHDELVLALEGRVEEHHRFLLAIQLHRLEAAEHDIEALDSRIAERLEPYRTQHALLMQIPGVDWVVAAVLIAEIGIDMSVFLSAYHLASWAGVCPGNHESAGRQTSGRARKGNVHLRTILVGAATSASRTKGSYLKDKYHRLKARRGALRAALAIAHKILVAAYHMLAKGLAYRDLGEAYLDQLHQTRTAANLKRRLERLGYTVALQLKEATTA

SEQ ID NO: 100933 - protein, 350 aa, unidentified
MWYSGIDQHKAYCVITTYGPEGPRVKQARVASTPLALQQYFAESPGPQQAVVESTGAWYWLADTLAGVGVELVLAHATRVKAIAAAKVKTDKVDSNTLALLLRADLIPAAHMIGPAQRAPRDLMRTRLRLVAKSVSAQNSIDRLLEKFNAHDVGELDELYQLQARCHAAQIQLLENQIRTLERALHPHLIPNADVQRLLWVPGLGKVSAFTIYTEIDGIARFPTARQFFSYCRLVPGADNSGGHTRHRSGSKAGNRYLKLAFSHAGIRAVQYYPEIRGFFKAKARKKPIRIARTLVALELARIVYHVLTKQEAFNGRFKDRPLSRHKQAQWPRRASPPVLTETPQGGSRA

SEQ ID NO: 100934 - protein, 462 aa, unidentified
MLGREERETSEKSRRQLEGLPVIRRGVAGIDLGSEQHWACAPTLDRSGREVAHFGATTAELIRMAEWLKARQVESVAMESTGVYWIAPHEVLEGQGLQVLLVDTRQLAQVPGRDKKSDPTDCEWIQRLHSCGLLRGSFRPEEAVCMLRTLVRDKANLVAESGDWLRRMQKSLDQMNVRVHRAVSDIDGVTGMAILRAIVGGERDAQKLAKLRDRRCSKTQQEIAEQLNGHWRDDHIFSLQQALKMYDAVQERMAAYEQEILRKLGEMEREEPHEPTAPPLQNASKARTIKKLGQEAKPQALYRMSGVDITQIDAIGVETVEVVVSEYGSDLSRFPTEKQFVSHVTLAPSVPKSGGKPVRKKKRNSASTRVAAALRMAALSLRHSQTALGAYYRRIAQRRGGDIAVFAAARKLATLIYRLLRWGQPYVDEGAAAFETRYRQHRIGRLAATAKELGYQLTPVPA

SEQ ID NO: 100935 - protein, 364 aa, unidentified
MQKISMQTSGKNIFEGQLTIGLDLGDRSSAYCVLNAAGEIVLEHRLATTPEAMKQVFGSLPRCRIAMETGTHSPWVSRLLMALGHEVIVGHAQKVRLITKSRRKDDRLDARTLARLARIDPELLSPVKHRSAQAQLHLTEIRARAALVSTRTALVNAVRGLVKSYGERLRKCHTQQVGREMTRELSMGLREALKPLLQEVESLNERIKEYDRRIEKMAKEMYPETALLKQVKGVGDLIATGYVLTIEDPHRFRKSRDAGCFLGLQPGRRNSGESEPQMRISKEGDEYLRTLLVQGAHYILGPFGEDSDLRRWGQKLSARGGKNAKKRAVVAVARKLAVLLHRLWVSGEVYEPLRNSQKPMSTAA

SEQ ID NO: 100936 - protein, 422 aa, unidentified
MSKRRNKVCGADVHRDLIVATIQDDDNLLFQNEFGTTHAELKRFRDWLVANNCKQVAFEATGVYWLPIYDFLSLSIDTIVANPWKIKNIPKDKTDSKDSQWIASLCLNGQIKRSRILSKNDRDLRTMTRARSGYVKTRTQFRNRIHKYLASNGIKLSSCISDVFGESGRYILGGLVEGRSIDTILDGIPSGRVRKKRDLIKAALGSGLDGISRMLIKDTMDLLDHLETKVEAASQDVINKLQTKSKDLAIVMSIPGIGFVSGSVILAEIGDYHDFKTPEQLAKWCGLSPGENESAGKKRPCGITKQGSKYLRTMLVQIAHVVAGKSNTKLSRFFQRLSKRKEYNVAITALARKLICLVYHLLINQELYQEENCERRKSKPAKSDLTSSYSSEDQLEDKVAAIVDAFYHLKAHGRKRSSDGSG

SEQ ID NO: 100937 - protein, 348 aa, unidentified
MKKCNTISIDLAKSVFQVAIINGYGKILSNKAISRKRLLAFIAKQKKSRIVMEACGSSNYWGRLFQELGHEVLLVAAQHVTPFVKGNKNDANDTVAIYEASCRPNMRFVSIKSLEQQDIQSIHRVRQRLVDSRKNLMSHARGLLSEYGIIFNVGASKLREGLVSVFSGDIPSREITSTLVELAKEWYDEFIHLDEEIAYKDKTIARLARQSEAASRLMKVEGIGPVIATAFVGTFGEKPTEFKKGRDMAAVLGLTPNQHSSGGKAKLGAISKRGDKYLRTLLVNGATSVINALGNKSDPKSQWLRKLLERKPVNKVRIALANKMARIAWAILAKGETYNPELACAVNQ

SEQ ID NO: 100938 - protein, 410 aa, unidentified
MQTLVERGCGLDVHQATVVACLLIVLKNGQVQKQVRTFGTTTRELMGLREWLLSGGCTHVAMESTGVYWKPIYAILEGAFEIVVANAQHVKKVPGRKTDVKDAEWIADLLCHGLLRPSFVPPSPIRELRDLTRYRRKLVESRTAERNRLLKLLETANIKLASVATDVFGVSGLLMLHALVEGKATAQEMAELAKKQLRKKIPELEMALEGKVEEHHRFLLRVQLRRLRTVEEDLGILEQRIQEKLKPYAAQFTLLQEIPGIDETLAAAIIAELGVDMGVFENVSQLSSWAGVCPGNNESAGKRRSSRIPKGNVYLKTALVEAANSAAKAKGTYLRDKFYRLKARRGYKRAAVAVGHKILVAIYHMLSHQVCYNELGDVYLDNLNKHHVTRNLVNRLERLGYAVTLQQKAA

SEQ ID NO: 100939 - protein, 438 aa, unidentified
MTAPHAGGAVMMEKTMDILHERVAGLDVHKDTVVACVRLAEGGKATRECRTFATTTDGLTGLLDWLSANRCTHVAMEATGVYWKPVWKILSDGDFELVLANASHIKNVPGRKSDLNDAMWIADLLACGLIKASFVPGEELDELRALTRTRKQLVREQTRHVQRIQRTLADANIRLDSMLSDIVGASGRRIIEAMIAGVRNPHKLAALAGKGIKATPKALYDALHGRLTDHHRFLLQLHLGQWDGLDAAIRRIDVEVNQRIAHMDTEVGRGEAPFRDLIGLLCTIPGVGTVSATAILSEIGRDMSRFPSAGHLVAWAGLCPGQNESAGKRKSSRLRKGAPWLKTMLVQCAWAAKRKKDSYYRAQFFRLQSRRGPQKAACAVAASLLTAIYHILKDGTEHQDLGGNYFDRRPTEAKTKQLVARLAKLGFAVQLKPIAEAA

SEQ ID NO: 100940 - protein, 322 aa, unidentified
MEQVYYCGIDIAKSKFDCAIRLNNGKYKDKVFKNESEGFSTFINWLAHHGFSHVHICMEATGIYWEAFAEYLADKGLTVSVINPAQIKAFSISLLVRSKTDRGDARVISDFCFERKPAAWLAPSASEQSLRTLVLRLESLQKMRTQENNRLHVARENVTKSLTDHIAWLNNEIEILQGDMLLLINGNAEMKQKKTLLESIPGLGVQTAAVLLSFGIHPGRFVNARQAAAYAGVDPRLNQSGSSVKGRPRLSKTGHAFLRKSLYMPAMTTLFRTAWGKHFYARLTAAGKAPKLIIGAMMRKLIHVAFGVLKTEKSFDQSLHGV

SEQ ID NO: 100941 - protein, 397 aa, unidentified
MEIQDETGRKLAARRLPEGAAGIARLHELIAVHLAADGDPGQVVVAIETDRGLWVQALAAAGYQVFGLNPKQVARFKERYNLSGKKDDAADAHALADMVRAERHQLRAVAADTAGAQAIKVAARAHQTLIWERTRHTLRLRSALREFFPAALVAYADLGLTGADTLELLARAPAPAAAAKLTGAQISAALRRARRHDVAAKAEAIKEALRGPQLAQPAAVTAAYAAAAQASAAVLITLNDQIKRLEAQVEAHFMQHPDAEIYLSQPGIGTVNGARVLAEFGDAPGRYACAKARKNYAGSSPITRASGRSKVILARYIRNDRLADALQSQAFSALTASPGARACYDRQRARGLGHNPALRQLSNRLVGILHGCLKTRTRYDEATAWPNAVTHQEPLAA

SEQ ID NO: 100942 - protein, 351 aa, unidentified
MRNLTIGMDLGDKNHVITILDEDGVIVRSCSLDNDQTSIIKFFKKYQGSIVAIEAGTHSPWISRELKALGCNVLVGNPRKLRSIWNSDDKADVHDSEMLARIARFDSGLLYPITHRSEQAQVDLELLKARDMLVKTRTNLINHVRGAVKSFGERLPKCSAASFHKQCLDFLPENLRTVLQAILETIEHVTGRIKDFDRGIEKISREVYPETELLKAIGGVGPLTALAYVLILEDPGRFGKGRQVGKFLGLTPRRDQSGETDKQLRITKAGNRFLRRLLVGAAQYILGPFGPDCNLRRFGLRLMERGGKNAKKRAVVAVARKLAVLMHHLWRNGEVYDPFCKSHRVEMQNAA

SEQ ID NO: 100943 - protein, 418 aa, unidentified
MQTELTQFTAIIGIDWADKKHDVCVQAGTSGTRQSYQVAHKTDKLDEWARSLYRQYGGPIAVALELSKGPIVSALQKYDFFVIFPIDPTTLANHRKTFTLSGAKDDPTDAEYILDLLLKHTEHFKALKPQSVEMRALMTLVEQRRRLMSDRVRLTNRLRNALKQYYPQALEWFDRIDTPLFCDFIKRWPSLAQARRARKATLEKFFREHNMNRRALLERRMTAIKSAVPLTTDAAIIMPYRLQAMTLVAQLEVALVSIRRYDDEIAALAPQHPDYGLFSTLPGAGPSLAPRLLVAFGEQRERFANAAALQKYAGIAPVTERSGQKHWIHWRWQCPTFLRQTFVEWAAQTINKSYWAGLYYYQQRAKGSSYQAAVRALAFKWIRILYRCWATRTPYDEAKYLKTLQERGSPLLKMAEVA

SEQ ID NO: 100944 - protein, 408 aa, unidentified
METLHRRCAGLDVHQKEIVACRRIASGRKARSELARFPTTTRGLVELSAWLSEAKVTHVAMEATGVYWKPVWHVLCHDFKLILANASHIRNVPGRKSDANDATWIADLLAHGLIRASFVPPQPIQELRDLIRTRRELTREIVRHTQRIQATLEEANIKLTSVISDILGLSGRRILRAIVAGESDPHALADLRHPRLACPHEKLIAALDGRLGDHHRFLIGQHLKTIEQLEATIAEFDVRLEAALAPFREAIERLKGIPGVSDNVAQTLIAEIGADMSTFPTADHLVSWAGMCPRLDESAGRKRSKRLRKGAPWLKPVLVQAALSATKVKSSSMRARYLSLTPRLGHKKAIVAVAAAMLRTAYHMLKDGTFYQDLGPDYRRPKNPQRAANNLAKRIRALGFIVEFKTAA

SEQ ID NO: 100945 - protein, 416 aa, unidentified
MNAVGIDVSSRKSTVAVLRPLGEVVCLPFDVTHDIAGLASLAEKLKALDGETRVVMEHTGRYYEAVEKALHEAGLFVCAVNPLLIKEYGANSLRRVKTDKADAVKIARYALDNWADLRDFTPMDAIRYDLKTLNRQFQLASKQRTASANNLIALLEQSFPGIRKCFDSPVRSDGTQKWVDFAHSFWHVDCVRKQPFPAFCERYRKWCKRHAYLFKQSNAEEVYALAKRAVVLTPKSKVVKVLVQEAANQLISISRSVEVYRAEMDRLAAMLPEYPVVMAMYGVGKSYGPQLMAEIGDVRRFERKQALVAFAGIDPMPNQSGDKNVRSNKSSKRGSPYLRKTLFNVIRTYLQCAPQDEPVFQFLNRKRAEGKPFYVYMLAAANKFLRRYYAKLRDYFASLDTLQPVAPIPTILKATL

SEQ ID NO: 100946 - protein, 309 aa, unidentified
MKESSKVIAFDAGKWRHRVFLDSQLKDVDNKKGALRSLLEAQPEGTIVAIESTGNYHRLAADLAYQMGFTVYVLNARRTAAFKRADKMRGKSDNIDARFIARYVCLFADSLHPYIPFPQRLGRLRWLSKRRIDVASRKHDLQMSLRSSGLQSFAELEEAFDKLLAEIDAQMLEIAKEYPSYKRLLKIPGVGPVVAAGLLAVLEHYDFQKPDSFVAYCGLDPRPFESGTKVGKHKTSKFGDACLRRFLFLGAMSGQKCNAYKIYHQQAIDRGLKPMTSLMRIARKIAKLAWQAVKLNMEFQDEIFLKQLT

SEQ ID NO: 100947 - protein, 331 aa, unidentified
MFPVGIDVSKNTLDLCMLYDGIKGRIKTRNIQNNRHSVENILRWLRLQHCSPEDVHVVMEATGVYHEQLATELHDAGFRVSLANPHRSREFARGMGIMTKTDKVDAYMLACYAFLKKPHRWEPPAPEIRYLGALLRRRDVLLGDALREENRLEKYLSTDTPADIISSCRRMAQLLREEISNIERQIKAHIKASPALRRDYTLLTSIKSVGPQLGMHMLIVLRSHNFVSAEQAAAFLGVVPIEKRSGTSVRRRPRMSKIGPPQLRAKLYMSALCGKIYNKRMRNIYDEMCLRGKPKMVAIGALMRKLVHWCYGVLKTGTFFNDEDLKPVLST

SEQ ID NO: 100948 - protein, 412 aa, unidentified
MEAIIERCCGIDVHKKTIVACLMVGKPDGKPQKTIKTFSTMTRELLACKDWLESEGCTYVAMESSGVYWKPVFNILEDSMEVILANARHIKNVPGRKTDVKDCEWIAQLLRHGLIKGSFIPPKPIRELRDLTRYRRKLIQTKSSELNRIHKLLEDANIKLSSVVSDINGISAQDMIYHLIKEDMSPKEMAELARGRLRKKITELEKALEGSLREHHRLILKVSIQMIASYDNAIDKLDREIDQRMEPYREESERLQSIPGLKKKTAESIVAEIGVDMNRFPSHCHLSSWAGVSPGNNESAGKRRSGKSTPGNRWLKGSLTEAAWAASKSKGTYLKARYHRLASRRGKKRACLAIGHTILIMAYHIIKEQCTYRELGADYFDRLNEVHIIRRLTSRIQVLGYHVSIERLPIAS

SEQ ID NO: 100949 - protein, 325 aa, unidentified
MIQFTLGIDVSKDTLDFALLGGKKTEYRHFTNNESGYSHLVNWLHKAGAKTPHACLEATGQYGEGVATYLHNHGYWVSVVNPACIKAYAASMMRRFKSDKGDAEVIALYCQKEVPALWTPPPDSFRELQYLVRYLDDLKSMRQQERNRLKSGVTSLRVRADLKAHIDFMGAQIEQLTKEIARHIDQYPELKKQKELLKSIPGIGDITAAALLSEVRDFGAFESARQLAAYAGLVPEQRDSGTSVHKKPRMGKRGNSHLRKSLYMPAIVAIRHNPIVRALSERLKATGHCSMSVVGAAMHKLLHLAYGVIKTGKRFDPAYGQNLTA

SEQ ID NO: 100950 - protein, 445 aa, unidentified
MHYKRLLTLIDSVSSYLSVGLDVGADFTWMSIALPNGSFIGKPFKIVHSDPRSRDLAVAKIKEAQETYSLKSRCFLESTGIYHIPLLCFLRDKGFDCSVINPIITKNSTNINIRKLHNDKFDSKKAALVGLNVSLKTSIIPDDSVVDLRNLVRDYYYFKDLQSAVALKLTAELKVSFPAYAKVFSKVTTQSSLKLLSSYPLAEDMLAASKDDIVKIIRSTARFGEAYALRKYDTIIAAAQDAAVFGRALPSNAVRIRLYIDTYQEYQKHLDALLKALHETVDRLQDTLIYDQICLLQSLRGIGFLSAIVLIAEMGDFKLFSSPKKLYAYFGLDPAVKQSGKLNGDKVHMSKRGSSLARRVLHMVALNNVKIDKGSGTPVNPVVYDYYTRKCSGKKKTVAMGAVMHKICNIIFAMLRDNKPFEIITPEEHCRRFATEHPDKIRKAA

SEQ ID NO: 100951 - protein, 392 aa, unidentified
MVISVGVDVSKDKHDCFILSSEGEVLADVFTIPNNLDGFRFLLQRIRDCTHAQDKIKVGLEATGHYSYNLLGFLLDNGLPTYVLNPLRTNIYRKSLSLRKTKTDRVDARTIASMLLSDAGLKPYTNTAYHNEELKSLTRYRFDKVKERAKLKSSIARLVCVLFPELEKLVPSLHIASVYALLEEFPGAKQIAAAHLTRLKTLLETASKGHYKRDMALEIRDAARNSIGSWMPAKSLELQHTIRIIRELDDEIAEIEKQIQAIMDELNSPITTIPGIGFRMAAMIFAEIGDFTRFDSPDKLLAYAGMSPSTYQSGQLKNCYPHMEKRGSRYLRYALYNATKYVCHWDPTFAAYLAKKRAEGKHYNVALSHAAKKLVRLIFAMEKSRQPYCLVA

SEQ ID NO: 100952 - protein, 410 aa, unidentified
MEALFECVAGFDVHSKTVAVCLRRVIHRKGLKEIRTFGTMTRDLLALSDWLTSEGVTHVAMESTGVFWKPIYNILEGQLEILLVNARHIKNVPGGKTDVKDCEWIAQLLQCGLLQGSFIPPKPQRELRDLTRMRTQLTRESSAVANRIHKVLEDTNVKLGLVATDILGVSGRKMIAALIDGETDTARMADMACGRLREKIPLLEQALLGKVTDHHRFMLRALMDHLIYLESQIERFNPRIEGAARPFEKAITALIPRPGYDRASAQSGIAEIGPDMNQFPTDAHLCSWARVCPGNNESAGKRRSGATGQGNRWLETTLVQVAWAASRKKNSYFQAQYRRLAGRRGKKRAIVAVAHSILTDTYHILKEGTSYHELGADYFDHLHHDRIRRYHVKRLQDLGYTVVLGEEQVA

SEQ ID NO: 100953 - protein, 452 aa, unidentified
MVKRSKKRCEELPILHPHAAGIDVGASELFVAVSADRDPQPIRSFPTFTRDLNALADWLQQCGVRSVAMESTSVYWIPVYQILESRGLEVCLVNAQHVKNVPGRKTDVSDCQWLQYLHSVGLLRASFRPPGFICAIRSLWRHRSSLIQMAAEHVLHMQKALDQMNLQIHRVLNDITGMSGLRILDAILAGERDPVTLARLCHGGVKNSEDTIAKSLEGDYRPEHLFALRQSLAAFHYYQQLVVEVDQEIQGQLGSLETATTAEPTVPKRTKASAYQRRRYEPKTFDLRGELYRIFGVDLTNVPGISAITAQTVLCEIGTDVSRFRNASAFASWLGLCPENKISGGKVLYTKSRRVRSRVATALRMAANSLHHAKDYLGEFFRRITRKLGKPQAITATAHKLARIVYHLLSTKEAYNETVFHRCDEEAIKRAQYRLRKQAAHLGFQVIPLQNG

SEQ ID NO: 100954 - protein, 418 aa, unidentified
MKVVFPTCCGVDVHKSFLVATIIKTPQDSLQPCYQKKRFSTFNSDLNHFADWLHENDCLDVCMESTGKYWVPVFNILEKRGICVVIANPKWVKAVKGNKDDTKDSKWIGDLFRIGLVKSSFIPDKDIRILRELTRYRYKLTSMRSSEKNRFQNAFTVCNVALDSVVSDMFGKSATAITDYLTSGEDFDAQHCISLLQRSLKKKADDVLQSIEGYEITAEQKTRIGIIRDHLHYIDTLIERVDICINTMIDKYEGYIVLLRTIPGVDRSSAITILSEIGVDMTQFGSSKRLCCWAGLTPGNNESAGKKKSVRISRAGIYLKPALVQVAHAAVKDKLSPYYSLKYERIAKRRGKKRAIIAIARMILTAVFVMLSNLEEWNPVDLYRADMPEHLKEKQLAKAVKQAVRFLETQGLTVLDSA

SEQ ID NO: 100955 - protein, 410 aa, unidentified
MEILYETCAGLDVHKNTVVACVRDASGRTVVRETRTFGTMTKELIELFDWLASMKCTHVVMESTGVYWKPVWRVLDGGFELHLANATEVKNVPGRKSDVNDARWLADLMAHGLLRSSFVPPEAVQDLRDLTRTRRQLIRETTQHKQRIQKVLERCNIKMASVVSDVTGATGRAILEALIRGERDVVKLADLAQGSIKRTKWLALAESVRGCTRAHDLFMLDLHLQTLDGLTKQIDRIGVRITEVMPAPFDEATRRLQTMPGVSHRVAETILAEVGIDMSTFPSPGHLISWAGLCPRMDESAGKRRSTRVRKGAPWLKPVLVQAAWAAVRKKEGYLRSFFFKLKARRGPMKAIVAVAAKLLTAAYFILRDSVDYKDLGAAHLDQLDKTRASRNLVRRLQRLGFDVELRAAA

SEQ ID NO: 100956 - protein, 434 aa, unidentified
MVASTEGRDLWWTLGTDCHEERHRFVLVDEQCERQGEWWVANRRDTIEDAVAKIVLNLPEGKRLRVATESDRNLAWVVAQVASQLGLEIWHVPPKAQDRYREAEGLPRKDDEIDAFLSARMVWLGLRGCRVIYDPQPEERALCRLTRLRHSQVSRRRAVQAQLRSLFLEVAPEVLGSDWEGPVFAGQGMRAVLRRWPAFRGLERAHSKTVEKVLRANSRYGDRCIDMVKPLKEMARRIHLSAEEREVIEMTVSMALDELELLDKVIAKLSREITHRVEAHPVGKKLLAMPGVGTITAATDIAEILPVARHVSEGKAATYAGLTPLSRRSGKAAADGKGSSKLARGTNKHALRTNYLSAVAALQASAIDAAYHRKQKTRHQGHPKPHVKATIALARQRFKVKYKLMTSDAVYDKEKLIASHLERLERDQTRSSGA

SEQ ID NO: 100957 - protein, 325 aa, unidentified
MQIYGIDFAKDKFDVSFLAPTLKNVSNKPAHKVVRNNESGITKFIKTLPADAVLVAEHTGVYGDRLLKHCTESHINIAYVGGYVIHTYKSAPDRAKTDMLDCAVLREFGERFTDKLIYKTFPKKELYELKQLARHRTMLVEDRKRYVTADKGEDCRPCRSMQVKESMERIMKILTEEIARTEKQMLDIIRAHEELSRNYDIITSVKGVGLITAVELIVKTENFTTIKTASQYAAYAGTAPYEKSSGKMNKGAHVSKIGNRRSKTLLYICAESARMHNKEIKLYYERRTIIDKKPHFYVLNAIVNKLLKIIFSLVTKRQMFDSDFI

SEQ ID NO: 100958 - protein, 457 aa, unidentified
MPEAKQSRPQRGLTPVHPAAAAIDIGATMHVAAVGPNRDAEPVRTFQTFTEDLHRLADWFTRCGIKTVVMESTGVYWIPTYEILEQRGFEVVLVNARDAKHVPGRKTDVSDAQWLQRLHEYGLLRGSFRPQAEMAGLRAYLRQRERLLDYAAAHIQHMQKALTQMNLQLHHVVSDITGATGMRIIRAIVAGERDPNVLASYRDVRCHASVETIRQALVGNDREEHIFALTQALELYDVYQEKVAACDRQIKAILDQLKRSAAPPARELPAARRSTRQPNAPVFEVREALHAILGVDLTQIHGLGPYLALKLVGECGTNLSAWPSAKHFTSWLALAPHNKISGGKVLSSKTRRTSNRAASLLRLAAVTVGRTDTALGAFYRRLSGRTGKAKAVTATARKIAVLFYNTLRHGMSYDDPGASYYEDRYRQRVLRNLQRRAKSLGFVLHQADLAATQAGVS

SEQ ID NO: 100959 - protein, 412 aa, unidentified
MDIVHERAAGMDISKRDAKVCLRLPGERAGTYTSTVTTWGATTAQILALRDFLEQEHVTTVVMEATSDYWKPFFYLLEETLPVILVNAKAARNIPGRKTDVSDAAWLAQLGAHGLLRASFVPPEPIRELRDLTRARAIAIRDRTREIQRLEKFLEGSGIKLSSVVSDLTGVSSRAMLEALVSGERDPEVLAGLAKGTLRSRIPELVEALTGRFKAHHAFMARLHLDQIDAQSRIIDALTGRIEEAMEPFRAAREFLATIPGVSLKVADVIIAETGADMSRFETPGRLASWTGVCPGANESAGRIKSAHVLPGNKYLKGALGIAAMSASRGKDTYLAAKYWRIAARRGPMKATVSLEHSIITAVWHMLADGECYADPGADHFTRLDPIKARNNAIKKLNSLGFDVTITPATAA

SEQ ID NO: 100960 - protein, 462 aa, unidentified
MNKKTAKRPHAKNIVEMPLVNACAAGIDISDKEHVVAIPEDKAFEHVRKFGTMTCDLKLIISWLTECGITTVAMESTGVYWKPLFSMLVGAGFEVYLVNSKHVKNVTGRKTDEDDAMWIQKLHSCGLLKSSYLPEDEQDALRTLVRYRRVLIDDCSRFINRMQKSLELMNIKFHTVISDITGKTGKAVIEAIIAGERKAENFLPLIGKRIKAEHEIIRKSLEGNWREEHLFTLKESYEIYKIYQQRIAACDIEIEKQLQRYEAKCNEGVIEAGKKTQEERKTGATKKQRKKKDKNHPRFDVRGYLQRIHGVDVLAIPGLSETGGLEILSETGTDLSKWEKDTNFCSWLNNSPNNKISGGKVISSKIMKKKANAASQAFRRAANAVQKTDTWLGDYFRRMKTKGGHKYAVIATANKIGTIYYSMITKKEEYKPWQLEQYQQKYKKAKIAYYERKLEALKRQAA

SEQ ID NO: 100961 - protein, 342 aa, unidentified
MDEYDGRQFVGIDLHRQRSVIVRQSESGEQLSAVRIHNDPLALQLELERAGTDPEVVLEATYGWYWAVDVLQAGGAHVHLAHPLGVKGFRYRRVKNDVRDAGDLADLLRMGRLPEVWIAPPQTRELRELVRYRAKLVAIRSGLKAQIHAVLAKAGVLIAVSDLFGVGGRRRLAKVALGGAYAERVRSVLELIDVLDGHEAQFAEMIAKRLDAHRGYQAIQQVPGIGPVLAAVFVAEIGDVNRFGDPAHLCSWAGLTPRHRESDTVVHRGHITKQGSKLVRWAAIEAVQRHQTTAKIVADKDRIEARRGKNIAKVAAARKLLTLVYYGLRDGHIRALDRARAA

SEQ ID NO: 100962 - protein, 347 aa, unidentified
MNLVAIDLGKFKSVACLYRSDDDVTYRTIETGPQAVHDLLVEWEPERLVVEVGTVTGWVHDIAVGLGIEVQVANPNTEGWRWKRVKRKTDRDDALKLARLSVLNQLPTVWMPVLRVRQWRALINYRHELVSRRTAIRNSIRSILDMQGYRMAMGARAWTEAGIAALRSLAKPAAECEPEELWKGQLETELTLLEALGRQIDLVESKLDSLAAAEPRTSRLRTIPGVGPRLSEAVVAWIDDPHRFRNARAVGSYVGLVPRRRQSGTYDRSGRVTKHGPCLLRKLLVEVAWIMRQHNPHAAALYNKLNKGEKTRRKQATVALGRRLLTWCWAMLRDETTWDAQKVGITV

SEQ ID NO: 100963 - protein, 345 aa, unidentified
MTKPQSAVEVFAGLDVSAREIKAARVQRPGENPTLATFANQASGHKALLAFVLERTERVRVCLEASGNYSLDLALVLHAHPQVEVSVINPRRARKFAESLGERSKTDPVDARVLCQYAARMPWESWKPPSLTALHLRAITRAIESLGVMHTQENNRAHALCSSEALPALVLRERQRHQRYLENRMTQLRREARRLIARDAELDRRYRLMLTVPGIGETSALQILGELVVLFDRADARQWVAFSGLDPCIFTSGSSVEKRPRISRGGSRHLRRALYMPALVALRREPHLRRFYERLLKHGKARLQAVIAVMRKLLHALFAMFRTNQLYDGSKLCAAEVPGTIAACA

SEQ ID NO: 100964 - protein, 395 aa, unidentified
MFIVGIDIAKRSHEAIIIAEDGQVVRKAFSFRNNCTGYNLLLEQVRRLTLVKSQIVFAMESTAHYWLALYARLLKDGYAVMVLNPIQSHSLRELYIRKAKTDARDSLIIADLVRFGRCKASNVPQDKILALRELCRSRAYLVDMAADLKRKLIALLDRIFPEYESLFESVFSKASIAVLRKYSTPQKVKNAHLGKLTDILMESSNGHFGEWKAHQLKEAACSSFGIDDSGGVYSTLLGMFLEQILSLTAQADSLEKQISVFFQEFNNPLTSIPGVGTVLAATILSEIGDITRFSSADKLLAYAGLDPSVKQSGEFKSNQNRMSKRGSPYLRRAIWLASTVAVHRDPMFQTYYEKKISEGLHYMNVIGHVSRKMTAVIFAVLRDGQPYQPILQSAG

SEQ ID NO: 100965 - protein, 293 aa, unidentified
MRFYAAQHRFYCGIDLHARTMHVCVLAADGTAVLDRNLPCHFPTLLQAIAPFRPDIVLGAECMFGWYWLADRCAEHHISFVLGHALYMKLIHGAKAKNDKIDAHKIARLLKGGNFPLSYTYPQGMRETRDLLRRRMYLVHKRAELITHLEILNAQNNLPPFGKKLAYAANRAELDIPRRFTDPSVQLSAALDLELIDKLDGLIAQAELYLTRTAKVDDVQTYHRLRTIPGVGPILALVLLYEMHRAERFEYAGQFLSYARLAPCDHESAGKKLGSGGKKIGNAQLRWASGSAG

SEQ ID NO: 100966 - protein, 334 aa, unidentified
MRNLYTFYVGVDVAKSFYVVAILSIEGNEEKLRSFRVEANPRAFEKRLISIIGSCKRTDLLIIMESTGPYHVGLAEYLSRQGYKVVVANPFAVKRFIEANMSKAKTDKIDAEFLAKFGMHVSDHRLYELRSEEEKKVERYIKLIEDLKEKLVALENQREAARIILGKEDKDILGSYDRIIKELKKEIEAKERELKEYLKRSFAREYRLLLSIPGIREKAIGVILGVMRGFRGFKSVKEVVSYAGICPRVVESGSSVRQRGRMNRRGNRLVRRVFFMCALSAVRANRYCRELYERLLSRGKSKKAALVAVAAKLLRQAFGVLKSGRPFNAELATP

SEQ ID NO: 100967 - protein, 311 aa, unidentified
MEHSRFVGIDVSKAHLDVHVRPTGDSFRVSHDDAGFAMLIERVRPLTPTVLVLEATGGYEVTVTAALASAGLPVAVVNPRQIRDFARATGQLAKTDTLDARVIALFAEAVRPAARPVPDQQAHALGELVARRRQLVDMLGAEHNRRRLLRDRRLQRHLDAHIAWLEEALRRLDHDLTTLIRSTPVWRETEDLLRSVPGIGPVTACTLIADLPELGRLDRRRIAALVGLAPFARDSGAFRGRRMIAGGRARIRRVLYMATLTAAKHNPAIRAFYQRLVAAGRPGKVALTAAMRKLLTILNAILRDRRAWLSP

SEQ ID NO: 100968 - protein, 427 aa, unidentified
MSERKSLEIRVSVDVGSRSHQVAIGLSSGEVLEEFEIAHRVEGFEDLFSRIERHRKGNSYRVAVAMEGFNGWARPLDSMVRGRGYRLYNINNLKLARFKEIFPGAAKSDRIDARKGLELFQLRDHLPLAKEVLQEVVGTPHENEVLKRLSRRRRRLVDERVRVVNNLQADLQAVCPGLLEITKEAGNQWFLNFLISADTLPQLARLRRTTLLKIPSVGVKYARLIQDWQERAHFSEEVEWVSAMIQEDARRILELDETIKALEVKTAEVAETSTIAKLLRSIPGYGAICTSELAGEIGTIERFNKEGSLALYLGMATLDNSSGKYQGTKRPKHINTRAKAAMMTALDRHRKYVPQSQQYYEKKRAQGKSHNQAIRALGRHLCRIIYKMLKEKREYEVRPLKRDTQAKVTSRSSRIGQIGKKKISAKG

SEQ ID NO: 100969 - protein, 405 aa, unidentified
MNAVGIDASKGKSMVTILRPFGEIVSSPHEVKHTSDQIDDLIQEIRSLEGESRIVMEYTGRYHEPMARWLSDAGLFVSLVNPKLIKDFDNDSLRKVKTDKADSVKIARYTLDKWHKLKQYGAMDELRNQLKIMNRQFGYYTKLKTAMKNNLISLLDQTFPGANTFFDSPARSDGSQKWVDFVDTYWHVDRIRSMSLAAFIEHYQKWCKRKGYNFQPDKPAEIYESVRNIIPMLPKDEVTKFIVRQAVNQVNTASAAVEELRTRMNDIASQLPEYPVVLAMKGVGTSLGPQLMAEIGDVTRFTHKGALTAFAGVDPGKNDSGSYSQKSVRTSKRGSAPLRKTLFQVMDSLIKTMPQDDPVYEFMNKKRSQGKPYYVYMTAGANKFLRVYYGRVKEYLSEHPEIAEN

SEQ ID NO: 100970 - protein, 330 aa, unidentified
MKKIFIGIDFSKEKFDVVIIMAENLEEKAPRVHEQFANDKAGYRKFLKWVKENSHGVDMSLWLFCGENTGDYSKGLSNFLYGKGCDMWLENAKCIKDSCGIRRLKSDRADAAMIAEYAMRNHDRMTLYEPLSGPLAQLRELFLFRQMNVRKRSGYIVRKGEKGRTLDSSLAKSFMARKCKHMIAELDKTIKECDKMIEALIASDRDLQETYEIVTSVPGIGTQNAVCMMVYTDNFKRFDCNPRKIACYYGIAPFGHDSGTSVHCDPHVHYMANKTIKGILTQAALCAINHCPPVAHYYARLIERGKKTMVALNNVKNKLVRIVTALVRTK

SEQ ID NO: 100971 - protein, 357 aa, unidentified
MEYCGIDAHSKSSTVCVINEMGEKLMLAKTPSTKEGLGKKVGMWDVLMPIVIEACSTSRPVIRHLQDMGFENVVVVNPQATSQMRARGKKTDCVDAQGLAELARLGLVEAWRVHIPGDWAQQMRDLLYDREFVIKHRVAITNRVTAIFRREGKMCPSLKGESGWRKILELLPEYSEEFEFYRRMRRQYLDRETALTGRIKSEAAKHPQYEFVKSVPNVGTLTAAILLACIDDISRFCSARSLASYFGIAPSVFQSGATERTGSITKRGNSLARKFLAQASHHSRYLSSPFNAVYRDIARKKSTSVAVMTVARKIVTSVYAVMKHNELFDPIKMGLLKVDQEMKFVREYERAHKVEAV

SEQ ID NO: 100972 - protein, 334 aa, unidentified
MNFKSYVGIDVSKNQLDFAVLDLHGKLLKSSQFENTSAGRKAMLNWFKEHACLKDALFCLEHSGVYGLPLCVFLEENELAYSIQSGLQIKRSMGIRRGKSDRADAMAIARYAYRNRDEIECSKLPSRIIMKLKKLISYRERLIRAKVAIQTAAKEMKEFTDKGLHAEIVRDSQQHEKRLLKSIGEIDSKLKELIQSDEDLQRIFELATSVKGVGLQIAANLIVATHGFTRFSTWRKFSCYCALAPFEYRSGSSIRGKTRTSSLGNRRIKAIIGNGIASAIQHDPEIKQYYHRKLEEGKHKMVVMNAIKNKLVSRVFAVVKRGTPFVPLHQHLAA

SEQ ID NO: 100973 - protein, 415 aa, unidentified
MKKVYDKCCGVDVHKKVIVACFLNGKEKELKTFGTTTRELLEMADWLTAGGCEMVAMESTASYWKPLYNVLESSGLNAMVVNAHHMKAVPGRKTDVKDAEWIADLLRHGLLQASYIPSKDQRELRELVRYRKSLVEDRTRELNRLQKMLEGANIKLSGTVSNINGMSARNLLDFIIGGGTLTAEKYDELFMAGKISPMLKAPKQQIIDDLNGMLTVIQRRMLKELISHLDELNQHIRNLDNDIDGTMKPDEKEAAKAIQEIPGIGETSSQVIISVIGTNMERFPSDKHIASWAGLCPGNNESAGKRKSGRTRKGNAMLRTTLINCAHAAVKRKDSFFAAQFARIQVHRGKKRAYVAVAHSMLIAIYAVLKSGDVYRDLGFDYYNQFNRERKIAAYLKKLKALGWDQSAAITPAPV

SEQ ID NO: 100974 - protein, 410 aa, unidentified
MEAIVECCAGLDVHQATVVVCVLTGPPGTKLKKEIRTFGTMHHELTALRDWLMACGCTLVAMESTGVYWRPVFGMLEDHFDVIVGNAHHMKNVPGRKTDVKDCEWIANLARHGLIARSFVPPRAIRDLRDLTRYRRKLVDAAAAERNRLIRLLESAGIKLAGVVSDVFGVSGRAMLHALIEADQSPAEMAKLARGRMRRKLTELEHALHGTMDEHHRFILRLQLGRIKAAEADLVVLEARIEEKLTAYEEPLSRLLGIPGVDRVVSASVIAEIGVDMTCFHGASHLASWAGICPGNHESAGRQRGGKTRKGNVLLKTALVTAAVAAGKARGTYYADKYRRLCARRGKLRAAVALGHTILVAIYHMLADGTFHADLGADYLDRLDKRRTSNQLIRRLNNLGFDVQLTPKAA

SEQ ID NO: 100975 - protein, 314 aa, unidentified
MSARTFVAALTVNEKVSAAEEFSNDARGFRRLHGWLGQHFAGKVRAGIEATNIYGHALAAALHGRGHEVYLLNPEQVAHYARAIGQRNKTDHCDARTIARFVAAHNDFTPWRPRAAAHAALQALTRARSQLVSAREELTNQARTASAPAKAVLVGAVADLRARVVEIEAKIRRLLSEHPELGDQVRRLRTIKGVGQITAAVVIAELPPVDRSSDPRALAAFAGLIPRRWQSGSIVLPARLSRKGNAYLREALYMPALVARRFNPVLREYAQRLKTRNKTSGAILGAVAHKMLRIMVGLLKHQVDFDPNWTFSKA

SEQ ID NO: 100976 - protein, 343 aa, unidentified
MMKVSTIGLDLAKNVFQLHGVDASGAVVLRRQLRRAAVEKFFARLAPCLVGMEACGSAHHWARVISRYGHEVRLMPPAYVKPYVKRNKNDGRDAEGICEAVTRPTMRFVAVKSIEQQATLAVHGTRALLVRQRTMVANALRAALSELGIVAAQGYEGLRELMARLEEPSEGIPEMMRCALLLLAKHWQALDADERVLERQIGKAAHCDRDARRLMEVPGVGPIIASTVLAKVPDAKLFRSGRDFAAWIGLTGKDHGTGGKHRPGRISKQGDRVLRALLISGASAHLRQQKARGVTDPWLRDLLARRPYKVAMVAFAAKTARIIWAMLVKGEPYRDRASAPAAA

SEQ ID NO: 100977 - protein, 371 aa, unidentified
MLTHEHGVAGIDPHKNSATIAVLDRRGGVVGSESFSISEEGIDQLLTFLLGIELTINRIGVEGSGFLGRPLVLALTAAGYDVREVQANRTAERRRRRRRAKTDIEDAEAIARETLADPHLPPAGKHATPSPAWQTLTVLRDWRASLVLQRVRLLTEAEAVLVTLPVTIRDALPATSRVLPQLVTLADGHAAPGELAPADQLKLDRLAASLLDITTLTKRIKELDRQIPAIIAELGSTLTDLHGVGVVTAMNLLVEIGDPHRFTSEAQFARWCGIAPVAVSSGEGHGPARRHRLDLGGNRAVNSILHVIHVTQARCHPPAKEYLARKIRENKSKREARRCHKRQLANVIIRHMWNDAERHASTAPADREAAA

SEQ ID NO: 100978 - protein, 325 aa, unidentified
MQNQTIVGIDVSAATLDICVIGKEQKSVVVKNDVTAIRRFFMAYKNEDLFIGMENTGRYNWALYEVLKDMHHQVYVVSPLHLKKSMGLVRGKNDKIDAIRIASFISKNHTDIPRWKPSSPAVQKLKILLTERNARIKSKRQLLKQQHDYAKMKHLGLDKYLQKLNLQQLVLIDKQLVQIEQEIETIIKADERMNEQAKLIRSVPGAGKVLSWMILAKTESFITINEPRKMACYSGVVPFSNQSGTSIRGKQRVSSYADKAIKSILHLAAMSAIRLKNDLREYYLRKVAEGKNKMSALNAVRNKIVHRIFAVIKNQTPYKPNLLLS

SEQ ID NO: 100979 - protein, 312 aa, unidentified
MIASPVYLGADVAKASIDCRLLDQSFSITNDSAGFAKLGSRLKPLADCRVHVVCEATGIYQNAFVDYLHKHKIPVSVVNPRQVRDFARSRGILAKTDRLDALVLADYGRANPPTPNAPKPQHIKRLGALLAQRDHLVTERAVQKTRLHQVEDRWLRAQTERAIAFFTREIEKLEAQLLALRNADLELKAKAERLDQASGVDWRSALALLGYLPELGTLSRRAIAKLAGLAPLNHDSGQYRGQRHISGGRAPVRRLLYLASLTAIRRNPILKNFYLSLKTAGKPSKVALIAVARKLLILLNSSLKNPNLSLAS

SEQ ID NO: 100980 - protein, 349 aa, unidentified
MNFYTNTHPYYCGIDLHTRLLYVCIIDNENNILVHEKIDDSPGKLLALLKPYLGNIVVGVECMHCWYWVSDFCEENNIDFILGHALYMKAIHAGKTKNDKIDALKIAKLMRGGNFPLAHAYSKEHRSIRDALRRRTHIMRMSAQLKAHVASTVSQYNLPALETRLDLRNSPDREKMRHFFPDEAVQKSMDLNLNIIETMVSELYKIEHYVKTQAQTHCATDLHILKSFPGIGKILALTILYEVGDIKRFSSVQKFASYSRLVKCKAESAGKTHGTQGNKIGNAHLKWAFSEAAVLYLKGNDNAKRYLAKLQKRMSKAKALSALAHKIGRCTYFMLKNQQVFDEERFLNG

SEQ ID NO: 100981 - protein, 331 aa, unidentified
MNYSHFVGLDVGKNTFDASLMSADEKELSHNSFDNTPEGIQSLLVWIADHQLSLSNILFCAENMGNYVTELSVSSVSMGFSLALVCPLTIKKSIGLQRGKNDRIDAKRIANYAVLHYRKLKLYKLPDKDLVKLRGWIIVRDNLVKQKVSSIKLLETFSQMSRLADVAESISFLEEQLNSIKEKILKVEEAMEKLITANSSLYTNYILLRSIKGIGVINAVVLLCVTDNFQRFDNPRKFACYCGVAPFEHTSGISIRGKTQTSPLANKEVKVYLTRAAITAIAWDPQMKAYYKRKVAEGKHKASVINAVRAKIIARAFAVIRRQTPFVTLVA

SEQ ID NO: 100982 - protein, 341 aa, unidentified
MNHYAGIDVSLECSSVCVVDAGGKIVREAKVASEPEALIAWFRSSGFALERIGLEAGPLSQWLFAAMKAAGFAIELLETRHVRKAFEAMPVKSDRNDARGIAQLMRLGWFRPVPCKSLGAQETRALLTARKLVQSKLRDVENSLRGILRGFGLKVGKTTGRQFAGRIEELVSGHPHLQMIARALLAVHAVLRSEFAAFEKQIRKTARSDPRTRLLMSTPAVGPIVALTYGSAIDDPARFKSSKQVGAHFGLTPKKYQSGETDYTGRISKIGDGSVRTALYEAAHVMLTKPIKGCSQLKSWAMRIARRAGMSKAKVALARRLAVIMHRMLADGTPFNAAAAA

SEQ ID NO: 100983 - protein, 331 aa, unidentified
MKKKCFIGIDVSKGTLDTYIHGTNHYFVAPNSTTGFPFLLEECCKSLKCKTAELFFCFENTGRYSRQLAAFLSESGITFTMAPAMDIKKPLGLKRGKSDRIDAKAIALYAWQKRDSIEPTVLNSGMVAQLRQLLTLRDKLIRHRTSYKNAIKDLQDIFFEGETEFLMESQVRMIAHLNREIDLVEGQLEQIIENSGNWKNNYHLIQSVRGIGPVLAKYLIVYTENFTRIDNAKSFACYAGIAPFEYSSGSSIKGRTRVHPFANKHLKSLLNIAAMGAVQLQGEYKTYYLRRTEEGKNKMSTLNIIRNKLVSRVFAVVKRQTRYVDLSKFAA

SEQ ID NO: 100984 - protein, 392 aa, unidentified
MVISIGIDVSKDKHDCFIVSSEGEVLADVFTIPNNMDGLHCLLQRIQACATPQDKIKVGLEATGHYSYNLLGFLLDNGLATYVLNPLRTNLYRKSLSLRKTKTDRVDARTIASMLLSDAGLKPYTSTAYHNEELKSLTRYRFDKVKQRAKLKSSIARLVCILFPELEKLVPSLHIASVYALLEDCPGAKQIAAAHLTRLKALLETASKGHYKRDMALEIRDAARNSIGSRMPAKSLELQHTIRLIRELDHEIAEIEEQIQSIMDELHSPITTIPGLGFRMAAMILAEVGDFTRFDSPDKLLAYAGMSPSTYQSGQLKNCYPHMEKRGSRYLRYALYNATKYVCHWNPTFAAYLAKKRAEGKHYNIAISHAAKKLVRLIFALEKSRQPYCSAA

SEQ ID NO: 100985 - protein, 341 aa, unidentified
MQAPRHIGIDLHRNQFTCCVRLENGRNYLTEWKLEDLPRFVNKLRPADEIAVEVTGNTRLFHDAVAPHVRRVVAVDPNQFKVISHSVKKTDPNDARNLALYLEKDLLPEVRMKDKTQAQLASLTQTRDTLVKLRTALKNKVNNILSAHGINLEKEALSSEKKLKAVLGTPFDPMVKIELEVIIEEIRSLNQRVAKLEKTIADEGSKLEGHKNLTSIKGIGPLTGSILLSVIGDINDFADEGKLAAYFGIVPRISNSNETERSGRITKRGSKLGRTALVQCALIAQRYSPYLKRYYEKIKARRGTGKAIIALARKLLGIIYRTLKNNWVFADFPNFVLAEAV

SEQ ID NO: 100986 - protein, 368 aa, unidentified
MHEGITAYIGLDVHKDSIAIAAAGKDREVPHFVGTVRPDFKQVRKALSHYGSPNSLQVVYEAGPCGYALARQLLADGFDCQVIAASRITRSPTERIKTDRRDAITLARLARSGDLVAVRIPDERDEAIRDLSRARQDAVRACLKTRQQLKAFLLRHGRPLRGSKPWSPTGEMYLSKISFDHPAQNIAFADYRQAVLDTRARVDRLTEALRAQCEQWRMQPLVSALACLRGVDFLTAVILVAEIGDFSRFAHPKELMGYLGLVPSEYSTGERHHRGDITKTGNAHARRVLVEAAWNYRFPARLSHPITRRQEGQSKPVRDIAWKAQLRLGHRYRKLQSRKLHQNKIIVAIARELSGFLWDIARHVTIPG

SEQ ID NO: 100987 - protein, 338 aa, unidentified
MKVHIIGIDLAKNVFQLHGVDRKGSPVLVRRLRRDQLLRVLGELEPCLIGIEASTGAFYWQRQFEKLGHAVKIMAPQYVKPFVRRQKNDTNDAEAICTAVQQRNMRFVPKKTLQQQDIQTLHRARQRLVNHRTALISQMRGLLLDRGIAIAVSATRARRLIPKILAAPNDELTALMRETVSSLYAFMLQIDERIRVFDRKIDAIFKASEVCQRIAKIRGIGPKTATAMVAAIGNGSDFKNGRHLAAWLGLVPRQHSSGDRRVMMGISKRGSQHLRTLLVHGARAVVRTAVRKTDSRSMWVNELRQRRGYNRATVAVANKNARVIWAVPTSGESYRSAA

SEQ ID NO: 100988 - protein, 424 aa, unidentified
MLAVVVSDVEIDSEYQFERKRFRSNPEQLRSLAAWLLEQAVEEVVMESTAQYWKPVWEALERYWKPTCEKREGARRKSGTLHLAQALSNRGRRGRKRDFPDAERLVKRLVAQELTLSFVPDAEQRLWRTVTRKKYQLRCDRIRLQNQLESLLEEAHIKLSSFVSDLLGLSAQRMLKAISEGETDPAVLAALADKHLRATPEQLCDALGACTQLNPVYRRLLKLRLEELRLIDDQIGRLDREMASLLGEHQDAVQRLAEVPGLGVDSAQQIIAEVGPTAATFPSAKCLSSWVGACPGDDETAGVNYSHRSPKGNRQMRRILNQSANAAARTKGSIFEIVYRRSVPRLGHNQAIGAIAHRHCRLIWLILHRGVRYEERGPAVTRRSKQLRTWRMIRQLRSLGYHIAPPNPQPSQEQVIFDPGVLPA

SEQ ID NO: 100989 - protein, 357 aa, unidentified
MLSSNVKYIGLDVHKEAVAVAVLNSAGKLVMESIIETKASTLLDFLQGLRGELHVTLEEGTWAAWLYDVLKPRVAEIVVCNPRRNALLKEGSKSDKVDARKLAELLRSGMLRAVYHGEHGLGTLRELARSYLTISKDQRRVMSRLKALYRSWGIACSGKQVYTPRHREQWLNKITQPGVRRRAELMYQQLDGLSVVRHTVRGELLAESRKHAAVKILRQIPLIGPLRATLLLALMQTPHRFRSKRQLWTYSGLAVETHDSAQHRYVDGQLQRSKKPQQIRGLNQNHNHEMKEIFKSAATSASHCAGPLQDFYQGLLARGMKQDMARLTLARKIAAITLRLWKKGEHFDAEHLKSQAA

SEQ ID NO: 100990 - protein, 372 aa, unidentified
MVLASAANFKPRLLGDRLFTVGNDEAEVVALVERLGKLEGLCGIGIEASGRYERLAVAELAAAGLPVMVLNPAQVRSYAQAIGQRAKTDPIDARVIALFVEAVRPELRPMPDEETAELAALMARRRQIVAMLTAEKLRRQRAAAGLARVSIARSVSFLSDELKSLNLEIDKTVRGNTVWRNKEDLLASVPGIGKTIARTLMAELPELGTLNPKQIAALAGLAPYTRQSGKMAGTEFHRGGPHHRAHRPVHGRARRCALQPHSQGLPRQARRQRQAKACRAHCHSKKAPRYPQRNPARPKNHGDPLDHQDSRFPRRREKERRWKCGAWNRGGEGARGSRLRTYSLLTRRHSHLGASHVCQFRHRQARRTRASA

SEQ ID NO: 100991 - protein, 336 aa, unidentified
MACLCTHCTCVTKAFQSTTFSNGSEKFLESNFPGGTYLCAYEAGFCGFSVHYDLESAGIRNIVFNPADINDTQKERSRKTDAVDCIKICRNLMNNELKAIYVPSREELGLRGYLGARDAAVKKQRVAKQRIKSLLNRNGVKISEELFPTNKGHWSRRFNGWLEHVAADLGSGEGYRLNDLLKDLHHAHSQVLAAGRRLNEVISAHHMDTNELLLSIPGIGRLTAARICLEVPHVSNFINSDHLASYIGFVPDVHGSDDNVYVRGITYRGRALLRSAFVESAWRAIGRDPAMGLAYSNYIKRGLKPNNAIIRIARKLVNRVFFVLRERKRYEIARVR

SEQ ID NO: 100992 - protein, 332 aa, unidentified
MKTAGIDVGHDELEVVLLLDGKRHQARRFGNHATDHQQIVKLLRGKRVGRVCVEATGTYHIDIAVALSRAEGIEVMVVNPKAVKHYAEAQLSRQKTDLEDAFLLADYAQRMAFTAWCPPPEAVLQVRAAARRLHALTRQRTEAKNQHHAYGVTGTTPAFVLEDIEHTIHQFDGQIERLKQQTLALIRDDADLCMAFDLLCTTKGVAQTSAIRILGELAVFPMELTDKQWVAMAGLDPRHHISGASVKRQTRISKAGNKYLRGALYMPALAATQHDPYVRAYYRHLIENRGLKKIQALCAVMRKLLHAFHGMLKNRQPFDNTRFFNAEAAGAT

SEQ ID NO: 100993 - protein, 368 aa, unidentified
MNDLIRIGVDTSKSVFQLHGVDAAEQPVLRKKLRRRQVLDFFAKLPRVRVGIEACGAAHYWGRELSALGHDVVLLPPQLVKPYVARNKNDAADAEAICEAMSRPRMRFVPIKTAEQQAALMLVGVREQLVARRTQLSNIIRGHAAEFGVVAAKGLAKIEPLLARIAADETVPALAKELFATLGRDYAQLQRELRTIEAKLMAWHRHNELSRRLAEVPAIGPIGGTLMAMKVTDPAAFRSGRDFSAWLGMTPKDHSTAGKTRLGVITRAGDEALRRVLVAGAMAVIQQVKNGRAQASPWLVELVKRKPAKLAAVALANKTARIAWKLMVSGERYNAAAASRARRCAPLARGCAARPARDAQPARLAADA

SEQ ID NO: 100994 - protein, 388 aa, unidentified
MQTIADRSEATIAIRTNLGAIFVSLELSRSTWLITSLSPDGGEKMSKYLVRGGDVAGLLERFAQLREKTRAKTGKVFPFVVIQEAGLDGFWIDRALQNEGIESHVVDPASIATSRRRRRAKTDKIDGDALVRALLAYKRGEPRVCAMVKAPTPEEEDRRRLCRERKVLIAERVRHVNRVKGLLFSQGISGYEPLRRDRWEQLDTLQTGDGRVLPDHLKAQVRRELDRLELLLNQIKAVEAERDVLLAAQQGAAPAAMLLDIKGIGPEFAAILWSEGLFRHFDNRRQVASYAGLAPTPWQSGSVDREQGISKAGNPRLRTTLIQLAWLWLRHQPQSALALWFEERVRRNGGRLKKTTIVALARKLLVALWKYVTAGVVIEGAVMKAARR

SEQ ID NO: 100995 - protein, 425 aa, unidentified
MSEKDYNRQVVKRERIGRDTLIMGVDVGNAWNAVGFMNKEGNVLGSCAKLFNSREGFEQFIRMTEGFKAKHGMNRVLIGMEPTGHYWRKLAYFAKDRGYEVRFVRTTALKHHRELDESSSAKSDKRDALTIANITREGKYIDTVIEDGMVRQLRTLSKVRERLLRYSVGAKNALHAALDDYFPELHEIFWSMNSRSLWAILDRCPFPEDVVSMKRSVLGELIARSSRKKAGAAQKAKALYESAKKSIGVKRIGSADRYRVKICLEEVKRTVLMLKDIDRQMKSVLKEIPASEYLLSIPGIGPLSAAIFLGELGDPAYFQNARQIVKYAGYDPQESDSGYRISRKFISKKGRWLLRKCLFFMSMRVVVLTNYFQEYYQRKLQTKNKFGQLPRKKEILCAVAIKLIKVIFALLRDNRRFQDTVSDAA

SEQ ID NO: 100996 - protein, 341 aa, unidentified
MRYIGLDVHKDNITACVLTSTGKPKLEKNFIKDSESWNLTELMEYGDKDGFCVMMESGTYAYQPFRFFSDRDVETHVVHAQALKLITQSDKKTDKKDAYTIARMLRLWKRKEIDLPMAFMPTREQCELKDICRYREEISRKISDETRRIKSHMSRNCEYLPESFDNFQTQRARNYVRFNFSSDITLMNRMAELERLFRERDSVQKEVESRLPESREVEILMTIPGVARQTAVQIMSMIVDIDRFDDAEKLCAYFGLVPRVRDSGGKEHHGHMTKTGDKMMRVIMERVTQSHVQNCDSSVTQYYKRKCSEMGTKKALITASRKMLSVIFAMLKSGSDFRLAA

SEQ ID NO: 100997 - protein, 369 aa, unidentified
MTFFIGVDLHKTQFTVHVRTEEKVESLEQIKQYPTTASGYAEFLTRIETYKASGAAVKIGVESTGNTRFFKNQVEKAGAEVTVINTLKFKVINESTKKTDKHDASTISEFLSKDMLPESYLCGKETENIRRLLKSRERLVRSVVGQKNEVHALLVSMGLPDELRSLQSKKGRRKVLDTLESNNDYVLEAQSVKLMFQIIDRMTESVKVIEKQLTELTKDDEMVQRLMTIRGCGKITAWTIRAYTEDIGRFASAKKYAAFCGLVPWVQDSNETIHHGKITKRGPQELRTCFVQLVLGIRRCKDTSEWRMMQRYEYMKKNKGSGKSIVAAARKMAEIVWAMLSAKQDFNADKMKGIYKPMTLADEALSAMN

SEQ ID NO: 100998 - protein, 338 aa, unidentified
MKTHVGVDLHQRFCYLTAMNASGRICRQGQVVNEGGALQAWLRELPRPRQVVVEASGFWPAFARAAAVESERLVMVHPQRVKAIASAKLKNDRVDSETLAHLSRCDLLPEAWMADPATQQLRLRVRLRIALGRQRARAKNQLQAVLHQEGFRKPVTDVFGRRGRAWLKGLELSEAGRLVVDTWLREVDRLDAELTTQTRELERLAEADARAGWLQSVPGIGAYAAMVILAEIGDVERFASKRALASYAGLTPVVRESAGRRKRGGITHQGSNTLRWIMLQVAQVAARWSPGARSYYAGLRARKPAQVARIALARKLLTVVWALLRHRVDFDEELFIRG

SEQ ID NO: 100999 - protein, 412 aa, unidentified
MNPTPTSSARFFALDIHKHYAMVAAVDRDGQPLMKPRKVTNADLPDWATGHLFPDDLVVIESTTNAWHVYDLLAPLVAEVKVANPIRIKQIAQARTKTDKRDALILARLLAANLIPEVWVPPVHVRELRQLVSQRRRLVEMHTKVVNRMHSVSHRHHLGHPKGKRFQEKDMSWRDQLSELERFQLDLDLETKKYLKGQIDRMTNQLASMSHQEPWASQAMYLFQIPGFGVITVMTVLAAIGDISRFETAKHLVSYAGLAPGVEQSGTKQRSKPITKEGRKELRWAMVEVAWRAVRADPVWEKRFEELKRSKHPNDAITVIAHQLIIAVWHILTKQQSYRHYSTERIAYKFLTWSWQLDEDQRRNLSRPQFARYYLIRLGIGNDLKRIAIDPKHPHRLASVDEVQALFPDLGR

SEQ ID NO: 101000 - protein, 374 aa, unidentified
MKEKLRFLGLDVHAETIAVAVAEPDGEVRSLGTIPNRSESIRKLIKKLGPADKLRACYEAGPTGYVVYWQLAELGVECEVVAPTLVPVKAGDRVKTDRRDAEKLARCYRSGDLTAVWVPDEGSEALRDLVRAREAAKQDQTRARHRLSKFLLRSGQRPPSGVRSWTRPYLIWVAQLRFSQIAQEFTRLDYLHEVEHMRERVARLEQAITEAVKLASPELQQVINDLQALRGIADISAVTIAAELGQVSRFDSARQLMGYCGVVPSEDSSGKRTRRGSITKTGNAHLRRIVVEAAWSYRRPPGVWYGLRRRQETISQETKEIEWKAQHRLHKRYMKLGAAGKHQRKIVTAVARELLGFIWAIGSRAETIVRQQAA

SEQ ID NO: 101001 - protein, 426 aa, unidentified
MKRTQNAKILQIKNETLVVGIDIGKENHFARAFDNRGIELARLLKFSNTAQGFEQLDRWMQDTCKQQKKTEAITGFEPTGHYWFTLGDHLKDIGHKLAIVNPFHVKRTKELDDNSPTKNDRKDPKTIAMLVKDGRYRDVYIPENIYQELREAVEERERLQERLNAVHNRVIRWLDIRFPEFQQVFKKWTGKTALLTLKTFPTPAMVIEAGEDKILATWRTSIKRSVGKKRAQALVKAAVSSIGRTNGNIASQAGLQNLLAEYELYQMQYEQLEQLMWELLLQVPNAVKLLGIKGVGLVTATTFVGEIGDIHRFEDPRQIQKLAGCNLVENSSGKHKGKTTISRRGRKRLRHGLFMAMIAILGKNQEFRELHQRNLTREKNPLNKMQSIVALCGKLIRIFFAILSKGVDYNPEKMMGDIQYSVKAAA

SEQ ID NO: 101002 - protein, 475 aa, unidentified
MAARKNDNAKVSGAAGQHGGDGAEVTEERVEVVTYAAAIDVAKGFGMVCTRVPGSRADRKRQKVWRVDASYGAVVALMDHLRSEGIQRLVLESTSDYWRIWYYLAEAAGLQVWLVNARDVKHLPGRGKSDREDSVWLCKLNERGMLRRSFVPPEGIRDLRSLTRTRSRLAQDQARHRSRVEKILEDALLKISVVISDLFGTSGRRFPGALVAGQRSPKALAALGDYRLKASTAELEAALTGRFREVHAFEIATHLRLTGAINAEIARLDARIEQQLASIPGVAPACGDCGLIGGGHSPGCASDGTPVLGLVERLDEVTGVGVRNAQVTIAELGTDMSVFPTPGHAAAWARLTSRTLQSGTTTKNGRTGKGNPYLRGALGQSVMAAAKTDTRLGEQYRRIARRRGKQKAIVAVSRVICEISAILIADPGARFTDPGADYYSRVNPARQTRSKIRDLERLNPGMKVTLTPVETAATA

SEQ ID NO: 101003 - protein, 351 aa, unidentified
MKEYIAFDSHKHYTLMEREDVVTGRTRQVRIDHAPGAIRAGLAGCQAGTPVLVEATGNWYWIVKEIEEAGLRPVLVHPRKAKLMMGMINKTDKLDVHGLNRLQRNGTLPTVWIPPGDLRDLRELTRGRVALTRQRTRLKNTIRSALTKYGLQMAEGSDPFGVRARKGLDERVAQLPSETRFVVELFLRQLDFIAKQIAAIEERFQALVKATPDMQRLMTMPGVAVILAATIALEVGDAKRFPDAEHLASYAGTTPRVHASGGKVRYGKLRSDVNRHLKWAFAEAGNSVAVNHRRRPEKHVSRIYRRVRQRRGHAVAVGAVARHLAEATFYILAKKETYRDPSLRDGRAREA

SEQ ID NO: 101004 - protein, 427 aa, unidentified
MNNVTYQPTLCVGADVHLDEIVLRVVDKALGHEVVDRFRVTNNLPGAQLAAATIAAAATELGYTRIEIACEATGMLWIPFHRYLSTAPPLQPFELELVCFNPKLVAKFKDGLVLRSPKNDDRDAFDVAARLRFGELPISYVPSDFWQGLRRLTRYRYRLSKAMSQEKMRFQSYAFLKGSDWKRVKAFSDIFGATSVALLTEFTVAELQEMTHDQLVDLITHRGHGRFADPTATARAVREALRTSYPIDPRMDEMVTATLAAGWEHIRYLKRSMKRLDQLIARYIDLVPNPIITVKGLGAVITAGILAEIVDVLRFPQEKQLAQYMGLTWRKSSSGGFVSQNTRLTKVGNVYLRYYFILGANLLRQNNLEYKAYYWRKYQEVSKYQHKRALVLTARKLVRLVHALLTKNESYVRPRTTRQEQEDDRLQ

SEQ ID NO: 101005 - protein, 387 aa, unidentified
MTVRTVNNLPAATHGETVRCLFAIELSKQSWVIGFNTPLSEKISRRTLSGCDWKGLLELIEDVRARVSREMGRAVAVMSCYEAGYDGFWLHRQLEAHGVRNYVIDPASLQVDRRARRVKTDRIDAERLLRSLMAYLRGEPKVWSVVRVPSVAEEDARRLHRERDRLVLERVQHVNRIKGLCALHGIYDYHPLRPQATARLEQLRTAQGGELPPRLKSEIKRELHRLELVVEMIATLEAERDAIVEDEASTHLNAEKIQNLHKLKAIGPEFAAVLVGEIFHRSFDNRRQLASYVGVTPSPFQSGSMAHEGGISKAGNRKGRTTGIELAWLWLRYQPDSDLSIWFRARVGIMKGRIRRITIVALARKLLVALWRYLETGLVPRGAVLKG

SEQ ID NO: 101006 - protein, 343 aa, unidentified
MGRMIGVDLHKNSFRVCYYQNDEKYDFETYHVSIKGLEHFKKGLRKADELAVESTGNTGHFVRSIEGKVKRIRVVNPMQFKVISESVKKTDDEDALKIAKFLSKDMIPEVRMKTKQEGQLSSLIGTRDKFVKLRTALKNKVHNILNANGIVTKTELLTSDKSLDKVLGNKLDEACLFELEIIVSEIRNLNEAIKKIDAQVKERGQKLDGFKGVTSITGIGDMSGTILLNTIGDVKYFRDEKALASYFGIVPRIRSSNETTHMGRITKMGNKIARTALVQSTLIAIRYSPYLRAFYDRLKAKKGSGKAIIATARKLLGIVYNTLKNNWVFEDFNNYKLAPQGAY

SEQ ID NO: 101007 - protein, 353 aa, unidentified
MRKIQEYIIKDNNIFVGFEDSKRTWKLCVRCDGMIVHEISMPADYENLRTYLKGRYPGCVIKVIYEAGFSGFWLYDFLKRDGIDCVVTPPNKVTMEKDNKVKTDKRDARRLSRNLENKDYVSCFVPDKERREDRQISRILEQIQRDINRTKNRIRRFLDFHGLNGSMPCGRWNRSDYNRLHSLKLNKILRISLNSYLKLLSELESIRSNLMLELKELCKKERYQKAVESKQSCPGIGWLTAIRLTLEWGEMSRFKTGKHIASFTGLTSSEYSTGETIRKGRITGQSSKSVRAWLIQCAWTSIKRDPVLLEKFRNVWKNSGSKKKAIVAVARKLAVRMRAIELGEQPYCIAVAV

SEQ ID NO: 101008 - protein, 416 aa, unidentified
MSLALPEALFFTGIDWAAETHAVCVMDAAGKITAEFTIAHSADGIAQLVRRLARYGNPAVIPIAIERPNGRLVDLLLEAGHPVVPVSPNAIKTWREGEVLSGAKSDAGDAAVIAEYLRLRSHRLRVAVPYSGETQALRTVVRTRSDLVDMRVAATNQLSALLEASWPGAKAIFADVESAISLAFLTRYPPPASAARLGEKRVAAFCASHGYSGKRPASELLARLRSAPAGTADPALTTALGTAILAMVTVLTALNSAVRDLDRSAAARLGEHPDGAIFTSLPRSGQVNAAQVLAEWGDCRQAYDGPDSVAALAGVTPVTKESGKHRGVHFRWACNKRFRKAMTTFADNSRHASPWAAKVYSDARAAGKDHPHAVRILARAWIRVIWPCWISHTPYDPARHGAAAALAAALAEPIAA

SEQ ID NO: 101009 - protein, 316 aa, unidentified
MTSTRFVGIDISKATFDVAFSAESRAVYSNDPAGFTQFRQTLADDDHVVMEATGTYFLKLATFLSAQDITVSVINPAVISYFARMRLVRTKTDRVDADIIREYGCFEALSAWTPTEDVFIELNQLDSHLNGLQGDRNRVIGRLEALQQCAKINAYTLEDLQQQLTDLEVRIKQTEKELVVLTQAHFPELLTLLTSIKGIGQKTAIMFIVLTRGFTRFSSPKHFASFLGLSSFIRQSGTSVRGSGGISKMGNPRMRQLLYMAALTARTRNSACKIFAERLAGNGKPPKVVRIAVANKLIRQAFAVCLKGESYSECYA

SEQ ID NO: 101010 - protein, 418 aa, unidentified
MSQNLWRQALLSNIHLNSTSMTHLKPFIYVKYAVGLDLSKQDFKACLCLISQEQEVKVKASGSFANSPSGFEAFFKWISKHVKEDLPVFYLMEATGIYYEQLAWYLYQREQKVSVILPNKAKNYLQSIGIKSKNDKIDAQGLARMCAERQLPFWQPLSKNIYILRSLTRLHQSLTKQRTVFNNQLQASKSSMYELKEVLKILADSIATIDKQLKTAEKQIAKLIGEDAILKGKYEKMHTIKGVAILTFAVIVAETNGFELFENQRQLISYAGYDVVENQSGSRIGRTRISKKGNSRIRRILHMPAFSVVAHDEGALKALYERVYERSGLKMKAYVAVQKKLLCLMYTLWKNDSSYDKGHLKKVTSSNKEPKPLFPVVFEENRVVGVEEKEVAPSSRATQDELSCNKSPEALFPVEQIY

SEQ ID NO: 101011 - protein, 305 aa, unidentified
MAEQQAVFVGIDVSKATLDVALRPGGECWQVSNDEVGLSQLVERLSARPLQLVVLEATGGLEVAAVAALAAEGIPVQVVNPRQVRDFAKALGRLAKTDRLDAAVLAHFAQAVQLQPRPLPDAATQELRVLVTRRRQLQTMLVAEQNRRTRAPRRIRAQLQAHIDWLQRAVAELDRELDHTIRSSPVWRAQDELLQSAPGVGPVLSSTLLADVPELGHLDRRAIAKLIGVAPLNHDSGTLRGKRAIWGGRAAVRATLYMATVAATRWNPVIKSFYARLLAAMPACWRPARPRKSPSLPVCASSSRP

SEQ ID NO: 101012 - protein, 350 aa, unidentified
MEYIAFDAHKRYTLASVAQPDGRLVREQRIPHERGALQEFLERCEPGSPVAVETIGNWYWIVDEIEAAGCVPKLVHARKAKLMMGEINKTDKLDVRGLNRLQQAGTLPTVWIPPGELRDQRDLPRTRMVLVRQRTQLKNRIHATLAKYALHDLEVTDLFGVRGRSLLRQRFDCLPPHTAYASRQLLEQVEALDRQVREFEQRIQATFKPTPVIQLVLTLPGVGLTLAVVIALEVGDVMRFATAEKLAAYAGTTPRVHASGGKTRFGPARPDVNRYLKWAFVEAANAICLTRGRAPHRHVSRLYARLARRKGHAKAIGAVARHLAEATYWILSKGEGYHEPKASSRFVHGG

SEQ ID NO: 101013 - protein, 324 aa, unidentified
MIRLEILKQSLGIDVSKDSLSFCLCSLTKDLEKVFHAGEDVSNDKFGYKQLTKWLAGGIATAELPIIVMESTGVYHEGIAYYLHELGYAICIMQSGRVKRYAQSLDQRSKTDALDSKMLSMLGCERQLPIWDPPGKTLQELKFLSRERSALVKERSKGRNRAHAMNAATYPHKAAIKRYNKRMKLLEAQISAIELEMQQLVKSDSELSEKLQFLESIPGVSFKSAATVVGETLGFSTISSAKQLVSYCGYDVVLRESGNYRGKPRISKKGNSHIRAVLHMPSMTAIRLNPTLKPFYDRLKPKKVKPIIALVAVQRKLLILMYIL

SEQ ID NO: 101014 - protein, 439 aa, unidentified
MSQELPTLDPLASFVDVGSEHMHVSVGGNKPEVFGTVTSQLHALRDWLLEQGVHSVAMEATGVYWLALYGVLESAGLEVRMVNGRQTRNLPGRKTDMADSQWGATLHMHGLLHAGFVPPADIRRLQDYLRLRASHVAAAAACVQLMQKAFDRMNIKLHDVISKLGGVSSMAVVRAIVAGERSPEALAALCDVQIRRKKERAVIEALRGTWADEHIFALDQALQSWDHYQKLIADCDRRIAAVLPPHDETQPPLPSSTKQTGVNAPEISRLREILAQMCGGRDLTKLPALSQYGVLQLIGEVGTDLSVWPTEKHFTSWAGLAPGSNDSGKRKKRVSRGRNRTGQLFCMMAQSLVRSKDIALGGFYRRLAARRGGLVATKALARKLAGWFWRVMVKGDDYVEKGIARYEEQVRKTKEHALKRLANELGRQLVPVPSSSQIT

SEQ ID NO: 101015 - protein, 408 aa, unidentified
MYNAVGIDASKLKSTITIIQPSGVVIRKPFDVLHTSDELNTLVTYLKSLEGETRAVIECTGRYHEPVVKSLSEAGIFISAVNPKLIKGQKQNTLRKVKSDPADARKIAKYALDNWAELREYSSMDTTREQLKTLNSQFTFLMKQKVAAKTNLISLLDNTYPGVNKLFDSPTRDDGSEKWVDYAYSFWHVDCVRKIGLKAFTERYEAFCKKHHYNYQKNKPALLFEESKQLVAVFPKEKSYKLLIQQSIQQLRLASEHIEIIRKEMNELASTLPEYETVMSMYGIGETYGPQLIAEIGDVSRFTHREAITAFAGVDPGVNESGQFKQRSNRASKNGSTRLRKTLFQVMSTYLQNKPVNEPVYQFLDRKRAEGKPYLVYMTAGANKFLRIYYGKVKECLRNLEQSQIEES

SEQ ID NO: 101016 - protein, 320 aa, unidentified
MMAQNDLVVAGIDVAKDKVDVCIRSPSLKRTFVNTIEGRCELTSWLRRNKVGKAVMEASGGYEREWAKVLRNAKIEVRIVDPKRVRSFAQSAGRLAKNDTIDAEMIAWFAETFGEVPGQTYDAAREQLHQMVHARQALKDMQSKLTSQGEHAAPAAVQRIHARIVKTIAVELVKIEAEITALIQATPHFAELAEIIESVPGLARTTSAALIAAMPELGQASNKIVASLLGVAPYDDDSGRRRGERHIKGGRRRTRNIFYMACLGAATQHNPVLKAFYDRLVAKGKLKKVALTACMRKLISILNVMIARREKWDAKRYAVN

SEQ ID NO: 101017 - protein, 408 aa, unidentified
MMMEFLFLLLFFFVDKYNFVNKYIKKEWGELSCRTDFKDLSLVLVPILSNQVTKDQIEYHFLPNKGFSQSNHNKYKIMKILDTIGIDISKLNFDVRIHSTQFYQQFENSNKGFVTMLKWVYKNSSFSKENILFVFEHTGLYSHQLSVYLTDKEVPFSLIPGLEIKRSLGIARGKNDKVDATKIALYAYRLRDEIELTILPTEQIRSLKTLLSLRDRIVKQRAGYITSLNEQKRVLVKNKNEVILYTQEKIIKHLSKQIKVLEIEIQEIISSDEQLSIQFKLITGIKGIGTQTALFVIAYTHGFTRFKTWRKFASYCGIAPFPNASGTSIRGRTKVSNLANKKIKSLFDLCAKSAIQHSPEMKVYYTRRLEEGKNKMSTINIIRNKLLSRIFAVVERQTPYVDIMKYAA

SEQ ID NO: 101018 - protein, 448 aa, unidentified
MTLNAEGKPIAALRFQTTHENIQLLRAELTEFDTIALEVTTNSNAITRRLQQSPAKILTSNPIRTKMIASAKIKTDKIDARVLAELARAGYLPLVWLPDPDTEALRHLFSDRRSLMDRRTELKNTVHSILHRNLLEYEFADLFDTNGRQWLDQLCEASDEQCDRLDRLRLRAILIELDRLEQHLQEVEGVIAAFVVERPHLRQQLDQMLSVPGVSLVVGAGLLAAIGDIKPFRYAKQLGAYFGLVPSTYQSGDTKARHGRITKTGRSDVRWLAVEAVEHLRKAPGPLRALFQRVSQKRGHNVAVVAVARKLAELVWHLLTKEEDFLYQKPKRTQDKRSNVRLMARRRTGLKTPSAEPPLAKRPALYGSGLQGKKVKGDIARLAAKQSEAIYQAIVTQWQEGKDATPVWQPLAFDPTRPVSADWQRVLEKVGERYAELLARVPQPPIMD

SEQ ID NO: 101019 - protein, 315 aa, unidentified
MTKHLPPVNVGVDVGKNQLDLYLLERDRALTVPNEEQAILVLVRSLSRYRVERIVVEATGRLEQPFVRAALAAGLPVIVVSPLKIRRFADVIGQLAKTDQIDARLIAQFAATVKPLPRPASDANAQAIKDLVVRRRQLTSLRTMEKNRREVMPNDLKPSFDRILKALDRELKSLEQLINLAIDQHASSRHKRELLTSMPGIGNCVAATLIGDLPELGSLDRRQIASLTGVAPFNRDSGTLRGKRRIRGGRAHSRTALFLSAMVATRFNPDIKRFYQRLLTAGKHKKVALTACIRKIVTALNAMLRDNLPWRSAIA

SEQ ID NO: 101020 - protein, 359 aa, unidentified
MSESTFIGLDVHARSVVAGVLEGESGEVRTCAAPVRTSELVPWLRARGESVSVAYEAGPTGFGLARACEAARIPCLVAAPSKILRAPGERVKTDRRDALRLAKLLRLGELTAVRVPSACEEGARDLVRAREDARGDLMRARHRLSKLLLRRGLVWDGSAWTQAHERWLAGQRFEERPLQLAYEEAVAAVESVRARREALDRAICEEAATEPWAAVVGRLACLRGVSTLTAFALATEIGDWQRFDGRSIGAYLGLVPSESSSGERRRQGAITKTGNAHARRLLVEAAWQQRRPASHPSRELARRREGQPAAVRERAEAAGRRLRRRWARFDARGKRSTVAAVAVARELAGWCWSLAVMDS

SEQ ID NO: 101021 - protein, 355 aa, unidentified
MNRKKIHVLGIDLAKNIFQLHGIDNLGQACFKGKLSRNKLLAFFGELSPCVVAMEACSGAHYWSRKARISGHEVRMIAPQFVKPFVKGNKNDAADAEAIAEAATRPSMRFVSVKTPQQQDINVIHRVRQRLIHNRTQLANQIRGVLAEYGIVMAKGRQKVGKLIQDLLGGEQSPSDLTPLTMDLLGELWDEWNRLEEKISQQDVRIAKISAETDECQKLEQITGIGKITSTALVAVMGSPHNFKNGRQLAAFLGLVPKHSGTGGNNRIGKISKRGNVYLRSLLVHGARSALRVILQRFRSGTTVLEGLEKRFYLMYEKKGYNKTCVALANKIARVCWALLAKGEDYSPQKAFHIV

SEQ ID NO: 101022 - protein, 336 aa, unidentified
MLYVGLDLSRKRLDFDARLADGEFVERGAVPPDADGLAGLVRRLGGAEVLAVIESMNGARFVHDRLERLGWDVRIADAVKAKGLAPLACKTDKIDAWVLAELARRDLVPEIWLPDPANRAERERARFRLHLVKHRTALKNRVHSILIAHGTANPHSDLFGTGGRRMLERLQLPEPWRSTTTATLALIDVLDEQIDACERELRRLGADHRYLPLLLTCPGISWVLAYTIAAEIGDINRFPSPRKLIGYTGLTPRVDQSGDTDRRGPLRKNGPTYLRWALIQAAHTASRDRRYQPIVERHRGKLAALTIARKLSEAIWHMLTTNQPFAPAGAPCPLAA

SEQ ID NO: 101023 - protein, 345 aa, unidentified
MKKGITIGMDLGDKKHQACILNKTGKIIAEEEVAGNRKAMASFFKQYRGAVVAMEMGAHSRWVSQIAAAAGLEVLVGNARKLRMIWQSRQKSDTRDAVMLARIARMDPALLCPIHHRGEQVQMDLEIIRARDLLVRERTRMVNHVRGVVKSMGERLTPSSAASFGHKVKIPEALNEAMKPMLEMIRELTSKIRGYDQMIKEAATKKYPETEQLCQVGGVGPLTALAYVLTLEEPERFAKSRMVGPYLGLVPRLDQSGQIDKQLRITKHGDGYLRRLLVGSAHYILGPFGPDCDLRTFGLKLMQRGGKNAKKRAVVAVARKLAVLLHALWRSGAIYEPKRMQPLAA

SEQ ID NO: 101024 - protein, 339 aa, unidentified
MELCCGMDLHSSNTVIGIIDEKRKHVIDRKLPNDPELIRSFLKPYQSDLKGIVVESTYNWYWLADLLQEEGYPVHLSHPVANEQYNGLKHSNDKHEAFWLAELLSLGILKEGYIYPRQVRSLRDVLRKRGHLVRIRSGLLVSLQHMISRNCAVKVKAGDMKRLTADVISPLLSREEALLLAGQSSKEVIDCLTRQIDKIERWALKRLRREGVFIRLVTLPGVGDILGMTILLETGPISRFREVGNFASYCRKVSSQWTSNDKVKGRGNIRNGNKYLAWAFSEAGEHARRTNEACRRFYERKLRQTNTKVAHNALAHKLARAAYYIMKDHVSYQEEKMFS

SEQ ID NO: 101025 - protein, 390 aa, unidentified
MSQPFDASRSLTAFEQDSTLVAVIEMSQSNWLVAAVVPGVERQPLKKLDAEADALLKLLLRWRDEARKAGRVVRRIVCAYEAGRDGFWLARWLQAHAIEAYVIHAASIAVSREHRRAKSDRIDTELLMRSFLGWLRGEKRHCSMVAIPTMAQEDARRPSRERESLVGEQTRIGNRVKAVLALFGIGGFNPKLRKAAQKLETLGTVEGTSLPENTRAELRRDLERLRLVRDQIRAIEGERLRRLAAAPRTATGPHAMVRLLARVFGIGIETADMLVNEALSRNLRDRRAVARYAGLTGAPDESGKRRREKGLARAGNGRVRRGMIQLAWRFLTWQKHSRLAHWFRERTADGRSTTRKTMIVALARKLLIALWRLVTTGELTEGIKLRPAGA

SEQ ID NO: 101026 - protein, 346 aa, unidentified
MAHYAAFDVSDKETAIHVLDEHGKLVWKGKRPSEPEALAAALRQHAPELVRVGLETGRLTPWLFHALKGLGVPVVCLDARHARAATALQRNKTDARDAETLAQLVRTGWFREARVKSWAAHAVRHLVGARAQLVGMATDLSNQIRSLLRTFGLRITGRAGGTFERKVREQITGSPEVAAVAEPLLAAWRAMRDQIAALDRKLIEAARGDATCRLLMTCPGVGVVVATSFAAAVEAPDHFRRSRAVGAYLGLTPRRHQSGESDHSAGVSKRGDKLLRSYLFEAAACLLIRVQRPSALKAWGVGLVQRLGFKRAAVAVARKLSVVLHAMWRENRPFQAWPTPAVAAAA

SEQ ID NO: 101027 - protein, 388 aa, unidentified
MSVRGRKAERSEALRPRTGDARSIAPGQSHAVAKRDRRRLRGTSPNSRLSDGGRAVTAAPASSHVQDGDISMNTTPTFVGIDVAKDKLDVFIDSSGESFTVANSPDGIVSIRQRLAGLNVKLIVIEHSGRYERRCALDLMDSGLPVALINPRQSRDFARAIHWLAKNDRIDGRLLAEFGRRIEPRPSERIPENRAELDELVGRRRQLVQMRAGESARLQQAQFKSIRRSIEKVLRQLEQQIQDLERRISKLIENDQDWHSKGQLLQTVPGVGPVVASTLVAELPELGRINRQEIAALVGLAPFDRESGQWKGKRSCFGGRAEVRSTLYMAAITARRCNPIIQRLAQRLEAAGKAFKVVMVACMRKLLTILNTIAGTGQAWNPKLVTQS

SEQ ID NO: 101028 - protein, 429 aa, unidentified
MDYTQNEKIEQVTDTTLVIGVDIGSQTHYARAFDNRGRELTKKVFSFENDIEGFNTFNLWIETLKTENNKTKVIIGCEPTGHYWFALAKYVTDRQKILVMVNPFSVKKIKELDDNSPKKTDAKDPKTIAKLVVDGRYSIPYMPEGVYAELRDLVYSRDRIVKQHNISANRIQRWLAIHFPEYLGIYTRFDATSGLAVLEKAPFPKDVIELGVEGIRKIWHDKKLRGRGITEDRAKTLVEAAHNSIGLDGGSGTKSELYMLLEEHRLWASQLEAVEKTIEEVTLRVEHVEKLLAIKGVGVITVAGFLAEVGDIRRFKSPKQIQKYAGLELVENSSGKHKGKSKISKRGRRKLRKILYQVMIPLLARNKEFREIYDYYVTRVKNPLKRRQAMVAVSCKLIRVFYAVLTKGVDYDRFKMMSDIRRDSELVAA

SEQ ID NO: 101029 - protein, 339 aa, unidentified
MKVLIGIDPHKGSHTAVAIDRDEVKVGELRLRSSKQQCARLLDWAAVFPERRWAVESAAGLGYLLAQQLVAAGEDVVDVPPTLSSRVRVLGSGKAQKNDPNDALSTAIAALRGRRLRPVELDDHVAIIRMMANRHHNVVALHTQAVCRLHAQLANLMPGGASGHLSPALAARMLAGVRADNGVVAERKQQAQDLLDDVIRLHRALVEVKARIAVAVAASKTSVTDVYGVGPIGAAIIIGHSGDARRFTSRDHFASYNATAPIEASSGPTKRHRLNQRGNRQLNHAMHIAAITQIRNDTPGRAYYQRKIAEGKSKKEALRALKRKISDAVYRQLVLDSAR

SEQ ID NO: 101030 - protein, 342 aa, unidentified
MECYVGLDVSLKQTSICVVDRTGSVVREGVVDSNPEAISAFVRSKAPNTVRIGLETGPTSTWLWTELKRLGLPVICIDARHAKAVLKMQINKSDRNDAIGIARIMQTGWFKEVHVKDIDSHSVRALLASRELLVKIKRDLENHVRGLLKNLGLVIGRAKFNVFAVRAEELIEGRPELIAAIRPLLEARNTVEQQVSELDRKVMKLARHDAQVRRFMTAPGVGPITALAFKATIDDPARFARSRSVGAYVGLTSRRHASGEVDWTGRISKCGDAMLRSYLFEAAGVLLTRVPKWSAVKAWGVRLAKRNGLRKAKVAVARKLAVILHRMWIEGTEFNWSKEIAA

SEQ ID NO: 101031 - protein, 414 aa, unidentified
MLKIVYRVCCGMDVHKSFVVACIASTNEYGVTTYKSKRFSTFTKDLRRCADWLSENNCKDVCMESTGKYWIPIYNILEPTCNIVLAHPKYVKAIHGKKTDKRDAKWIADIFKHDLVAGSFIPPADIRQLRDLVRYRWKLTNFTTGEKNRAQNCLTVSNFKLDDVFSDVFGKAASAITARILENPTEKITDVSGFRTKGMKATNEQVLAAVDGEMCEEQAEKLRIIRSHMDSLELCKLNLESLILSVAEKYLPQLGLVMTAPGIQSFAAVGIISEIGVDMSVFPTSKHLCSWAGLTPQNNESAGKKKTTRISRAGAYIKPLLVQCALCAIRAKQFPELRNRYLALKKRRGHKKAIIAIARMLLTAIYNILKKNESYNPELYRQTDRPPAHREVSVAEAIFILQRQGYLVAAPPTP

SEQ ID NO: 101032 - protein, 336 aa, unidentified
MTIIRIGLDTSKHVFQIHGVDENEQPVLRRQVRRSGVAKFFAKLPATQIGIEACGASHHWARLLRGLGHEVMLIPPQYIKPYVKRGKNDAIDAEAICEAMSRPGMRFVAVKSAESQAALTILGVRDLLVKQRTMLINAIRGHAAEFGVTAPKGPQQICELLRRLVVEGSVPALAREMIGVLAGQLEALNTKLREIEARLMAWHRQDQTSQCLATIPGIGPIGGVSFALKVPDPKGFRSARHFAAWLGITPREHSTGGRQRLGKISRAGDEGLRRLLVLGAMAVIQQAKKGRAAPWLLGLLARKPKKLVAVALANKMARIIWAMMVSGETYRRQTAA

SEQ ID NO: 101033 - protein, 315 aa, unidentified
MTITVEVYVGIDVSKDRLDVAMWGEKNCLEVANSKKGITKLVKQLLALAPKLIVVEATGGYEEAVVLGLLEAGLPVALVSPQRVRQYARAKGLLAKTDRLDAEILADYGKHIQPRLFVGKSEERKRLSALVGRRKQLNEMLQAEKNRLRTRDLNLQGSLERVIRCLKTELEAIDQEIEQFLQVHQDLEEQEKLLRTAKSIGRVTAATLLADLPEVGQLDRKEIAALVGVAPMNRDSGRKRGHRKTQGGRPEVRSALYMSALTGIRYNPILKAQYDQLVKRGKEKKVAITACMRKMLTILNAMMRDQQPFRLAATS

SEQ ID NO: 101034 - protein, 344 aa, unidentified
MTYYTGIDVSLRSVSICVVNDKGEVCFEAKVAAEIATIVECLHRFDRDVKSVGFEAGTLTQYLTYGLQAAGFEVVCLEARQVSVTLAAMRNKTDRNDARRIAQILRTGWYSHVHVKSLHSHQVRALLASRKVILKKCVDLENELRGLLKVFGIRLPSRVGHGAFDTELRETVSGDEMLACALVPLLDARTVLYKTYLKLDNAVKGLVRADPICRRLMSIPGVGPVTALTFKAAVDDPSCFKSSRTVAAHFGLTPRRFQSGEIDNPGHISRAGDADVRSALYVAAHSLLTRNAQWSSLKSWGVRLAKTRGHRRAVIAVARKLAVILHRMWLDGSEFRWGSVPTQA

SEQ ID NO: 101035 - protein, 406 aa, unidentified
MKVYLGIDWSERKHDVCMINECGEVLQQLVIAHTPEGFLALDTARRKMEIEAGECVVGLETAHNLLVDYLWDQGYEQVYVLPPNAVKSAQGRYRQSGAKSDASDARLIADMLRTDQGRYTAWVPDLAVTRQMRARVSLVIFLTHSMVRTENRLRAVLLRYYPAALEVFSSLDAPITLAFIQEYAMPQAATQLTFEQFKSFLKQHRHHQPKKWAGCYARLQRSQPQADPAILAVYSSEARLLAHLLDELVHAKAKALQELDDVYMQHPDHEIYASLPGVGPFLGPALLSKFGDDRQRFPSPAVVQAIAGTCPVTVASGKKTVPLFRRACDHEFRYIAQQWAKQTIHLSPWAHAYYANIRPHCKSDNDAYRRLANRWLEIVWKLWIDRQPYNETKHLKQKALRSLTRS

SEQ ID NO: 101036 - protein, 424 aa, unidentified
MKVSYQTCCGVDVHKSFLVATIVKTTGGIEPSYQKKRFSTFNNSILEFKQWLLDNDCHDVCMESTGKYWVPVFNLLEDEINVVIANPKWVKAVKGNKDDAKDSKWIGDLFRLGLVKGSYVPCKKVRILREYTRYRYKLVSCRSSEKNRYQNALTVCNVALDSVVSDIFGKSSTSIIDYLLEQSGSSINHEEIASKLLRSLKSKEDAVIESIEGYQMTDAQKYRMRLVRAHMDYITAEINDVDKMIENAISSDPDFENAVQFLCTIPGVKRASAITIISEIGTDMTQFSSSKRLCCWAGLTPGSNESAGKKKSVRITRAGVYLKPALVQCAHAAVKSDKSPYYKKKYDSLVKRRGKKRAIIAIARMILTAIYQMLSTGELWNPSDLYKIDMPVALVEKQKAKAIKQAKKLLQQEGLLPPDEPLAS

SEQ ID NO: 101037 - protein, 365 aa, unidentified
MRSKHSKKKLLWRDKPERTVGLDLGDRFSWYCLLNQHGEVTEEGRIATSEAALQLQFAHTSRLRIAMECGTHSPWASRLLEQLGHQVIVANAREVRSISASTSKNDRNDAEKLARLAHCDPNLLEPIRHRRRERQQDLNMLRVRDTLVRARTMLINTVRGLAKSAGARLPRCASEHFPAAVPACLPATLTAASTPLLEQIAAMTAHIRTLDQQIEKLAHRYPEISLLRTAPGIGPIVAAAYVLTLDRPENTPRSRSAGAFLGLRPRQDQSGDRDPERNIGKDGNTYLRKLLVQSAHYVLGPFGPDSALRRWGQKLAGSGGKRAKKRAIVAVARKLAVILHCMWRTGQCYQPFPPLPPASRTPQAG

SEQ ID NO: 101038 - protein, 452 aa, unidentified
MARKRKQASKSNSAVLPVMRPDAAGIDIGATEIFVAVPADRAEENVRSFPTFTQDLYGLADWLKQCGIRTVAMESTGVYWIPLFQILEERGFEVCLVNARHVKNVPGRRTDVRDCQWLQFLHSVGLLKASYRPPQEVCAVRSLLRHRESLVQMAATHVNHMQKALDQMNLQVHHVISDIVGQTGLAIIDAILDGERDPVKLAKLRNERIKASEEVIAKSLVGDYRPEHLFTLRQSLAAYRSYQKLIDDCEREIRQRLHDFQPPLPPADTPEDEKSSQKTRSADGVLKSELKCVFGIDLTQIPGIRTGIAQTLFGEIGPDFTKFRSASAFASWMGLCPDNDISGGKVLWSGTRKVNCRAATALRMAAQSLHHSKSALGDFYRRMRAKLGAPKAITAAAHKLARIIFHLISTRQEFDDSKFAADQLRYQKRQEIKLRARARTLGFELVPCPQAG

SEQ ID NO: 101039 - protein, 375 aa, unidentified
MKNKVRFLGLDVHAETIAVAIAEPDGEVRSLGTIANRAESIRKLVNKLGSFEQLRACYEAGPTGYVLYWQLTQLGVECAVIAPTLVPVKAGDRVKTDRRDAERLARSHRSGDLTAVWVPDEGSEALRDLVRAREAAKADQLRARHRLSKFFLRTGRRPETKIKLWTGVHMTWVRQLRFEHPAQESTRLDYLHEVEHMAERVLRLEQAITDAIKLATPEMQEVIRGLQALRGIAEISAVTIVSELGTLSRFENARQLMGYSGAVPSENSSGKRVQRGSITKAGNAHLRRIAVEAAWSYRLRPGIGPRLRKRQENVPEEIKEIAWKAQIRLTKRYARLAAAGKDQRKIVTAVGRELLGFIWAIGIKAESAAMQKMAA

SEQ ID NO: 101040 - protein, 344 aa, unidentified
MDYYAGIDVSLEYSSVRVVDASGKVVREARVVSEPEALVGWFGSLGLELARIGLEAGPLSQWLYAAMKQTGLAVELLETRHVSDAFKAMPVKSDRNDARKIAQLMRLGWFRPVHCKSITAQEIRAMLTARKLVQSKLLDLENSLRGILRGFGLKVGKTTRTNFAGRIEELVKGHPNLQTIGQALLRARAVLLAEFNGFEKRVRAMSRLHDKARLLMSTPAVGPIVSLTFACAIDDPSRFTSSKQAGPHFGLTPKKYQSGETDYTGRISKHGDASVREALYEAAHIMLTKPIKSCSGLKSWAMRIARRAGTNKAKVALARKLAVIMLRMLKDNVPFNPAAKPATA

SEQ ID NO: 101041 - protein, 364 aa, unidentified
MTAAQAGRQAASSTVEVVGGVDTHKDTHTAAAVDTAGRVLGSAQFPTDAAGYRALLRWLRGFGTLLLVGVEGTGVYGAGLARLLAAQGVAMVEVDRPDRKARRWQGKSDPVDAEAAARAALARVRTGVPKQRDGRVEALRALRVARRSAVGQRADVQRQIKALIVTAPESLRAQLRKLPDRELIEVCADLRPDRANADDPGTATKIALRSLARRHRRLSVEVADLDELLGPLVAQINPGLLALKGVGAEVAGQLLVTAGENADRLTNEAAFAMLCGVAPLPASSGKTTRHRLNRGGDRAANSALWRIVITRMGTDQRTKNYVARRTTEGLAKPEIIRCLKRYVAREVFLALTPASAEKRPANAA

SEQ ID NO: 101042 - protein, 361 aa, unidentified
MTKGSTGMGTEAATDFIGLDLSDKTATYVVVSAGGEVIQEGRLKLSQAGLNKALGARPPAQVAIEVGAHSPWVSRALKGLGYAVTVANPRQVKLIADSPKKNDLLDAENLARLLRYDPAMLRPISHRGEAAQADLALLRSRDALVQARTRLINSARGMAKAAGGRLPSCSAESFHSKVRDHLPELLKPALEPMLPAIASLTEQIRTATRQLEKLADDRYPETRILRQPKGVGYLTSLGFVLTLEEPQRFAKSRSAGSFVGLTPRQHDSGESQPQLRITKAGDPFLRRLLVQSAQYILGPFGEDSDSRRWGLKLAGEGKNKIRRKKAVVAVARKLAVLLHRLWLTGDVYEPRRQAEPEQEAA

SEQ ID NO: 101043 - protein, 311 aa, unidentified
MAAVYIGIDVAKDHLDVAIAGSDIVSRFKNSAEGATELVAFLRSHAPTLTVLESTGGYERRVFMALVNAGLTTSRINPKRSRDFARSLGKLAKTDRIDAKMLALYGERCRPAATTPRPEHIDVIEALVTRRRQLQKMITQERNRLETAAPTTSASIRIVLGCLRNELKKNGGALRDAIRHTKCSEDAARLQSVPGVGPVLTAVLLSMLPELGTLDRKQIAALAGVAPLHRESGTLNGQRKIFGGRPGVRAVLFMAAIATIRVNAKLRAIYARLRARGKPAKVAIVACMRKLLCILNTMTRNKTTWIAEPTP

SEQ ID NO: 101044 - protein, 374 aa, unidentified
MENSITYVAMDTHKKEHKVALHYPCHEEIVRFAVKNTAREIKKLVNKIKKQASADVKFCYEAGVCGFTLKRRIEALGCQCTVIAPSLTPIKPGDRVKTDRKDAVKLLAMFEAGLLTEVHAPDQEQEAARELARCRQSAQENLKRIRHQILKFLTRHGYVYAEGNHWTQKHLHWLGSLEFDLPCLRDVFDSYFTEMQHCLQRLVSLDKELAKLAESNPYKEVVSLMRCFHGIDTLTAITIITEIFEFGRFSSPGELMSYLGLTCSEDSSGQKERRGSITKAGNKRVRRLLIETSWHYRHPYIAVSKVLRERRKDQPQWAIDIADKARQRLRKRYWYLVNNGKMPCKATVAIARELAGFIWSLFNEYQIRNQKKVA

SEQ ID NO: 101045 - protein, 416 aa, unidentified
MKIIHPICCGVDVHKRTIVATIAATDHNNITSYSTQTFSTLNSDLLAFRNWLLKSNCLHVCMESTGKYWIPVFNTLESHIHVILTHPKYVHAIKGKKTDKKDSKWIADLFKHDMVKSSFIPPKHVRSWRELARYRAKLVYMRTSEKNRYQNCLTVSNIGLTNILSDAFGKTVQGIMQHILSSQVFDEEKCKTLISRSAKKKTDLILQSVKGCCVESDQKYKMNATIAHMDFLDNAIVKTEAELFVRMQPYYPFVEHIAGLPGISQLSAALILAETGMDMSVFETAGHLTSWAGLTPANNESAGKKKSVRISRAGQFLKPLLVQCALATIKNQKEPYFANKYYRIKKRRGHKKAIIAIARMMLVCIYHMLKTGECFKPSDYEEFQNPMPKRVVLNETTAIEFLREQGYDISALKKAM

SEQ ID NO: 101046 - protein, 350 aa, unidentified
MQIIGCDFHTRYQQIALLDTESGELLERRLEHANGEAQKFYAELPAPARVGVEATGYLQWFEQMLAEQGHELWVGDAAAIRASVVRQQKTDTRDARHILELLTQQRFPRIWIPSPADRDVRQLVVHRVKLVQWRTRVMNQLHAMAMGQGLCRKKKLWSTVGRQELQALRLGPWASRRRAELLQLLGQLDGSIQELDRAVQQQAAGRAAAALLMTHPGVGPVTSLAFVLTMGPSSRFRRGKQVASYLGLNPREHSSGGRQRTGAISKQGNSLMRWLLVEAGQTAARYDAELQRVYQRLKFRHGSGAAKVAVARKLAVRMYWMLRSQADYAQLVRVRGSSSSAVVPETGSRS

SEQ ID NO: 101047 - protein, 417 aa, unidentified
MDTTYSNVAGLDVHHKSIQCAIRCQQPSGTLRKSSRAFGTMTAQLRSLADYLESQGVTHVALESTGVLWKPIWNILEGRFTLLLVNPRHLKKVPGRKTDVSDAEWIAQLLQCGLLKGSFVPSRALRNVRDLTRHRAQLSAETTRVSNRIHKLLQDANIKLSAVASDILGVSGRDMLQALINGETDVDRMADMARGVLRGKIPHLRLALDGRFTEHHRFVLQRLLKHLEFLDKEVDILNREISRQLGDLLPPDDAARLDAIPGVNMLTIQNVIAEIGVDMTVFPDEHHLSSWTGICPGNEESAGKLLRSATRHGNRWLRRALSEAAWAASHAKDSYLAAQYRRLVGRRGKKRALIAVAHSLLVIIYHILKNHVEYQDLGSDYFDRLEPERLRRYLVKRLEALGHEVILKPKSASGNAA

SEQ ID NO: 101048 - protein, 343 aa, unidentified
MEYYAGIDVSLKESSVCVVDAKGKVVREVKVASEPEALVQCFAALSLPICRIGLEAGPLSQWLHVGLIAAGRDVVLLETRHVKAALSAMTVKTDRKDARGIAQLLRMGWFRPVHVKSVASQDTRAVLVGRKLLQSKLLDVELSIRGILRGYGLKVGEVSRGRFEARIQELITGHATLESVIGAMLTARATLWAEFTRLHREMLKIARADKICHRLMSTPGVGALVALTYRSAIDDPTRFGRSSTVGAYFGLTPKKYQSGETDRDGGVSKVGDAMVRTALFEAAHIMLTRATRFSSLKRWALEVAKRRGLKRAKVALARKLGVVLHRMWVDATDFRWGANAMAA

SEQ ID NO: 101049 - protein, 408 aa, unidentified
MQVLYPRCAGLDVHKDMVMARVRCVSKPEHDEVRSFDTTTSALLELGDWLAEHGVTHVAMEATGVYWKPIWHLLEERFELILANAQHIKNVPGRKTDVNDAAWIADLLAHGLIRSSFVPPAPIQELRDLTRTRKQLVREISQHCLRIQKTLEDANLKLGSVLSNVLGSSGRAILAALVAGETDPQKLAELAQGTARKKRTELVEALRGRVRPHHRELLRIHLNLIDALHQALADVDARVGKTLAPIKNSARLLTTLPGVSELTAQVMVAEIGVDMGRFATSSHLISWAGLCPRNEESAGKRRSTRVRKGAPWLKTALVTAAWAAVRVKGSYLQAQFLRLKARRGAKKAILAVAASMLTAAYHMLKNGIEYRDLGADHFSRRDRSKAIQRLVRRLNDLGCEVQVTPLAA

SEQ ID NO: 101050 - protein, 381 aa, unidentified
MPATTRTLIRLPEPPVLYLALELSNRSWKLAFSTGLGQKPRLRSIPARDLDALLREISAARRRFHLDDALPLVSCYEAGRDGFWLHRFLVSEPGRHNLVVDSASIDVKRRRRRIKTDRIDATKLLTMLVRYHNGEADVWSVVHVPSPEAEDARHLHRELLTLKTQRTRVTNRIRGLLAAQGLSVSSMARDFPRQLASMELWNSDPLPPLLRERLLREWEHRVLLSKRIGLLQQRQTERLQNSTDPAVAMVRQLMTLKGIGLQSAWLFTFEFFAWRNIQSRQQLTALAGLSPSPYQSGDEAHDQGISKAGSSSVRAMAIQIAWGWVRFQPDSTLTRWFDRRFAHGSRRLRAIGIVALARRLLIELWRFLQTGALPEGATASS

SEQ ID NO: 101051 - protein, 416 aa, unidentified
MGKQRDIACGADIHKNTIVATILSLAGTKNQAKFGTTLSELLRFKFWLTDNGCDVVAMESTGTYWIPVYSVLEGSIKVVVANPYMIKHIPGKKTDLIDSDWLAELCLKDLIVPSRIFPKEDRALRSLTRAREGLVKIRTQLKNRIHRDLSSSHIKLSSVVTDIFGKSGMHILRGLLDDQSIDEIIKGIPSGRVKKNADKIKESIENNLDSSQIFLIESSLDLMGHVQDKIDRIDMDLKSKIITRLNDLKIAMSIPGIEFTSAATILAEIGNYRNFSSPEKLASYFGLVPFVNQSADKLHTGCITKHGSKHLRWIMVQVAHAASKKIGSKLRKFYLRIRARKGANVAIVALARKILCILYHLLMNQEMYEEPGAARKTRPNRLDQSTTQREFTAQEMIDILKRSGYEIRKIDRGACG

SEQ ID NO: 101052 - protein, 342 aa, unidentified
MKISTIGLDIAKNVFQVHGVDEAGEVVVRKQLRRSRVLAFFEKQPPCLVGIEACGTSHHWSRELQALGHEVRLMPAGYVKAYVKRNKNDAADAEAICEAVTRPTMRFVATKTKEQQSVLMLHKTRQLLVRQRTMLGNAIRGHMAEFGITARRGREGLGKLLAIAHDQDDEQVPSFARQALIALAGQYQAVQAEIVALERPLHAWHRSNETSRRLAEIPGVGPLVATALTASVTDPTAFSSGRSLAAWIGLVPKEVSTGGKSRLGPISKQGNRYLRWMLVTGAMAVIRYAKKTGFKKRPWLARLVEHRPIKLAAVALANKIARIAWVIMARGERYKEPVVLAT

SEQ ID NO: 101053 - protein, 338 aa, unidentified
MKLNVFGVDIAKDVFQIHWVDKAGKARSEKVKRQHFLEWFSNKTPSLIAMEACSGAHHWGRCFQQMGHQVRLIAAHKVKPFVIGNKNDMVDAQAIWTAVQQPQMRFVAVKSVEQQAALAAHRMREYLIKNRTGSINAVRGFLAEFGLVIAKGRAAFKREIAGCLETLSQSVPKEFVDRLYERLAYINKLDEDIAGLEQHITAYFKRCPQCQRLGKVPGIGVLSATAIVATVGDVSQFKSGRELSAWLGLVPKQTGSGGKVKLHGISKRGDTYVRTLLVHGARSAITHNKHPSEWLQGLLIRRPKNVVLLALANKTARVVWALLSKDVEYDENLYSQVS

SEQ ID NO: 101054 - protein, 313 aa, unidentified
MSQNTMTTIYAGLDIAKLNLQLHLAGRSHDLPNTVPGHRRLLKLLAAQPGSQVVCEATGGYERDVVAALQAASIPVSVLNPARARHFAKASGQRAKTDKIDAALLTAYGQALRPKPTPPRTALEQQLTELVRRRQQIVEVIVAQRQQAEQLTLPGLRRQAQSLVRRLERDLAQIEDQLKQLRRQMAPLHARLQKLEAITGVGTITALSVLAELPELGTLNRKQTAALAGLAPFTRQSGRWQGLRAIGGGRAPVRRALYMAALVAARCNRQLKEFYQRLRTAGKPAKVALTAVMRKLVVLMNHVLKYPDFVLQN

SEQ ID NO: 101055 - protein, 372 aa, unidentified
MQQESAVFVGLDTSKMKISVALAEDGRQGEVRFLGDIDHTPEAVRRLVTKLAGKYGRLLFCYEAGPTGYGLQRQISALGHDCAVIAPSLIPKRPGERVKTNRRDAITLARLHRAGELTRIWVPDPGHEAVRELVRAREAAMADLRTKRQHLQSFLLRHGRIYPGSRPWTQVHARWLSNLSFEHPAQYLVLREYRQAIDDAEARLERLTQQVAEVVSSWSMVPVVEAYQALRGVAFLTAVTFVAEIGDVRRFETPRQLMAYLGLVPSERSTGEQVWRGSITKAGNPRARRVLIEGAWTYRYPARLSRPLQVRQESLPTVVRAIAWKAQLRLCARYRRLMAAGKRQTVVTTAIAREMAAFLWAIGHAVEPRPAA

SEQ ID NO: 101056 - protein, 346 aa, unidentified
MAIAVLGIDLGKNSCSVAGLDGTGRVILRRRLTRESVVRLAGTLPACVVAMEACCGAHHLGRVLREQGHEVRLMSPEYVQPYVKAQKNDERDAEAIAEAATRPTMRFVELKSEAQLDAQILHRARSRLVGQRTALINQLRAVLLERGIVVAKGRRRLEEYLIGLLDEDGDRRATLSLRTCLLIEDMRLEWSELDQRIAALTAEFVARAREDQAARRLATIPGFGALNATALVAAIGTGETFRRARDLAAWLGLVPRQATTGGKPRLLGITKRGNTYLRTLLIHGARAALPSLSASQSPMGEWLRGLIGRAHKNKVIVALAGKLARIAWAVLRSGETYVKEGRPVAA

SEQ ID NO: 101057 - protein, 348 aa, unidentified
MKHIGMDVHSTTTNVVVINDAGKRLLSHKVATTAKDLKEVISSIPGDKRVAVEESQMADWVVRELAPLVKEIIRCQPQHNRLISRSEDKYDERDAESLAVLLRLNELKPVHHAAWGFRLFREAVRSYWLRSRDLSRAKNRLKAFFLYNGIHEPSKRIYTQRHREEYRERLRQRSGNLELAESLWEDTRYCRLKKAHHVKLMREAGKPWKAEIARVQSIPGLGVIGAHTLVAYLERGYRFRNKRQAWSYAGLGLRRKESAQRGYRKASRCGNRYVKNVILTAAANIAAGRRQHALWEMWRQGMVAGVDARRMRRNVGRKIVVIAQHLLRSGEEYADDQMTASTTGSRQQ

SEQ ID NO: 101058 - protein, 385 aa, unidentified
MAPPRMPEAVIGLDVGKLSHWACVATRDGEILLSAPVANREGDLDSLFGRFPDALVVVDQSRNIGALALARAKAAGMSAAYLPGLAAHGAARLFAGDAKTDERDAMVIAKTALGIPDALLPVGDPGPTVAAARALAAQRNFLTSENTRSKNRLRSILLESCPAFEALVDLSDGPQLRLMASLGGAWSVADAGPRRAAALTRGAARGKIEALVRSTASSTRPDAAAIAAEDRAVRLLARRISENSAEIDVITAEISALLEGDDTYRCLLTVPGIGPKTASELAISIDIEDFPSHDRLASYCGLAPRNRQSGTSISSVTASRQGNKRLKNLLIFSCNCLTRTEGRWGDYYARCRERGMPHGKALKALARKRLKVIYAIMRDRVPYAA

SEQ ID NO: 101059 - protein, 349 aa, unidentified
MTEQRISYTGARVYVGIDVHKETYTVTCVCHKQIVKTATVPAEPARLVASLLRWFPGATLTSAYEAGFSAFVLHRALTQVGITNIVVNPASIAVAANDKVKTDRRDSKRLAIDLADGRLRGIYVPTEAEELARLLPRTRAQIVQHRATIARQIKAKLHQFGLIAPSSRRSISSRYLREIATWPLPPELGVSLMLLAEQWRFATRQLIEMRRLLRDQAKAQAEIEKVYRSVPGIGAVVARTLATELGDMTRFANERALFSYTGLTPSEYSSGTSVRRGHISRQGSSRVRHLLVETAWRALPRDAVLKEIFDRIAATRGKKRAIVAIARRLTGRMRACFRQGTTYAVGTYA

SEQ ID NO: 101060 - protein, 346 aa, unidentified
MQITTIGLDIAKNVFQVHGIDATEKVVVRKQLRRGQLIKFFEALAPCLIGMEACATAHYWARELMKLGHQVRLMPAKDVKAYVKRNKNDAADAEAICEAVRRPTMRFVPVKSAEQQGQLMQHRTRDLLMRQRTQVINALRAHLAELGIVAAQGREGIKELLAIVADDQDARLPIDARASVIVLAAQLQALQTLIGSIEKRIKMQHRSNEASKRLESIPGIGVIGATAIVATVVDPTVFRSGRDFAAWIGLVPREDSTGGKQKLGPISKQGDRYLRRILVVGACAVLRYAKQNPERYPWLTQLLARRPFKVVAVALANKMARMAWALLAKGGTYRAPALVPALAAAA

SEQ ID NO: 101061 - protein, 377 aa, unidentified
MSKIRFVGLDVHADTIAVAVAEAGGEVRSLGIIPNRLESIRKMIGKLGPVGDLKCCYEAGPTGYVLYWQLTQLGVACEVIAPSLIPTKAGDRVKTDRRDAEKLARCYRAGELTPVWVPDAAHEALRDLLRAREAAKKDQLRHRHRLGKFLLRHGKRPQDAGKAWTQKYLNWIRIHVHFEQPALEATLKYYREEVDHIAERIAALEQAIDGAVRQAPAEIRAVIEALQALRGVAQTTAATVVSELGSLSRFPNPSQLMGYSGLVSSEYTSGNRVQRGRITKSGNAHLRRVLLEAAWTYQHRPNVQGRVLRRQKSLALSEEAKRIAWKAQQRLHKRFSALTARGKETNVAATAIARELLGFMWAIAVHVEAQHKPAKAA

SEQ ID NO: 101062 - protein, 405 aa, unidentified
MATPEQVDVWVGLDVGKEEHFAEVLDDGGERIFARSVVNDQAALEALLDRAATHGTAGLVIDQPGSIAQLALAVARDRQVPVAYVPGLVMRRAADLYPGEAKTDKRDAFVIADTGRTRRKQVHWLDVASDELLERLGVLNGFDIDLAGDQTRLTNRCRDALTSVSPALERALGARLNQAGVRDLLAKYPTLTALKTAGRARITRTLKGRSPRLAAKLVDAVTAALDAQTVTVPAEATIGRVIAELAVELDRVFARRDALAAEIEEAFLSHPFGELLSSLPGIGPRTGSRILAEIGDGSRFADGDKLASYAGLAPVTRQSGKSINGESKSRRGNHRLKNAMFLAAFASLRSPDSKAFYDRKRAEGKRHNAAIICLARRRCNVILAMLRTGQTYNPGHVVTDLAEAA

SEQ ID NO: 101063 - protein, 429 aa, unidentified
MNLRPIAGIDVGKFFSEMAILSPSNEVIARMKIRHDSSSDVERAVELLKKTEKDFDSRPFVVMESTGHYHKILFHSLCKAGLEVSIINPIQTDSIKNIGIRKVKNDKADARKIALLYRFQELKTTNIPDEDIECLRSLCRQYYKLSDELTAYKNRLTGIVDQLMLNFKDVFPNIFSKAALAVLEKYPTPAHILKANRNKLIALIQKNSRRSLKWSTAKYNLLVSKAREFAPLTVHNSSNIAMLGVYISMIRTLEDNLAKVLKTIHLLIAEDMAKDMPMLALTLELLQSLPGIGLLTAATILAEIGDFSAFSKPGKLVAYFGIDPSVMQSGEFTGTRNKMSKRGSRLLRRVLFTTALANIRTKRNKEACNPVLLEFYKQKCQSKPKKVALGAVMRKIIIYIFAVLRDRKPYQLRSPQEHAQMLAAKHIAA

SEQ ID NO: 101064 - protein, 431 aa, unidentified
MPGENQDKLMSGNQPEVQYAAFLAIDWADQKHVWSLQEANSSARERGEVDHMPEAVETWVAQLSQRFAGRPIAVAVEQSRGALVFLLSKYAQLHIFPVPPAMTANLRKAFYSSGAKNDPTDADLLLDLVQQHREKLRRLSPDTEATRRIQNLVEERRKLVDEKTAQSNRLEAHLKIYFPQIPRWFGDVGSPMVCALLERWPTLEALQKARPDTLRSFFRKHHCRKEELIESRIKAIGEAMPALKDRAVVEAKVAVVKVSVQLIQVLHEGVEGLNRQIQEAAEAHPDFFIFDSLPGAGAVMAPRLLAAFGSQRERYQNAAEVQTLSGIAPVTESSGKSSWVHFRFACSKFLRQSFHEWAALSITQSQWARAYYELQVRRGKKHHAAVRALAFKWIRIVYRCWKERVAYDENVYLAALAKHNSPLVAATKAAL

SEQ ID NO: 101065 - protein, 369 aa, unidentified
MKVTTVGIGLAKNVFQLHGVNEFGKTVIKKQLRRDQRSEFFVNLPACLIGMEACGSAHYWARKLRRFGHTIKLMAPQFVKPYVKTNKNDAADAEAICEAVSRPNMRFVPIKNVEQQAVLALHRVSQGFVKTRTAQANQIRGLLGEFGLIIPQGIGHISARVPELIEDASNELPRSFHILMQRLLDHLKELDRQVGELEVQIQAWHRNSDVSCKLAQIPVIGPITASALVASIGDAKNFDSGHQVAAWLGLVPKQHSSGGKQNLLGMKKRGDTYLRTLLIHGARSVIYRAGEKPDACSWINGVVNRRNKNVAAVALANKNARIVWALLAHGRQYEAGYARDGDGVIRCGSKTDNNSAGRIEPPIAQAIMK

SEQ ID NO: 101066 - protein, 406 aa, unidentified
MIFVGLDWSEAHHDVCVLDDQGMVLAKGKVSDDVSGVGRLHAMAAEHAEDPSEVVVGIETDRGLLVGSLVQAGYRVYAINPLAASRYRDRHAVSRAKSDPGDAKVLADLVRTDRQNHREVAGDSELAEAVKVLARAHQNLIWSRQRQVNALRNTLREFYPGALRAFTTSQLATIEACSVLAMAPTPTWARDKLTLQRLRRSLSASGRKRNLDRRAGQILHALQAPELSAPALVEQAYGDVVGSLVVVIDGLTHQIAKLEAELAERFEGHPDAEIITSLPGLSSVLGARVLAEFGDDPTRYQDARARRRYAGTAPITRASGTRLVVLARVARNRRLFDACYLWAFSSITTSAGARRYYDAHRARGKTHHQALRALANRWIGILHGCLTRHEPYRENVAWVAPVEAAA

SEQ ID NO: 101067 - protein, 320 aa, unidentified
MSVTSVTVGIDVAKAHVDVCVLGAKSSAQRFDNDAEGHSALAAALQPLDVGLVVMEATGGYEAALACALQATGLPVAVINPRQARDFAKSMGRLAKTDAVDARTLAELAAVLLRRDDLQRFLRPLADERQQWLAALVTRRRQLLTMLHSERQRLQITPKKLHASIEAIEAAIKAQLDEIEEQMVTHVREHFGELDTLLQSAAGVGPVSSATMIAELPELGRLNRREIAALVGVAPMANDSGGSKGRRRVQGGRFEIRRVLYMATLTATRYNPAIKAFYERLKAAGKLPKVALVACMRKLLTTLNAMVRTGKPWDKSLHCA

SEQ ID NO: 101068 - protein, 403 aa, unidentified
MAPVMIGIDPHKGSHTAVAIGADEEPLRQVRVRASAAQAQKLVAWAANWPERTWAVEGARGLGYLLAQQLVAAGERVLDIQPKLGARVRLLATGASGKNDPNDARSVAIAALRSTTAAEVAAAGHAAVLKVWSKRHRDLGRARNQLACRLHAVLCDLAPGGFSKEITAGQASGLLQRIRPSGAAAQARYDLASEFVEDLRRLDAQLRDTRRKLTAAVKESGTSLTEIFGVGPVIAATVIGATGQVSRFASRDRFAACNGTAPIEVSSGPRKVHRLSRRGNRRVNHALHMAAVTQIRNKHSDGRAYFDRKLAEGKTRKKALRSLKRRISDAIYARLQDDAQRARKLTAREGNRGTTLTPARPAHTPITGSSDKPLPGLAPPYGHSPSKAEYDQAASAREAQRTP

SEQ ID NO: 101069 - protein, 350 aa, unidentified
MMIIGCDFHPRYQQIAMMDTETGELVERRLEHENGEARAFYASLAKPVRVGMEATGYAQWFEQMLAEQGHELWIGHASEIRAGVVRKQKTDARDAAHLLRLLAENRFPRIWIPSPAERDTRQLLRHRYKLVCFRVSVKNQLHGLAMSQGVCRKKKLFAAKGREELEKLSLGPWASRRRQELLAMLDQLNAVIEELDRAVQQEAERRADAVRLMTHPGVGPVTALAFVLTLGPMARFQRSKQVVSYLGLNPKERSSGDKQHTYSISKQGNTMMRWLLVEAAQTAVRFDPELQRVYRRLKFNKGASVAKVAIARKLAVRLYWLLRATASCAQMAPMQGSSRGTLVPQVGSSF

SEQ ID NO: 101070 - protein, 350 aa, unidentified
MLIIGCDYHPGFQQIAFADTETGECGERRLAHREEGEQFYRELKQRSVSVRVGMEASGHARWFERLLADLQFELWIGDAAEIRTKRVRKQKTDRQDAQLLLKLMIEDRFPRIWVADAENRDLRQLLWHRHRLVQMRTRVMNQLHVVALNEGLRCKKALWRPAGRSELESLVLARWASRRRQDLLDVLDQLTPKIQELTRALEEEVEKRPVTRRLMTHPGVGPLTALAFELVIGTPERFHCGKQIASYVGLVPSEDSSGDRRRLGHISKQGNSLLRFLLVEAAQVTVRSQAQWRSKFFHLAMRRGRKIAKVAMARKLAVHLYWMWRQGWDYGQFAKFGSHAGEPGNRHGVQ

SEQ ID NO: 101071 - protein, 339 aa, unidentified
MKSMEITAVGIDVSKSKSTVAIRRPGGVIVARPFDISHSNHDLEKLVSILKTTGGDIRVVMEHTSNYWKPIALTLKEAGFYVSVVNAMLIHDFSDNSIRKLKTDRADSLKIANYALTFWNELPPFNDEDETRLVLREQSRMYERLASTATSLRNGLIALADQTFPSIDQAFGHAIKNADGHEKWVDFFSIYWHRDCVLRLSIEKFTESYRKWCLRRNYKFRTNTAHKLYALAQDAVPTLPKNNGTKALVLQACKSLNAVCEAKQSTQEEMNRLASLLPEYEVVMQMEGTGPITGPALMAEIGDVRRFKNKKALVAFAGIDAPPFQSGNFESKPPAEPVA

SEQ ID NO: 101072 - protein, 320 aa, unidentified
MESTQQTICAGVDVAKEELEACVMPGEHRITVARNDKGIASFLKFCQKHGVQCVIVESTGGYDRAVTAACHAANLPVSLVNPKRVTDFGRGLGWLHKNDRIDAKKLALYGQLAKPRCLEKLPENQQELNDLVTRRRQLIDMRTAETNRSKQTDSKRARESIGKVIAMFDEQVEQLDAEIARLIEDDDSWRNADSILKSVPGVGKATSAALIAELPELGKLNRQEIASLVGLAPFDHDSGKMKGQRSIWGGRKSVRTGLYMAALTSMRCNPILKVFAARLKRSGKKTKVVLTAVMRKLLVICNTMIKNNTHWQPNLASEIV

SEQ ID NO: 101073 - protein, 355 aa, unidentified
MESTKYIGMDVHKETVSIAVMNSAGKLVVESIIETKGATILQFIQGLRGDLHVTFEEGTWAAWLYDLLKPHVTKIVVCDPRRNALLKEGNKGDKVDARKLAELLRAGLLRPVYHGESGLRTLKELSRSYLTISKDLTRVMNRLKALYRGWGIACEGATVYAPRHRSEWLGKITEAGVRRRAEFFYQQLDALQALRQQVRRDLLAESRNHSARKLLRQIPSIGPIRAALLMALIQTPHRFRTKRQLWAYSGLAIETHDSAQYRYVAGQLQRSKKPQQLRGLNQNHNHDLKAIFKGAATKASSGAGPFHDFYEALLTKGMRPSMARLTLARKIAAITLMVWKKGAHFDAEQLKPQAA

SEQ ID NO: 101074 - protein, 439 aa, unidentified
MKETCKQAETAFAAFIGVDWADQRHAWAMQIPDGTLLQGELTHTPEAVEAWAMELGTRFNGQPIAVALEQSRGSLVFMLSKYAHLVLFPVHPTTLVKYRQGFRPSGAKSDPSDAAFLVELLVHHRDKLRRLNPDTVETRTLQFLVEGRRKFVNEKTRYSNRLTDCLKMYYPQVLNWFCEVSSEIAGDFLQRWPRLENVQKARPETLRKFFLQHHSANAETVERRLEEMRRAVPATKDAAVLTACVSNTAVLVRILRDLRAAIHDYDKQIDTLARQHPEFALFDSFPGAGSALVPRLIAALGTQRERYQNASEVQCYSGIAPVVASSGKQCWVHWRWACPKFMRQTFHEWAGHSIRFSTWAKAYYEKQRAKGKSANTAIRCLAFKWIRILFRCWKDHQHYREELYQAALAHRSSNNAKTPTVQLQWKTYAGFCKLDGFSA

SEQ ID NO: 101075 - protein, 363 aa, unidentified
MNATAALPVVGVDLAKSVFQLAVADGSWRVVESHRLTRGQFERWFANRAVGLVVMEACGSAHHWARWLNGLGIEVRLLPAAYIRAYVKRNKTDAADACALLEAARCAEIVPVRVKSIEQQALQGLHRTRSLWMGTRTSRINALRGFCREFGIVIAQGSRLGVEQISRALADPHAAVPMLIRGTMTLLVEEIRLLEVRIAQLERELSALARQSPACTTLLSIPGVGLLTATAMVAATSGEVSHYRDARHFASWFGLTPKEHSSGSTRHLGRISKRGDRYLRMLLTHGARSVLRAASVAVHAGKTVDGLRQWALGVQRRSNHNKATCALANKLARICYATLRDHEPYGSVRLNKKLARTAVALPS

SEQ ID NO: 101076 - protein, 391 aa, unidentified
MIYVGIDIASEKHDFFMIQAETGITFSKSSITIKNSDDGYKKLHESIQDFCGATGDSQIRIGLESTGIYHTNIISFLLSQNYQVMMINPILTNMARKASKVHCPKNDNLDSQTICKYMIDNSDKFLPYTLSLYHNEALKSLSRKRFYIVQDLRKAKLAVNSLVQQIFPEFKSFFSNIYGDSAIAILKEYGTPKNLAKAHTKKVASLIHGRCKCTAEQLIAAAKVSVGISEPHLAFQLTDAIEEMEHIQKRIKAYDAQIKEYVDMLCPNLLSIPGVGYTTAGLIAGEIRDIDRFHSAESLISYSGVDVTVYESGKYKAQHLMMSKKGSKYLRYALFQAARIIWQHDSVFQAYYNKKKAEGKHYYVILGHIQKKLCRVIYSVLKSGSLYSSAS

SEQ ID NO: 101077 - protein, 421 aa, unidentified
MQVLYERCAAIDVGNAVVAVAVRLPGDGPDGRVTHKKMFKTFYGVLREAAGWLTSLGVTHVAMEATGIYSMPVYHALLEHGQFEQVLVCNAGHVKNVPGRKTDLADAEWLAHLLECGLLRGSFIPPADIKAIRDVIRYRVKVVQARSSEIQRLDGVLQDAGIKLGNVASSIASRSGRNMIEALIDGERRPDVLADLAIGRMRSKTADLAMALEGRFGSHHALMCRLHLDHIAHLEQMIAKLDAQVETMMQPYRTQQDLLATIPGIGPLAAAAVISEIGADVRAYFPTAAHLASWAGICPGNHESAGKQHTGQRRHGNQHLEPVLAEAAWAATRHQGYLKSLYHRHVMKSGGYRSSAAKNKAIIVVAHAILIIVWQVLATGTPYHELGADYFDRRLDPERETRRLIAKLEALGHQVTLQPTA

SEQ ID NO: 101078 - protein, 454 aa, unidentified
MKRKVPHSKIDALTGEVSKSKIQEVPEMNNTQNEKIAQVTNDTMVIGIDIGSQKHWARAFDNRGMELSKKAFGFNNTAAGFAGFEVWYEGQRRAAGLKRVMVGLEPTGHYWFNLNQFLAGNGIKVVLVAPQHVKHSKELDDNTQRKDDLKDPRVIAKLVTEGRYFLPYRPTGVYADLRDGFNRRCGIVESMTQAKNRLHRWFCINFPEYLEAYGSVSAKTGLMVLKKAPLPKDIVALGVDGIDKIWRDAKVRGAGKKRAATLVALAEQSIGEKTANEAARLELWQLLEDYEHYAHQYEVIEEMLERRIHEVPHADKLLQIRGIGYFTVIGFFAEVGSIDRFDDPKQIQKLAGLSVVENSSGKRKGLPGISKRGRDRLRWVLFQAAMSAVKNNQEFKEIHLYFTTQKDNPLKKMQSLMAVAAKIIRVFYGIVRTGSDYDPERLMRDIRRPEKAAA

SEQ ID NO: 101079 - protein, 327 aa, unidentified
MGSGSLYVGIDGHKNFSFLCAMTKEGEIIEEKKVRNEEIEKIIEELGLDNLIVIIEPTTTTYPLVRGLRKKTEIKLAHPQKTKLIAESKKKTDKVDARVLADLARTNFLPTAYLPPDEIIELRDIVRERVRLKKLSTSIKNRIHSILMIEGIKYSNPFTSEGIKFLKSLNDGRINRYLRILNTINEEIKEIDKEIREKCIENEEIMILTTIPGIGYFSALLIYAEIGDINRFPNSKKLCSYAGLVPAVRQSGNRVIRGRITKEGNKLLRWVLVQCAHVAVRKDERFKEFYNRIKQRKGPQKAIVATARKLLTVVYACWKNRTPYGRG

SEQ ID NO: 101080 - protein, 344 aa, unidentified
MATYYIGADVHSNNTDLAIEHRGQIVARYSVPTSIPSISAVLNSIQGKKILAMEEGPMAGWLYRNLHEKVDKLVVSEPRRNKLITSEGDKDDKIDSGKLAVLLRGNYLKAVHHTSDSHRAHLKHWVNLYHDRVRDAVRDINKIRACCRMHGVRIPRKVVRNPVRRRAWLSELDNSVLKAQLHMLWIGYDATKEQVKIAKKQFSSYARKYPIIKSWSSLPGIGIIRAATIFAYLDTPWRFKNRAKLHRYCGVGLVRITSGKDKKGKPKPPRLKLPWAVNRRLKNAVMGAATTAIERGDNVFKDYYKRMVSNGITPANARHSVARKMVSTMSAMWKTGNKYDETLV

SEQ ID NO: 101081 - protein, 344 aa, unidentified
MTYYAGFDVSLRTVNICVIDEQGEFVAETKLASDVQDIIAYLDDLKFDIESVGLEAGTLTQYLTYGLQAAGFEVVCMEARQVKAALSAMRNKTDKHDARGIAQVLRSGWYSKVHVKSMASHHIRMLLSSRKAVLSKCVDLENEVRGLFKIFGIKLPPKLGHGAFDPMVRDIIEADEALSHALLPLLDARLVLYHTFRVLDNRTRKLAMNDPVCPRLMSVPGVGFITALTFKAGVDDPHRFKRSRTVGAHFGLTPRRFQSGEIDIEGHISKCGDADVRCALYTAANAMLTRSAKWSSLKAWGMKLAKTRGHRRAVIAVARKLAVILHRVWIDDTQFRWGTEGARS

SEQ ID NO: 101082 - protein, 463 aa, unidentified
MSMKERGKTPAKGAKPKIDWKALEIVHPDAAGIDIGGSEHWVAISPERDEQPVRCFDCFTADLEQMADWLIERGVRSVAMQSTGVYWIPVLEILQERGLEVYLVNARHTKNLPGRKSDIAECQWLLKLHTFGLLNNSFQPSDQIRVTRTLWRHRGGLVAQASSTIQRMQKALTEMNIQLCNVLSDLSGASGMAIVQAILNGERDPQALAAWADPQVKASRRVIAKSLKGNWREELLFVLKQEVEMYRMYQERIAACDQKLQGHLRVLAPKVDLQAQPLGPRPKGKRARGNAPKFDLRTELYRITGVDWTQVDGIDVQVAQSVIAEVGVDLHAFPSEKHFSNWLGLCPTNETSGGKVLKRQTPKVVNRAKVAFRQAASTLLRSQSYLGAQYRRPRTRLGAPKAITAMARKLACLFYRLPKHGQQYVDKGAEFYESRYREQQIRSVIKRAHQLGLQLLQSADKSA

SEQ ID NO: 101083 - protein, 320 aa, unidentified
MKAVLGIDIAKAKFAAALLRPDEKVRHKSCANTPAGFAELAAWLLRQHVTQVHATLEATGTDGEALATWLHDAGHVVSVVNPTIIHAYARAHLTRSKTDRLDAELIARFTATQHPEPWAPPAPEIRQLQALVRRLDALQGMRTQEVNRLAAGVTIADVRASIEAVVANLDAQIVHVQQLIRDHLDRHPSLRAQRDLLTTIPGIGEATAAILIAELFDKRYQGARQAAAFAGLVPRLVESGTLRGRSRLSKVGPSRLRKALYFPAIAALRHNPTIRVMQTRLHAAGKPPMVIIGAAMRKLIHLAYGVLKSGKAYQPTCAHP

SEQ ID NO: 101084 - protein, 356 aa, unidentified
MTGYYGNDKVLARGKTVAVGIDVHKENWHVTVLVAGEELFHGQIPGEYAALRKQLDRLLDCQIRVAYEAGPCGFGLHDRLQGDGIEVLVVPPSLIPVESGNKVKTDRRDSRKLARLLEANLLKRVHVLTAEERAHRDLLRTRRQVVNHRSDVARQIKSTLLFYGIRAPFPAQQQWTGPYLRWVKGLHWEEECVTVALDMLLRLYEELTVHVKALARQITTLAGTEQYQARVRLLRSVPGIGLLTAMEILTELQDLSRFASPQHLASYLGLTPSEYSSGPRVRQGRITRCGNKRVRSCLVESAWILIGKDPAMRQRYLRIKMRRGAKRAIIAIARNLSGRIRRMLIHHEPYVVGMAA

SEQ ID NO: 101085 - protein, 391 aa, unidentified
MGDTYRVFVGIDWADEAHQVCATDEDGRTIGERQVPHSGLELHGMVEWLVGLATGQADAVAVAIEVPHGPIVDTLLDRGCHVFSINPRQLDRFRDRFSPSGAKDDRRDAEAMSSAVRTDRDALRRLHLADPLTLQLREAARQDAELQEDFQRLANRLRDLLVRVWPELLRLVPAANEPWLWTLLRLAPTPLKSERLPRSRVKRLLETHHIRRLTADGVVAVLRTPSVCLAPGVREGVAPRITGLLRQIELVYGQRKEAGRRLEGILHAVAKDTPTENVREHQDVAILQSRPGIGTRIAATMLAEAAQALRERDYHALRVLGGVAPVTRRSGKLRIVQMRYACNGRLRFALRCWGMSAIYHDARSRLHYDHLRNDGHNHDRALRGVLTPSIT

SEQ ID NO: 101086 - protein, 319 aa, unidentified
MVKLKYSICCGLDVHKNVIVATIVITNKDGICEYKQKSFSTINSDIQRFHNWLIENNCYHVCMESTGKYWIPIFNYLENDIDVCLTHPKYVKAIKGKKTDKKDSKWIADLYKFDLVRCSFIPPKDFRQLRELARYRFKLVCMKSSEKNRIQNCMTVSNIGIASVLSDPFGKTATEIMSYLLGHTADSIDEKAVRKLIKKGAKAKSDEIIEAIKGYSIETDLAKKLELARAHLDYLDNMITQTEVELYVRIKPYYGFVEFVSTMPGMTELSSTIVLAETGVNMNLFDDAKHLCSWCGLSPANNESAGKKNLSGLPKPALT

SEQ ID NO: 101087 - protein, 455 aa, unidentified
MYLPDWKWIPIRKELLLMSNKVIFNLDELFISVGIDVGADFSWMSIALPNQQFVGKPFKILHNSIDSLTTAVSKIKEAEELYSLESRIFLESTGIYHYPLFCYLRDKGFNCSVINPIITKNSTNINIRKVHNDRFDSKKAALVGLKPDLKVSLMPSDLALNCRNLCREYYDLMDNRSAYVNKLQGELRMAFPQYLGIFSKVTINTSLTLLETYTSPSAFLEADKQEIIDIIKSTARFGLTYAQNKYNAIIQAATDANQFGYIIESNIKRIRLYISFIRKYDEEINSILESLHELVDANEDTDFVKQIHLIKTFKGAGFLSAVSIMGEIGDFSAFSKPKQLFAYFGLDPAVKQSGKFEGTKVQMSKRGSAIARRVIHTLTLQSISISRNGEAKNPVLREYYLKKCDSKPKLVAMGAVSHKVCNMIFAILRDNKPFKIIAPQEHIKQYNAAKCDMTA

SEQ ID NO: 101088 - protein, 350 aa, unidentified
MIVLGADTHKRSHTVAAVSARSGELVGERTVQVGVKGFDALVVWARGLGAERVWALEDCRHVSGSLERFLIERGERVLRVTTKLMADARRRARGRGKSDSIDAIAVARAALREGLDGLPAAQLEGPELDLRLLVDHRERLVRQRVALNNTLQWHLHDIWPELRLPGSSLFYGNWGPRIARRLARAEQTMRVRIARDELGRIRELSQAIKALEAEIAQLVAQIAPQLLSEPGFGPLTAAKLVGEIAGAGRFASDAKLARAAGVAPIPVSSGKTNRHRLDRGGNRQINATIHRIAVTRLRCHTETQDYIARKRAEGKSTKEAIRCLKRHLARRLWHLLQPPTPDQHTIKLLT

SEQ ID NO: 101089 - protein, 393 aa, unidentified
MFYLGIDVGKFSHSLCLLSDEGQESIWQIKNNKAGFETLKEKLLSLDSIDKNSLLVGMEATGHYFLNLYDFLLQLGITAEQIALLNPLQVKSFRNTNLRGAKSDNVDARQITVLLKFGNFDRCNINIDEMIMLRELTRLKSDLTASSADLKRKMISVTDRIFPEFMSIFSNRFGKTAVALLRDYPTPEEMAELSLSELTTVIKSLSKRGLASSKIKKLHEACRNSIGISFGVDAFKIELNLLLENLRLLQNQIDFLENKIVAIVSKFNSPIFTIPGIGKSTGASILSEIGSIDNFNSAIKLIAFAGLDPKLKESGIYQGRTPISKRGSKYLRNAIWYSAMVICRVDPKFKKHYTDRRNKGRSHRYAVTAAANKLTKIIYHVLKNNCTFNPELV

SEQ ID NO: 101090 - protein, 379 aa, unidentified
MEAIVACCAGLDVHQASVVVCLNRGGGKRGKEIRRFGTTRGELAEMCAWLKDAGCTLVAMESTGVSWHPVYFALEGQFELIVGNAQHIKNVPGRKTDVKDCAWISDLARHGLIAKSFVPPKPIRELRELTRYRRKLVQVQAAERNRLIKLLESADIKLAGLIADVFGVSGRAILRALIEGEESPDEMAQHARGRMRRKIKALAQALDGRLEEHHRFLMRLQFARIEAAECDLERLDERLSERLAPYAEPLHRLMRIPGVDWIIAATIIAEIGVDMSAFNSAAHLASWSGICPGNHQSGGKQRSGKIRKGNVHLKTALVSAAIAAAKTRGCYLADKSRRLRARRGEMRAHVAIAHKILIAAYHVLAGADYQELGRIISTV

SEQ ID NO: 101091 - protein, 355 aa, unidentified
MLYLGIDQHARQITISLRDENGDVIEARQVSTKPEKIHDFFQRLTAERLKAGEKFVAVLEVCGFNEWLIRMLRDYRCEKVILIQPEQRTKRKTDRRDAAALSELLWVNRKRLLEGKAIRGLRQVEIASTTDQENRRLTTLRKEAGQARTRIVNRIRQILRRHNLQWEMPTKLFPTQRAIAWLKKLVLPEIDRLEMQYLLADLELIRQRLQELAKAITDRCGASQDARQLLSMPGVAGFTATALACRVGNVKRFPRSSSLANYWGLTPGCRNSGEKSQRLGNITKAGSSMARWLLAQVTINVLRKDARLREWFKRIKRKRGSKIARVAVMRKLATIIWHMLSKRKTYDECRAFKTA

SEQ ID NO: 101092 - protein, 349 aa, unidentified
MIVLGIDAHKRTHTVVAVDHLGRQLGSKTTTATTTADHLAIIRWADQFGDERCWAVEDCRHLSRRLERDMLAAGERIVRVPPKLMAHSRDSARTYGKSDPIDALAVARAALREPNLPTAHLDNESRELRLLVDHREDLVAERTRHINRLRWHLHDLDPTWEPDLRSLTTFKHLDITAARLAGLDSVIARIAADLVARIRQLTVDINDLRVELEARTETTAPNLRQIHGVGPLAAAKLIGEVAGVERFKSRNAFARHNGTAPTPVWSGNTSRHRLSRSGNRQLNAAIHRIALTQARSHPGAIAFLARRTDAGATRKEALRSLKRRLSDVVFRAMLADAELTQHHPTQHAA

SEQ ID NO: 101093 - protein, 342 aa, unidentified
MKDIMIGVDLAKQVFQLHGAQRSGEIVFRKKLSRDQFQRFIAAQPACLVVFEACSSAHHWARQMAALGHDVKLIAPQYVRPFVKRQKNDAADAEAIVIAARQPEMRFVMPKTKEQQAKAVAFRSRERLVHQRTELVNALRAVFYEYGHAFPIGIAHLKRMEAVVEEPGSDLPELVIDECRDLLAQIAEKTERIAAKTKTLKALAAQTETARLLQTMPGVGPLTALAVEAFAPDMAEFKSGRNFAAWLGLVPRQNSSGGKARLGRISKAGQSDIRRLLIIGAMTRTMGGERRRIAADGWIGRLLARKPRMLVGIALANRMARQIWAMMTRRQAYRDPAVVAAA

SEQ ID NO: 101094 - protein, 419 aa, unidentified
MSFKILKFNCCGLDVHKTWIYACIGITDSNNRTEYKQARFSSFTKGLNELCDWLAKYNCTDVCMESTGKYWIPVFNILEQHNLWVTLSHPKYTKPMKGNKTDRKDAKWICDLYMCGMVKPSFIPPADIRELRDLVRYRYKLTCMIAGEKNRAQNCLTVSNLKLDDVFSDVFGKSSRSITEQILQHPGEKFDVAPFVYGHCKTPIEEIQAAVDGAISKEQAVKLRQCLDHIDELNKHISEVEQEILCLSDKYEAALNLIRTVPGFNKNPMTAIQVLSEIGCDMSVFPTDKHLVSWAGCCPRNDKSDRKIKSTRISRAGSYFKPVLVQVANALIKSKKHPEFTNRYKRIKARRGHKKAIIAICRMILTAIWHILSDLKPYTPEGFLESHPVKEGKVLSSSQALNFFKQRGYIIKDEPLSVS

SEQ ID NO: 101095 - protein, 329 aa, unidentified
MFYLGIDVSKAKLDCCLLLDNTTFKRKDKSIANNPKVFNELLAWIQKQSVELTDVHIIMEATGVYHEQAAYALHDAGVKLSLANPNYVRHFAHSLAIKTKTDGMDSFVLARYGLSTVPKLWIPAPVKARLLQALLNRREAIAQDLQRERNREEKALVANAPDKIQQSIESSIAFLEQQLQKLQDDIDDHIDKHPKLKQDVKLLESIPAVGERVGNTMLSVLHNHHFESAEQVAAYLGLVPVEHQSGTSVLKRPHLSKTGSASVRATLYMAAVVATKYNPHIKALYDRLLAKGKCKMLAIGAAMRKLVHLCFGVWKNQTPYKANFLHKSA

SEQ ID NO: 101096 - protein, 405 aa, unidentified
MNAVGIDVSKGKSTVTIRKPGDVVIMPPCDIPHTQSAMNNLIQQIKSLEGETKVCMEHTGRYYEPVATWLSDAGIFVSAVNPILIRDFGDDSLRTPKTDKADSKKIARYTLDRWAKLKQYGSMDKIRNQLKTMNRQFGFYMAQKTAMKNNLIALIDQTYPGAPDFFDSPARSDGSQKWVDFIHSYWHVDCVRSKSLNAFTEHYHNWCKRKNYNFSAEKATKIYQLSSDLIAVFPKDDITKMLIWQAVELLNTASETVESLRSKMNELASTLPEYPIVMDMNGVGATLGPQLIAEIGDVTRFTHREALTAFAGVDPGKNDSGKRIQNSVHTSKKGSPYLRKALFQIMDSLIKRSPVDNPVYAFMDKKRSEGKPYYVYMTAGANKFLRIYYGRVKEYLSNLSNNETI

SEQ ID NO: 101097 - protein, 431 aa, unidentified
MEQKRHPYLSVGIDIGADFSLMAIALPTQEIIGKPYKILHSSNRSVEGAVERIQSIGQAYELPVRIYMESTGIYHLPLYHRLKNAGLDVYVLNPLVTHANQNINIRNIHNDKLDARRIALLGLRPDLKTSIVPADDVAAVKALLREYHAMKKETSMYICRLKNQLRQIFPQYLPLFSKVNGKASLEVLSHYPSPSAVLSAGADALAKLIQEASGKGRTMAEKKAEAILSAARESLSFGHGNSGITFLIGHYVEMIRILDEKTAAILKQIKRSVQEQPDSLLARQTRLLESIPGAGFLTAVTIVCEIGDFRAFHRPKQLYSYFGLDPVVRQSGNSAGANLRISKRGSPYARRCFYILALQSVSLRKNGEPKNPILRAYYLEKCKSKAKMTALGAIMHKLCNIVFAVLRDERSFVLISPQEHRQNYLSLPRAA

SEQ ID NO: 101098 - protein, 328 aa, unidentified
MTDLSLGIDVSKDTLDVCLLSSDAKQTRQYGNDSKGHRALHGWIKKRCGSCRPHACLEATGQYGEAIAEFLYRRQYAVSVVNPLKIKRYAQSLFVRNKTDRADAQIIASFCQERSPDLWAPPAPHLHCLKAMTRRLEDLQDTLIQEKNRLHATRGESSVADDIMAHIQYLEEAITSLKKQIQDHINRHPDLRKKSKLLCTIPGIGQLTAARILSEIPNLAQFESARQLAAYSGLTPRNHLSGSSIHPRARLSKQGNVHLRRMLYMPAVVAKRYNPIVAAFYQRLVERGLAGLAAIAACMRKLLHIIYGVLKHEAPFDPNYLVNQSIAA

SEQ ID NO: 101099 - protein, 299 aa, unidentified
MACAADSFAPQTFANTPTVLRRWAASLPPGSRVGVEATGRYHETVVTAAQAAGLTVYVLNPRDVKRYGQSIGRRGKTDRVDAQVIARYVAREHDQLHPYRAPSAAERRIGELLKRRRKLVALRESTRQSWRGIDGCVTELRSLLQAYTHMLAEIDRLIATTLRELPQTAARQCQLRTVPGYGPLASVALAHALGRFPFRNADAFIAYTGLDPRPDDSGSRHGRRRLSKRGPAELRHVLHMSAMAAARLPAWQPYYQAQRAKGLSGTAALVILARKMARTAYAICKAGAAFDSRRAAVAT

SEQ ID NO: 101100 - protein, 437 aa, unidentified
MPYKIAGIDVHKRMLHVVVSDVQVDGEYDFTRRIFGSLPEALRSLSAWLVEQQVQEVVMESTAQYWKPVWGTLERYWKPICQTREGALATSGRLHLAQALSNRGRRGRKKDFRDAERLVKRLVAHELVLSFVPDVEQRLWRTVVRTKYQLTRNRVQLQNRLEALLEEAHIKLSSLVSDLLGASARRMLAAIADGETNRETLAALADRGLRSTQGQLQDALGVCQELNPVYRRLIRMVLDEVASIDKRIEQLNQEMANLIRLHEDQVKRLAEVPGLGVDSAQQIIAEVGATAATFPSEKHLSSWVGACPGDEESAEVNRSRRSPQGNRHMRRILNQAANAAAKLKGSIFEILYRRYVPRLGHNQTIGIIAHKLCRLVWKILHRGIRYEERGQEVSKASKQKRTRKMIQALRRLGYRIEPFSISHHSMIVIPARFSTLR

SEQ ID NO: 101101 - protein, 343 aa, unidentified
MKFVGLDLHKRNIFATVLGGDGKIISRVSIGPNRDDISYFFKKMGDGSDLSVAMEASYNWLYYYRILEEITDNITVAHPLKTRIIGEARIKTDKIDSEALAYMLKAEMLPKIYIPTKISMENKLLLRSRISLVVLRTSIKNKVHAIIDRNRDSYRGLEKKTDIFCRSGMIILRNTEIPNPDYMIAKNYLDLIDELNKKIKEVEDEIDKRVVSDSDIELLKTIPGVGRFISFLLKSEIDSIDRFSSKERFASYAGLTPSVHQSGPRSYTGKITKQGNKFIRWALTEAAQVAIVHSSYFRYHYFKIKAKKGTNPAIVAIARRIAEIAYVILKEKRSYIEKPISYL

SEQ ID NO: 101102 - protein, 396 aa, unidentified
MHSQLHVAIDIGSQLHRVAIGRDDGGLIDEFDCAHTPAGLNDFFARVRKYEAAQATEVCVAMEGYGGYARPLDSQILAQGWRLYAVNNLKFVRFKEIFPAPAKTDAIDARRMLQLMQLRERIPMACAVLQEVAPVDQLHQQLKALTRRRKQLVSERMRISLRMQVELQGTAPGLLSITGQADNLWFLNFLTCRDDLRKLKTIRRDTLLKLEGIGVGYAGKIAEWQKTAIFAPSIAWVGPMIHADAMRMLSLREAIGQLEVQIADLTAQSGIAQRLLTMPGMGSVCASELAGEIGNIKRFEKEASLAVYLGVAPLDRSSGKRISAKLPRQINPRARDALVTAIAHHMQAVPTSRAFYDRKRVEGKTHMQALRALARHMVRIIFSMLVNDRDYRLPNV

SEQ ID NO: 101103 - protein, 469 aa, unidentified
MENNYILYVGMDSSKGKADAAILKVSDRRSVKPKFLRKKLSFKFVKSEVTSFLETVRSYSDDNCTSICFALEVTGIYSTNVYNFIKDNLNDNESIKFLNTDFVNQWRNAHNIAKSDPLDAQTISTIIGTDSDVQYVNDNVFENKNGYQDLKALVHRHYQIKKIYSQEINRLIAQCDCLFPELQYVFEPKSAAFIAVLSSYPTTHDIINASRLEVFNVVYEATKHRCSMDKIDKLFDLCHDTLVPDNISSYGRSIILDLVENIKNIKGQLKMIERYIRDVASLNPAYKLLLTITGCGPLTAATVIAETGDIKRFKNADCFVSYSGTSPRNKRSGTSVETMGKISKRGSRYLRHAIYMIAEFARRHNPVLKHQFERIKNGNKKRHKLANIAIANKIARYIYSIMKNESGFVIFHEHIMRLPEETQNTFFNSISLDFPENTRKQIYQYSDIDGEVHKFVYTKLEETMIINSI

SEQ ID NO: 101104 - protein, 346 aa, unidentified
MKRTTIGLDLAKRIFQVHSVDPDGGEISRQTLKRSQVLRYFANRAGSVVAMEACGSAQYWARELVKLGHEVRLISAQFVRPIVKTNKTDAADAEAIWEAAQRPGMRFVALKSEEQQAVLGLHRIREQRVGMRSALVNQVHGLMAEFGIALPRGWREMLRQAGALLAEECAVPELLRGALREQIEQIRALSEQIKALERQISSWQRRAEDCQRIGEIPGVGLLTATATVAMIGDARSFRSGREFAAFVGLVPRQSGTGGKIRLLGISKRGDRYLRTLLIHGARAVLRWQSRPGRELDPWLKSLLSRRARNVVIVALANKMARMIWALLAHGRTYQRGYGGPIEATVV

SEQ ID NO: 101105 - protein, 345 aa, unidentified
MKKVIAGMDLHSNNVVIGVMDLDGQRLASRKLPCELKEVVKFLAPFRKRLEQVAVESTYNWYWLVDGLRALNYPVALANPAGMEQYRGIKHADDTNDAFFVAELLRLKILPTGHIYDAQLRPVRDLLRRRLMLVHQRTALMLSFKSLYTRTSGQEMTLSALKQLEAKEAQNLYEHPANQLIAGMQIQHIQQLSQSIEKIEKGVLGSARELPYYEKLTTLPGVGKMLAMTITMEVGDIHRFADPGHFASYCRAVEAKRLSNRKQKGENNSKCGNKYLAWAFVEAANFARRSDAQCRKWFDRKAAKTSNVIATKALACKLAKAAWYLMAEATDYDPQRMFGQPATPK

SEQ ID NO: 101106 - protein, 339 aa, unidentified
MGEVTTIGLDLAKNVFQVHGVDAAGAVAVRRALRRGQVLGCFAKLPPCLVGMEACATAHYWGRELARLGHRVRLIPPAYAKAYVRWNKNDAADAAAICEAVSRPSMRFVALKTAEQQAAAGLHKVRELLVKQRTMLINALRGLLAEFGLVAAAGPQHVDELVRMLNEPAGAVIPEPLHGGLMQLVHSLRLVQREVETIEKEIVRWGRDNRTCRHLDTIPGYGPILASAMAAMVVEPGAFKSGRHFAASLGLVPRQDGTGGKVKLGPISKRGNGYLRRLLVNGAMSVLRGKRARHDPWLAKLLAEKKRMVVACALANKMTRIGWAVMVRQAEFRARPAAT

SEQ ID NO: 101107 - protein, 342 aa, unidentified
MKQYVGLDVSQRETAVCVVNETGQVIFEGKAKSNPGVLTDLLSKHAPHAERIGFETGAMASWLWHELRRVELPVVCIDARHAHAALSVRMNKSDQNDARGLAELVRVGWYREVKVKSEESQKIRAILVARSRLVSMRRDIENQVRSLIKECGLLFPRAIGQQFRNQVSELLGVDHLLLSVISPLLSIHENVCQQQGKFDNEVRRLAKLDETTRRLMTVPGVGVVTALTFRHTIDDPSRFRSASTVGAYLGLTPRRSQSGETDTNGKISRWGDRLLRTYLFEAATVLLYRTKKWSSLKAWGMKLAKRIGMKKAEVAIARKIAVILHCIWVDGTSFDWGQPKPI

SEQ ID NO: 101108 - protein, 355 aa, unidentified
MINTKYIGMDVHTQSISIAVRNSVGKVLMDCVIETKASTILQFIDGLRGDVRVTFEEGTWAAWLYDLLKPHVTQVVVCNPRKNALLKEGSKSDKNDARKLAELLRLNHLQPVYHGENGIRTLKELSRSYLTINKDLTRVMNRLKALYRGWGIACPGNDVYAPRHRAEWLDKIREAGVRRRAEHYYQQLDVLRLLRQEVRRDLLVESKKHRGWKLLRQISGIGPIRAALLIALMQTPHRFRTKRQLWNYSGLGLETHDSAQYRVVKGQLERSNKPVTLRGLNKDYNHDLKDIFKGAALRASIAAGPLHGFYEALLAKGRKPTMARLTLARKIAAITLIIWKKEVRFDANHLKQQAA

SEQ ID NO: 101109 - protein, 343 aa, unidentified
MQTVTTVGLDIAKSVFQVHGVDAAGQVVIRRQIKRRYVLAFFQKLSPCLVGIEACASSHHWSRELQALGHTVRLMPPAYVKPYVKRNKNDAADAEAICEAVTRANMRFVPTKTPEQQSGMVLHRTRHLFVRQQTAVINAIRTHLAEFGVVAPVGRNGVEELLRAVADPADTRVPEIARACLLAFGAQLRRLKEQVLEFDRMIRAWHRSSEISMRLDECPGVGPVLATAVVATVADPKVFRSGRNFSAWIGIVPKQHSSGGKNRLGGISKRGDRYLRFLFVAGALAVIRYAKIHGTRHRPWLTALLARRPTKVAAIALANKIARMVWAMMVKGERYKEPVALAA

SEQ ID NO: 101110 - protein, 320 aa, unidentified
MKFISGIDVSKKYFDIEISDKVFRFNMDNKDIKKLLKQLPSGSHCILESTGTYGNKLMWDLHSAGHIVYMVNPLQISNFSKMKLSKVKTDKSDAKLITEYGRMNIECLKPYDFPDAGIQSVNQLEAVISQLIKQRTALTNQLEALEQYKDICKEAAVALKKTITYLSAKITELEKKQQDYIDKDNKTLRENISSVIGIGNSTACMLIAVTNGFNNFENFKQVSSYFGCCPRVFQSGSSVKRRGSISKIGMASVRTRLYLCALSAKQYNPKCKELFERLIENGKPFKVAMMAVVNKLIKQVFAIVRKNEKFDKNYNISFGF

SEQ ID NO: 101111 - protein, 282 aa, unidentified
MPLSDKQFTNKLDVDPIGIPRICNKKVIFKAYSFSNTSDGAAGLMEKIQPFQSELEIGMEATGHYWLSLYSFLAEQRFVIHVINPIQTDGWRKGTEIRKRKTDIIDSVLIAYFIRYGEFLETSLADEDTMSLRNLTRFRNYLVSSIGDLKRKAINSPITTIPGIGDAIAATILGEIGDINRFSSGAKLVAYAGIDAEISQSGEYEATSNKMSKRGSPFLRKALFQAAFIASYNDPIFTTYYQQKRAVGKHHKVAVGAVARKLCHTIHAVLKKILHMKSGSSI

SEQ ID NO: 101112 - protein, 409 aa, unidentified
MQAIVECGAGLDIHQATIVATVRRPDGRGGRTVQTQTFGTMTVDLLTLRDWLQACGVTHVAMESTGVYWKPIYYLLEDGFTVILVNMQHLKIVPGRKTDVSDSAWLAQCLEWGLLKGSLVPPAAIRDLRDLTRYRKKQIEDRAQEANRLHKVLEEAGLKLSTVVTDILGISGRAILAALVGGTTDPAMLAALARGRLRSKLPALREALRGQYRAHHAFLISQILAKIDFLEETITTLTEEIDRQVHPFDPLLARLTTVPGIARRTAITILAETGGDMAVFPTAGHLCSWAAMCPGHNESAGKRRSGRMRAGNRFLRGALLEAGWACTRAKGTALQARYLRIKRHRGHKKAVVAVGHQLLEIAYYLMRDGVDYRELGAEYFARRDRERATQRHLKQLRALGYRVTIEPAA

SEQ ID NO: 101113 - protein, 465 aa, unidentified
MQLNRRWSSGKPRVSPTILDRLNPNVAGIDCGSAEHFVAVPPDRDPTPVQSFTTVPTDLLRLADWLATCRVTSVAMEATGVYWIPIYEILESRGFEVRLVNARHLKNVPGRKSDVSDCEWIRELHSVGLLRGSFRPPDAIVALRAYLRHRQTLIETAATHVQRMQKALVQMNLQLPVVVSDITGQTGLRILRDIVAGTHDPQRLAAHRDRRCHASQADIVAALTGHYRPEHLFVLQQNLELFDACQIQLAACDRAIAAHIQTLTDLRASAPTPLPPPRVTRKPRDNEPRFEIRTPVHQLTGGVDLTQIDGIGAYTALKLLSEIGTDMSRWATAKHFTSWLTLAPKNKISGGRLLSSRTQPSANRAAAILRMAAMTLGRTQTALGAFYRRLAARIGKPQAITATARKLAILVYRALKGELVYHDPGASAYDVQQRTRVLRRLRQRAAPLGFELVNRETGEVLTTGC

SEQ ID NO: 101114 - protein, 345 aa, unidentified
MPIVGGLDIHRKQITFDYVDTVTGQVCRGQVSPADREHLSAWLARFGGCEDVAFAVEGCTGWRYVAEELAAAGVTAHLAEPADTAFARGRKRHAKTDKTDCRHLRMLLAEGRLPECWIPPGRILECRALLETYHDLRAEHTAWVQRIHAVLFHQGAPALGEGALRTGQGLAELRAAAAVRLSPAGQLQVATALDVIEALEARMHELRHQLTDAARHLTGAKVLAARLYGVGPVTALALTCWLGGAGRFSSSRQAVRFAGLDVTVWSSDRKGPPGRLSRQGPPVLRWALYEAGKTHARSSAPDYRYYAQVKDRCNGKRAALSEARKILRQACHILAELGDDALAAV

SEQ ID NO: 101115 - protein, 381 aa, unidentified
MKQDNKAKQNKGNEVSVEAPQDTCDLGRRRWKVQRVGLTVGLDVGDKMSHYCVLNEEAEVVERGKLKTTPAALQPWLEALPAGTRVVLETGTHSSWISRLIEQAGQEVLVAQPRKIPQIYACKRKNDRRDAEKLARTGRLDPNSMGPIRHRSVEQQADLAVIQARDALVQVRTQLINTVRGLVKGTGERLMGCSSRSFARQVEEQIPQRLRGALLPLVSQITSLSEQIERYDAEVEKLAQKKYPETELLRQVSGVGPVTSLAFVLTVADRWRFRHSRDVGPFLGLVPEQDESGESSPQLGISKAGNTYLRRLLVGSANYILGPFGPDCELRRWGKKLSERGDKNARKRAKVAVARRLAVLLHKLWVSGEVYEPLPEKRAAA

SEQ ID NO: 101116 - protein, 426 aa, unidentified
MYKIAAHDVHKKMVALVITDIDQPGEHQFERRKVGTSPDALRQLAEYLVEQEVDEVVMESTAQYWKPVWQALERYWKPARQKREGAGPAAGTLHLAQAKSNRGRRGRKNDFADAERLVKRLVAQELILSFVPDPEQRLWRTVTRKRQQLVCDRIRLQNQLESLLEEAHIKLSSFVSDLLGVSGRRMLQALSEGETKPEALAALADHRLRATPQQLCDALGACTGLSPVYRQLLEMALEELNLLEKQIAKLDKAISGLLSPHQDAVRRLAEVPGLGVNSAHQIIAEIGPAAAVFPTAKDLVSWVGACPGEEESAEQNQSTRSPKGNRFMRRILNQAAHAAVKMKGSIFEVKFRSLKARMEYQEAIWAIAHRICRLVWLLLHKGVAYEERGPAVSAKSKRTHTAKMIRELRKLGYRVEAPILEAGNPA

SEQ ID NO: 101117 - protein, 348 aa, unidentified
MRFYTQQHKYYCGIDLHARSMYICILDQEGNTLLHKNFKTDPESFLRAIQPYREDIVVAVECMFVWYWLADLCNRESISFVLGHALYMKAIHGGKSKNDKIDSRKIAVLLRGGTLPTAYVYPEAMRATRDLLRRRNHLVHKRTELLAHIQNTNSQYNLPEFEKKLSIKSNRVGVAGHFPNPSVQKSVEVNLQLMELYDRLLNDLELYIVKQAKGHDVRNFYLLRSLPGIGKILSLVILYEVQDINRFDRVQDFVSYCRLVKCTRESGGKKFGPKNSKIGNAHLKWAFSEAACLFLRGNEPAQSYHDRLVNKHGKGKALSIIAHKIGRAVYFMLKRKEPFNMDIFMTRA

SEQ ID NO: 101118 - protein, 338 aa, unidentified
MEHFVGIDLHSSNSYIAIIDNENRRVFKKKVKNDLKNVLHVLEPHRKQIKGIVVESTYNWYWLVDGLMEKGYKVHLANPSAIKQYEGLKHSDDVTDAFHLANLLRLGILPEGYIYPKEERPVRDLLRKRLQLVQQCTALILSFENLLTRNLGTRINVNEINKLTEEDVEDIFQQEHLILSGKASIASINFLGTRIQQIEKAVHKVAKLRSEYKLLMTVPGIGKILALTIMYEAGPIERFAKVGNYASYCRCVGSERISNGKQKGKGNRKNGNKHLSRAHAEAAHNALRHYEHVKRYYQRKMAKTNNVVARKAIAHKLARACYYIIRDQKAFDPGKLFV

SEQ ID NO: 101119 - protein, 424 aa, unidentified
MKVTYQTCCGVDVHKSFLVATIVKTTGGIEPYYQKKRFSTFNNSILEFKHWLLDNDCHDVCMESTGKYWVPVFNLLEDEINVVIANPRWVKAVKGNKDDTKDSKWIGDLFRLGLVKGSYIPCKIVRILREYTRYRYKLVSCRSSEKNRYQNALTVCNVALDSVVSDIFGKSSMSIIDYLLEQSGTSINHEEIASKLLRSLKSKEDAVIESVEGYQMTDAQKYRVRLVRAHMDYITAEINDVDKMIENMISSNPDFENAVQFLCTIPGVKRDSAITIISEIGTDMSQFSSSKRLCCWSGLTPGSNESAGKKKSVRITRAGVYLKPALVQCAHAAVKSDKSPYYKKKYESLVKRRGKKRAIIAIARMILTAIYQMLSTGEQWNPSDLYKIDMPVALVEKQKEKAIKQAKKLLQREGILPPDEPLAS

SEQ ID NO: 101120 - protein, 416 aa, unidentified
MELPAHFAAFIGLDWSDQKHDVCLVDSSTREQELSVIKQQPEALNEWARSLRVRFRGGRIAVCLEQSRGPIIYALMKYDFITLYPINPKMLARFREAFTPSRAKDDPRDAEYLVELLVHHRDRLKAWLPDSDKTRTLQLLVEHRRRLVGDQTRLSNRLTALLKGYLPQVLEWFPDIRTALVCDFLLRWPCLDALKRVHRTTLLKFFRSHNSHRQGTLETRLAAIKEATPLVTDTAVINSSVLMVKALASQMKTTLEAVHDFDVQIEELCQTHEDFELFASLPGARRVYASRLLTAMGSNRERWASADELLRFSGIAPVVERSGKSSWTRWRYFCPKFVRQSFVEYAGESVKHSEWAKAFYVSQKAKGKRHQAAVRALAYKWIRIIWKCWQTRTKYDEARYLACLRKKGSALVSTPV

SEQ ID NO: 101121 - protein, 364 aa, unidentified
MDVHLRSTTVCALDAETGEAVTRRFRGNPWGEVAEWMSGFPGPSLAAYESGYLGFAPQRELSALGVDCVVAAVSKVPRSAADLSSKNDRNDAARMAKAILSHDVTPVWVPSPEIEGLRDLAAAHDAATARLAAAKQRLLAFLARRGYAYGGTTPAGNPRKYWTYGFLRWLDGIHPDDDGGIRALAALRNEVEAADETREALLAEYRAAVAAGPLSAEVEALQSIKGCGFALAAAFASEVGDFSRFRSGRQVTAYFGLAPKQRSSADSVRLGGISGAGNALVRRLAVEGSWRYAQAGHQPKLMPKGSGVPLEIRMHGRKGSERLLRRREEMLERGMPQAKANAATAAELVRWLWALGTMCREAGE

SEQ ID NO: 101122 - protein, 404 aa, unidentified
MKRTKPRGPVQREAKEVMAEVLEKLTGRLDAPAVSTRAKENRRGNTIKPNHDRLTVGVDLGDRWSQYCILDLEGETLAEGQVRTTQEDVREFFQAMTPARVVIEVGTHSPWVQDVITGLGHEVLVANPRLMEGSKRRKRKSDRIDAHKLARLGRVDPQSLYPIRHRSREVRQDLVVLRARDALVSIRTELINTTRGLVKSMGTRLPRCSSPSFAKKVKDAIPLEVREALLPLVQLAATVNDCIEKYDQRIEELGREKYGHTTLLRQVKGVGPITSLAYVLTLEDPQRFASSREVGPYLGLVPKQEDSGDSQPQLGISKAGDRMLRRLLVGSSQYMLGAFGPDTDLRRYGLRLCERGGKNAKKRAVVAVARKLAVLLHHLWVTGDVYEPLHQTGAGSRTAEAVAA

SEQ ID NO: 101123 - protein, 343 aa, unidentified
MQVVRIGLDLAKYVFEVHGVDERGNVVIRKTLRRGSVATFFDNLPRCLVGMEASNGAHYWARVLAELGHKVRLISPQFVAPYVKSNKNDRNDAEAICEAVGRPTMRFVPPKSPEQLAIQALHRIRQRLVQSRTRLVNQIRGVLSEHGIVIARDIWRLRRALAEITGNATDDLNALVRVLTMEVQTELIELDRRIAFYDRRIRELYRTSELCQKLGEIEGIGPVTATALVAAVGDRSCFKNGRQFAAWLGLVPKQRSSGGRNRLFGISKRGDRYLRTLMIHGARAALGKAGGKQDPRSRWLSGLRQRRHPNIAAVALANKNARIAWAMLAGNVSYEPARSVQAA

SEQ ID NO: 101124 - protein, 424 aa, unidentified
MNSSEQWQQYRAFGGLDWASQAHSVIVVNQAGKVLEEFEIEHSALGWKKFREKLQPYGSIPFALETSQGVAVDQLLEAGMLVYPLNPKSAQAYRERKAPSGVKDDRLDAWSFADALRVDGQGWKGLRAEEPLIKELRLLCRDEVALIEQRTAFIEQLRHALAEYYPAALEAFKDWTRVSAWMFIERFPTPDSLAKAGKRRWQNFLHSRRLWGSDQGPRRMEIFARAEEFAGTPATRRAKSLLALSLVKMLFAVEEQLALYRSRIEALFARHPDHDLFGSLPGAGPKLAPRLLAEIGEDRERFGGDAQNLQCLAGTAPVTRRSGKKGKKNYWHVHQRWACDKYLRHALHLFSEQSLTRCVWAELYYQHHRQKNQSHASALRRLANRWLKIIHKMWIDRTPYNPELHHRNQVQHGSWIFQLQKLNP

SEQ ID NO: 101125 - protein, 319 aa, unidentified
MSKIVVRAGLDVSKDQLEAYVHPGGVRLSVTNDRAGHRQLLAWLAEQGVAIVGAEASGGYERDILERVAESGLVALRLNPLRVRRFAEARGRLAKNDRADAQTIALFMDSCPDQRAVIPPDPARERLGEHLLVRVQTLDAIAALENQLDHLRDRGLRAALRARAEGLRRAVAKLDRRIAELIAATPNLEAMATYLRSVPGVGPVLSATLLALLPELGRLTRRQIAALAGVAPFDDDSGNRNGQRHIHGGRAALRKVLYMAALVAKRRNPAIRNFALRLAGKKPKVIVAACMRKLLTILNAVARDQVMWHNTQIIPCRHP

SEQ ID NO: 101126 - protein, 342 aa, unidentified
MNTLYVGIDVSSKSNVVYLMLPNGDKHSNFSVANSHEGSTQLVKRILSALTSHSLDTVLIGLEATSVYGDNLVYFLREDATLAPFNRKIHVLNPKQVKKFHDAYNDLPKNDYVDSFVIADCLRFGRINKEVYLGDYRYKALQNLTRARFFAVQNLIKEKQRFMNVLFKKYSTMTQEKVFSDTFSTTALAVYDEFDSAEALANMDLHELTDFIIEKGKNRFPDPDAVAKAIQKAARSSYRLPKTVNDSVNQVLSISITSMKALESQIKEFDKAIKAQMELLPNVLISIPGIGSVYSAGIMAEIGDINRFDNQAALAKYAGLAWKQHQSGSFEAEVTRLIPSGN

SEQ ID NO: 101127 - protein, 370 aa, unidentified
MKEPITSYVGLDIHKDSIAIAIAKAGRDAPQFIGTTVAQLAQVRKVLTRQRCTPDKTLVVYEAGPCGYGWARYLNTNGWRCEVISPAHVVRSAAGKAIKTDRRDALLLARESRAGNLTPIAVPDERDEAIRDLSRAREDAIAARLRARQQLKAMMLRHGRTYSSNAWTLAHERSLATVRFEHPAQQIAFDEYRQSVKDAHERCERLTHALREQCSGWRMGRVVEALMCLRGFDFIAAVTIIAELGDLNRFSHPRALMSYLGLVPSEHSSGNSRRQGAITRTGNRHARRILVESAWTYRYGAHVGREHQIRQQGQPKAIRDIAWKAQLRLTHRYRKLSLGRKMKATKVCVAVARELCGFIWDLARHVPVHQ

SEQ ID NO: 101128 - protein, 344 aa, unidentified
MDNMIIGVDLAKSIFQVHGALMATGEIQFRKKLTREQFRMFMSKLAPSMVIFEACGSANYWAGQMEAMGHQAKLIAPQFVRPFVKRHKKNDAADADAIIVAARQPEMRFVMPKTVDQQARAALFRGRERLIRQRTEDVNALRAILYEHGHVFPIGMWQLKRMQNLVEADTCDLPAIVREECRDLLAQIAEKTARITLRDKNLKELAAQSQTARRLQTLPGVGPLTALAVEAFGPDMSQFKRGRDFAAWLGLVPRQHSSGGKERLGRISKAGQADIRRLLIIGAMSRIIGRARHKIPAESWIGRMLERKPKMLVGIALANKMARQIWAMLTKKEDYRDPALAVTA

SEQ ID NO: 101129 - protein, 335 aa, unidentified
MNITRVGVDIAKSVFHVHGVDRHEQTQWQAKLKRHEWLDILNQRVPKGAEVGIEACASARHWGRELQRRGYTVKLIAAQFVKPYVKSNKNDRVDAEAICEAMGRPRMRFVGVKTVKQQDIQAAHRVREELFGQRTAKANQIRGLVGEYGVIAPIGINKLRQALPQWLEDTENGLTDEFRVLLAELSSDLRHLDHRIADIDARIEQTVKTDPVARRLLDVRGVGPLTASALAGALGDGHAYRKGRDFAASLGLTPRQHSTGGKDRLLGISNRGGSYLRTLLVHGARAVIRHAKDRDDGLSQWLNALKARKHVNIVTVAWAIVHDETSYEPMLAASR

SEQ ID NO: 101130 - protein, 429 aa, unidentified
MPYRIAGIDVHKKILAVVVSNVEIESEYQFERRMFGSNPEQLRSLAAWLLEQEAEEVVMESTAQYWKPVWGALERYWKPICEKREGARRKSGTLHLAQALSNRGRRGRKRDFVDAERLVKRLVARELVLSFVPDPEQRLWRTVTRKKYQLRCDRVRLQNQLESLLEEAHIKLSSLVTDLLGVSARRMLKALADGETNPAALATLADERLRATPEQLCDALGACTELNPVYRRLLKMALEELRLIDEQIAQLDQEMANLLRPHQDAVERLAEVPGLGVDSAQQIIAEVGPTAETFPSAKCLSSWVGACPGDEESAGVNYSHRSPKGNRHMRRLLNQTANAAARTKGSIFEIVYRRSVPRLGHNQAIGAIAHRQCRLIWLILHQRVRYGERGPAVTKQSRQKRTARMIRQLRSLGYRIEAPNPQPSQAQAQ

SEQ ID NO: 101131 - protein, 342 aa, unidentified
MDYYAGIDVSLECSSVCVVDANGKIVREAKVASEPEALIAWFGSLGLALERIGLEAGPLSQWLFAAMREAGLAVELLETRHVRKAFEAMPVKSDRNDARGIAQLMRLGWFRPVHCKSIGAQETRAVLTARKLVQSKLRDIENHLRGILRGFGLKVGKTTNRGFGMRIRELVANHANLEMIAEGLLSVHAVLLREFRVFEKQVRSMARSDAKTRLLMSTPAVGPIVALTYASAIDDPARFKSSKRVGAHFGLTPKKYQSGETDYTGRISKIGDGSVRTVLYEAAHIMLTKPVKGCSALKSWAMRIARRAGMSKAKVALARKLAVILHRMLVNRTPFNAAAAAA

SEQ ID NO: 101132 - protein, 347 aa, unidentified
MKRVTHLGIDLHAKSSWWYGVSAEGEVVVNQDTPNDWLALGAALRRCRGPVVAAVEAGGNWPWLVYGLQKRGCEVHLLHATSVRTCRQSRAKNDRLDAMLLAELAAEPWRAKESWICPEDWVWVRGELRGRRHLVEQRTATRNRIQALLKQDNRLPPVTDLFGVQGLTWLAGLRLPARLRATLEALLAVEAEHGRQIAALEDELWPLTQTEPLMRRIVALPQAGPVTALTIALESGDLARFRNAEAYAAHCGLAPGTFESAGKRRDARLCPQCHEALKEVYAEWAFRLLSHGGPGPAWRAVQESYRDHPVSEAKFMLARKITGAVRAMAVREEDFVVTKLIRHAKMA

SEQ ID NO: 101133 - protein, 371 aa, unidentified
MKKCTRFVGLDDSKDYIDVAVASEGRDGEVRPYGTIPNTPEAVRKLVRRLGRPKDLYFVYEAGPCGYGLYRELLALGANCIVAAPSKTPRRSGDRIKTDRRDAIALARLHRAGELHPVWVPDEETEAMRDLTRAREDAKYVQTKARQRLGSFLLRHGRRYPGRSTWTKTHLKWLAEQRFMQPSQQICLDEYVEAVREASARVQRLEAQVRELVSVWSLGPVVSAMTAHRGVSLVVAATVCAELGDLTRFDRARDLMGFVGLVPSLHGTGLSRRVGAITKTGNGHVRRVLVEAAWSYRHPARRTALMRRKLEGQPKEVQAISWKGQVRLCGRHRRMIARGKHPNKVAIAIARELLAFLWATARMVEPMTPAA

SEQ ID NO: 101134 - protein, 341 aa, unidentified
MKEVIIIGLDLAKNVFQAHGAAADGSVVFRRKLSRAQLVKFFSAQPACLVAMEACASAHYWARTIGALGHTVRLIPPAYVKPFVKRQKNDAADAEAIAEAAARPTMRFVEPKSEAQQAAAMAYRTRDLLVRQRTQTINALRAHLAEYGVVAPAGVAHVGRLAAALEAGDSGLPEAVTALGSMLVAQIAALSWQIEKLEKELRQRACVDDTTRRLMTIPGVGAITATALTTFAPPCETFAKGRDFAAWVGLTPRQHSSGGKERLGRTSKMGQRDIRRLLITGAVAVVRWAARNGAPEGSWLARMLARKPRMLVAVALANRMARIAWALMRSEEVYRDPAAAA

SEQ ID NO: 101135 - protein, 456 aa, unidentified
MTRRKQQKKFKVTDLPEHLQQVNLNAAGIDVGSDRHVVAVPAGRDEVSVREFGAFTTDLQALADWLTKCGITTVAMESTGVYWIPLFEILEQRGFEVKLVDARQVKNVSGRKSDVLDCQWLQQLHTYGLLAGAFRPADQICVLRGYMRQREMLVQASSMHIQHMQKALQQMNLLLHNVVSDITGDTGMKIIKAIIAGERNAKVLAKHRNYRCQSSVATIAKSLVGNYREEHLFALTQAVSLYETYQAKIAECEAVIARYLNSQAKHTDEEPPPGDKPSRDRDRLRGGVDVRSQLYRMTGVDLFNLPGFGADTLLTLAGEVGFDMTPWRSEKHFTSWLALCPGTKKSNGKVLSRKTKRSANRAAAALRIAAASLSRSKTALGAFYRRIRVRVGPAEAVTATARKLAVLYYSLLKYGSAYVETGQAAYEHKYQERRLHSIQKQALALGYQLIPTSSSF

SEQ ID NO: 101136 - protein, 351 aa, unidentified
MKYYKTTTKYNCGIDLHTRCMYICVMDLDGNILVHRNIKHNDFSFFLKLVEPYRQDLTVTCESCFVCFWLADACEDAGINFVLAHAYYVKSIAGNKHKNDKEDAKELAECLRTNRIPPAYVCPRDLRPVRRLLRRRNKYVKNRSELSGHSTCEVMAAGHQPLNISANSKERWREGIRSSFDHPVDSFTAEAELFMVESYDRIIMQMEQRIEKHARDFKHQDYRLLRTVPGIGKILALTILYETIDIKRFPSEKDYVSYSRLVCGTNESGGKDFGGKGRKMGNPYLKWAFMQAAILCKRADPQLNAYHSKLERQKGKHTANAILAAKFARAVYFMLDRKTGFSREMLMKGRR

SEQ ID NO: 101137 - protein, 338 aa, unidentified
MKTHVGVDLHQRFCYLTAMNASGRICRQGQVVNEGGALQAWLRELPRPRQVVVEASGFWPAFARAAAVESERLVMVHPQRVKAIASAKLKNDRVDSETLAHLSRCDLLPEAWMADPATQQLRLRVRLRIALGRQRARAKNQLQAVLHQEGFRKPVTDVFGRRGRAWLKGLELSEAGRLVVDTWLREVDRLDAELTTQTRELERLAEADARAGWLQSVPGIGAYAAMVILAEIGDVERFASKRALASYAGLTPVVRESAGRRKRGGITHQGSNTLRWIMLQVAQVAARWSPGARSYYAGLRARKPAQVARIALARKLLTVVWALLRHGVDFDEELFIRG

SEQ ID NO: 101138 - protein, 409 aa, unidentified
MRYYLGVDWADQTHAVWVVDASGAKITARAVAHTAEGLGEWGRALDEWRAQGIDLWAAIERPDGRVVDFLLDHGVVVYPVNPKALDRARDRFRQSSAKSDPFDARVLADFLRTDHTHLRALQPSSEAAQELKLLTEDCQRHIRQQTRLVNQLTATLKAYYPRALEVAEVTSALAREFLPAYPTPAAVTALTERQWQRWARAHGLSAARAGDLWAVLRQPHLPVPAHVVRAKARLMQALMEQLMPVVAAVAQYRKAIDDFFASMPAARWARTLPIGKHGITAPTLWARLGDAPGRWESFRHLQAHAGAVPVTKRSGKQQVVHFRFACDKALRHVVDQVAFLSLLSSAWARAYYDQQRARGHSHRQALRALGAKWLKIIFVMWQRQVPYDEQYHLATMTRQQRQRGQKQCA

SEQ ID NO: 101139 - protein, 470 aa, unidentified
MNDKHSSTDPKRKKYRWRWGPKLPKHLDQINHNAAGIDVGARKHYVAVPEDRDEHPVQVFEPFTPDLIEMVQWLKQCGIDTVVMESTGVYWIPLFQVLQDHGFEVLLVDARHVKYVPGRKTDVFDCQWLQQLHTFGLLRGAFVPDKDIAALRTYSRQRKQLVQSCSREIQHMQKALTQMNLQLPVVISDITGVTGMRIIRAIVAGERDPVVLAKMKHPGVKSSEETIVKALSGNYRHEHVFTLTQALDLYDIYQGKIAQCDQALARRMQAFEVKADPKELAAKPSKRNKRKRRKNEPHFDLRAELYQMTGVDLTQIDGIDAMTALSIITECGFDMQRFPTEKHFASWLGLCPNNTVTGGKVKKTRSRNVHNRAAQALRIAAQSLHSSTTYLGAHYRRMHARLGAPKALSATAHKLGRLVYHMLKYGQDYVDKGQQYEEEQYRKRAERNLRRRAHAMGYQLICVDTGEILA

SEQ ID NO: 101140 - protein, 371 aa, unidentified
MLTHEHGVAGIDPHKKSATIAVLDRRGGVVGSESFPISEDGIDRLLTFLLGTELTIDRIGVEGSAFLGRPLVLALTAAGYDVREVQANRTAERRKRRRRGKTDIEDAEAIARETLADPQLPPAGKHAAPSPAWQTLTVLRDWRASLVLQRVRLLTEAEAVLVTLPVTIRDTLPATSRVLPQLVALADGHTAPGRLAPADRLKLERLATSLLDITTLTQRIKELDRRIPALLAELGSTLTDLHGIGVVTAMDLLVEIGDPHRFTNEAQFARWCGIAPVPASSGEGHGPARRHRLDLGGNRAVNSILHIIHVTQARCHPPAKKYLARKISENKSKREARRCHKRQLANVIIRHMWHDAERHAQTTTIDHMAAA

SEQ ID NO: 101141 - protein, 466 aa, unidentified
MKLLYRRCAGLDIHRDTVSACIRKRVRGQAEPVIEEQVFGTFTQELERLRSWLKQHKVKQVAMESTGVYWIPVWNILERSFTLTLVNPATVRALQGQKTDRIDARRIAEYLQYGLLRGSFIPGKPIRQLRELTRMRVHIQQDRNRVINRIARLLETVNLKLASVASNIVGASGLAMLRLLASGVCDPEKLADCAQSSLRVKIPALILALDGRPDAHFCWMLSQLLTKLDRLDQERGGVDARLDSLAGPYEDLLRRLSTIPGVDRTSALVLLAEFGEDMSQFPTPGHLASWAGLCPGNAESAGKRFSGRTRKGDRYVRRILVQSAWAASRTHGCFLAALFFRTAQRHGLKKAAVAVAHRIAVIAWHILAEPGAEYHERGGDFFDRRNPERTAHKLSRRLEAIGYKVTLVAPPKPFGTRLTPPRSSPPAPSIDASVCAKCARWGMPRCICLVKRKPRPNAAPPCPSIT

SEQ ID NO: 101142 - protein, 422 aa, unidentified
MKIIYRRCAGLDVHEKSVFVCARILRGKQLEIVEATFPTFTEDLEALRDWLIRHRIQRVAMESTGVYWRPVWNVLEQGGKLELILLNPQHVKALPGHKTDRVDAARIAELAQYDLVRASFVPPAEIRELRDLVRRRVHLTEDRNRVSNRIHRLLELQNVKLSSVLGKVTGTTARSILEGLATATTIRPEALALLATHKRVRAKREQLAKALRCRPTEHFRFLLRELLEELDRLSGKIALMETRIEERMLPYRELIGRLCEIPGVDRITVWTLISEIGVDMGRFPDSGHLASWCGLCPGNANSAGKRHSGKTGKGNRYVRRALVQSAWASARIVRKRNFFTALFYRVSSRAGMKKAAVAVAHRILVIVYSIVRTGAAYREQGPDYFDRLHPERTKNRLTARLDRLGSLVHVEPGISGQNQLKC

SEQ ID NO: 101143 - protein, 412 aa, unidentified
MSLELPTALFYVGIDWAAETHAVCVMNAEGRIVSEFTIAHSADGIALLIRRLVRIGEAMDMPIGIERPNGRLVDLLLEAGHPVVPVSPNAIKTWRDGEVLSGAKSDAGDAAVIAEYLRLRQHRLRIATPYSSQTRALRTVVRTRDDLVEMRVAATNQLSALLDMHWPGAKAVFADVESPISLAFLTCYPTPVAAERLGEKRMQAFCVKHGYSGRRPATELLRRLCAAPTGTTDPALTEALRDAVHALVGVLTALGTAIKDLDRSTAAHLGEHPDAKIFTSLPRSGQINAAQVLAEWGDCRQAYAGPDSVAALAGVTPVTKESGKHRAVHFRWACNKRFRKAITTFADNSRHASPWAAKIYRDAITAGKDHPHAVRILARAWIRVIWRCWNDKVPYNPALHGAAQHLTPPEAA

SEQ ID NO: 101144 - protein, 341 aa, unidentified
MKKFIRIGVDLAKNYFQVHALASEDSPAIKRKLKRSKMHEFFSKIEPSLIGMEACGSAHYWARELKTMGHEALLMPPAYTKPYVKRGKNDAVDAEAICEAVSRPGMRFVPIKSAEQQATLMLHKTRELLIKQQTMSINALRGHLSEFGIVVAKGIGRVGELLELAKADGTLPEAAAAAVKVFAQHLEMLDKAIDDLEKQIGRAHAQNEMSRLLDKVPGIGKIIASVITASVPDPSVFKSGRDFAAWLGLTPRENSSGGKQALGAITKKGNRYIRKQLVLGATSLLNVVGKRQGALRDWIVALLAKKPARLVTVALANKLARILWAMMKTGEGFRTEMFAKV

SEQ ID NO: 101145 - protein, 367 aa, unidentified
MEKSSKVYVGMDVHKESIEVTLAEEGGALRRLGQIGGDRGSLLKMARRLQSRGGERMFVYEAGPCGFWIHRELAALGERCMVVSPALVPKRAGDHVKTDRRDSERLASLARAGELEAIHVPDIRDEAIRDLVRGRDDAVIAQRRVRQQLKALLLRNDIRYVGKTSWTGAHRRWLSELKLPEPAQQIVFEEYVDAIAVATGRIERLTRAIETEVLTWRFAPVVAALQAMRGIQFVHAVTLIAELGDLTRFGSARQLMGYLGLVPREASSGEQRRQGSITKAGNSYARRALIEAAWAYRHPARVTRIIATRQTGLPKAACDIAWRAQLRLSTKYRRLNARHLNHNKIVVALARELSGFVWAIGQCVKPQ

SEQ ID NO: 101146 - protein, 457 aa, unidentified
MYGPFIVASSTRIRFAVSLQLLRATAPSLVRRVEVGRVQVSQDDQEIIARVAALDIGKAEVVCCVRVPGQGPRARRMQEVRTYTTMTRSLLAMSDWLTGLGVTRVVMEATSDYWKPPFYLLENSFETWLVNAKDVKHLPGRPKTDRLDAVWLCKVAERQMLRPSFVPPPAFRELRDLTRYRADLITTRTSEKQRVEKLLEDAQIKLSVVASDIFGVSGRAMMAALVAGERDPKVLADLARGSMRGKTARLEEAFTGRFTDHHAFLLRTMLARVDGIDADVDVVQARIDEQIAPFAKAVTRLDEIPGIGVTTAQVIIAEVGLDMTRFPTPDHLASWARFAPGISESAGRKKGGSSTGKGNRYLARALGEAAVGCRSTKTFLGERYRRIAKRRGKKRAIVAVGRSILMIVWELLSDDEKRFVDLGPGYYDSRVNRNRSTRNHVRELQALGYKVTLEPAA

SEQ ID NO: 101147 - protein, 412 aa, unidentified
MADGTVSWFAGVDWGSQKHQVCLLDAAGQVVGEREFRHGGAGLTALCDWLVSVAGEPGRVAVAIEVPHGPVVDALLDRGFAVHAINPKQLERLRDRVSLAGAKDDRRDARVAAGGLRTDPHLFRPVEASAPAVIALREWSRLAEELQQERVRLGNRIRQQLWRYYPQLLEVSDDVTAEWVLDLWTLAPTPTKAARLREATLTRLLQRHRIRRVDAERALSTLRQPAITVANGVTEAAVLHLRSLVARLRLANREFHQAERKLDELSAILREKTAATGGAPPDAAILRSLPGVGTVTLATLLTEAAGPISRRDYAALRTLSGVAPVTKRSGKSSIVLMRYAAQFRLRNAVFHWARVAVLNDPKCRSRYAALRARGHSYGRALRGVADRLLGVACVLLQRQVLFDPDHGTPTAP

SEQ ID NO: 101148 - protein, 346 aa, unidentified
MNDAKYIGLDVHQATISAAVRDSSGSLVMEATLETKAETILEFVHGLRGSLHVSFEEGTCAAWLHDLLQPHVTEVLVCDSRKNALLRVGNKNDREDARKLSELLFLNKLHAVYHGETGIRTLKELARSYLTITRDLTRVMNRLKAIYRGWGIACAGQQVYAPRYRAEWLAKITEAGVRRRAEIYYLQFDTLAALRQEVRRELLAESRKHPAMRLLRQIPSIGPIRAALLIALMQTPHRFRTKRQLWAYCGLALRTYDSGEYRFVGGQLKRSKKAVTIRGLNKNHNHDLKNIFKGAATRAAATAGPLQNFYEAGIAKGMKPPKARLTLARKIAAITARLEERSSFRR

SEQ ID NO: 101149 - protein, 355 aa, unidentified
MTVTIVEEARPVTCRAAVTGGVDTHADTHVAAALDPVGGLLGVAEFPATTAGYARLLGWLGGFGTVCLVGIEGTGSYGAGLARYVTATGIRVVEVDRSDRQDRRRQGKSDPLDAVSAARAAQSGRASGAPKGRDGAVEAIRALMVARRSAAGERTRTINQARALVLTGPDDLRARFAKHKPAALITGLAALRPRPGDVAGHATRIALRELGRRAQFLDGQLVRLDELIVPLVTARAPGLLAVYGAGPRTAALLLIAAGDHPERLRSEAAWAHLCGVAPIPASSGKVTRHRLNPGGDRQANHALWRIVFTRLGSDAATRAYAERRTAEGKSKAEIIRCLKRYVAREVYRQLRPAVG

SEQ ID NO: 101150 - protein, 341 aa, unidentified
MEQATTIGLDIAKHVFQLHGADAAGHVLFRKRITRVKLLGFLAAQTRCVVAMEACAGAHYWAREIAKLGHHVRLIAPAYVKPFIKRQKNDAADAEAICEAAQRPSMRFVPVKTEEQQANGIVFRARDLLVRQRTQCVNALRGHLMEYGYVFPKGITHVETLVALVEDPQSSLPEGVRVILKLLVDTFTALEAQIAVLDAEINQRSKSDPTARRLMTIPGVGPIASTAITALVPAAEGFPAGRDFAAWLGLTPLQKSTGGKQKLGAVSKRGERTIRRLLIIGASAVVQQASRRGAPKGSWLAQMLARKPKMLVTVALANKMARVIWALLVKGGIYRAPATAA

SEQ ID NO: 101151 - protein, 313 aa, unidentified
MAIIGGFDLHRRQLTYDYLDVVTGQVDRGRVVPADRGQLRSFLARFEGQGEVAFAVEGCTGWRYVVEELERAGIGAQLAEPAETAAKRGPKRRAKTDRSDARHLRELLGKGDLPQSWIPPVQVLEARARVRLYKDLEEERTAWLQRVQATLYHQGVPVVASLTSAAGQARLATAELSPAGQQAVQVGLRQLDRLTAELDPLRADLARFSRRQPGCRALRTTHFGIGPITSVAIWAEMGDTRRFCSSDDAVRHAGLDITVYASDTKRARAASPGKGRPRCAGRCLRQPCAPAGRTRPTMPTSWRSSAGPTATWA

SEQ ID NO: 101152 - protein, 419 aa, unidentified
MKHDVEVLHPYCCGLDVHKKVISACILTPTTKQRKRFGTMTDDLQELANWLKQHSITIVAMESTGVYWKPVYNILEEAGFAMQVVNAQHIKTVPGRKTDTTDAEWIATLLRIGLLKSSFIPSRQQRELRDISRYRLAMVQERSREIQRVQKILESANIKIGSLISDVNNVSGRLMIHAIIEGQLEPAQIATLGHPKLKYSPEEYAKALKGRVSAVHQDLLSLQLCHIDELTQRIIVLDKRLEELTAQIPNFNESLELIDTIPGVGRQSAMTILIEIGLDMSRFPTVKHLAAWAGVAPGNRESAGKSKPEKSRKGNKYLKAVLVQSAHSLHRKKNCHLKEQYQRIKSRRGGKKAAVAVAHTILRIVFYLLTRKEAYQELGDNYVSQRNKYSQIQRYVKELAKLGLVVPSELVNQQLAVPA

SEQ ID NO: 101153 - protein, 339 aa, unidentified
MNISTVGLDLAKNVFHVVCFNDRDKEVKKRMLRRNQVLGFFTQLSPCCVAMEACASAHYWGRQFSDMGHEVKLIAPRHVKPYVRGNKNDYNDARAIAEAANRPNMPLVGIKTAEEQDMQALHRIRSQCLRDRTALSNSTRGLLGEYGIVFAKGVPTLRKKIPDILEDAENGLSLDFRNLLARRYEQLVEMDEHIAFYTKRLESISQEDDACVRLQTVPGFGSIVSSAFRGAIGDGRAYARGRDAAASIGLVPRQYSSGGKNVLLGISKRGDKYLRKQLIHGARAVVLQAANKEDPLSLWINRIREERGWNKAVVAMANKMARIGWAILRHNTSYQPTSR

SEQ ID NO: 101154 - protein, 393 aa, unidentified
MICVGVDVAKDKHDCVILNSEGKILAGVFTIPNNADGFDTLLQKIRSCTSSDDKIKVGLEATGHYSYNILGFLINQGLPTYVINPLHTNLYRKSMSLRKTKTDRVDAKTIATMLMSNVDLKSYTDTAYHNEELKSLTRYRFDKVRERAQLKQSVSRLVTILFPELEKLVPTLHMSSIYALLIEFPGAKQITEAHLTHLKSLLKDASKGRYGRDMATEIRDAAKHSIGSVMPAKSLELRHTIRLIRELDSEIEDIEAAIEAIMEELQSPITTIPGMGFRMGAMILAEIGDFARFDSPDKILAYAGMSPSTYQSGQLSLAGTYSHMEKRGSRYLRYALYNATKYVCHWDPGFAAYLAKKRAEGKHYNVALSHAAKKLVRLIYAMEKSRQPYKRAA

SEQ ID NO: 101155 - protein, 370 aa, unidentified
MQTVRSFVGMDVHKETISISVAEDGRNGPVRFLGVIPNQPDDIAKMAKRLAKHGVLDFCYEAGGCGYNIYRQLTGLGHSCTVAATSLIPRKPGERIKTDRRDSQKLAILHRSGDLTRVWVPDATHEALRDLVRARVDASMHLMRARQQLLAFLLRHGRSYPTGKHWTQRHRSWLAGQTFQLEVHRIVFQDYVETVWTAQERRDVLIERIATMTASWSLGPLVEALRGLRGLDLLSSATFIATTGDLSRFESPRMLMGYLGLVPSEHSSGGTIRRGGITKTGNREARRMLIEAAWSYRYPARIAKEKAEILVRLPKNIRDIAWKAQTRLCARYRTMIARGKKPTVVVAALARELAGFIWAIGQEMRVGVTT

SEQ ID NO: 101156 - protein, 379 aa, unidentified
MILIDTGEFGRIAWSFFAPSSPALSWPAVPRSLLPQQTTNHTNLARLQSNGNRQSSDRKGFCCGTSAATLDTKLAATPQITCFSAPARLRKGHVVLRRQVSTRWPKLEEFREQLRQLAAADEKYVAIVEVCGFHDWLVKWLQQDERCHLVLVVQPLGRSATKTDRRDAHALSELLWINRERLLRGDRVHGVRTVHLAGEEQMADRRLTAMRERLVRRRTQTLNQIHKILRRQNLEWDRPTKTFQTGKVAQWLKTLQLEPMDRLVLNQLLVQWKLWEEQIVKVDTRIGQRFLANPDAQLLATIPGVNAFIAVAITCRIAPIARFPHGRSLANFLGLTPGCRSSGETERMGSITKMGSRIVRFLLGQVIVHLQRRDGTVRA

SEQ ID NO: 101157 - protein, 341 aa, unidentified
MNVKTIGIDLAKNVFQIHGVDEHGKRLFNKQLRRAQMASFFANIPPCLIGMEACASAHFWANKLISMGHNVKLMAPQFVKPYVKTNKHDAADAEAICEAVTRPNMRFVPVKTAEQQAVLALHRSRQSFIKQRTAQANQIRGLLAEFGIVVPRGIQQLQRRLPELVEDADNPLPVLFRTQLSLLQHHIAYLFDVIATLDKQIEQCYRQNALCQRIGKIPGIGPVTASALIATIGKANNFENGRQLAAWLGLVPRQHSSGGKQVLLGISKRGDTYLRTLLIHGARAVLQSAKHKQDAVSSWANQLMARRNNNIASVALANKNARTVWALLAKEREYCAPIISA

SEQ ID NO: 101158 - protein, 337 aa, unidentified
MAKQKALRRAGVDVSARWMDVSRDAADEAVAVRQCANTAAGQRELARWLTRGGRRAQVVLEATGLYSLDVALTLQRTAGIEVMVINPRASKEFAGAWGQRARSDASAAAVLREYAARMPFTPWTPPPPAALALRAIMRRVVALIEMRVQERNRLHALSATEALPPSVRADVRQHLGALGRQIARLECEARALVEPAPALRAGYRHLCSVKGIGRRSALLILSEVAVLPAELSVRQWVAHAGLDPRPLRSGSSVHPPVHISKRGNVYLRRALFMPALVAVRRNVAVQRFATALTTRGKAPLAILVAVMRKLLHAIYGMLKTDTDFDGEKFRRSVLTAA

SEQ ID NO: 101159 - protein, 356 aa, unidentified
MNKRSKLNFSGQVIYLGLDVHKKSWSVSIFTKHGEYKTFSQPPEAGVLIQYLQRHFPGARYHSVYEAGYCGFWIHDQLREKGIENIVANPADIPTQDKERRNKRDPIDCRKLARGLRAGDIQGIYTPPRWRLEDRSLIRTRLSMGRKQARCKNQIKSMLLFYGVAIPEQREMGHWSRRFIQWIEGIRMERTSGDLALKLHLEELCHLRQILAKLNRSIVALARTEEYRLWISLLKTIPGISTLTAMIVLTELHEITRFPSIDQLCSYVGLFPDTQGSGEKEHVGGITQRHHSSLRWLLIEASWIAVRKDPAMMEAFNEYCKRMRKTKAIVKIARKLLNRIRYVLKNQAEYVTGVIE

SEQ ID NO: 101160 - protein, 359 aa, unidentified
MVELSKIGMKTVGLDLGDRSSHFVVLDAEGQLVEEGRVATREPALRKHFSGCERMRIALETGTHSPWVSRLLKDCGHEVIVANSRKLRLIYENRRKNDRVDAMYLARLARLDPQLLSPIAHRGPQAQKDLALLHSRDALVKARTLLINHSRGLVKSVGQRLPSGSSEAFPRKVLGAIPGSLQAALLPVLEMITSLNAQIKALDRCIDALAEKFYPETKLLRQITGVGPITSLGYVLILEDPERFRKSRAVGSYLGLTPGSNKSGQSDPQMRITKEGDALLRRLLVSAAQYILGPFGPDTELRRFGLRIAQRGGKNAKKRAVVAVARKLAVLLHHLWRDGEVYEPLYQQTRKAARLGKIA

SEQ ID NO: 101161 - protein, 322 aa, unidentified
MSSKNYGGIDVAKQSVVIGIFGYPKTKTEANNPNGHTNTVEYLKKHNVNLVVLESTGGLEVPLANALYAAGMRVVIANPQRTHKYAESFSLGKTDHLDAKMLADYAQALDARKMVDDILYVPPSAEIQELEALVKRRSQLVEMRKMEKNRLEQTHASQKASVAALIAHLGELIVALDKDIDRYNKSGFNGKGTILSEMKGVGNTTCATLLSMMPELGKVAHKRAAALAGVVPLPHQSGDKEKKTGCIGGRKIVRNALYMAALTATRFEPKIKEFYERLMNRGKPFKVAINACMHKLLRILNAQMRDYLANLEQTKESTPQTA

SEQ ID NO: 101162 - protein, 391 aa, unidentified
MPTAADPAEAPTAIQTNLAAIFVSLELSRSVWLITSLSPSFGRKMSKHSVPAGDVAAMLARFAELKQKTLARTGKSFPIISIQEAGLDGFWLHRVLESEGIESHVVDPASIATSRRRRRAKTDRIDGEALLRALLAYKRGEPRVCVMVKAPTPEEEDRRRLSRERKVLVAERVEHVNRIKGLLFSQGVSGYEPLHRDRRKRLDELMTGDGRALPAHLKTQISRELDRLELLLDHIKAVEGERNALLAKQQAAAPPTVAAGKVLLGFKGIGPEFAAILWLEAFFRHFDNRRQLAAYAGLAPTPWQSGSVDREQGVSKAGNPRLRETLIQLAWLWLRHQPKSALALWFKERVSRNGGRMKKVIIVALARKLLVALWKYVTAGVVIEGALFNAA

SEQ ID NO: 101163 - protein, 396 aa, unidentified
MARIWAGTDIGKSHHHCVVLDAEGRRLMSRRVLNDEPELLALLADVLALDEDVVWAVDVADGMAALWVNVLLNHGQRLVYIPGLAVNRAAAGYRGTGKTDAKDATVIADQARMRRDLTTLRPDDEHVIELRVLTGRRADINADRTRRINRLRGQLTSIFPALERVLDLGNTGPLVLLAGYQTPAALRRTGRKRLETWLRNRKVRSADTLAETALAAAGRQHTALPGEKITAQVIHTLAKEVMGLNEQLAEIDKLIAARFREHALAEVIESMPGIGPLMGAEFLAATAGDMNRYGSADRLASLAGVAPVPRDSGSVSGNLHRPRRYHRGLQRVFYTSALISIRNCDASRRFYERKRAEGKRHVQAVLALARRRVNVLWALLRDGRCYQDGLSVTTAA

SEQ ID NO: 101164 - protein, 346 aa, unidentified
MNEQRHYVGLDVSLETTSICVIDDAGTIIWRGKCSSDPDAIAATLRQHAPGAVRVGLETGQLSNWLTLSLRRRGVPVICMDARHAKAALSLQINKTDANDAFGLAQVVRTGWYREVAVKSMDAHTLRMLLVARSRLVSQRQATANTIRGLLKTFGLVVARGSKGLFPVRVREQIAGNPALIAIIEPLLAVWSAIREQVTMLDRQILARARNDHARRLMTIPGVGVVIALAYTAVIDDPARFRRSVSVGAYLGLTPRRYQSGEVDTTGHISKCGDSLLRGYLYEAAAVLLHRDGRASILKSWGLGLAKRIGMRRAKVAVARKLAVIMHRIWSDHSEYRWTVTPPTAA

SEQ ID NO: 101165 - protein, 349 aa, unidentified
MAVTIVEEARAITGGVDTHADVHVAAALDPIGGLLGAGEFPATAAGYARLLGWLGGFGTVCLVGIEGTGSYGAGLARHVTAAGVRIAGVDRSDRQDRRRQGKSDPLDAVSAARAAQSGRARGASKGRDGSVEAIRALMVAKRSAAGERTRTINQARALVLTGPDDLRARFAAHTPAALVAGLGSLRPRPGGDVAGHATRVALRELGRRAQFLDSQLERPGELIVPLVTAHAPGLLALYGVGPNTAALLLIAAGDHPGRLRSEAAWAHLCGAAPIPASSGKVTRHRLNPGGDRQANHALWRIVFTRLGSDPATRAYAERRTAEGKSKAEIIRCLKRYVAREVYRYLRPGG

SEQ ID NO: 101166 - protein, 341 aa, unidentified
MHQATIIGIDLAKRTFQAHGATSDGKVAFRKKLSRSQLLAFLTQQPRCVVAMEACATAHEWGRAARELGHEVRLIPPAYVKPFVKRQKNDAADAEAIAEAASRPTMRFVAVKSEAQQARAMVFRTRDLLIRQRTQLINALRGHLAEHGIVAPQGPANLKLLADAISDMKISLVPIVRDLGLLYLEQIKGLGEKIAALDRTLRRESKSATTACLQTMPGVGPITAVAIEAFAPAMTTFKRGRDFAAWVGLVPIQHSTGGKQRLGRTSKMGQRDIRRLLITGAMTIVRWASRKGAREGSWLARMMASKPRMLVAMALANKMARAVWAMLTKQENYRDPAAALA

SEQ ID NO: 101167 - protein, 339 aa, unidentified
MKLYGAMDLHSTNSVTVLINEHDEVVYRKRLANDLKLILEQLSPYQSSIEGLVVESTYNWYWLVDGLMEQGYKVHLANTAAIQQYEGLKYTDDDSDARWLAHIFRLGVLPEGYIYPKQERAVRDLLRKRGQLVRQKTANLLSIQNIYSRNTGASISANRIKQLTAQEVEQMLTAGDVALAVKANLSVMRCLETEIKTLERIVKERVQLRAGFRYLLTVNGIGKTLALTIMLETGAIRRFASVGNFASYCRCVGSQKLSNGKRKGKGNTKNGNKYLSWAFVEAANFAVRYQPAIRRFYQRKKAKTNGIVAIKAVAHKLARACYHVMRDQVAFDVTKAFSG

SEQ ID NO: 101168 - protein, 310 aa, unidentified
MKQSKVYVGIDVAKAHLDLAWEQRSWRVSNDAGGHRKLVKRLKKASAASIQVICEASGGYERALLLALERNGIDFSLVQASRVRQYARACGLLAKTDAIDAQLLARFGQAISPPPSKAWPVAQRQLRELEDQRRHLVRLLVAEQNRRVQLSNKTLLRLNTRLTGQLRKQIAQIEALLAASIEQDQALSRKARQLTSIVGVGPRTATLLLAQMPELGELNRREAAALAGLAPFNRDSGSLHGKRAIFGGRRAVRCGLYMAALVAARRNPILAPFYQRLRQAGKPPKLALTAIMRKLLIALNSKLKTNPLPA

SEQ ID NO: 101169 - protein, 387 aa, unidentified
MRRPTSPRSPYDGLQTGCLGKPEKGRLAMDDRISGRVKLVCGLDLGDRTSTFCLCTGEGETVEQGRVQTTAPSLARRFEAMAPMRIALEVGAHSPWVSRLLRQWGHEVIVANARKVKLIGNSRRKNDRIDAQTLADLASVRPRLLHPVEHISAEAQADRAVLRSRDALVRARSGLISHVRGVVKAQGERVVSCSAEAFAKKAASSLPAGLVEALKPTLEILSELTEKIRCYDRQVERLIRERYPQVQRLTQVKGVGPITGLAFVLTLGDPTRFAKSRTVGAYLGLVPALRDSSNSEPQLRISKEGDPYLRRLLVQCAHYILGPFGEDSDLRRLGQRLMVNGGKNAKKRACVAVARKLSVLLHRLWVSGQKYEPLYSIAGQVSVPMAA

SEQ ID NO: 101170 - protein, 341 aa, unidentified
MTEYVGFDVSKEETAFCVKDAAGKILAAGKVATDPDALLAAVREHCRCPGRIVLETGTLSGWLARELGERGLAVEVIDARHAHALMRLQRNKSDAGDAAQLAEIARLDAGQAVAVRSETLQRDRAVVEARAHLQGQRLATRNVIRGLLGAFGLRFPKGAGTLAARVREALAERPELMAVVAPLLDSIEALSASFARLDDAMMRGAKESDACRLLMTVPGIGPVNALTFVATIGDAGRFADSRDVGAYLGLTTRRYQSGEIDYSGRISKRGDSLLRSLLYEAANCLLTRVRRAHPLKDWARRIARRSGHKKACVALARKLAVILHRMLITGEPFRWPQPAAA

SEQ ID NO: 101171 - protein, 341 aa, unidentified
MERIITIGLDIAKQVFQVHGVDGVGAVVVRRKLRRDDVVGFFKALPPCLIGVEACATGHHWARVLMALGHEVRLMPASYVKPYVKRQKNDATDAEAICESVTRPTMRFVPVKSQEQQSVLMLHRVRQLLIRQRTMLVNALRGHLAEFGVVTRQGIAGVGTLIALVEDQGDELIPPLAQAALLPLIGQLREVHEKISELDRKIHAWHRSNELSRRLETIPGIGPITASAIAATVTDATLFKSGRQLAAWIGLVPRQNSSGGKDRLGRISKKGDPYLRRLLVVGAHAVLRFSGKGKGASTRWAAELLAKKPYNVVAVALANKMARIVWALMMTGRRFEDPAAR

SEQ ID NO: 101172 - protein, 408 aa, unidentified
MKLFVGIDVSSKQLDVCFLDSEDTRLTEETLSNDINGANKIKENILAYNGQYRYENIVVGMESTSVYSFHPATLLASDVDLQRIGVEVVTQNPKAIHRFKGLFEEDKTDRIDAFRIADFLRFGRYNKSLIREEKYVALQRLTRSRYQIIQQLTECKQHFLENLYYKCNTLSKEVETSVFGSTMMDLLAESLSLDDIANMELEELASFLQKKGKGRFSDPEKLAKSIKKAIRDSYRLGKVIQDSVDIVLATYAKLIRTLNKQIKELEKAIEDLFEILPEAQSLKSVPGIGSVYAAGIIAEIGQIERFETQAQLAKYAGLYWKKSQSGDFESERTPRVKTGNHYLRYYLVEAANSVQRNEPVYREFYLKKYKEVPKYQHKRALVMTARKLVRLVDVLLRNHQLYTPERSV

SEQ ID NO: 101173 - protein, 350 aa, unidentified
MLIIGCDFHTRFQQIAMLDTTTGEIIERRLEHENGEARAFYAGLPGSARVGMEATGYAQWFERMLAELGHELWVGDAARIRAAVVRKQKTDSRDASHLLELLLSEGFPRIWIPSPADRDARHLLRHRHKLVGFRTSVMNQLHALAMGQGICRRKKMWTAAGRKRLEGVALGAWASRRRQELLEMLGRLNASIEELDQAVEKEAASRADAVLVMRQLGIGPVTALAYVLTIGPVSRFPKSKQVVSYLGLNPREASSGGRQRLGSISKQGNKMMRCLLVEAAQTASRFDPELRRSYQRLKYRRGSAVAKVAMARKLAVRLYWMLRHATQPVPPARMQGSSRISVVDLSPSTK

SEQ ID NO: 101174 - protein, 338 aa, unidentified
MYYTGIDLHQKTSFITTVDETGKVIAKVNLPNEERIILRHFQDLGDKTKVVMESMRSWYWLYDLLTDQGIEVVISNPVKTKAIASARIKNDKVDSAMLAQLLRSNLISPVYVSSRKTRELKELLRHRAKLVRDMTRLKNRIHVLLAKNNIQVPWSDLFGVRGIAYLEDIQLPQYQRRSLETYLSLSKELKAQIEPLNKEMQELAKSNPQARLLMTIPGIGSIVALFILAEIEDISRFPSHRHLASYAGLVPSLDSSAGKDRRGRITKQGSPYLRTALVEAAQVTSRVKRSRLHLFFRKRIVKSGYQRAIVATAHKILHYAYYILKHQTPYRELDPACA

SEQ ID NO: 101175 - protein, 345 aa, unidentified
MKIIGCDFHPSFQQIAICDLETGELQEVKLSHADGQAERFYRELGEPALIGIEATGNSQWLLDLVQQLGHEIRVGDAAKIRASYVRKQKTDKRDAGHILKLLLEKRFPQLWRPSAAMRDQRQLLRHRDKLVEIRTKVKNSLQHLALNRGMQKKSRLWTRHGMEQFQQLAMPGWAGTRREDLLHLLKELNRQIEQLDQAVKQAAEQHPQAQLLMTQPGVGPVTALAFVLTIGDVTRFAGSKQLTSYLGLVPSEHSSGSKRYLGAITKQGNCFLRKLLVEAAQTTVRKDEGFRKEYQHRCHHRPKAVAKVAAARKLAVRLYWMLRSNVGYPEIVHIESNPRVPLGEV

SEQ ID NO: 101176 - protein, 462 aa, unidentified
MSRLSKPNTALEESRPFQGMSMVNENAAGVDIGAHEIMVCVRGPDHTQLVRSFGNYTADLYSIANWLGEHHICTVAMESTGVYWIPLFEVLESQKFKCLLISSKSLRRVPGRKSDVIDAQWIQTLHAYGLLTGAFRPESDLVALRTLLRHRARLLEHRAPHILHMQKALLQMNLQLSQVLTDITGETGFHIIRAIVDGERDPHKLAAMRNRHCKKGEDEIAKALTGTWREEHLFILSQSLELYDFYTEKISACDTQIEQNYGVIRPNWSDPEPAGQMAAEHFLPKRLAKNAPKDGEQIRAHLKRIGGVDLVAVHGISVPLAQTIITEVGTDMSKFPNEKHFCSWLGLAPKNEISGGKILVSRTLKTKNRAGQAFRLAAVSVMRADCAFGAFYRRMKSRLGPAQATVATAHLIARVVYRMLKYQVEYEPLSVSEYEKRYHDRQVKYLEKKAAKFGFQLMPAAT

SEQ ID NO: 101177 - protein, 418 aa, unidentified
MNVKTRRTKKQVNVENQAINLLSKEELNKKIEVVEKELRSYTWRELETNGKFAKNDKLSFITDDMLIVGCDIGSENHYIRAIDVRGRELSRGAFEFSNTSEGFENAKAWVLALAAKHDKKQIVLGLEPTGHYWFALAAWMISNGISVVQVNPYAVKQSKEIEDNSQLKDDSKDPKLIANLVKDGNYGMPYLPEKVYADMRRLSMFRDQLTEDRIRNINRLHRELKIYFPEYMDAFGKIDGAFTLEVLKGSAIPSDITALGAEGIKNIWHNEKQRGRGYSRANEIVSYAEKSVGLTDGIDAGREAVKWYAEQILKLVACSSGKHKGQTKISHRGRKRLRYWLFQAAKSAVSHADEFKQLHEYYTTRTNNPLKKMQSLVVIACKILRVIYTILKTGTTYDPQKLLEDIKRPTASQTPMAA

SEQ ID NO: 101178 - protein, 355 aa, unidentified
MNSLGIDVGKKKCRAALKDERGDVIREFFFSNNNEGISALIQSASHYGKCTAVVESTGNMWIRIHDTLEENGIDTILANPYKTKIIAEAKIKSDKLDARILADLLRADLVYESYVPTKEFREKRSLVRHRISLVRNRTMLENKVHSLLDKYDYKSQLTDVFGKSGIIWLKTLDVSTIDRLIMNTTLAAIENINLQIETISKELAKYGWDSDDVKILLSMTGIDVFSAMLIATEIVDVKRFCTPWKLVSYAGLAPSTRESSGKTKTGRISKQGSPWLRWILVQCAMTAVRYDQRLKSFYERLKSRKGSAKAIVATAKEILVIIWYMLTRRELYRHMNKDRYEQKLSRLKKIKESAV

SEQ ID NO: 101179 - protein, 367 aa, unidentified
MSLPPENRSLTSSSIKCFTGVDIAAKDFTAATLLPGGKPRLEKKPFEQTPQGFSLFLARLAAAASGIPPQEHLVVMESTGPYWVALAVYLAQKDYAVSVVNPAQVHFFAKAQLKRSKNDKLDAQTLAEFAQTMLPNLWTPPPQFYHELRQRISQRDNLVRIKTQVENQLHSLLVNPIIIESVRDQLKELVSTLSSQIEQMDHELADLLKIELKKLDQEPQAEPSHQQEWKRSIALLRTIPGIGPLTASWLVLSTLNFTTCQSPQALSLYAGLAPIERSSGSSIRGHPQIGHSGNARLRTLLYMATLTAARYNPLIKAFWERLHDKKHKPLKVARCACARKLLHLAFAIVKSGKPFDPGKIVIEGEAA

SEQ ID NO: 101180 - protein, 423 aa, unidentified
MVVKKAKTGKIKFVKEDTLIVAVDIGMEMNHGYCTTPDGRDIKPFKFENTREGMDKLWCTVLASKARFKCSEVIVGYESTGPYGEPFLHYLVKKDVKIVQVNPMHTKRVKEISDNSPLKTDDKDPRVIADIIKLGRALSVVIPEGDAAYLRPLNNLRERHVKERTALLNQMQQLVFLFFPEFKKVFKNMQCMTPLYILKTYPTPEEISVLDKDTLGEEMRKKSRGKFREQHAETLIKFAKNTVGIQEGVLGLSMEIKHILVQLELLDTLIAEIESEMEVTLGRIPYSSKLLSIKGFGVVSVVGIIGEVGDFKQFQTRGEIMKLAGLDLYEISSGKWKGQRRISKRGRSLLRKILYYVAIQTIRENGIMHDYYARLTDGGMKKMKALVAVSRKLLGIIYAIVRDDSEYVTHFESTKRQVKKMAA

SEQ ID NO: 101181 - protein, 359 aa, unidentified
MSNYITIGMDLGNKKHTVCALDQEGKVLWRREVANTPEALKPFFEENAGATVAMETGLCCRWISALAKSCGCEALVGNARKLAAIWQSKQKNDENDALLIAKLARADRELFHPVELRDDERHEMVQIIELREVAVSQRTQAVNSVRGLCKAHGVFIPKCDASCFHRVAKDAIPAGMAWKFKPMLRHLKEIVATVKRYDAMLEKYARAHFKEEVELLQTIPSVGPVTSCAFVAHISDPRRFGSARDAGAYFGLTPGQDQSGDRDAPKRITKTGSTLMRHLLVTAANYILRESSPDTALKRHGERICERGGKVARRKAKTAVARKLAVTMLAMLKSGKPYDDSLAAKRTATEATAIAELVA

SEQ ID NO: 101182 - protein, 414 aa, unidentified
MNELHYIGFDVHKKSIQFCVKSADGAICQEGRIRATRPALAAWCAQQKVPWKGGMEATMFSGWIYDALKPHAVNLKMAHPAMLKAITTGKHASDRLDARKIADLVRMDWIPSVWVAPPEIREMRLQLRYRNLVVRQATQVKNRIACTLMEHGAEFTKKKLHQEKYFHELLEQLDEVPESVRNLLRRARGSLQMFAVTQKALLQLLETDPRLAARVQLLKSIRGVGVVMALTWALEIGDPQRFGSIGQALSYCGLVAAFQQSAEKVYRGHLSKKRNAHLQTMLIEVAHLAPRYHPELQRVYNEAKEKRHANAGTLAVARKLVAYLMAVDKSGKPFQMRTPEAAAAPGSPAGSQVASPPAPPIAKSQRVAQRSSPSRVRSAAPKDGAPRTAPGRCAASEPAMGGSGGKAKKLALRA

SEQ ID NO: 101183 - protein, 366 aa, unidentified
MLQKAELSCEADSENYLGGSSETMYYIGLDVHKRTISYCVKDAAGKIHQEGKIGSTRRELDAWIKTLPQPRTIAMEATIFTGWIYDHLLPHAEKVKVAHPLMLRAIAAAKRKNDKIDASKIADCLRCDFLPECHMASTEIRDRRRTLRYRGLLVKQMVQMKNRISGLLLEKGVTHTKRRLHKVGYFAELMAGNEEIDQSIRPLLKLSREHIVRAQKLDYALVSSLERDPLLVERLKRLRTVPGVGPITALSWALEIGDVARFRSIKQAISYCGLCGAEKSSADKMLRTPISKQRNKHIQHVLVEAAKLAPRQCHELALIYEKEMQRGNRNRATLAVARKIVAYLLAVERRQQDFVPTEERGGTAAA

SEQ ID NO: 101184 - protein, 452 aa, unidentified
MCKDEGTRYAEFCQFIRGIRSSKEHLIVGIDIAKDKHHAFFGTATGKVLLKKLVFQNTREGFTKLIEHAEALRIRHNLQEVVFGFEPTGNYHKPLGDYLVQSGSMVVLVSGGSVKKNREIMDGRWDKNDTRDAATIADLISQGRCLYYEYPSQGIRNLRDLLSLRRRFKKEECRLMLRIRNSLVTRYFPEFDRFFKSNEEESLAITKWCLDPHEIHAQEFQKFFTLVTAKRRTLARENRLRAIHFVAGNSIGMDMGEVSVFEARALVDQVKAVQALLKDIEDRIEETCMGFPEYQCLLTIPGFGPVISSVVLATIGDPHRFKNASQVIRLSGYDLSASRSGKTSDKAVPRISKKGNADLRHVLYQAAMLSSTKNKDMMVYVGRKLQGRAREKGIGAKMRVKLAVKLLVIAWTLMKKKVPFNPAYLSGIAIPSSAREPVTISLRPSEGPRPSQ

SEQ ID NO: 101185 - protein, 326 aa, unidentified
MMHPAEAFKPAPTDALITMGIDVSKDHLDAARHPSGDSLRVPNTRKGHTELLRWLGNSGSIARVVFEPTGPYHRMLEERLASVGLQIVKVNPRQARRFAEAAGRLAKTDRIDALMLARYGALLEPVTRPVRSDVQNQLAELVAARRGLMRDRTATLNRLKTLTIELLKRHARHRLRQIEAQVASLDAAIDAIVLGDPVLCRRRDVLASIPGLGLITAHTLLADMPELGAMDEGQAASLAGLAPITRQSGTWRGRSFIQGGRASLRQALYMPAIVAMRFNPDLKRVYDRLIAVRKHTKIAITAIMRKIIVLANALLRDNRLWSPKAS

SEQ ID NO: 101186 - protein, 368 aa, unidentified
MSSVASPEGLIHLGMDTSKNTIVVATLLPGEESPVTDRIFNEEEAIRRLVGRFSDRSVLRAWYEAGPGGYDLYRLLTSMGVACQVVAPSLIPKGGSDKVKTDKRDSRRLARLGRAGELTPVRVPSPAEEAVRDLARARAVVLDDRKRARQRLTAVLMRHGRIWRGASYWTAAHRAWIAAQRFGEPALALAVGHYRAALEVREAELAAIEAELAPWAAREPLAGPVARLGCYRGIAELSGLTLAAEVVDWRRFPAARAFMSYTGLVPAEYSSGERTRRGHITKAGSEPVRTALTEAAWAYRHAPAIGAGLRRRQAGAAPQTLARSWTAQRRLHARYMHLLHTGGKAAPEAVVAVARELAGFVWAEMTAA

SEQ ID NO: 101187 - protein, 411 aa, unidentified
MEVTYKRCCGLDVHKETVVACLLIREGGKVLKEIQTFLTMTVDLVVLHDWLKAHQVTHVAMESTGIYWRPVFNLLEEDFTVLLVNAAHIKTVPGRKTDVKDCEWIADLLSHGLLRGSFILPEPIRDLRDLTRYRKSLSDERVREVNRLQKFLEAANIKLSSVATDVMGASGRAMLEALASGGTDPQALSELAKGRLRKKLPELKKALEGRFRPHHRFMVSEILTHLDFLDESIERVSQEVSIRIVPFSPKVDLLDLIPGIDQRVAEGVLSEIGVDMSCFPTDGHAASWAGLCPGNNESAGKRKSGKTRKGDRWLRRYLIEAAWAATRKKGSYLSALYHRLVVRRGKKKAIVAVAHRLLVIIYHMLKDHGTYRELGSDHFNKLNAAYVRRHHVKRLESLGFKVILEPISEAA

SEQ ID NO: 101188 - protein, 402 aa, unidentified
MTKRFAGLDWASRIHAVCVIDAHGKVVARLKVTHDAAGLAELCRWLRSMKVDAVAIERPSGLVVDTLLEAGFTVVPIHPNVVKATRPRYRSHGGKSDDGDAYLLADLLRTDGHRFKALLTECDQIRALRAMVRGRDDLVATRVQLANQLRELLQSFWPGAAEVFCEIDSPIALAFIESYPTPASAARLGARRMASFCSKHAYSGRRSPEELLQRLRQAASGGAAELEAQAKGALALALVRVLQPLLEQLRLLSKSIEQAVESSDDGRIIMSFPRAGRVCAAQILSELGSVRERFADLEQLEGEAGVTPVTRESGKSKVVVFRWACNHRLRAALTCLASNSRHENSWAAATYAKARARGCQHAHAIRILARAWLRVIWRAWQDRRPYDPQRHTAAKLYIATGG

SEQ ID NO: 101189 - protein, 346 aa, unidentified
MMIIGCDFHPSWQQVSWFDTETAETGERKLVHATGDTKQFYQELAAPALIGVEATGNSQWFLELVEDLGHEIWVGDAAQIRASYVRKQKTDKRDAAHILKLVVEGRFPRLWTPDREQRDLRQLVLHRHKLVEIRARVKNELQHLSMNKGMQKKRMLWNQAGQKALRELPLKAWASCRREDLLRLLAMLDEQVGKLDQAVQQAAEQHEQAKLLMTQPGVGPNTALAFVLTIGDVTRFPRGKQVASYLGLIPREASSGGRQKLGAITKQGNRLVRMLLVEAAQVAVRCDPGMRKQYLHRCHQKPKGVAKVAAARKLAVRLYWMLRTQVGYPEIVHIESSPRVPLADAS

SEQ ID NO: 101190 - protein, 461 aa, unidentified
MAKKAKKVKTAKGAELRIVNPDAAGIDIADGIMQVCVPADRSKDNNRAFGAYTSDLHAISAWLRECGIKTVAMESTGVYWIPLFCRLQEDGLDVVLTNARDVKNITERKTDESDAEWLMLLHQYGLLKASFQPHNDAKRMRTLTRHRDTLSREASSIVLRMQKAMQQMNIKLTLVLSDITGKSGIRIIEAILAGERDPKRLADLADIQCKTPKEEIAKALEGNWEEDLMFVLRQNYDTFKHYCTQLGECDAELEKLMENYRAEVAKVEDTSYSPAKKRRDYKKTRHTVGFDVERKAYEMWGVNVFEIPGISHLTALELMSELGHDFTRKFPSSKQFCCWCNISPNTKISGGKRISSHVPHRRNNVGLIFRSIAPPLANAKNQLGNFYRRIRSRAGGKAAVIATAHKVAEIFFAMVANQTTYNPERVGIDEKVLLEKRITRYKRELERITGTHIEIGNACVP

SEQ ID NO: 101191 - protein, 408 aa, unidentified
MATPEQVNVWVGLDVGKEEHFAEVLDDAGDRLFAKSVVNDQAALEALLERASSHGTVGLVIDQPGSIAQLALAIARQREVPVAYVPGLVMRRAADLYPGEAKTDRRDAYVIADTGRTRRRQVHWLDAKSDELLERLRVLNGFDVDLGADQIRLANRLRDALTSISPNLERAIGSRLAQAGVRDLFAKFPTLTALRAAGRARIERTVKARSPRLVTKVADSVIAALDAQSVTVPAEATIGRVIAELAVELDRVYARRDALPAEIEEAFLAHPFGELLSSLPGIGPRTGSRILAEIGDGSRFADGDKLASYAGLAPVVRQSGKSINGESKSRRGNHRLKNAMFLAAFASLRTPESKAFYDRKRAEGKRHNAALICLARRRCNVFLAMIRTEQHYLRSPSSTTATEFKDAA

SEQ ID NO: 101192 - protein, 343 aa, unidentified
MEHYVGINVSLEESSVCIVDATGTIVREVKIASEPEALVRYFDELELSVIRIGLEAGPLSQWLHAGLVDAGRDAVLLETRHVKAALSAMTVKTDRKDARGIAQLLRMGWYRPVHAKSVTCKDSRALLVGRKLLQGKLLDVELSIRGILRGYGLKVGDVSRGRFEARIRQLTAGHVALETVIGAMLAARTALWCEFTKLHREMLKIARADKVCRRLMSTPGVGALVALTYRSAVDDPMRFGKSSTVGAYFGLTPKKYQSGETDRDGGVSKVGDAMVRTALFEAAHIMLTRATRFSGLKHWALDVAKRRGMKRAKVALARKLGVVLHRMWVDATEFRWSKAAAMA

SEQ ID NO: 101193 - protein, 376 aa, unidentified
MISSDYTVGCDAHKHFSLFAILDKRGELIQRIRVDHAPGEIRAFLSQFPEGTPVALETVGNYYWIVDEIERAGCLPLLAHAAKAKIMMGNIHKTDKLDAYGLAILLYLGKLPSVWIPPGDVRDERELPRTRMTFSQHRARVKNRIQSTLAKYALSLDTHSDIFTPKWRRDLLAAVDRLPEETARCVHQQLDILDAIQEHIKKLEARILERIRMTPTMQLIQSVPGPAKVLAIVIDRELGSIDRFPGPKNLSSYCGLVPKVKASAGRVHYGRMVKQCNTYLKWAFIEAANVIVRQRHHPNWRGKYVVHLYERIRRRKGHTIAIGAVARYLAEATYWVLKKREPYREPPHWKAAGKQSLSRSARVRSVANMGPMRSAS

SEQ ID NO: 101194 - protein, 314 aa, unidentified
MKVFAGIDVGKRELVVSVLGKGVRRYRNEAGEIGEMGKWLRTEGVTHVVCEATGGYERGVERGLKGSGVAVHKAHPPRVRGFAQTLGRGAKTDPMDAEVLARYGATMQVEGEEEGDSASEELREVLGRRRQLVEQRVQELNRLEKGPGKASKQSGERHVAWLDKEIARLDKALQALWRRHPGLSERVALYQSVKGVGELTAATLLGYLPELGQGCGRGLTSLAGLAPWSHDSGQRQGYRAIRGGRGTVRRALYMAALSAIRCNPELSGFYRRLRRRGKPGKVALVAVMRKLLLLLHAIARRSTPWLPTLRPEPA

SEQ ID NO: 101195 - protein, 483 aa, unidentified
MKRKSIPSSRGPKTSRPSKSKKQAWKVVHPHAAGIDIGATEHYVAVPPDAVAAGESTVRSFGCFTQDLDALVEWLKACGVDTVAMESTGVYWIVPFQKLEAAGLEVVLVNAHTLKHVPGRKTDVQDCQWIQQLHTYGLLRASFRPDELTCRLRTLVRHRANTVSSGAEYILQMQKALTQMNVPLHHVVSHLTGETGLRILRAILNGQRDPLMWVELRDPQITRSTKEEMRKALVGDWRPELLFVLKQSLRGWEFCQEQMRECDGQIEQLLKEMPSAVAAKTPAARPQPDPLASTNPRPKGKQSRKRNDPEKDLAPELARICGVDLTAAHGLRLLTVLTLVSEIGVDVSKWRSAKAFVSWLGLCPNNKISGGRILSSRTRKVINRAANAMRMAAVGVGDTDTWLGSFHRRMRTKLGPAAATTATARKIGTVVYHLLKHQEPFIDRDLMAYEAKVYRHKLARIKKQAAALGYALVKTDEEKQLTE

SEQ ID NO: 101196 - protein, 378 aa, unidentified
MHRMTQEHTFVVGGVDAHADTHHVAALDEQGALLSAKSFPTTTPGYRKCLDWLSSFGEIHAVAVESTGSYAAALVRYLREHDVQVVEVNQPHAHTRRRVGKSDPIDAEMAARLFLAGKAKAVPKQTDGIVESIRLLRAARHSAVKSRSAAMVQLRDLIITAPQELRDQLSCRRTLRGKATVCARFRPSARELRSPSQAAKFALRSLAHRIESLDREITALDRELEQLVRAAAPRTTQLLGISTGHTAQLLVTAGENIDRLRGESAFAALCGASPIPASSGKTVRHRLNYGGDRQANRALHLIAVCRLRYCQRTRAYARRRTAEGKSKLEIMRCLKRYIAREVYNSLRADLAETHPQPPRQAVTIMCGSPGFGITRKRT

SEQ ID NO: 101197 - protein, 355 aa, unidentified
MKATTIGIDLAKSVFHVCASNRQGRVIWRKKTTRQGLEALLAKLPPSRIAMEACGGSHYWARRCQAHGHVPQLISGKFVKPFVKSNKNDVIDAEAISEAAQRSTMRFVPAKTIQQQDIQALHRVRERLVRGRTALVNQCRGLLLENGIPIAKGRHHLQRQLPVVRENPAEELSAPFVGLLGELGEELRDLNQRIETLESQLTQLGRDLEPCTRLMSIPGVGYLTATALFAAVGTGADFKNGRHLAAWLGLVPRQCTTGGKPKLLGISKRGDLYLRKLLIHGARAVLISRKDLGAPRRWALRVAARSCPNKAAVANKNARIAWKLLHSGESFRDLGRAPANTHSSMPSRTGLDAQS

SEQ ID NO: 101198 - protein, 379 aa, unidentified
MKQIRSFVGMDVHKETISISVAEDGRGGPVRFIGVIPNTPEALQKMAKQLTRHGELDFCYEASGCGYGIHRQLTRLGHKCTVAAPSMIPRKPGERIKTDRRDSEKLAILHRSGDLTPVWVPDTTHEALRDLVRARVDASMHLMRARQQLLAFLLRHGRSYPTGKHWTQRHRSWLAGQTFQEHAHGILFQDYLETVWTAQQRRDALIERISAMVGSWSLGPLVEALRGLRGIDMISAATFIASTGDLSRFESPRLLMGYLGLVPSEHSSGGTIRRGGITKTGNREARRMLIEAAWSYQYPARIAKEKAEILVRLPKNIRDIAWKAQTRLCTRYRSMVARGKKPTVVVAAIARELAGFIWAIGQEMRLLMAASQQKLCTLA

SEQ ID NO: 101199 - protein, 416 aa, unidentified
MEQIHDRVAGLDVHRDVVAACVRRPGPRGGTLTEKERFATTTAALARLGGWLADRDVSLVAMEATGVYWKPVYYALERTEAFELWLCNAHHVKNVPGRKTDMSDAEWLADVAAHGMIRPSFVPPPPIRELRELTRYRTTQTDARVAEIQRLEKVLQDAGVKLTSVASKVFTQSGRLMVEALIDGQRDPAELANLAKGKLRPKIPELREALTAHFGAHHAVVARRILDHVDFLDVTIAALTEQIDLRTEAYQAAKELLLPIPGFGRLIIDTVIAETGADMSRFPSPGHLAKWAGVCPGNHESAGKRRRVGVSPGNAWLRRTLVEAARAAARTKGSYFGAQYRQVAKRRGPNKAAVAVAHSLTELVWHMLSTGECYHDLGDDYFQRRRDPQRETRRLVTQLEQLGYHVDLTTPDSPAA

SEQ ID NO: 101200 - protein, 391 aa, unidentified
MFLLGIDIAKLNHVASCIDSSTNEVIFSNFKFKNDFKGFSALLNKIKSFDAKNLIIGLESTSHYGENLINFLFRHDFKVALINPLQTSHLRKANIRDAKNDNLDSLNIAKSLLFTKLNFVSEKNIECFSLKKLTRFRSNLIKQRSKAKIQLTSLLDLLFPELQYLFKSKIHNKAIYSLLKKYPSIEEIAALKDDEISNLLYASSKGHFKKEKSIELKSLAKTTVGIKDTSISLHLIQLIELIELYTKQIKGIEIKITDTVNKLDTTLLSVPGISIIACAIILGETNNFENFSSSKKLLAFAGLDPKIRQSGNFNASSCRMSKKGSPYLRYVLIFTAWNIVRHSEKFNKYYSLKRSQGKSHYNALGHVAHKLVRILFTLIKKNISYQEEKLE

SEQ ID NO: 101201 - protein, 357 aa, unidentified
METAYDGRQVVGIDLHRRRSVLVRMAEDGRRLGTARITNSPQELRAQIARAGKSPRVVLEATFGWYWAADTLAAAGAEVHLAHPLGVKAFRYRRVKNDERDAADLADLLRMGRLPEAWIAPVEIRELRELTRYRQKLVHLRTSCKDQVHGVLAKLGVLPACTDIFGVAGSAWLDQLGLPQPYAGKVTSLRQLTGELTSEITMLSEVIADLAAGDRSYQVIQQLPGIGPVLAAVIIAEIGDVTRFKNAAQLCSWAGLTPRHRESDTKVTRGHVTKQGSRMLRWALIEAIQRAGADTVTGAIKDAIIARRGKQARNIAKVAAARRLLTLVFYGIRDGQIRCLSTTPGGSPPTTRATRAA

SEQ ID NO: 101202 - protein, 427 aa, unidentified
MAVVMIGVDPHKASHTAVAINAAEEPLGQLQVRASAVQAERLLRWAQAWPERAWAVEGAGGLGHMLAQQLLSAGERVLDVPPKLAARVRLLATGNVNKNDPNDARSVAVAALRSADVREARRDDHAAVLKVWSKRYRDLGRARTQVACRLHQVLCELIPGGVPGEITAGQAGQVLASVTPAGAVDAARWELAAELTEDLRGVDARILETRKKAAAAVRAAGTSLTGLFGVGPVIAAVVIGDVRDVSRFASRDRFAAYNGTAPIEVSSGGRKVYRLSRRGNRRLNHAIHMAAVTQIRYRHTKGRAYYDKKLAEGKTPKEALRALKRQISDAIFACLQEDARRAAAAAAKSPGGQPGNHSASRAAGSHPDHRLFGQATPGPATYPMTPAAPVPAQLPSRASERPSPGPGAARPRSGARRASSTRPRESR

SEQ ID NO: 101203 - protein, 464 aa, unidentified
MEIVHPHAGGIDCGAQEHYVAVPPQSVKPDEPYVRCFSAFTEGLDALVEWLKACGVTTVAIESTGVYWIALCQKLEAAGIEVFLVNARHVRHVPGRKTDVKDCQWLQRLHSFGLLSASFRPEDIICRLRSLQRHRLNLVSTAGAEIQHMQKALQQMNLHLHHVVSDITGVSGLRILDAILAGQRDASQLAKLRDHRVYKSTLAQMEAALVGDYRPEHLFVLGQSLQAYRFYQTRTQECDAEIERLLQQLAERFESSSAPGAELSQPEVLNDAQFQNPRPAKRKVKRKPQANEPKIELADYLRRICGVDLTQVNGLNVLSVLLIVSEIGVDMSKWRSAKAFCSWLGLCPRNKISGRKVLDTRTCKVISRVATTLRLAAQAVGRTDTALGIFYRRKKAHLGPAKATTATARKLACLVYHLLKYKEQYREPDPATYQLKVQKTILAKIQKQAAALGYKLLPTALVPA

SEQ ID NO: 101204 - protein, 343 aa, unidentified
MDHFAGLDVSVKDTSVCIVDDTGRIVREVKVASEPEALLQVLMNPSYRFKRIGLEAGPLSQWLFSALAEAGLPVICVETRHMRAALKAQINKTDRNDARGIAQMMRAGLYRPVHVKTLRSQKLRMLLTHRKLLQSKAIAIENDLRATLRNFGLKVGVVGTVKFEARIKELVEDLPDLVVLVEPLLIVRRVLREQVGILHRRLLAIVRDDDVCRRLMTVPGVGPVVALTYRATVDVPARFRNSKAVGAVFGLTPAKHQSGEVDRTGAISRCGDEMMRMMLYEAAQIVLVRSAKWSWLKAWAMKIARNRGMKKAIVALARRLAVIMHRIWVDGTEFRWARDVAAA

SEQ ID NO: 101205 - protein, 425 aa, unidentified
MQEKILRITATTIIVGVDTAKDEHWARITDCRGVDLTKPIKVTNNIEGFDKLMTRIGKACATHGCNQVMIGMEPSGHYCRALQWYLRIHPSQPVLVGVNPYHTKQAKELDDNSQTKSDKKDALVIAHLIRDGRYFDTYLPKGKYADLRVFNTERQRVMKEISRAGNTIIALTDEYFPEYGKLFENLLCPTSCEILRTAPFPSDVMAMNRDDLIALIRRVSNGAMGQKLADSLMQAAANSVGVQEGKEAVRFRLGQLLESLTFHLKQKDAVEEQLNVVLKGMGLGDVLQSMPGIGPIIAAAFLGEVGDVSRFDTWKQVRKLAGLNLKENSSGKRKGKTSITKRGRPYLRHMLYMAGETCLMHNDEMRQLYHYFRERSINPLKYNQAIVAVGLKVMRILFYMAKNNKAYDPNKALGDIRKAQLSLLA

SEQ ID NO: 101206 - protein, 324 aa, unidentified
MTDTVLGIDVSKTTLDTSLLAGAKPRSRSFANSPDGWRKLIAWLTEHKVGQAHACLEATGRYSLGIALALHEAGHIVSLVNPAQIRDFARTKLGRNKTDQVDAAHIREYAELFKPHPWTPPSPALRRLCELQTIRAGTVAGLTQWTNRSTSGMEDDRALSLAKATIQHFTSQLEAVDQAIAETIDDDPELCAKRDLLVSISGVGETLAGIVLAELPGPEVLGSSGAVAAYAGLNPRQHQSGTSINRPARISKIGNAVLRTALYMPALSAMRYNPAIAALVDRLKAQGRLKGKQIVVAAMRKLLVICFGVLKSGKKFDPTIAMGQ

SEQ ID NO: 101207 - protein, 344 aa, unidentified
MDTIGLDLHKRESQLCVLTEAGEIVERRIVTSRERFTAVLGDRTPARILLEASTESEWVARHLESLGHEVVVADPNFAPMYATRRRGVKTDRRDARTLAEACRLGAYRPVHRASAPQRHVRAQLAVRDALIRTRTRYVSVVKALARRDGLRLPPGKPVHTEAKLAVLPLPVPLAEEVAPLRAVLEPLNREITAADERLAAVAAGDPVVARLRTVPGVGPVTAVAFVATLDVVTRFASAHHVAAYLGLTPREYSSGEQQHRGRISKTGSPRMRALLVEAAWRVLRSQDPAAAPLRVWAERIAQRRGNSVAAVALARRLAGILYALWRDDAAYRAPAPRRGAGTEA

SEQ ID NO: 101208 - protein, 505 aa, unidentified
MLQKPSGELTPRVKAVGPEHFGLLCFDCAKHRSRYFLADFYAQVLLPPATLAHTQGDFQSAITQLRDAMRRHDLRDLVVAIERTGDYHRPVQRAFREAGFDTRIVHPYTTKQYRQPADPDDKTDDHDLAAIFRAAAHGFGLCEATWPADYTSLQILRRHRKDFVDKNSILMCQILEKLHAAMPGYASCFGCIWESPVALAVARRTTSAAAVRQLGLAGLQELVNQQGLRCRKQTLANILAWALQAPPGHSHSLELRVVLGALDDDRIAKCRQIKELERQLAGLIVRTPYTLLLAIPGINVVTVADLAGELGPIELYRDANAITGRAGLMPSRYQSDRVDCADGPLRRRGNRRLRGVLMQTADNLVQCNHYFKAQAEQWRRAGKAAGWIRVKVAKRFTRLAYALVAGKQLFSHPCSQERNYILEKLLGFHSDHGSPPAVTRQDLEAASGQLPASSRQEEARPLQERLEEMAKKKRGVQTLQEIIPFVLARLGVKQVECPGEGTGLS

SEQ ID NO: 101209 - protein, 383 aa, unidentified
MSSNSVGQEHTITIAIELSSSIWLIAARLPGVEKPHFHKIDAGDTAALLSHLSSLRCRVLDRSGTTPTLSCCFEAGRDGFWLHRFLLAHGIDNHVLEPTSILVNRRARRAKTDRLDAQGMLRVLAAYLQGDRHICSMVRVPTPQEEDAKRIHRERGHLVQERLRIENRIEALLFTQGIHKRPSLRSWDRDLAAMQTGDGRELARHLRAELNRLRRRLVIALELIREVEAERDEAASADPQNLTCRKIGALCCIRGIGANFAAVLTREVFYRSFGNRRQLASYVGITPMPHQSGSMDRDRRISRAGNPRARTTMIQLAWLWLRYQPESDLAKWFRDRVGTRTGRTRRIAIVAMARKLLIALWRYCEDGVVPAGVEFHVKTTATS

SEQ ID NO: 101210 - protein, 457 aa, unidentified
MDRELQPLREAISHELRASLFPAVAGVDPDKLLETYLDRLTMYIGVDVADQSFTALAMDAGREILGSLEGCANDPPGFQSFVTWSRALRDQHRLRIMALAGETTGIYYWALWDFLGEQPDVARVLYNPRTTEHMGEVLSKKVRDELVDALLLAEQLRLGSTPEVLLQADADLLTARYYSRAARDLAQQINRKKNQLRALLRAYCPPLCQVFPGYKLHHPAVYALLQEHLFPDAFVHAGPEAVATTLLDHCDTAFGLTEAQQLVEACRQALIRPIGRDVIRHLVHAHTQDIATFQQRKAFYLKTGYALIEDRQESKLLRTVKGAGASNTLALVSEVGDVQRFTSGDHLASFLGLTTSKHVSGTTLFQSKRITKQGSRNGRYAAVNVAQHLSHRVPRYQAMYQRIKGRKPPRKGHYVALVAIARDFVSNVLYDMWRNQRPFFLEVSDYRDYRRKQHADD

SEQ ID NO: 101211 - protein, 346 aa, unidentified
MQFYTERHRHTCGVDLHGRNLYLCVLDPDREIVLHRRVDCDEEKLLRALAPYREDLVIGVECMFKWYWLADLCDEHGIPFVLGHALEMKAVHGRKSGNDKLDAERIARLLGSGMFPVAYVYPKEMRSTRDVMRRRSYLVNQRSSLITHIQVTNQQYNLPEMGKISRADQREGIEMRFEDPAVRASVEADMSVIDILDVVIARLERTIIKAARGHDHHAFALLKSVHGIGDIIGLTLLYEIHDICRFDSLGGFLSYCRLIRCEKTSDGKKKGTGGRKQGNHHLKWAFSEAAALFLRANPEGQKLHSRLVKKHGKAKALGILAAKLARSVYYMLHRNTPFDMKRFVRA

SEQ ID NO: 101212 - protein, 365 aa, unidentified
MNNSVYHTELSSQEETRCQFNGGTGAIKLGIDVHQDFYVVVMQEGGSNPKPPQRFGKEALLYWAARLKEKSGAQMYAVYEACGFGFSLQRRLSELGIRCYVVCPQKLDERNKRVKTDSLDAKALCLRLDRFVQGNRDALALVRVPTEEEERSRAIHRQREQLVKARKQLEAQGRSLMVNHGLDPVQQWWKERAFTKLPVPGWMKLLLGNTQPILIGLQQKIAELTLQLQSAAAADQPRGLGKMTSVVIDREIGHWQRFNNRRQIASYTGLCPGEYSSGNTRLQSCVTKHGNPRLRAALVELAWRLVRFQPNYKPVIKWRRILAKGALATGATRKKAIVAVARQLAIDLWRIRTGRCSAQQLGLTI

SEQ ID NO: 101213 - protein, 340 aa, unidentified
MEKRYVGVDLHRNQFTVCVRLEKGRTYLRTWRLEALPQFVKQLRAGDELAVEVTGNTRLFHDAVAPHVGRVVVVDTNQFRVITQSVRKTDAHDAERLALYLAKGLLPEVRMKDKQHSQIASLTQTRDTLVKQRSGLKNKVNNLLSAHGINLAKEALSSEKKLEEVLGLSFDRLVQLELRVIIGQIRSLNQSIRELEKTIGEEGSQLEGHRQLTSIKGIGKITGAILLSVIEDVNDFPDEHRLASYFGIVPRVSNSNATEHSGHIHKRGSKLGRTALVQSALVAAKYSPYLKNFYQRVKNRRGAGWAIIALARKFLGIIYRTLKHQWVFEDFPNFVLAEGA

SEQ ID NO: 101214 - protein, 325 aa, unidentified
MSSHEIVGIDVAAKTLAVAGDCPRLRAEYENSREGRRGLVKALGGGTRPVRVVMEATGIYFLDAACELVAAGIAVMVVNPRASHHFAEAVLQRRKDDPVDAAMLRDYGQRMPFVPWVPPAENHFALRAIGREVRAQGKAVTAAKNRLHAMGATRLVPRELVRALERQIAETEALVDALVAAAVALIDGDPELKRKFQRTDSMPGFAAKAVVTVMGELIVLPPMSATQWTAQAGLDVREVRSGTSVKRPARISKRGNKRLREALFYPALTAARCCPQARAFVARLVARGKTPLQAQVAVMRKLLHAIHALWKTDEDFDADKLFLNA

SEQ ID NO: 101215 - protein, 346 aa, unidentified
MEHYAGIDVSLELSSVCVVDGRGKVVKEAKVASEPDALASFFKGLGFPVKLIGLEAGPLSQWLHAGLMRAGFEAVLLETRHVKAALSAMTVKTDRKDACGLAQLLRMGWFQPVHAKSIGSQEIRALLVARKQLLGRLLDVELSIRGILRGFGLKVGQVTRKTFEARIRELVTGQATLGRIAEAMLSARATLQAEYEKLHKAVLGFVREDAVCRRLMTVPGVGPVVAVTFKSAVDDPSRITKSKAVGALFGLTPKKYQSGEKDVTGGITRAGDEMVRTALYEAANVLLSRITRFSKLKRWGMDVAKRRGSKRAKVALARKIGIILHRMWIDGTTYRWAEAKPIAAQA

SEQ ID NO: 101216 - protein, 347 aa, unidentified
MRFYNNQHKYYCGIDLHTRKMYVCIIDEKGEIKEHRNMKTDRDAFLRAIAPFREDIVVAVECIFTWYWVADLCHNEGIPFVLGHALYMKAIHGGKAKNDKIDSHKIAALLRGGMIPMSYVYPEKMRATRDLMRRRNHLMRKRSELYAHIKNTNSQYNLPDSFGCLARPKNRTGIIEQFEHPSVQESITADMEMIRSYDAILSQLEKSIINMAIHHDPVSYTLLQTIPGVGKIIALIILYEVENIRRFASVQDFVSYSRLVKCAKESNGKKCGSGGSKIGNGHLKWAFSEAASFFANNSDPAKKYLDRNIKKHGKSKALSILAHKLGRAVYFMLKNKEAFNQSKLLNL

SEQ ID NO: 101217 - protein, 403 aa, unidentified
MEGPLISLDVSKGKSNYRFFENETDRKGKKGVIRHDIQGFDSIRDEAEKMEKRLRIKPSVIFESTGVYSDVVEKYFTDKGFDVYVISPLLSASMRKEGVRPAKNDSLDTLSIAKVFYSRDDLRKCSENDKKAERLREMSYELDMMNRRIRPMKCQFLRLLDKVWPCLDEVSDYSSRFMLDFIIAFGHPENIKTVKGVLSVIRKSEMGTAGRKDKIAQDLFDYCHTHLSAVSKDSSYVELLKRMAIELKAMAKKKSELIDRMAEEARNKDEFVRLLTIPAVAKTTALKIMARVGDISRFRNAEALVAYCGLDPRVYQSGKMTGEHRTITKKGDCILRSTLFLAVKLMVMLYPDTKVARFVAAKAKNGLSYKQAVVAGSAKLARIIYSMLTHHENYVEFNANIVA

SEQ ID NO: 101218 - protein, 349 aa, unidentified
MTIVEDARVITGGVDTHAGLHVAAALDPLGGLLGVQEFPATAAGYARLLDWLGGFGTVALVGVEGTGSYGAGLARHLAAAGVPVVEVDRADRQDRHRQGKSDPLDAVSAARAAQSGRASGAPKGRDGAVEAIRALMVAKRSARHERTQAINQARALIVTGPDELRARFAGHTPAALVEAIAALRPRPGDVPGHATRVALREPVRRDWFLDARLDRLDELIGPLVAARAPGLLSLHGVGPDTAALLLIAAGDHPERLRSQSSRAHLCGVAPIPASSGKVSRHRLNRGGDRQANHALWRIVITRLSSRPGHPATRAYAERRAKEGLSKKEIIRCLKRYVAREVYHQLRGGA

SEQ ID NO: 101219 - protein, 342 aa, unidentified
MKHYAGIDVSVERSSVCVVNAEGKIVREGRVVTEPAALIVWFSSRGLSLERIGLEAGPLSQWLYAALREAGLAVELLETRHVRDAFKAMPVKTDRNDARGIAQLMRLGWFRPVHCKSMAAQETRAILTARKLVQSKLHDVEMSLRGILRGFGLKVGKTTRSGFASRIAELVAGNPTLQDLAEGLLTVRAVLLHQFKGFERKVRALAGADTRARLLMSTPGIGIVGAITFVTAIDDPTRFKSSKGVGAHFGMTPKKYQSGETDRTGRISKIGDASVRAVLYEAAHVILTRPLRGCSKLKSWGMRIAKRAGMKKAKVALARKLAVILHRMWIDGTAFDPARAAA

SEQ ID NO: 101220 - protein, 323 aa, unidentified
MNHKVGKDNTVARFIGIDVSKQWLDVACLPERETRRFGNDCAGLEQLCAWIVPLAPELIVMEATGGFETNVATALAARGLALAVVNPKHVRDFARAFGILAKTDRIDALVLAGFAQKVHPPVRPLPDEERRELIDLVDRRRQLVTMRAEEKTRLTQATPAARQDIKEHIEWLNERLRRLDIDLTAKLRSSSLWKTKEQILTSAPGVGRVTVATLVARLPELGTLNRRAIAALTGVAPFARDSGQHRGRRMIWGGRADVRNVLYMATVTAARINPVIRSFYLRLKQAGKPPKVALTACMRKLLTILNTMVRTNQPWQTPPTQTI

SEQ ID NO: 101221 - protein, 330 aa, unidentified
MKKWKFTLGVDVSKHTLDISCSELNEHIKIKNGTEGFTQFLKWCRHLQINLPDSFLVLEYTGGYEYKLLQFCQAHTIVYARIPGLAIKNSMGITRGKNDKVDSARIAQYGEEKYKSLQPSKPLNAAIIRLKELLAFRKRLVRENAGYQSSIKEREHMYGKNTKDIIVKSLQQKQKANSKIIENIEAEMMHIVIEDEQMHVNFTLITSIKGIGKVNGLMTIAYTENFTSFTNPRSYAVYVGVIPFDHSSGTSIHGRKRVSHIANKELKQELNQAARSALVWDKEMNGYALNKLKTKCYKIVLNNIKFKLILRMFAVVKKGEMYVDNYKNVA

SEQ ID NO: 101222 - protein, 373 aa, unidentified
MGLMNTTIFVGLDVHKATVVVAVAEGLRGGEVRQVGTFPNSAEQIAKVAERLAKGGRRLSFCYEAGPCGYGLYRQLTGLGHDCIVVAPSLIPMKAGDRVKTDRRDAMMLAKLHRAGELTAVWVPDAAHEAMRDLVRARATSVRVLGKARQHLQGFLLRHGRVYAGKKGWTLAYRRWLATVRFDHPAQQVVMQDYIHAVIDAEKRVERLTRQIEELVPQWSMAPVVEGLQAMRGVGLIVAVTMAAEVGDFSRFANPRQLMAYLGLTPSEHSSGATVRRGGITKAGNALARRALIEGAWTYRMQARISRKLHDRNEKLPQGIRDIAWKAQLRLCARYRRLAAAGKAKAIVTTAIAREMIGFLWAIACQIQTRPAG

SEQ ID NO: 101223 - protein, 455 aa, unidentified
MGKRGEKRERRSAILEPDAAGIDIGAEEIYVAVPPDRDEQATRRFSSFTCDLYALAEWLECCRIRTVAMESTGVYWIPLFQILEERGFKVYLVNAHSLKTVPGRKSDVSDCEWIQYLHSVGLLKASFRPPEDICAVRTLWRHRGSLLQMAAEHTQHMQKSLSLMNLQLHHVLSDITGASGLAILDEILAGNRDPLCLAHLCNIRVKSPRETVAQALVGDYRPEHLFTLKQSLDGYRYYQKLIAELDDEIARLMHTLPNATEHPAPIPKRTKRTAYQRMGNDPLFDLRSELYRIAGVDLTDIPGVSAIAAQVILTEVGPDVSRFRNASAFAAWLGLCPDKRISGGKVLSTKTRKVKNRVAIVLRLGAKSLSRAKDYFGAFFRRMRARLGTAQAITATAHKLARVVYHVLHSKEPYTETIFHRCDEQEQQRAEMRLRKHAAQLGFQLLPISTNSAAS

SEQ ID NO: 101224 - protein, 450 aa, unidentified
MHSLETRLVRVFLHCVCLYRLKEPAGFRPGFLHLAISAGNAIYRNLNPSLKMNITHSIGLDVHKSSASYQLLDKTAHRVARGLLKPSTVAVKQLLEKLQADPATVLVVAEATGMLHLDFCEAFEASGCQVVAINPLYGRNRSAHNAIRDNKTDQLDAESLAELGLSDHEELLKRFAFHCPVERFALQRYVSSSKILRKSLTNTIKHTATTVHTLFPELDELGLSVNQVRVCRLLRQHPSPVRIAALDLAELRTYVGDKAATLKQAAAESFAIQAMGTTCEEGLLAMLLDTMEHLKEQLKEMNRKIDQLLVPCAGTETIRLVRTIPGFGAKTTPAILAFIPPEHLQWGSKKTITRKLQALFGADPRVKQSGRWKGTTKISKRGIEIARTALFQAAFCGMMHDPQLRCYYDSLKARGKHHKEAIIDLMRKQLHRLVAVLVDQKSFTPITQHL

SEQ ID NO: 101225 - protein, 334 aa, unidentified
MEKITTVGIDLAKAVFSLHGVDAAGRVVLRRTVRRDQLVEAVAGVSPCLVGMEACSGAHEWGRRFQAHGHTVRLMAPKFVAPYRKSGKNDGNDAEAICEAVTRPNMRFVPVKSIEQQALLTMHRVRQGFVVERTAIINRLRGLLTEFGVVLPLRSVTVRRQAAAAAETLPELARRAIGDLLDQLRVLDERIGGYDREIEAQANLCEPAQRLMKIRGIGPTTALAIVATVGNAREFKNGRQFAAWIGLTPSQYSTGGKPRLGHISKRGDAYLRNLLVQGARSVLNSAGMHQDRMSRWILELQPRRGYYRTLVAIANKNARIAWALLAKNETLRSA

SEQ ID NO: 101226 - protein, 350 aa, unidentified
MQIIGVDLHTRQQTVAMLNVETGEIVEKTLQHEGGSVREFYSTLAGPSRVGIEATGSMQWFLELMEELGIDCQVGHPAKIRAAEPRKQKHDRRDAALVLQLLVENRFPSIWMPSREQRDVRSLILYRHQWVRIRTRVQNALQAIALSHGLRRGSSLWSEAGQQAIASLSLSRYTAERRTALQSLYRHLEEQIDDLNRKVEELAWQRPQARRLMTHPGVGPITALATETFLGEPKRFLDGKAVASYVGLIPSEHSSGGRQRLGGLSKQGNPLLRFLWCEAVGHAVRKDVELQRFYQHKLVQKGLGKAKVAAARKLGIRLWILLRDQIDYQEFCRRGQLRQKHGGAHAGMPA

SEQ ID NO: 101227 - protein, 341 aa, unidentified
MQITTIGLDIAKNVFQVHGIDATEKVVVRKQLRRGQVIKFFEALAPCLIGMEACATAHHWARELTKLGHQVRLMPAKDVKAYVKRNKNDAADAEAICEAVRRPTMRFVVVKSPEQQGRLMQHRVRNLLMRQRTQLINALRAHLAELGIAAAQGREGVKELLAIVAQNGDSRLPVDAHASLIVLAAQLQAVQTMIGSIEKRVVRQHRSNEESKRLETIPGIGFLGATAIAATVPDAKVFRSGRDFAAWVGLVPRQDSTGGKQKLGPISKQGDRYLRRILVVGACSVLRRARQQPEKYPWLTQLLARRPFKVVAVALANKMARVAWALLAKGGTYRAPRLTAA

SEQ ID NO: 101228 - protein, 401 aa, unidentified
METMRDNAQRGKRFRELKATLRTNRQRLLVGLDIAQTAHVAHLRHAHTRVVVPTLTIPNTPRGFTELWTRIQQAQRATGCREVVCGLEPTGTYHQAVATFLGTQGADVVLVSSSVAYWNRRTQDGTWDKHDPKDAANCADLLEQGKVLFYRQPTGPLAELRHLVRCLRRARTELAACKARWRTPLRPALAPMGEPLPQRLWAELPVALQAWERAAPGRPAVPKGRLSLGLATACADLGAQVTAVQARSAVIEAALTPVAERLPADALLRSIPGVGATVAAILLAEIGDIVWFTKFSQLRKLAGLDIVRVQSGQFAGQARISKGGRSLLRWALYHAAVGAARTVAGRARLAALKAKRRGDRFAGFKAIVELAAQQLRIVWGVWRSGPPYDPTRAGGLRRQRR

SEQ ID NO: 101229 - protein, 311 aa, unidentified
MDATVVVGIDVSKDRLDVHVLPSGENFAVARDEEGVSKLVARLAALGPYAIAMEATGGLESLVAASLNGANLPVIIVNPAQVRAYAQALGKRAKTDAIDAAVIARFVEATKPVIRALPDADTVLLAQLMTRRRQIVQMIVAERQRQTQLPTRHLRRSAASLIKALQRELDVLDRDIDSSVRGSPIWREKEELLRSVPGVGPIIARTLLAEMPELGTLTRREIASLAGLAPWTRQSGRWRGKSFTGGGRAPVRAVLFMAALVGARFNPILKAFHQRLIAAGKPKMVALIALARKLLTILNAILRDNSPWQSA

SEQ ID NO: 101230 - protein, 342 aa, unidentified
MEKVSIIGLDLAKRSFQAHGALAEGGVAFRKKLSREKVLTFLAEQLRCVVAMEACGSAHHWGRAIRDLGHEVRLIPPAYVKPFVKRQKNDAADAEAIAEAASRPTMRFVAVKTEEQQARAMLFRTRDLLVRQRTQLINALRGHLSEHGVVVPQGPANVKVLEEAVEDQTTSLPLLVVELARVFIDQIEGLSKKISELEKATAHEAACGETTRRLQTMPGVGPITALAIETFAPPMDVFKRGRDFAAWLGLVPRQHSTGGKQVLGKISKMGQRDIRRLLIIGAMAVVRSALRKGAPEGSWLQRMLARKPKMLVAIALANKMARSVWAMLAKGEDFRVPVVAVS

SEQ ID NO: 101231 - protein, 426 aa, unidentified
MKSNSQNAKIEAITEKTMIIGIDVGSETHYARAFNWRGYEFSKKPLKFSNTEEGFKTFRIWISDLKKKHGMNKVIPGMEPTGHYWFNLGKFLQDNGMRPVHVNPHHVKKSKEMDDNNPSKNDRKDPKVIAGLVNEGRYFYPYIPDGIYAEIRALSGLEVAARNEITRLKNRIARWFCIYFPNYKDVYGDIGAVSGVMILKAAPLPEDIVRLGVDGVNQIWRDAKLRGVGIKRAKALVKAAEHSIGSREAKEAAGMELNILLSDYERQAAREAKLMEMLREKIAEVPYVDKLLEIRGVGIKTVVGFVAEVGDIRRFDDPRQLQKLAGYAIVKNESGKHKGESHISYRGRKRLRYVLYEAAISVVGHNQEFRSIHEYYTTREKNPLKKMQSLIAVACKLIRVFYVILKTGAKYDPAKMIKDIRRPEAA

SEQ ID NO: 101232 - protein, 428 aa, unidentified
MSNQELIRRKQYCQIVKEITGSDQYMVVGIDIGKDKHHAFMGTATGKSLFRKLIFENNLEGFSKLLKTSNLIKNRNNLSKVVYGLEPTGNYHKPLARYLIRSDRNVVLVSGEAVKKNRSLLDGRWDKNDTKCAANIADLVSRGRCLYYDSPSPGIIELRSLLSLRKRLKREDHSFRMRIRNNLLAQYFPELDRFYSACESESLAIVKWCLEPNQIAGMAFEPFFQMVTRTRRGPAQLLRLRKIHQQARESVGCPIGAAAAFEAQLLVEKLEQVRQQLKDTEAAIKDVALEFDEYRYLLTIPGFGLYISSSVLSAIADPFRFKNRKQLLRMAGYDLCAKRSGKTSDKAIPVISKKGNSNLRYALFQAAKIASARTDIFRTYFAEMLRGRERERGIITKMRVKLAAKMLIIAWTLMKNKEPFNPAYLTIG

SEQ ID NO: 101233 - protein, 349 aa, unidentified
MEHYVGIDVSLELSSVCVVDAKGAIIREAKVTSEPDALVGFLRGLGVSIERVGLEAGPLSQWLHAGLTEAGFETALLETRHVKAALSAMTVKTDRKDARGIAQLLRMGWYRPVHCKSPGAREIRALLVARKLLLGKLLDVEFSIRGLLRGFGLKMGVVTRRGFEARVRELCSGQALLSGIMEAMLTARAELQAQFGKLHKSMLSIVRADSVCRRLMSAPGVGPVVAITFKSAIDDPARIGKSKAVGALFGLTPRKYQSGETDVTGGISRVGDEMVRTALYEAANAVLSRVTRFSALKRWAMEVAKRRGMKRAKVALARKIGVVLHRMWVDGTAFRWTKQAAEAAQSARA

SEQ ID NO: 101234 - protein, 457 aa, unidentified
MGKSLHIQGLKGTKFSQQLRGVNLEQVLIVAIDAAKLHQKALICNYFGDIIAKPFFFSVNHSGIQMLCDAIEQAVVSTGAVRLFLGIEATGHYYEDIVREMAKQGYLVQILNAYTTFEERASALNWCKTDDLDLVAIAHVLKNNKATEFRLAEGLQRQLHVLTRARRSEIRKRSTLRMEIRTLMDIVWREFQGYADHQHGRVQKIKVFSDFWGKASLFFMEHYPHPAAICKLGEAGLRELSIQHNLKLRATAIRKLLQVAAESLSPDEPTLRPELLLLRMKLQDLRAFDTKIHILEQEIEGLLLQTDGRLLLTVPGLGVSTAAELYAEMGDVSHYTHAGQLIKKAGTNPVVKQTGGSAGSYGKISKQGNSHLRYVAYLAGRSLCLHNPDLRTFYERLKSRGKHPRSIFVAMGNKMLKIAFAMLRDKKPFLSARPTCSLAQEMNKKLRYSCFLTLDIA

SEQ ID NO: 101235 - protein, 368 aa, unidentified
MKKRITFVGLDTHKNSIEVALADDGRNTEVRLYGSIGGDLASLDKMIRKLQATGTELRFVYEAGPCGYQIYRHLRAQGLQCDVVAPSMVPKRSGDRIKTDRRDACNLARLYRAGELTAIYVPQEDDEAMRDLVRGRQDAVNAQRKVRQQLGGFLLRHGFRYPGKCAWTLAHRRWLAGVRMAHPAQQIMMQEYIHSVEECTQRVHRLTEQILQLMPDWRMRPLVGALQALRGVAPVVAATAVAEIGPMGRFERPRQLMAYLGLVPSESSSGGSVRRGAITKTGNGHARRALIEAAQAYSHPARISRVMLKRQEAVPEPIRQIAWKAQLRLCARFRKLTARGKSRNRVVTAIARELSGFMWAIAKQVPVP

SEQ ID NO: 101236 - protein, 408 aa, unidentified
MNTLYVGIDVSSKSNVVYLMLPNGDKHSNFSVANSHEGSTQLVKRILSALASYSLDTVLIGLEATSVYGDNLVYFLREDATLAPFNRKIHVLNPKQVKKFHDAYNDLPKNDYVDSFVIADCLRFGRINKEVYLGDYHYKALQNLTRARFFAVQNLIKEKQRFMNVLFKKYSTMTQEKVFSDTFSTTALAVYDEFESAEALANMDLHELTDFIIEKGKNRFPDPDAVAKAIQKAARSSYRLPKTVNDSVNQVLSISITSMKALESQIKEFDKAIKAQMELLPNVLISIPGIGPVYSAGIVAEIGDINRFNSQAALAKYAGLAWKQHQSGGFEAEVTKLIPSGNRFLKYYLCEAALSLVRCDKEYSDFYHLKYKEVNRCQHKRALALTARKFVRLVFRLLKDNRLYCPAK

SEQ ID NO: 101237 - protein, 335 aa, unidentified
MHYLYYVGLDVSKETFDASLVAFEDANEMAHRKFANSRKGICSCLHWVEKRHGIRLVDVIFCAEDMGSYISEMAVCASDRTLNFNFSLISPLVIKYSMGIARGKTDRVDARRIAEYAITHYRKIALYLPAEKELCQLRTWLILRAHLAKQRVAKLVLLEKLDYKEKFADVSIQRSMLQEEIAYAETHMKTIEREMKELITADSNICRNYKLLTSIKGVGPITAIVMLCSTLNFTKITDHRKFACYCGLAPFEHSSGTSVRGGCHTSSMANRDIKVQLNRSALIAIRCDPQLKAYYERKVAEGKHKFSVLNAVRAKIAARCFAVVRRGTPYVALQI

SEQ ID NO: 101238 - protein, 428 aa, unidentified
MTQSSSTTSPTMWVAIDIAKAHNEVLIESPQGRRRHFRVANTLEDFAKFAALLSSSGYRCRIAFEATGDYHRPLAYFLGAQGFALSLVSSIAVARTRDALYNSWDKNDPKDAQVILHLLKTGTTQVYYDPLEHHYHDLQELANTYQQISLGKVRLHHSIVTHYLPLYFPEAERYLHSTRAEWFTQLLLLAPCPAVVLKWSREEFITLARRLNAHKNDKTRWLADFYEAARSSIGLPVAENSEAIRMFRVVLNEYLHLCRLRREMEEQVVARLSNHADFRRLQTIPGIGPILALIILAEAGNLRRFSHDQKFLKYCGLDLSTEQSGQFRGTTKLSKRGNARLRYAFWMAGAVAVRAKQNSFCQKFHDYIRRDPLNPDLRRKAYTAVAAKMARVVYAVVKTGTDYRRFPEATVPGGRIPSLRAVEAISTS

SEQ ID NO: 101239 - protein, 371 aa, unidentified
MSQPIRCVGLDVSKQRIAVAVAEPDGSVVEYGDIPNDPGSVRRLVEKLSQDAQLKTAYEAGPTGYPLHRQLTGLGIENLVVAPSLIPRRPGDRVKTDQRDAVQLARLLRSGDLTPVWVPDEAHEALRDLVRARDDARAEGLRAKHHLSKFLLRQGVTAPARVGQAWSARHQVWLNTLTFRDRAAQVTFEDYLACVRAATERLRRLDAALLECGTASPHLELLRALQAVRGIGFLTAVTIVAESGDLRRFRSAPAFMAYVGLVPSEHSSGSSRRRGHLTKTGNRLLRHVLGEAAHHARLQPTVSEALRQRQQGVPSEVVEISWRCQQRLHHKYRHLGGRIGRQRAISAIARELAGFVWAIGQAVQLAAVVAA

SEQ ID NO: 101240 - protein, 404 aa, unidentified
MGQVYVGIDWADDHHDIHVTDDTAKALDSFSIPHSREGMERLMKRVDKCSPDRESVLVAIESHQGLLIYALLEAGYSVHPINPKAMDRYRDRYRMSSSKSDTQDAMVLANILRTDRHLYKPLPKEVAADARLRQLTRTHKTLVQQKVKLLNQLTSQLKSYYPAALKLFSRLDHKVTLAFLERYSTPQKAFDASLEDLRGFFREQGYSHQRKIAPIYEALQQPSLRAPRELEEIHQTITLSLVAVIRSLSAEVEKLADEISHEFEVNPAHEIFSSLPTGEMTAARISGELGSDGARYPAREFVQTAAGTAPVTRRSGKTVVVYFRWQCNKHLRAALQDLARESVKRCPWAREYFAGQMRLGHKPSRSYRALANRWATIIWKMLQTGQCFDQSRLSKHLTKVPEIN

SEQ ID NO: 101241 - protein, 312 aa, unidentified
MTKLICGVDVSSGSLDVVLRPGAEVRRFTNDTPGIEALATFCREKGVALVAMEATGGYEKLAFVLLWRQGVPVALANPRSVRWFAEAMGLLEKTDRIDAGVIAWFAETKRLAPRPPASSTQERLEALVTRLRQLTDLRTAQTNQRRLVGEATVLAHFEEMLALIARQIRTLETAIAELIAGDPLWRELDKAFRTIKGVADRTVARVMAEMPEIGTLSNKAAAKLNGVAPLAQDSGKSNGRRPVRGGRAGLRSILFVVAEIVRRHDPDFAAFHKRLTAAGKPKKVIRIALAHKLLVRLNAKARDVRSRLAYPA

SEQ ID NO: 101242 - protein, 339 aa, unidentified
MNYTTVGVDVAKNVFQLHWVDADTGEIVSKQIKRSGFLEHFANRAPCLIGMEACGGAQHWARRLISMGHLVKLMPAKFVKAFVIGNKNDAADARAIWAATQMQGKEVAVKTEAQQAVVALHRIRQQKVKFRTAQMNSLRGLLTEYGEVMNKSRSALDKAIAGVLGKLSERLPAMLIDSLRELWNELETLDQQIAAIEQRLQRWMKEDRACKAIAEIPGVGLLTATAAVATMGDPKSFKSGREFAAWLGLVPAQTGTGGKVRLLGISKRGDTYLRTLLIHGARSVLFRMKEPGAWLAQMKQRRPANVITVALANKIARTIWAVLAHNTPYQKNHVSVVPG

SEQ ID NO: 101243 - protein, 371 aa, unidentified
MKSIAFVGLDVHKKTIAVAVASNATPRNGAEYRGEILNEPGAVRKLCDRLKREVDELHFCYEAGPCGYELHRQLLALGHACDVVAPSLIPVRTGDRVKTDRRDTILLARLHRAGELTSVWVPDCAHEAMRDLVRARDAAKQSLARSRQHLKSFLLRHGRSRGSRGWTLKYRQWLSDQKFDHPAQQIVLQDHIDAVSDAEVRVKRFDDQIAAFVPDWGLAPVVAALQAMRGIGFLCAVTLVSEIGDFTRFAHPRQLMAYLGLVPSESSSGPRTRRAGITKAGNSRARRILVEGAWTYRMNSRVGRHKVKLLDTLPKMVCDIAWKAQIRLCAKYRKLLARGANAKVVSVAIAREMIGFAWAIACHVQARPASA

SEQ ID NO: 101244 - protein, 355 aa, unidentified
MMLIGVDPHKSTSTATAVEPESNREVASIRIEATLREYRRLLTWAGRWPQRRWAIENAEGLGRHLASWLLARGEQVVDVPTTATARVRQLSRGGGRKNDRIDAAAAACVAALQGDARPLEAEGTTDVLGLLDERRANLSQARVRAVNQLHALLRALLAGGAPRGLSAAAAAALLRTVRPAGEAERVRKHIAGDLVAEIRSLDSRLKANAEVMAGMVKASGSTLTGTVGIGPVTAARLIGRSGRPSRFPSSAAFAAYSGVAPVEVASAEHARHRLSRSGDRQLNSALHIVAVTQIRTAGSLGNIYYRTKIAEGKTEREARRCLKRRLADHVWRTMIADEKRQRAKASGPASASDAA

SEQ ID NO: 101245 - protein, 339 aa, unidentified
MQTPRHIGIDLHRNQFTCCVRLENGRNYLTDWKLEDLPRFVKKLRPSDQIAVEVTGNTRLFHDAVAPHVARVVAVDPNQFKVISHSVKKTDPNDARNLALYLEKDLLPEVRMKDKTQAQLASLTQTRDTLVKLRTALKNKINNILSAHGINLEKEALSSEKKLREVLAMKFDAMIRIELKVIVEQIRSLNQSIAELETNADEGSKLERHKNLTSIKGIGPLTGSILLSVIGDINDFADEGKLAAYFGIVPRVSKSNETEHTGRITKRGSKLGRTALVQCALIAQRYSPYLKRHYEKVKARRGTGKAIIALARKLLGIIYRTLKNKWVFEDFPNFVLAEA

SEQ ID NO: 101246 - protein, 371 aa, unidentified
MTDEERTIYVGIDVSKAKLAIAIADGMNRDEVLSLGTIENAPASVAKLLKNLSNRTSRVAVCYEAGPTGYGLYRQVRAFGFECLVVAPSLIPVRAGERVKTDRLDAMRLARLFRAGELTPIWVPDETHEAMRDLVRARESAAEDQRHKRQLVSAFLLRHGRVYHRTKPWTMRYRRWLQCQSFDHPAHQIALQEMLQAERNAAERLDRLTGHIEALVPEWPLAPAVNALQALRGVALISAVTFMAEIGDVRRFDTPVKLMAYLGLVPSEYSTGKTTRRGGITRAGNAHVRHKLIEGAWTYRLPVRPGARKLYILREQPPEIQDIAWKAQSRLTARYRKLSQRGKRSTVITTAIAREMAAFMWDIARRTMPTS

SEQ ID NO: 101247 - protein, 387 aa, unidentified
MTKNKGRVVGLDVHPDSFAGAVVEGTDPAQARVLSTSTRVELEQLEQWALRHTSTEDKLVLEASGNAFAVAARLRAIGRKVEILDSHRAGKVGKVYCANDRVDAVKIARIYLSALSPIVWQPDAKTLERREIFSAYQAVVKESTRARQQLRSMLNEHCVRLEKGFRLCHPNAIRRLVALREWTPARTMLLQQLHGTLVAARRRRTLLRRHMAQEIVAEEALLRLTRLCGINLVTLYGVVAAVGDVHRFTHSKKLVAYFGLNPSVSQSGNFEGGGALKRHGRGALRALLIQSGKKLLEVNNPLQKWGLAVAARRGRNKAAVAVARKLCVALWHVLMGHAIGALERLDTLETKLSKFATEIGSAALTAFGYHNKADFVQKKLYVLRTYP

SEQ ID NO: 101248 - protein, 338 aa, unidentified
MKAYAGIDLHSSNNYVGVIDEQDRRLYGKRLPNNLDDVLMALDPFKEDLEGVVVESTYNWYWLVDGLEEHGYKLHLANPSAVKQYEGLKHTDDKWDSFWLAHMRRLNILPEGYIYPKEERPVRDLLRRRLLYVRHRTAHILSLQSMIARNLGIRISGSTIRAMKEADAAKMFDQPQLALAAKNSMAVIRFLKEKIKIIEKEVKSQIKLRKEFRMLLTITGIGDVLGSTIMLEVGNIHRFPKAGNYASYCRCVKSEKLSNGKKKGENNKKNGNKFLSWAYVEAANFTIRHCPKSERFYQRKKAKTNGVVAIKALSNKLARASYYVMRDQVPYDAKKLFG

SEQ ID NO: 101249 - protein, 340 aa, unidentified
MMTTTIGLDLAKSVFQVHGVSSEGQVTFRRKLRRSELMSFFRALPACLIGMEACATAHYWARELAALGHEVRLMPPSYVKAYLRRQKNDAADAEAICEAVTRPTMRFVPVKSAERQAILTLHRTRELLVRQKTTLIHAIRSHCAEFGLVVPQGARRIFDLLQLVRDADPLTLPETAVVTMQMLGAQLDALSVQIRTLERRLLAWHRENQTSQRLATIPGVGIITATALAASISDPSLFRSGREFAAFLGLVPRQNSSGGKERLGRISKKGDGYLRKLLVVGATSVIRRARTGVTPSAGWVQSLLKRRPSRVVTVAMANKTARIAWAVMARGESYRPMATV

SEQ ID NO: 101250 - protein, 481 aa, unidentified
MKTKPPEKIQKATSPSTRGHWNEMNRKQRREMMRQIQSEDLSVEVVHPHAAGIDIGNESHYVAVPPTRDRQPVRHFGCTTVELKALAEWLKQCGIQTVAMQSTGVYWIAVYDILEATGLDVYLVNARDTKNLPGRKSDVQESQWLMKLHTYGLLRNSFRPSQEIRTMRTYWRQRNDLIRAAVSHIQRIQKALTQMNIQLGNVLSDVSGVTGQATLKAILAGERDPHKLAALRDPRVKASEEQIARYLEGNWQEDLLFVLKQEQAGYEFCQQQIAECDRQLEQYLQLREDRSQGASLPQEMRKGRLVRKKGNKPVFALRAELFRITGTDLTQVDGIDVVTAATILSEAGWDMSKWEDEHHFVSWLRLCPDNRISGNKVLGKGRLPTNNRASIALRMAASTLRLSNTYLGAQFRRFRTKLGAPIAIKAMAAKLARLVYRMLRYGIKYVDQGAKIYEAQHRQRQIGQLKWNAAKLGFRVVEAAA

SEQ ID NO: 101251 - protein, 342 aa, unidentified
MKFNQLTTNFVAGIDLHKTPVAIHILSKNDISLYQKTIRKNMRRGLKRILLKYKDDITVCVESTYNWYWVADLCLQLNIPFEIAHAYYAKKKMLGKNKNDKIDAFGLASMLLHEELPIAYNYPPEMRATRDLLRLRCSLKKMRTGRLQHHSCVEDQYIMSEISLEEAGYNEKTIKDITTNMGVDERCIDFLTVQINGLEKHILGRAHIHDEDAFIRLKKIDGIGNILALTLLYEIHTVKRFRSQQEFSSYCRVVNPQCESAGKKVGIGNKKAGNKYLSWTMQEIVTYSCRYNKRIGEYFKKLERKKGRKHARRILAHKSAIAIYNILKKRIDFDIDKFLKNA

SEQ ID NO: 101252 - protein, 451 aa, unidentified
MDPGFLEHLRLSPRAVIGSGARFLEFLLRGPHVDDATLEEEMELLHRRCCGLDVHKETVVACLRLVADGKVTTEVRTFQTTTADLLRLSEWLAANDCTHVAMEATGVYWKPVWHILDDGEFELVLANAAHVRNVPGRKTDVNDAMWLAELLAHGLIRASFVPDTQTQEMRNLLRTRKQLVREQSSHVLRVQKILEDANIKLDSVLTDLMGKSGRAMIEALIAGETNPAKLASLADRRAKASHEEFREALRGRVTKHHRFLLRLHLNQIDALDAAMATVDAQVEANLGPFRTAVELLISIPGIKNLGAHVIVSEIGIDMSRFPSHAHLISWAGICPHNDESAGKRRSNRLRKGAPWLKTTLVQCAWAAVKKKDSYLQAQFYRIKARRGPKKAIMAVAASILTAIYHMLKDGTMYKDLGRNHFDRRSTDKQKQRLVKRLAELGYVVEIKPLAA

SEQ ID NO: 101253 - protein, 348 aa, unidentified
MRFYTRTHRHYCGIDLHARAMYLCILNRDGEILLHQNMKTTPEAFLSAVAPYRDDLVVAVECIFTWYWLADLCADEGIDFVLGHALYMKAIHGGKAKNDKIDAHKIAVLLRGGMLPQAYVYPKRMRATRDLLRRRNHLMRKRADLLAHIQNTASQYNLPPLGTRVDRQGERATIPAHFPDPVVRRSIELDLSLIGHYDGLLKTLEQELALMAKGHDAFSYHLLRSVPGVGRILSLVLLYEIEDVNRFPRVNEFLSYARLIKAQKSSAGKIHGHSGGKIGNPHLKWAFSEAAVLFLRQNPDGQQFVERLAKKHGKGKALSILSARLGRAVYVMLKRRQPFDPERFLAQT

SEQ ID NO: 101254 - protein, 411 aa, unidentified
MKRVIGMDIHRTFAEVVIWEAGQLRPAGRVDMSRAGLEGFGRTLSKEEDEVVIEATGNAMAVVRALEPHVARVIVANPTQVKAIAYAQVKTDKIDAGVLASLRAANFLPEVWLPDTDTERMRRQVARRNQVVRHRTRIKNEVHAILHAHLVPCCPHDLFARVGRDWLGRQTLPDDERAAVARHLRELDRLGEDLDVLDRDIAQAAINDPVVKRLLTITGVNLIVAAGLVAVIGDVRRFASSEKLVSYVGLNPRVRQSGLGLAQHGRISKQGRSHARAMLVEAAWAAAKAPGPLRSFFLRIRARRGHQVAAVAVARKLAVLCWHLLTKEVDYQWARPALVANKIRAMELQAGQPARKGNKRGSTYVYNVKELRDREIEVARHAEQVYEQFVRGWQRRAPTKRRTGAANEERL

SEQ ID NO: 101255 - protein, 370 aa, unidentified
MNSIIYVGMDVHSSNYTLSCYTFENDQDFATVQVEPDYRNVLKYLERVQENYGGPCEFRCGYEAGCLGFTLYHQLTSHNVNCTILAPSTMPSRKGEIKTDKRDAMKIARCLAHNTYSAVHIPTKEDSDVKEYIRMRDAHKDELKHMKQRILAFCKLHDLRFAGGKNYWTQRHLGWLKSVAMDGMLREIMNEYLLTFQELTDKIERMDARIAELAAGPNYAEKVGKLSCFIGVRTHTALALIVETGDFNRFARAEQYAAFLGLVPGEHSSSTDVNRLGITKAGNTHLRRLLMESAQCYSRGQVGYKSKQLKARQYGNAPEVIAYADKANERLRRKFYKLVLKSNKKHNVAVAAVARELACFVWGMMTDRIA

SEQ ID NO: 101256 - protein, 370 aa, unidentified
MTQCSKAEKQLTAGFDLGDSYSYLYVVDTTTGEVIEETRLPTNPETFHRYFADREAMHVAVETGKHSPWVSRLLAACGHEVLVANARKLSFIYRNERKSDRSDAENLARVARLDPKLLAPIEHRNETAQADLALLRSRDTLVKTRTQLINHVRGVVNSFGNRLPKCSSAAFHNKVVDHLPEPLRPALVPMLATLAELSQQIESCNETIQRLVEERYPETQTLRQISGVGALTALTSILTLESPSRFKNGRQVGAYLGLTPALHQSGDANPRRRISKAGDELLRHLLVECAHFIVRPSSPDSDLKRHGEKLMQRGGAYARNQAVVAVARKLAVLLQHLWLTGGVRWCVTGDAAFAEKPFAEQVLKKGVGTC

SEQ ID NO: 101257 - protein, 318 aa, unidentified
MAQNGAIVGIDVSKDKLDVALRSAKVAAIFANNGDGHRELLTWLVHHGAAKVVMEATAGYEMACRKFLMKAGLEVVVVDPKRVRHFAKSAGQLAKNDAIDAQMIAWFGEVFDDLTGKAQDDEREELEHLLTTRRALGLMQAKVENWSGHERPKLVQKAYQALLRTLACQIDKLDDAIAAQINGTARFAERAEIIRSVPGLRDVSAAGLIAFLPELGRVDRQAAAALLGVAPFDDDSGKHRGRRVIMGGRRKLRTLLYMPLVGAATRHNPVLKAHYQRLLARGKEPKVALMACMRRLIGILNAMLARGEKWDPSKHALA

SEQ ID NO: 101258 - protein, 324 aa, unidentified
MSDSLDIGVDVDSKEFVPAVADRKAGDRVANTRAGIAKWLKTLPQRCRIGMEATGRYYELLARMAGQAGHVVYVIDPRLIKNYARATGSRGKTDAMDAQAIARYVKKESDRLREYVPRTDEQQQMHDLLRKRRALVETRARLEQSFGVSKSDPGELSDLFCALAGTLSELESELQRLGRDGEHGALYKRLLTIPGIGPAVASHLIYYMTRWPLANANAWIACTGLDPRPNESGGRTGRRRLSKQGAPMLRQMLYMAAMGLKRCRRGQPLYDELSKRGHPSTAVFNILARKLARIAWGVFKSGRDFDPAMLKVGQACFQQASPRT

SEQ ID NO: 101259 - protein, 338 aa, unidentified
MKNIKYFIGLDVHKERTSYCVRDKLGNILIEAETATLYSELEPRLKPYLAYSLIALEASTTYYTLYQTFLKKGYRIKVANTIQLRQLIAKNDKLDAQRLAEMLRLGTLPCSYIPEERIQHLRSMVQMRHALMQEKVRCNNRIQAFLDRNGVVMPPVKAFSKKWKHALMQHLGTGTVSMELRYEYNHYVYLEKTNEQADQEIIGYTKTYWKVEYNLLRSITGFGVLLPCYVIAFVHPIERFLSNRKLRRYAGVIPLSKESGDTTSPGRIPKTTSKALLRWALVQAANTIGKTNTRLGRYYRRKKNQKKKSGIAKIAVASTLVDIIYKVLTTKKPYVSTC

SEQ ID NO: 101260 - protein, 342 aa, unidentified
MQQSIYVGLDLGSSRCHQTVINADGSLQMSRSIPTSEQHLRRAFSALGDHVRVHLESGELADWVYSVIKPLVAEVVVSHSRTLAWIGKDSQKDDSVDAGKLAELLRLNRAHPVYYEPCDIRRTFKQLVTHYEQMSREQARLKSKIKARLRTLGIIRSDARLFTKSGQVLLLAELKEPSIERMLAQTFAVLNQMLDVLGQAKSAMIAASNQFPEVRLLQTAPGVGIITACRFVAYLQTPARFSNKRKLWRYCKLGITRRESNGKRSAHPRLDCAGVGSLKDCSRKIFEAARRTKKDNSFKRAYEQSLANTKNAVHARLSAQRKILSTLRAMWLAMQPYRAGDT

SEQ ID NO: 101261 - protein, 412 aa, unidentified
MLFVGDDWAEGHHDIEIVDDEGKVLVRRRLPEGLEGVTRLHALVAEQLPDDWIDRDPEQAAALVKVGIETDRGSWVGSLVAAGYEVFAINPLSVARYRERHSTSGAKSDAADAHLLAEIVRLDRAHHRPVAEDTDLGEAIKLTARTHQSLIWDRSRHVARLRSTLREYFPAALLAFEDLDAPDALELLARAPDPDQAARLSAAAIAASLNHAHRRRVEDRTKRLRSILHAPELQQPPVLQNAYAAVVTSEVAIITALNAQIDRLGAVVGEHFGRHRDAEIYASLPGLGVILAARILGEFGDAPGQYADAKARKNYAGTSPVTRASGTKKIVLARYARNRRLGDALQQWAFCSMRGSPGAKAYYQQLRARKIGHQAALRQLANRLVGILHGCLKTHTTYDEHTAWAHILTATA

SEQ ID NO: 101262 - protein, 418 aa, unidentified
MTERLAVGIDVSKGKSTVAIVTYDGEVIRKPFDVKHTNSDLKDLIKELKSYDGEVKAVMECTGRYYEPIARRLSGAGIFVSAVNPKIIKNYGTRDLRSSRNKTDKIDSMKIADFTHHEWLKLREYSAMDDLREQLKILNTQYDFYDRQATACKNNLKSLVDTTFPGCYSLLNYSTPAKADGHKKWVDFVRTFYHAECVSSLSRNKFEERYRKFCKDNRYNYDEDTCRKLYETAKEAVPIMPKDMITKNIIISAADQLISVSSTLRSIGTRMNEVASQLPEYDIVMSMDGVGTTLGPQLMAEIGDVSRFKRRGQLTAYAGVDPGTNQSGDHNSESVSTTKYGSPRLRKALFNVMDSKIKRAPAGDPVYEHMNKLRAKGKDYYVYMTAGSNKFLRIYYGKIKEYLKSLEQPASEEDSSEE

SEQ ID NO: 101263 - protein, 409 aa, unidentified
MELLNARVAGLDVHQASVVATVRVPGDAGARLTVTETFGTMTTDLVALRDWLQAYGVTHVALESTGVYWKPVYYVLEDAFTLLLINMVTLKHVPGRKTDVKDSAWLAQLLECGLLRGSLVPPPPIRELRDLTRYRVQQVRDRAQEVNRLCKVLEDAGLKLTSVLTDVMGASGQAMIRALIAGTTEPAVLAELARGRLRQKLPALRQALVGRFRAHHAFLLEQILAKIDFLDETLDRLTAEIDRHVAPFAPMLTALDTIPGVDRIGAVSILAETGGEMRAFPTAAHLCSWGAMCPGQNESAGKRRTGKTRTANRYLRATLIQAALGATHKKGSALQARYQRVRRHRGHKKAVVAVGHQILEIAYYIMRDGVTYDELGADYFQRRDAERSTRRHVRQLEALGYRVTIERAA

SEQ ID NO: 101264 - protein, 346 aa, unidentified
MKRYIGVDLHTNSFTCCFLQEGEKEIIRTWSLQGGGLEQFIKGLAKEDEVAIEATGNAAHFCNMVEAHVARVVVIAPWQFEVIRRSVKKTDKHDARAIALFLSKDMLPEARMKTEENAQLSSLISTRSQLVKLRVSLLGKVHGMFVRHGLKVKKEALTSKCGFARHVEGYSGWSTLERCELAVIESQLGALRENVKQLEKTITDFAKDLPGYENIISIKGIGPLSAAVMLSHIGNITDFKNVGKLAAYFGIVPKVSNSNETNNSGRITKRGNKLARTTLVQCTLIAKRYSPYLHAFYEQIKSRRGTGKAIIATARKLLNTIFHTLKNKWVFEDFTTFSKISTCNQS

SEQ ID NO: 101265 - protein, 319 aa, unidentified
MAQNDLVVAGIDVAKDKVDACIRALSQRRTFESTAQGRRQLICWLRRHKATKVVMEASGGYEREWAKALREKDVEVRIVDPKRVRHFARSAGRLAKNDTIDADTIAWFAETFVEAPGQAYDAEREKLMQIVNARQGLLEMQTELQNRGEHSVPNVVQRMQARLLKKIAAELATLEAAIAAMIKATAHFAELAEIIQSVPGLGEITSAGLIAAMPELGRVSNKVAAALLGVAPYDDDSGKRRGERQIKGGRRRVRNVFYMACLGAATRHNPALQAFYRRLLAKGKQPKVALTACMRKLIVILNTMIARGEKWDAQRHAVG

SEQ ID NO: 101266 - protein, 367 aa, unidentified
MKKVSTAARKQSRNFSQQKLTIGLDLGDRSSCYCVLDETGSIVLEQRVATTPKALPAAFGAMPRSRIALETGMHSPWVSRLLSGLGHEVIVAHARNVRLIGESRRKDDRLDAQTLARLARIDPELLSPVKHRSAKAQADLTVIRARAGLVRARTALVNTARGLAKSYGERLRGCNVRNMNPEKAEGLSPELRAALQPLLAGLESLSEQIREYNERIENLAQESYPQVAVLKQIKGVGTLIALTFLLTLEDPHRFRKSRDVGCYLGLQPGRRNSGQSEPQMHISKEGDPYLRTLLVQGAQHILGPFGADCDLRRWGLKLAERGGKSGKKRAIIATARKLAVLLHHLWVSGEVYDPLHNSSRVAIAAAA

SEQ ID NO: 101267 - protein, 365 aa, unidentified
MWEAPVKIQRTSVGLDVHARSVLGCGLDGDTGEVFQRRLTPDHGEIAAWLGDLPGPVAVTYEAGPTGFGLARALAAAGIHCEVAAPSKLIRPAGDRVKTDARDAAHLARLLHLGQITAVTVPTATQEAARDLVRAREDCRGDLMTARHRVSKLLLRQGIVYSGGKAWTGRHELWLRAQRFDHPTLQLSYEAAFDAMLACVDRRNRLDDAITAMAADSEFTPVVHRLGCIRGVATLTAFGLAVEIGDWRRLTGRSIGAYVGLVPSEYSSGDSRSQGGVTKTGNGHVRRLLVEAAWHHRTRYRPGAEMRRRWDLASPAVRARGQAANRRLHSRWAGFDARKKRPVIANVAIARELAGWCWSLAVMPD

SEQ ID NO: 101268 - protein, 355 aa, unidentified
MKPVKYIGMDVHQATISVAVLDDRGKLIMECIVETKACTILEFLQGLQGRLWVTFEEGTSAAWLHDLLKPHVSHLVVCDPRKNALLKDGSKSDRIDARKLAELLRGNQLSPVYHGEHGLRTLKELGRSYLAISQDLVRVMVRVKALYRSWAIPCSGKQIYAVRHRASWLEKIGEAGVRRRAEFYYQQLDGLRSLRQEVRRDLLLESARHQATKRLRQIPSIGPIRAALLIGLLQTPHRFRTKRQLWAYSGFGIETHDSGEHCYVDGELRRAKKKASVRGLNRNYNPDLKNLFKGAATQAAVKPGPWQEFYAALLAKGIRPEMARLTLARKLATITLTMWKKGVDFDARQLKSQAA

SEQ ID NO: 101269 - protein, 429 aa, unidentified
MNYTQNEKIEQVTDSTMVVGVDIGSQIHYARAFDNRGRELTKHIFSFHNDLEGFNSFNLWAETLKTENKKTAVLIGCEPTGHYWFAFAKYVNDHQKRLVMVNPFSVKKIKELDDNSPKKTDSKDPKTIAKLVVDGRYSIPYMPEGIYAEIRDLVYSRDRIMKQHNISANRIQRWLAIYFPEYLGLYTRFDAISGLAVLEKAPLPKDVIALGVNGIRKIWHDKKMRGRGVTEDRAKTLVEAAHNSVGLDGGIGTKSELYMLLEEHRLWTSQLEAVNKVLEEMILKVPHVEKLLAIKGVGSITIAGFIAEVGDIRRFDSPKQIQKYAGLELVENSSGKHKGRTRISKRGRRKLRKILYQVMVPLLARNKEFRGIYDYYVTRVKNPLKRRQAMVAVSCKLIRVFYAVLTKGVEYDRFKMMSDIHRKSDIIAA

SEQ ID NO: 101270 - protein, 340 aa, unidentified
MRVQKVARSCESGKSAIVYDQYIALDWSLKTMAIAHMSRRDDHPRIFERETDMKELKEYLGSLKGRTIITLEESGTAHWLYLELLDCVERIVVCDPFHNKLLWHGPKTDKIDAGKLCELLRAGLLKEVYHSDNGVYELRTLVSAYQDVVCAGVRAMNQKKALALGHRDKGKSASFIGEMLQENIDLYQRSKQQYERRLATVARHNTLIRYQREIDGIGTIGAVRIVATVVDARRFPCAGKYLSYCGLVKHEKLSGGRSYGQRKPRYNRILKSVYKTAALAALRGANPMREYYDHLLAQGVAEHNARHGLARYIARISYGMLKSGTRYEPYRWRGEAKKVI

SEQ ID NO: 101271 - protein, 407 aa, unidentified
MNGNGKRYIGLDVHKHYLITLGVDENLEVVMPARRVELSNLESWMKKNLTQQDEVVLEMTTNTWHLYDELVEYAGSVTVVHPPHVALITRSQVMTDKIAASILARLLAKGLLVGIWVPPQEIRELRGLVAQRQKMTRLATQAKNRLHAVIQRHHLVPPAGNPFAKAKNSWWQALPLGKLEKMNLQSDLETLQFAEKQEARLQEEMTGIAAENEDIGRLLHISGFGVITAVTVYAAIGDISRFEDAEHLVGYAGLGTRVHDSGLTMRTGKITKAGRRDLRVALVEAAHVAANSHPHWKAELARLQPRLGYNKAIVAIARKLLVTVWHVLARKVADRFAEPEKVSKKMLHIAYEVGKENRAGKSAAQFARERMDTLGLGSELTSIPWGTKKPIPLPPSKLKKESAVPNK

SEQ ID NO: 101272 - protein, 411 aa, unidentified
MQVIHERCAGLDVHKKTVVTTIMLTQADGSVQEQVRTFSTMTADLLALDDWLRSYGVEVIAMESTGVFWRPVFNLLEDGREVILVNAQHMKAVPGRKTDVKDSQWLADLLRHGLLKASFIPPKPIRELRDLTRYRKKLVQERAGEINRLQKVLETANIKLASVATDVLGKSGRSMIDALLGGFNDPEALAELARGRLRSKLADLRKALDGRVQPHHRVLLERILAHIDFLEESLAQLQAEMEHYLVPFEEATRLLMSVVGIDETAAASIIAEIGTDMERFPSDKHLASWAGLCPGNKQSGGKRLSGKTTKGNPYLRGILFEVAWAIAHTKDNYLSAFYHRMARRRGKQKAITALAHKVLIIIYHILRTKKPYTDLGADYLEQRDRSRIEQHHIHRLEQLGYTVTLAPKEAA

SEQ ID NO: 101273 - protein, 346 aa, unidentified
MTIVETTRPVTGGVDTHADVHVAAAVDANGGVLGVASFSTTPAGFRELHCWLAGFGAVDRVGVEGTGAYGAGLARYLRRQDLAVIEVDRPNRQERRRNGKSDDLDAIEAARAALSGRASGIAKSADGDVEAIRALLVVRRSGRSARIKYLNQIRHLGFTAPDELRERLRDVHRDQLARTAAALRPTPGSDTIVYATKLAIATLGRRVLALEADAERLDRELEMLVRRTAPRLLEVYGVGINTAAILLVAAGDNPHRLKSEAAFAHLCGVAPLRASSGKTNRYRLNPGGNRQANHALWRIVFTRMSGDERTRKYVARRTAEGRSTREVMRVLKRYVARELYPHIVRA

SEQ ID NO: 101274 - protein, 409 aa, unidentified
MGAKEHVVAVPADRDPRPVRSFKAFTPDLYELAEWLQQCAVKTVALESTGIYWITLYEILEERGFEVLVVNARHVKNVPGRTKTDVLDCQWIQKLHSFGLLSGSFRPDQQIRTLRSLMRLRDNLVVQSTQSVHHMQKALFEMNVQLSNVISDIVGESGMRILEAILAGEHDPARLATLCTPRIKAARETVAKSLHGNWREELLFSLRVALDSFRFAQGKIAECDARITEHLAQFADRAVLETPPSSLKSELHRVCGVDLTKIPGIKEQAAQIIISEVGLDMTRWNTEKQFSSFLGLCPNNSISGGKVLRRSTRKVYNRAADALRLCSQSLTHSKTALGANYRRLKGRLGAPKAIVARAHHLARLVYRMLRYGRQYVEKGIAEYEIKFRLQRLKWLKHEAKSLDMQLLPA

SEQ ID NO: 101275 - protein, 354 aa, unidentified
MSIVADHYRFIIGVDTHAATHTYAIVESPSGKLRAQETFPTTSAGLERAAAWIGRRTEGDIESALISAECTGSYGAVMSDRFAQVGYRVVEAPTPSTKRLRGKGKTDTLDAITAARSTLVIDLDKLRDRRAGEVQTALKLLSVGREQMNADRLRAINALTALVRAHDLGLDARKPLTASQIKTIAPWRTRDEALGATVARGEAVRLAKQITGLDGDLKANQVQLTKLTTEHVPSLLDMHGVGAVTAAIIMAVWSHPGRIRSESAFAMIAGTCPIPASSGNTVRHRLNRGGDRRLNRAINTIALTRMRTDKGTREYVQRKIAEGRSKREIMRSLKRYITRQIHRVLTTNPPLSVA

SEQ ID NO: 101276 - protein, 406 aa, unidentified
MESTLTAVYRCVAALDVHQAKLTVCLLYETDSGDVVTEIREFGGFKRDRREMAEWVASFHPELVVMESTGIYWKSPYAALEWHGLNLAVVNARHVKQVPGRKTDIADAQWLAILARSGLLRGGFVPPQQFRDYRLIARQLQKLAGIISGEKNRLHKLLTDAGIRLSVVVSDVYGKSAKAMIMGLLNGETPEQLLAHADPRLKASPDELRDALDGELSDSHRFVIRELMAHIDELEARSLRFRQTLLSGLSAYQAILQNLQTLPGIDELGAALLLVEIGDDMSAFGSPAKLASWAGVCPGQNESAGKRKSTRTRKGNPYLRRILCEAANAASRTRCGLQEKFKNLMIRRGRKRAIFALAHKLLKMVFLLIQRGDYYRDAETNYEALTVQRNAPRWIKKLIQYGYITV

SEQ ID NO: 101277 - protein, 432 aa, unidentified
MPKHLEHINPHAAGIDVGSRSHFVAVPPGSCEHPVREFTGFTDDLHRMADWLLECGVTTVAMESTGVYWIPVFEILESRGLEVRLVNARHVKNVPGRKSDVLDCQWLQQLHSYGLLEGAFRPSEEVCTLRGYVRQRGNLVRYAAAHIQHMQKALSQMNLQLSTVIKDISGVSGMRIIRAIVGGERDPVSLARLRDGRCKSSESTIARSLHGNWRREHLFSLKQALELYEVYQAQIAACDREILEQLARFEGSSGSGGAPPVDLNEALLRISGADLTAIDGIDTLNALKIIAEVGTDMSRWKSAKHFASWLGLCPGTKISGGKRLSTKTKRIVNRAAVALRISAVSLKRSKSALGAYLRRQWARLGGAKAVTATAHKLARLVYSMLKHGSAYVDLGQSYYEERYRDRVVKNLKRKANTLGYQLVRSAEQPASI

SEQ ID NO: 101278 - protein, 349 aa, unidentified
MRFYNQQHRFYCGVDLHARTLALHVLDAQGETVLAKTIPANPKAFLQAVAPFREGLAVACECMFAWYWLADLCLEEKIPFVLGHALYMKAIHGGKAKTDKIDAHKIAVLLRGGMLPQAYVYPKGMRETRDLLRRRTFLVRKRAEALVHLQNTNSQYNHPPLTKKLSYAANRAELDLPARFADASVKKNVELDLALLDTYDEHIREVELYLTRTAKVDDPQAFGRLLSVPGVGKVLALVLLYEVHDIRRFPEVGQFLSYARLVRCSHESAGKKQGTGGNKIGNAHLKWAFSEAACLFLRESDQAKQWLARREKKHGKARALGALAARLGRAVYHLLRKEQAFDIQRFFAS

SEQ ID NO: 101279 - protein, 330 aa, unidentified
MGVDVSKQSVDVCVLWGDDILLEKGISNTISCIESFMESFFKKHSFTASDVLVCAEYTGKYTYPLCLACERVRVDLWLENPYVIKHSGGLERGKNDRQDAKKIARYARRYEDKVCLFVLPEQAIGSLRELVSEQELYIVDKNKYQAQLTDEKGFMNPQDYREKSARLNILLKDLKAVIKQIERKIQKIIEGDETLSRQFKLLCSIDGVGERTAVKVIVETNAFRDFTDARKFCCHAGVAPFSYTSGSSIRSRNRVSHRADKSIKSLLHMGALTAATRTKGELHEYYLKKVSEGKNKMLVLNAVRAKLVHRMFAVIRNNKFYEKDYQNVLA

SEQ ID NO: 101280 - protein, 414 aa, unidentified
MIFRWFVGMDWAAEKYDVCVVDRSGKAIAKRVIKHSGTAIAELLDWLQEIAGGNPAAVAVAIETPRGAMVEGLVERGFGVFAINPKQLDRFRDRYSVAGAKDDARDAFVLGNSLRTDQACFHRVQLDSAQMLRLRELSRLQEELQVQENRLSNQLWEQLHRYYPQTLTLSPAANETWLWDLIEMAPLPLQAGQLKLVAVKRLLRSHRIRRVSAEEILEVLRAPALRLAPGAAEAASEHVLLLLPLLRSVHQQDDQVSQRIKHMLKELSDSVSGEGATPKHSDAAILLSLPGVGQSVGATMLAEASQPLAERDYHALRCYAGCAPVTRQSGKRKLVQMRRGCSERLRNALYYWSLGSLKEDWARQYYDRQRASGNEHGGALRSLGDRWLAVLIAMLKTGTLYDAARRGQPQAKAS

SEQ ID NO: 101281 - protein, 453 aa, unidentified
MSKPKPKRSGPERDITPTHPNAAAIDIGSRMHVAAVPTDRDTEPVRTFGTCTGDLTALADWFARCGVQTVAMESTGVYWIPAFEILEQRGFEVVLVNARDSKHVPGRKTDVSDAQWLRRLHEYGLLRASFRPKGELAALRAYLRQRERLLDYAASHIQHMQKALMQMNVQLQHVVTDMTGVTGMSIIRAIVAGERDPVVLAAHRNRRCHASVEEIAAALTGNWREEHVFALAQALELYDTYQAKIAACDTQTAAVLARMKDAAAKPVVQLPPARHRDRTANAPAFDARAALHAVVGVDLTQIHGLGPSLALKLVGECGTDLSAWPDAKHFTSWLCLAPSNKISGGKVLSTRTRRSGNRAAALLRLAAVTVGRTETALGAFYRRLSARVGKAKAVTATARKIAALFYNTLRHGMSYADPGASYYEERYRARVIANLQRRAKSLGYILQESPMPS

SEQ ID NO: 101282 - protein, 369 aa, unidentified
MSAVPVGAATLLWLETDERMAMSTMTETARCVTAGVDTHRDVHVVAVLDERGAELGCEPFAADPAGYRKALAWVRSFGRVERVGVEGTGSYGAGLTRYLHNQRVEVLEVSCPDRQRRRSHGKSDPVDAVAAARAAQSGEASAQPKSRTGNVEALRALRVVRRSAAHSRIDSVNQMRALLVTGPEKLRESFRDTTIWRMVTAAARLRPGDPTTPAGAVKFALRELAKRVQALEDELDRLDAIIGPLVKATAPTLIARHGLGPETAGALLVSAGDNPQRLHKESAFAHMCGSAPIDASSGVVVHKRLNRGGDRSANEALWRIVMVRMVSDPRTRHYVERRTKEGKSKREIIRCLKRYVARELYPYLVEERS

SEQ ID NO: 101283 - protein, 356 aa, unidentified
MSKRNTVNGGLTIGLDLGDKHTEACVVDGSGEVVETFRVRTTEPALDRALSRFEASRVVLEVGTHSPWVSRRVTALGHEAVVANPRRVRLIAENDSKSDGFDAELLARLGRLDPSLLSPLVHRGEPAQRDLVLIRARAGLVRARSQLINQVRGFAKSLGRRCPSSSAEAFPRGVRATLAKDLFPGLSAMLAMIEQLTAEVRSMDRAVERLCREQYPETAVLRQVKGVGPITALCFVLTLEDPHRFPKSRSVGAYLGLRSRQRDSGEQRPQLRITKAGDALLRRLLVTAAHYILGPFGPDTELRRFGLRLAERGGKSGKKRAVVAVARRLAVLLHRLWITGEVYQPLDYDAAMAKAA

SEQ ID NO: 101284 - protein, 355 aa, unidentified
MCAKKTGRIEDLAVVGIDIGKDTFHLVAFDRSGQLVMRKQIKRFDLNATFAKIPCCIVGMEACLSAHFVSRTLRGMGFDPRIIPAIYVKPFNKGQKNDYNDAEAIAEAALRPNLRTVSEKDQDQLDLQALHRVRARLVSRRTATINQIRAFLIEQGITVRSGLRALKNSFETILEQRRDEISPRMRGILIGLHGVWLWLDKRIENVSSEIEEISRTEENCANIMTIPGIGPMISTAMVASVGKGEAFDRGRDFAAWLGLVPRQFSTGGRTILGRITKRGSRYLRILFVQAAKVIMMRPYRWSDFSFGPWLTEAVACMPRNKAAIALANKLARTAWSLLRHGTRFDAPKDAAMEAI

SEQ ID NO: 101285 - protein, 360 aa, unidentified
MQRKINENSFNDQSFYVGIDYHKKSWKVTILGEKYEHKTMSQNPDPKILANYLKRNFPGGNYQAVYEAGFSGFNACRKLRELGINCIVIHPADVPTNQKERLQKTDKVDSRKLARSLRSGEFEAIHIPDNKLEADRALVRQRFRLVKDISRTKNRVKSLLFQFGIDIPGRFTSQQTRHWSKVYINWLKELPIEQESLKLTLDNYLRIGEIQRKELLTINRQIRKLSKTKYYQNNCRLLLCIPGIGLMTAITLLVELGDIKRFKRLDELCNFIGLVPSMYGSGEKMETGKIIKRGRKALKIMLIEASWQAVRKDPALMMKFNELTTTMKKNKAIIRIARKMLSRIRHVLVHQEEYELAVVQ

SEQ ID NO: 101286 - protein, 351 aa, unidentified
MKKNLKQVCAIDVAQKELVVTLGRLLEDLTQELYSRKTFPNTQKGFMALVLWVKKLAGEQTAIRFVMEATGVYHESLAYFLDSKGYEVSIVLPNRISNYMRTLEIKTITDKTASDAIARFGLERKLEKWTRPKKVFKTLRQLTREREQVIQMRTMAKNQLHAEQTEAEPNASSIARVKKQIAFLNEQEKEIKAEILALSKQDKEVEKSIKTICSVSGVGLLTAATTLGETNGFDLIRNKRQLASYAGYDVKEKQSGTSVKGKPKISKKGNKHLRRAMHLPALAAIQHDDRFKAIYARLVSKHGIKMKAVVAVQRRLLEMIYTIYKKNTPYDTGYLNKKEQPDQLEKIRAVH

SEQ ID NO: 101287 - protein, 436 aa, unidentified
MTQSKRRRPERDFTPTHPDAAAIDIGSRMHVAAVPPDRDTEPVRAFGTCTGDLQRLADWFERCGVRTVAMESTGVYWIPAYELLEQRGFEVVLVNARDAKHVPGRKSDISDAQWLRRLHEYGLLRASFRPKGELAALRAYLRQRERLLDYSASHIQHMQKALMQMNVQLHHVVTDIAGETGMGIIRAVVAGERDPAVLATHRNRRCHASEEEIAAVLAGNWREEHVFALGQALELYDAYHAKIAECDLRIEVVLQRLRDAAAKPAGRLPPARHRDKTANAPTFDARAALHAVLGVDPTQIHGLGPSLALKLVGECGTDLSAWPNAKHFTSWLCLAPANKISGGKVLSTRTRRSGSRAAALLRLAAVTVGSVGKAKAVTATARKIAVLFYNMLRHGMEYTDPGASYYEDRYRARVLANLRRRAKSLGYVLHEMPAPG

SEQ ID NO: 101288 - protein, 343 aa, unidentified
MQITTIGLDLAKHWFQVHGVDADGHVVARRRLWRSGVIPYFRSLEPCLVGMEACATAHHWARELTALGHTVKLMPPAYVKAYVKRNKNDAADAGAICEAVTRPSMRFVPVKDAEQQSLLMLHRARSLLVRQRTMLVNALRAHMAEFGIIAPQGLRHVEILTKTIAHEQERLPELARSILQTIVDQLNGTMARIREIEVRLTKWHRQSRVSRLLATVPGVGIMGASAIAATVADPSLFRSGREFAAWLGMTPRQNSSGGKERLGRTSKRGDKYIRSLLTAGAVAVLRHARTRPTRDGEWVRTLLARKPTKLAAVALANKTARIVWAVMMRGDGYQPKEVFGRAA

SEQ ID NO: 101289 - protein, 341 aa, unidentified
MQIVGGLDIHRRQITFDYLDVRNGQSRRGRIAPADRMLLRRWLEANVSNLPAAFAVEACTGWRFVVEELHRAGIEAHLAEPADTAAARGPKRRAKTDRTDARLLGELLAAGRLPESWIPPEQVLEMRARLQLFKDLREEHTAWVQRIHAILLHQGAPAIVGDLLGGDNRRRLAAGEQLSPAGREAVAAALRILDALDAELVPLRKQIAAFARRQPGCRALQAQYGVGEITAVALWAELGDTRRFSASRKAVRHTGLDITVHSSDGKRARGRLSRQGSPLLRWALFEAAQCAARPSSPDHAYYRQVADRLGGNRAALSVARKIARRAHHTLRALGDEAFASV

SEQ ID NO: 101290 - protein, 348 aa, unidentified
MKHYAGLDVSVKETSVCIVDENGQLCRERKVVSHPDDLVAMLSDPAFSLERVGVEAGPLSQWLFEGLAKAGFPVFCIETRHTKAFLDALQQNKSDRNDARGIAHMMRVGLFKDVHVKTLTSQKRRALLTARSLLQEKAIDLENEMRGLLRNFGLKVGKVSGGTFERRILELVEHDTELAEIMEPLLAARRKLREGLAKLEKRVLAEAKQDEVCKRLMTVPGVGPIVSLAYVSTIDIPSRFRHSRSVGAILGLTPVLKQSGEMSRVGHVSLRGDAMMRRLLYEAAQSMMTRVVKWCWLKAWAMNIAKRHGSKKAKVALARRLAVVMHRMWVDGTEFRWTREDTVSTAAA

SEQ ID NO: 101291 - protein, 409 aa, unidentified
MSSENCTEVFVGLDWAVHTHAVCVIDAAGAVLERFEIAHDRDGLAELMRRLARFGERVRIAIERPSGLIVDALVEAGHHVFPIHPNAVKASRPRYRSHGAKSDASDAYLLADLLRTDGHRWRELSPQSDSIRALRALVRTRDDLVATRVALGNQLQSTLEAFWPGAACIFADITSPIGLAFLKRYPSPASAARLSDAALGRFCRSQHYSGRRTPAELLARLHSAAVGLAGPLTNEAAAQLVRSMVAVLQPLVEQITHLTRRIERFVESLPDGQIIMSFPRAGHVCAAQILAELGDVRERFPSLDQLASEAGAVPVTYQSGKTRSVAFRWACNHRLRKAVTCLADNSRHANAWARGIYTAARGRGCDHPHAIRILARAWLRVIWRAWTDRKPYNPDLHVSAQKLASDQGG

SEQ ID NO: 101292 - protein, 428 aa, unidentified
MTAQRKCSAEATLVAIDVAKVWNTVLVEEPDGRRQRFRVANTRTDHDRLILFLKNQPTQCRVALEPTGNYHRPLAHRLLSEGFEVYLVSSVAAARFREAMFNSWDKNDPKDTVVILELLKQGRVLRYYDPVTAGIHDLQEISRTYAQVTLARTRLQHSILTHHLPLYWPEFGRYWHSSRASWFVSFLIRFPVPETVRRLDREAFIQQAWPLVGRKVNKKAKLEEIYELAFETIALPIAPEGFAVQAFRLQLERYLSLNKLRSQLERWAEEALGSNRDFELLRSIPGIGPVLALIILAEAGDLRRFGHHRQFLKFCGLDLAKSQSGASRGKEHLSKRGNARLRCAFWMAGGVAVRMRENSFRDKYQRYIRSDPTDPDLKRKALTAVMAKMARVAYAIVKTQTPYRTYFEAAVPSGSIPLSRAVEAVRTS

SEQ ID NO: 101293 - protein, 357 aa, unidentified
MESQEVKYVGVDCGKKSIEVVRINSENSLERRQFSTTESGINNLLQWLTLNDIVGLEAGSQSFRIAKSILNKGVQVIVLNPGNLATIYQSLKKTDKEDSLKIARLIQRFPIEELPVVPIPNDEEEDNRRLCTEQENWTRQLTQSKNRLHSLFTQAGLTHITKKHLRTKANREISVALLPSRYQKEAERILKVLDLVEQNLKLIEKEIQEALKKNKAYVQTIMSMPGIGMITSLAIMSYMGDCKRFSSAKQAAYYAGLVPRVDISGDTVRYGRIINRGCHSIRRVIVQAAWSLVRCQHGGKVKEFYQRLYLKKGAKKSIIANSRKMIEVLYVMIRTGKLFDSMPENILNRKLTQYGLM

SEQ ID NO: 101294 - protein, 405 aa, unidentified
MNEHLLVGIDVGCHSHQVAIAKSNGTYLKEFGISHNASGFNSLFSEITYYESTLKCPVVIGMEGFNGYARPLDQLIQQKGYTLYNINNLKLARFKELFSGPAKTDAIDARKIVEFMRIAPSFQEQRRAITEIKPGNGVNQTLKRLTRRRRQLVNEKINIQNRMQADLQSVAPGLVDLVKNVDSRWYLHFLTCRPSLRNLATMRKESLLKIKGVGKKYAAVIASWQKEAHFSTDVDLVSSMIIEDAKRILELMEAIATIENELEPLGEQSDLAVTIGSIPGFGLISSAELAGEIDNLSRFPSEKSLALYLGMAPLDNSSGKKEGCKIAKSVNTRAKAAMMVAVAHHSWQVEESKRYYEKKRAEGKKHNQAIRSLGRHLVRVIWSLIKEKRFYEIREENERNILKMA

SEQ ID NO: 101295 - protein, 331 aa, unidentified
MFPVGIDVSKNTLDLCMLYDGIKGRIKTRNIQNNRHSVENILRWLRLQHCGPEDVHVVMEATGVYHERLATELHDAGFRVSLANPHRSRKFARGMGIMTKTDKVDAYMLACYAFLKKPHRWEPPAPEIRYLGALLRRRDVLLGDALREENWLEKYLSTDTPADIISSCRRMAQLLREEVSNIERQIKAHIKACPALRRDYTLLTSIKSVGPQLGMHMLVVLRSHNFASAEQAAAFLGVVPIEKRSGTSVRSRPRMSKIGPPQLRAKLYMSALCGKIYNKRMRNIYDEICLWGKPKMVAIGALMRKLVHWCYGVLKTGTVFNDESLKQVLST

SEQ ID NO: 101296 - protein, 351 aa, unidentified
MIIIGVDYHPSSQQIAFMDQETGECGERELNHSDGEAERFYRELKERGVGVRVGMEATGHARWFERLLAELGFELWIGDPAEIKTKRVRKQKTDREDARLMLKLLLENRFPRIWVPSPENRDLRQLLWHRHRLVQMRTRIMNQLQAVAMNEGYRWKKKLFGQQGRALLEKLSLAPWASRRRKELLELLDQLDPKIAELTAAVEREANKRPEVVRLMTHPGVGPITGVAYVLVIGTPDRFPCGKKIGSYTGLIPCEDSSAGRQRLGHISKQGNTLLRFLLVEAAQAAARCDADWRRRYMHLMMRREKGIAKVAMARKLAVRLYWMWRNNWQYSQLVEFGSNAGKLGTVHGMK

SEQ ID NO: 101297 - protein, 473 aa, unidentified
MSKVSGMTRGDRKRNARRARLRGVLPRDGAVIGIDLADVKQAIAVIDHDVRVLARRTVRVKAFRLGEALDWAAGQARAKGFASVAVACEPTGPRWLQVQLLCAERGLPLVCVQPLVTHIAREQQDYTSHKTDEADCVMIARLAAELHCYLPEELDETWAHLRHLGRRRAALITSATASVQRIQDFLSVAWPTVTETCAQPVQSTTWLAALQVVTSRCGGQPGTLAAMGLEAFTALVRDAQHGWGGQRARASICRGVFAALTGTEGVVVAHRRGLLRRCADELGDLRRTRAQLREVEADMVVVLSELGLARLADIPGLTATGAAALLAETGDPRRYDSSSSLVKHAGLSPSENASGAFRGEAHISRRGRPSLRLTAWRAVWPMLIHNPVMAARYAAMTEAADAAAAAAGDAGTGQVTAAAATARARRAKARVACAASLLRWIYSIVVHNTSRDPAVASGAASSQHAARCQAEAA

SEQ ID NO: 101298 - protein, 391 aa, unidentified
MTYFIGIDIAKYKHDCFIMDQYGSVIRDSFSFSNDSAGFSLLLSVLHSLEPSYEKRIGFESTGHYGLNLKCFLEEHDLSFMEINPILIKRFSSATTLRRTKTDKADAALIASYLTTVEYITYPTQSYHIRNLKSLTRSRNALVKLRSGQLVMITNVMDKIFPEFKPFFNKSLKSATALYLLRNYTVPSRMASMNSESYRKMASKLRRTVSYARFTKLRELAKNTVGREDPCLTFELHTYLDIYQSLDAKIKEMETHIEEEFKEIRSHIQTIKGIGWISAASIYSEYGGIGNFQTPNQMLAYAGLDPSRNESGEHAYNGHMVKHGSSHLRYVLLNCAEMVIVHDPVFYDYYRKKREEGKPHRVALSHVARKLIRIIFFLEKNNIDYDSKKMR

SEQ ID NO: 101299 - protein, 416 aa, unidentified
MDTMYERCCGLDIHKKTIEACFRSGKKKTHMSFGTTSAELRKLTMWLVENDCQSVAMESTGSYWKPIFNILELSGTDMKIIVVNARHMKNVPGRKTDVNDAEWIAELLQYGLLRPSFIPDREQRELRELSRYRKSLVGERAREINRLQKMLEGGNIKLTSVVSEVTGYSSRRLLDRLLRNDEPMTEDVISGLVHTSLAGKSKELETALDGLLSELQKELLIKVLDHIDDMSRRIADLDDFCRKQMEKYEDALDKLDEIPGIARRTAETILIETGLDMSRFPTAKHFARWAGLAPGNNESAGKRSSGRTTKGNPTLKSTLIQSAKVAARKKNSFFKARYQKIAAKRGANRASVAVAHSMLIAIYHILKSGERFKDLGEDYYNQFNKEKKKKYYLKKLTKLGVNLKEATLSISIQAAT

SEQ ID NO: 101300 - protein, 355 aa, unidentified
MSQSTTLYVGLDVHKDSIDIALAEASRDAEVRHLATVGGGNEAVTKALRRLVSAGHRLHIVYEAGPCGFALQRHLSALGWRCDVVAPSSIPRPSGERVKTDRRDAMKLARLARVGELVPVRVPDSADEALRDLVRGREDAVREQRNARHRLKALLLRNGIAYSGRAAWSGAHLRWLASMKLAHPAQQIAFQEYLHAITEAGARIVRHEQALRDALSGWTLAPVVLALQALRGVQLIAAITLVAEIQDFWRFATPRQLMAYLGLVPCEDSSGPRRRQGVITKAGNAPARRMLVEIAHQYRLAARVSPSIARRQSDLELPKAVTDIAWNAQTRLCARFRRLSARRLPHNKIVVGRRP

SEQ ID NO: 101301 - protein, 413 aa, unidentified
MEAIVERCCGLDVHKDVVVACVLIGSADRRACKEIRTYGTTTGELEELRDWLLQVGCTHVGMESTGVYWVPVYAVLEGHFELIVGNAAHMKNVPGRKTDVKDAQWIAELIRFGLIRKSFVPPKWQRALRDLTRYRRKLVEAQASERNRLQRLLETCNVKLASVASDVFGKSGREILRALIKGEASPQQMAELSRGRLRNKVTGLVQALRGNVEAHHRFMLEIQLDRVEDIEANIAVVDGKIDEAIAPHRAVFERLMTIPGVDRVAAVTIIAELGVDMSVFPTVAHAAAWVGVCPGNNESAGKRMRQQKRRGNVHLCTALVQAAMAASRTKDTYLKARFWTIAGRAGKKRAAVAIAHSILKAVYEMLKASVNYKDLGGDYLDRFLNRRAEQRLVHRLRSMGYDVRPKIVGSEAS

SEQ ID NO: 101302 - protein, 418 aa, unidentified
MIEDVQWFVGIDWATQSHCVCLLDVEGRRVNERDFAHGGAGLTEMRDWLLEKTKAAPAQIAVAIETPHGPVVETLLDHAFLVFAINPKQLDRFRDRFTVAGAKDDSRDARVLGSALRTDRVAFRRLVVDDPVVIELREWSRMAEELQQERTRLANRVRQQLWRYYPQAVELTDDVADDWFLALWQQVPTPAAAAKASDKAIVRVLKDHRIRRLDAATVLQTLQKTPLFVAPGTTEAACAHIRHLAARLRLVNQQIKEAHRALDGLCSKLEAATESPSGQHCEQRDVTILRSWPGIGRIVLATLLAEATEPLRARDYHALRALAGTAPVTRRSGKQCFVIRRLACNRRLQTAIHHWSRTAIQHDTAARRRYDALRRRGHGHARALRSVGDRLLYALCTTLKRQTPYNPNCQTAQVTTSL

SEQ ID NO: 101303 - protein, 383 aa, unidentified
MYIGLMAQKRRSVKKQDTVSVEILTIGLDLGDEYSRYCRLDATGVVAEEGRVKTTEAALATMFKRFARSRVALETGTHSPWISRLLETCGHEVIVANPRKLALIFQSEKKTDRVDAEALARVARMDPRLLYPIRHRGKQAQADLSVLRARDALVGARTKLVNSVRGLLKSFGGRVKKCSTGSFAKQLVGSVPDELKPAIGPMIGMIRVMSETIADYDKVVESVAEEKYPETKVLRQVAGVGPVTALTYVLTLEDPSRFRNSRAVGPYLGMTSRVAQSSNQDPQLRITKAGDMTLRRLLVCSAHYILDPFGPDTDLRRWGLELMKRGAENQKKRAIVAVARKLAVLLHRLWTTLEDYDPLRNLRRSDARERSDKANQKPETAPI

SEQ ID NO: 101304 - protein, 280 aa, unidentified
MTHSKKFDVHVGIDVDKKSYAFTIYHNEMKKSKKIPSNADQLYSYFQKTYPNKNILYAYEAGPTGYDLFDYLKSKDCECMVVSPNSIPKPSNESVKNNRLDSKKIALHLKAGSLTSIRVPEGPWRELRHLVRIRENYSSQRKVARQRIKGLLLFAHLYPHIREEDTKWSNRYIKLLEKIPCSEAVRIRLDSHLSDLTYARKKLLEIHQQIKKFIEAHQDIQKNMEYLQSIPGIGIITATTILGKTGDPVHLKKVNELASFIGLTPRERSTGDVVDHTLWK

SEQ ID NO: 101305 - protein, 354 aa, unidentified
MRLYIGVDFHPHQQTVCWMDLETGEVRTKELLHNRVEEVKAFYKAMPKSVVGIEASSQATWFEDLIFENGHELVVGDPALIRKRAVSRHKSDKRDAEHIFTLLMNGEFPALWRRPRESVHLLEVIRLRSSFVRQRTQVYNRLQAMAHEVGLRKGIMRTTRFQNLLKEAEMNEVQRLRRSHLFRLIDSFSLQITEIDLWLKAKAEEAAKVKLLLTQSGVGYLTALCMVHTLGDVTRFARTRQITAFIGLDPLERSSGATVRFGNISKAGSRTLRYLLGQSANIAARRDPRLKGFYKRLAKKKPKAVAKTAVARKLAVKLSIMLRDNITAEEFDARSGCMTVDNARTKHGLQMAVS

SEQ ID NO: 101306 - protein, 388 aa, unidentified
MRFYNQAHRFYCGVDLHARSMYLCILDQAGAIVLHHEVPAEAAAFLEAIAPYRDGLVVCCECLFCWYWLADLCQAQNIPFVLGHALYMKAISGGKAKDDKIDSRKIAQLLRGGNLPQAYAYPKGLRETRDLLRRRMYLVHKRAEVIAHLVNTNSQYNLPVFGKKLIYARNRQALKIAERFADASVRQNAELDLRLLDCLDELIGDVELYLERTVKVDDADAFYRLRSIPGVGKILALVLFYEIHAIGRFGGEGEFLSYARLIRPQKTSAGKVTGGGGAKIGNAHLKWAFSEAACLLARESAQAKRFLARKEKQHGKPKALGILAARLGRAVYHMLRQKKAFDAKRFWNGEPHEAETRPAAKVEKAGTSDKVVTKARCRAKGSRRVLEA

SEQ ID NO: 101307 - protein, 346 aa, unidentified
MKITTIGIDLAKTVFQVHGVDERGKVLLRKQLKRKDVAGFFANLEPCLIGMEACGSAHYWGRTLSGLGHTVRLIAPQFVKPYVKTNKSDRNDAEAICEAVGRPSMRFVPIKSAQMQAVLAVHRARQGFVKARTAQANQIRGLLSEFGIVIAQGIGHIGKRLPEILEDGENALPGMMRQLLRRLGENLKEMDEQVSELERQIKLWHRENEQSSKLEAIAGIGPITASAFVATLGDVRSFKNARQVAAWLGMVPRHKGTGGKATMGGISKRGDVYLRTMLIHGARTVVAQLERKRDASDGWLQKLVARRNKNIAAVALAAKNARIAWAVLAHERSYERDYVARRAATA

SEQ ID NO: 101308 - protein, 342 aa, unidentified
MYYIGLDVHKKTISYCVKDASGRIHDEGKIGATRNDLDSWMKILPQPWTVAMEATIFTGWIYDHLIPHAERVKVAHPLMLRAIAASKKKNDRIDAGKIADCLRCDFLPECHMASTEIRDRRRTLRYRHLLVRQMVQMKNRISGLLMETGVSHNKQRLHKVGYFRELLSTNKEVHESIRPLLRLSRETIVRCQKTEYALVSSLQRDPLLAERIKLLRTVPGVGPITALTWALEIGDVSRFRSIKQAISYCGLCGEEKSSADTVLRTPLSKQRNKHIQHVLVEAAKLAPRQNHELALVYEKEKQKGNANRATLAVARKMVAYLLAVDRGKRAFVPLEDHSTTAA

SEQ ID NO: 101309 - protein, 317 aa, unidentified
MSEETFVGIDVSQGYLDLATRPGRGVRRFINDKGGILYLATFLGEISPASVVMEATGGLEGPVAVALAVEGIPVAIVNPRQVRDFARATGRLAKTDTIDAEVLAHFAQALRPEARPLPDERSKEMAAFLARREQVVNMIVAEKNRLKRALSAKGEENIKAHITFLEGQLKEIEEDLRRAVEESPLWRTKDDLFKGVPGIGQMTSMTLLFDLPELGTLGRKEIASLVGVAPINWDSGTHRGRRKVWGGRARVRCVLYMATLVAARYNPIIKAFYRRLIESGKAKKVALTACMRKLLTILNAMVKHNTPWAYQTIGPCS

SEQ ID NO: 101310 - protein, 341 aa, unidentified
MEYFAAIDVSLELSSVCVVDGTGKIVREAKVASEPAALIALFDDTGFEFTRIGLEAGPLSQWLHAGLTAAGLPAILIETRHVKAALKAMTVKTDRNDARGMAQLMRMGWFRPVHVKTLPAQEVRALLTARKLLQGKLQDIELGIRGLLRGFGLKVGQVSKGKYEARIRELAMGHPMLEPVTAAMLQARTSLRTEYAKLHRMLLRIVRDDTVCRRFMTVPGVAAVVAVTYKTAVDDPTRFGKSKELGPYFGLTPSKYQSGEVDWTGRISKVGDAMVRTALYEAANVILNRVTRFSTLKAWALRVVQLRGVKRAKVALARKLAVVLHRMWVDGTDFRWRKAAA

SEQ ID NO: 101311 - protein, 346 aa, unidentified
MYYIGTDNHITTLDFKVINDEGKLVKAHKVSTSASNFMEVIRSVSKPRIVIIEEGPLSAWLLEICDKYGERLVITDPKRNRWIGSSGVKDDPIDAEKLAQLARGGYIKEIHHPVGQRRRFRELMAAYHDTSQSTVRIKNKIKAKFMQNGIKCAGETVYLKDYRESWRQKLPQDPGLLVIIDSLWLQLDQTQQTQETILSAAKTQSKQYPEVKLLDGIPGLGFINAATIAAILETPHRFANKRKVWMYAGLGIQKRSSGGKTYSEKLTNDYNRLLKYTAKQAALAAIKADNPFRRAYREMTLVKGITHQRAELTIARDILATAWAMWRNGELYNPEIDKNINNYKQV

SEQ ID NO: 101312 - protein, 316 aa, unidentified
MLNSEGDHVESARVRNDERAITKLVNAWIRKWKLDLPQSLFCLEPTGHYSHLLLTVLVDLQVPVWLAHPMNIKQGMGIARGKNDEIDAVRIAQYARRFRDQARMFTADHLRMSKLKQLLMKRRQLVESKVKLKIQLGNVNRHMHKDLRKTFNQLDQAQIRTIDRLLKKVEFMIAEEINADPQVKHQYDLISSVPGVGPVLASNLLALTDAFSRFSTPRQLACHAGAAPFESTSGSSVRGRTRTSRKANAGLKSLLHMAALVAIRNDAELGTYYKRKVAEGKPKLCVINAVRGKIVHRVCAVLRKDHLYEKRPLLLS

SEQ ID NO: 101313 - protein, 387 aa, unidentified
MAQVNDLSRSLTAFDPISTLVVVVEMSKASWLVSGAVPGVERQPLKKLEPDATVLLRLIERWRNEAVRAGRPISRIALAYEAGRDGFWLARWLIARGIDAHVIHSASVAVSRERKRAKTDRLDAAMLMRVFLGWLRGERGHCGMVAIPTMEEEDARRPSRERESLVNERSRITNRMKSALARLGVRGFKPHLRKAPERLAGLRTAEGTGLPANIIEEFRRDMARLALVREQIGSIEKTRAERLERAPDTGPHAMVRLLARVIGIGIETADMLVREILSRKLRDRRAVARYAGLTGSPDESGLKRREKGLAKAGNARVRRGLIQLAWRFLMFQKDSALAQWYRTRTEGPSGARKTTMIVALARKLLIALWRLVTTGEVPDGVELRPAA

SEQ ID NO: 101314 - protein, 351 aa, unidentified
MKNMSKQLQGEELFVGIDLHKHRWHITIRTADVEIFSSSIAGRWQELKKVLNRYNGCRIHAVYEAGYFGFWLFDDLTQYGVQCIVTPPSLIPQEHGNRVKTDRLDSRKLAQLLAKGLLKSVWVPSVEERFHRQVIRRRRQLVGDRVRTQNRIKSELCFYGIDLPAPRSKWTQVYFTNLKRIKFKNHWMQKSFNQLLEQYEFLCAQIDKQTQLLKQLAELPLYRDRVKILCSIPGIGILTAMEILLELQDFSRFRRAEQLAAYVGLTPSQYSSADKIRMGRITGAGKNAVRSALVESCWHLIRKDKAMRKKYEQIKARAGAKRAIVAVSRKLILCIRRLLLDNRLYVYEPVI

SEQ ID NO: 101315 - protein, 312 aa, unidentified
MTEVTIGIDVSKDSLDVHRLPTGEEEAFANTKAGLTALIRWLGTDPVLRIVFEPTGRYHLDLERRLAAAGYALVKVNPRQAKRFCEALGVRAKTDRADAAMLARMGAALALDPQPVRPDILNELNELVTARRALIKDRTAAKNRAKGLRLALLRRQNANRLARIEADLAAIGKAIAILIASDPALAGKQTILLSIPGISDVTAAALLAQAPELGDLDQRQIAALAGLAPITRQSGNWRGQSFIRGGRAQLREALYMPALTAIRLNPDFKRIYARLTDSGKPAKVAITAVMRKLVILANALLRDKRNWSPEAP

SEQ ID NO: 101316 - protein, 314 aa, unidentified
MLESTRAVGIDCGKDFLDVAVFPGADRLRVTNTPEGHRNLVAWVAERSISVVGLEASGGYERPSRDALRAAGVSVRVFDPARVRFFAKARGQRAKNDRLDASVIAEFTATQTTVPSLPTDPVREELAGLIKARHLLVDKRADLNKSISQAPVAAQEALTRAVEHLAREIAGLDAAIARATGAQPTLARTARDLQTAPGIGPVTAVTLAVLLPELGRTSGQKIAALAGVAPFDHDSGKRGGQRHISGGRAGVRHALYMAALSAATRTGGVLADFYTGLIRRGKPPKVALTACMRKLIVRLNAMLAKGATWEAKPA

SEQ ID NO: 101317 - protein, 374 aa, unidentified
MADYSEVFVGIDTSKLRNAVAIAEGGRNGEVRYLGEIANTEEAASKLVKKLAAQHRRLTFCYEAGPTGYGLHRLIKTLGHECVVVAPSLIPKKPGDRVKTNRRDALNLAKLLRAGELTAVWVPDARHEAMRDLVRAREAAVDDLKSKRQQVLSLLLRLGRHFTGKRTWTRAHMNWLVSQKLAHREQRIAFEEMLLAVRQADERVIRLERAIAAAVPDWSLAGVVTALMAVRGLDLISATIFLAEIGDLSRFASPRQLMAYLGLVPGEESTGDRVWRGGITKAGNHRARRILVECSWSYRHPPRVGKKKLAKVEAAPPAVQEIAWKAQARLTARYRALARRGKRPTLVVTAIARELSGFIWAVSRAVSTPAAPTM

SEQ ID NO: 101318 - protein, 369 aa, unidentified
MTQLMAGIDLHSNNLVIGVVDETGKRLKHRRLDCNLEQVVHFLEPYRPELKSIAVESTFNWYWLVDGLRARSYPVVLANPAAIEQYSGIKYADDNDDAYFLADLQRLNILPTGYIYDPVLRPVRDLLRRRMGLVHQRTSLMLSFKSLYARTTGQALTLSRLKDLDQDQVRALYEHPANQLIARIQKQHIDALTESIERIEGAVLKSARELPLYQPLLTLPGIGRILGSTITMEVGDIRRFKMPGDFASYCRTVDSRRLSNQKKKGDNNQKCGNKYLAWAFVEAANFAKRYDEQCRRWFDRKVAKTSTVIATKALACKLAKAAWHVMAHGGAYDPQRMFPELAHQAERSTERISESRRQPVEGLANSPQV

SEQ ID NO: 101319 - protein, 396 aa, unidentified
MISVGIDVSKGKSTVCILKPYGEIVSKPFNITHTQKDLSELSSMLFRLNDEVKIVMEATGIYHLPVLTYLQEKGFFVSVINPYLMKSYRNESLRKAKTDKIDSRIIANYGIDHWFKMKEFQTSGEIYEELKLLGQQYRHYMKLHLLSLAELTHLLDLTMPGIKNLLASWNETNRKDKRSDFVERFWHYDVITSMSEQEFTEKYILWAKEKKYVPSQEKAKVIYTLAQESIPTLPSETSSVKILVTEAVRVLKEVDATLGLILSRMQEIAKTLPEYSVVREMGGVGNTLAPKLIAEIGDVRRFRNGKALVAFAGIDPPPYESGQFVGCNRKISKRGSASLRKVGYETMRSLKMRSRPEDPVYRYVVKKESEGKSKKNIEISRKIYRACLKNHFCNTF

SEQ ID NO: 101320 - protein, 430 aa, unidentified
MKSNTQNAKIEAITEKTLVLGIDVGSEKHYARAFDYRGIEYSKKPFKFSNTEAGFVTFKEWILDLKERHEKDKVVPGMEPTGHYWFNLGKFLQDNEMKPVLVNPHHVKKSKELDDNNPTKNDRKDPKVIAGLVREGRYMIPYLPDGVYADLRTASNIRFQLQVELTRIQNRISRWFNIYFPEYKTVYGKPDAKSGMLILKAAPLPEDILTLGIDGVNQIWRDAKLRAVGKARAKPLIEAAEHSVGSKEGAVSARMEIRMLLEDYESRNIRLQEVMTLIEGLVKQIPMAEKLLEIKGVGIKTVSGFLAEVGDISRFNTPKELQKLAGLALVESSSGKHKGETTISRRGRKRLRYLLFEVAMSLVAKNPEFRELHNYYTTRRLNPLKKMQSLMAIAAKLIRVFYAMLTKGVDYDPKKMVSDIKRPAVYLQAA

SEQ ID NO: 101321 - protein, 457 aa, unidentified
MKWYLGIDVSKGYADFALVSELLVQLEETFQLDDTRSGHEQLEIWLEALFKQHPHLEIDCGLESTGGFENNWYALLIKLSSSIPIRAARLNPSTVKNASRALLNANKTDAESAKEIAGYLKRYTDQIDFAVRDNQYASFRSLQNHLELVTKQKTQLINELKQILYSSFPELQRFCKQGIPGWVLELLMQYPSPEKLVRQKPLKLARIKGITEEKAKSLIEKAQVTIASRSNSTYEFLIVQLATEVKHKQGKIKQLKQYLEDHCKGKEKEWLESIKGIGSYSAAAIMIQIEDVHRFASPKELASYFGLHPLIKMSGDKRMVSRMSKQGRPAMRALLFMCANSAVRCDEHMRTIYARHRAKGKNHKQALGAIMHKMTRVIWGVLMHEKPYDSRIDLANQAKNNQNPVQDELKEIENKRRMQKFDSDAPVSRIASKKRRVHAASQVGEAELVRDLEHEPG

SEQ ID NO: 101322 - protein, 348 aa, unidentified
MPVSDRVVTGGVDTHAEVHVAAAVDHLGGSLGAASFPTTAAGYRDLLSWLRRYGTIDRIGVEGTGSYGAALARYLRWEQITVVEVSCPNRQARRRHGKSDVVDAIAAARAVLAGDAAAPPKSRDGAVEALRAVKLVQRSATKARTVALNQLHSLLVTAEDGLRAKLRGASRVETIAICAAFRVRSDDDSVAAMTRLALRELALRVRHLDEQLDRCAQRIARITAQLAPKLLDLKGIGPDVASTLLITAGDNPDRMHHEKSFASLCGTSPLQASSGKTTRHCLNRGGDRQANAALWRVAIVRMGTDQRTRDYVARRIAEGKNKPEIIRCLKRYIAREVFNTLTGTACRT

SEQ ID NO: 101323 - protein, 400 aa, unidentified
MEAIVQRSAGLDVHKKVIVVTVLLEQPDKTLKEETREYGTHYQACEDLADWLLSQDIELSVMESTGIFWKNIYAALEKRGLRVSVVNARHVKQVPGRKTDVKDSQWLARLARYGLVKGSFIPPKDLRELRIIARYRTKLKGMLASEKNRLHKTLDDAGVRLGNVVSDISGVTATEIIAGLIDGKSMDELLACTRGQLKNKKDNLRAELEGELSSRHLFLLKKLQEHIAHIEQELQDIDDYLFSAMQPYQKQWKILQTIPGIDAVGAALLIIEMGVDMEQFGSREQCCSWAGMCPGNNESAGKRKSGKTPKGSKQLRYLLCEAANAASKTECQFKHKYKSLMIRRGHKKAIVAVGHKMLRVIFSRLKTGEVYQDPKVSYEELVVKKNAPRWIRMLRKYPQM

SEQ ID NO: 101324 - protein, 352 aa, unidentified
MNNTGKRLYVGLDISLADTHVCVIDDTGKELFQGATSSDPDALAEMIEKHAPNCERIAVETGATTPWLWRELRHRGLPVICVDARHANKALSMRQNKTDKNDAQGLAQLMRIGWYKEANVRTQEAQYIRSLLSGRYQVCMCKRDILNQMRGIVKTFGLFTKSTATRRFPDIVKEIISDHPAVAPMLAPLMSVYITMIEQINIYEDELRSIAKNDEAARRIMTVPGIGYLVALGFMTSIDDPTRFSSSVKVGSYLGLAPRIRQSGESSWSAGIGHAPDRMVRSYLYQAATVVLTKSVKWSKLKAWGMRLYKRAGFKRAAIGVARKLAIIMHAIWVDGTEFVFGEEKPGKNVMA

SEQ ID NO: 101325 - protein, 457 aa, unidentified
MSQTKRSRKSRDFSTVNPAAAAIDIGATIHVAAVGPNRDKEPVHTFRTFTDDLYRLADWFAGCGIRTVVMESTGVYWIPVFEILEQRGFEVMVVNARDAKHVPGRKTDVSDAQWLQRLHEYGLLRASFRPQAEIAGLRAYLRQRERLLDYAAAHIQHMQKAMMQMNLQLHHVVTDVTGLTGMAIIRAIVAGERDPNVLATHRDRRCHASVETVCQALVGNYREEHVFALTQALELYDVYQTKVTACDKQIEAILKRLKKNAAPPAAKLLPVRRRTRQPNAPAFDARAALHAILGVDLTQIAGIGPSVALKLVGECGTNLAAWPSAKHFTSWLALAPHNKISGGKVLSSKTRRTSNRAASLLRLAAGTVGRTDTALGAFYRRLSARVGKAKAITATARKIAVLFYNSFGTGWSYADPGATYYEDRYRQRVLHNLQRRAKSLGFALTAVPPDPIQAVVS

SEQ ID NO: 101326 - protein, 331 aa, unidentified
MTSLPNRPNETALTIGVDVAKASLEVAFSDGAAALAPTNDAAGHAALLAHLATLREQGHTIALIVLEATGGLEMDVACALQLAGHPVVIVNPRQSRDFARAMGQLAKTDRLDARVLAHMGQTLVQREDLHKLIKPLPDETQRRLQALLTRRRQLQAMHIAEQQRASGPDQRMLRSMRTILKALEREIARLDKDIQALIGAHHAQLAKLLGEVKGVGQATISTLLAEVPELGKLSGREVSALVGLAPINRDSGAMRGKRTIFGGRPTVRKVLFMAALVATRFNPVIKAFYERLLPAGKPKKLAITACARKLLTILNAMAKSGQPFNSALHLA

SEQ ID NO: 101327 - protein, 358 aa, unidentified
MTTDNNSTSFFDKVLLFIGIDVHKAKWVVTIRTYDLELKTFSMKPSAEELEKFLLKNYPGAEFRIVYECCFSGFWIYDYFSEKGYKIIVTPTNRIYKDGSIIKTDKIDSRKLALQLSRELLKEVIVPAKRIREYKYIFRIYDKQKMRQGQILRQIKAFLEQKNHPLKWQKWNKGLLEQLKELKFIDNLFDLKFRSLLTEYEYVVSQIKDTEKIIEQIKEDQELRRRIQIIEKINGIGIISAVRISIYLFDRKDRFENSERLNHYLGLTPSERSSGEKIVRGRSGMCGNRQLRSIIVQLAWMTVRKDGSLLDKFDRVYKKSGSKQKAIIAVARKLMTKIYAAVRKEEDYRINLREVKAA

SEQ ID NO: 101328 - protein, 342 aa, unidentified
MDHFGGLDVSVKETSICIVEDTGRIVKEVKVASDPAALLKVLGNPTYRFKRIGLEAGPLSQWLFSVLAEAELPVICVETRHMQAVLKAQINKTDRNDARGIAQMIRAGLYRPVHVKTLRSQKLRMLLTHRKLLQSKAIAIENDLRGTLRNFGLKVGMVGKVKFEARIQELVENFPDLAVLVEPLLIVRRVLREQIVILHRRLLAIVREDEVCRRLMTTPGVGPVVALTYRATVDVPARFRKSKSVGAVFGLTCSRYQSGEVDWSGEISRCGDEMMRTMLYEAAQSMMHSKKWSWLKAWAIRVARRRGMKKAIVALARRLAVIMHRIWVDGTEFRWTRETAAA

SEQ ID NO: 101329 - protein, 412 aa, unidentified
MVETIVERPAALDVHKAQVTACVRVPADGGGREQHVAEFQTTVPDLLALRDWLAAHGVTQVAMEATGVFWKPVWAILEDEFELLLVNARHVKQVPGRKTDVSDAAWLCQLLEAGLLKASFVPPKPIRTLRNLTRYRKSQIQERQREANRLHKALEDTGIKLDCVASDILGVSGRRMLDALIAGTTDPVVLAELAKGSLRRKIPALRQALEGRFDRHHALWIGAILNHIDFLDEQISALSEAIEEEIRPFVAAVKLLCSVPGIQQRGAECIIAEIGVDMSVFPTSKHLASWGGQCPGNDKSAGKRRSGKSRNGSKWLDYALEEAAMAAIRASDNYLAAQYQRLRPRRGHKKALGAVKHSILCICWHMLATGELYYDLGGDYFHRRDPERQTKRLVKQLEALGHTVALQEAVAA

SEQ ID NO: 101330 - protein, 402 aa, unidentified
MNAVGIDVSKGKSMVAIMRPFGEIVSSPLEIKHTTSDINSLVELINSIEGESRIVMEHTGRYYEVLAHQLSEANLFVSAINPKLIKDFDNDSLRKVKSDKADAVKIARYALDKWQNLKQYSVMDELRNQLKTMNRQFGFYMKHKTAMKNNFIGILDQTYPGVNTYFDSPARSDGSQKWVDFASTYWHVDCVRKMSLNAFIDHYQNWCKRKKYNFSQSKAEEIYGKAKELVPVLPKDDITKLIIKQAVDQLNSASATVESLRTLMNETASKLPEYPIVMAMKGVGVSLGPQLMAEIGDVSRFTHKGAITAFAGVDPGVNESGRYEQKSVPTSKRGSSDLRKTLFQIMDVLIKTHPQDDPVYQFIDKKRAQGKPYYVYMTAGANKFLRIYYGRVKEYLSSLSES

SEQ ID NO: 101331 - protein, 407 aa, unidentified
MEVVHPHCAGLDVHKDEVVACARVTTGGPTRYASARFPTTTRGLLALSDWLAEQGSTVVAMEATGVYWKPVWHVLEEACDLVLANAAHVRAIPGRKSDTNDARWLADLLAHGLIRASFVPPTAIQELRDLTRTRTQLVREVAQHTLRIQKTLEDANIKITGVVTDLLGVSGRALLTGLIAGETDPARLLARTTGRLQADPDRLLDGLQGRVTAHHRFLLQLHLDQIATLDAGITRIEAALEDRLHPFRATIARLTTIPGVSVVVARTIVAEIGLDMTRFATPGHLISWVGLCPRMDESAGKRRSTRLRHGAPWLKTALVQAAWAASRKRDGYPRAQFARLRARRGPKKAVVAVAASLLTAAYFILRDGAEYRDLGGRYFDERDKARVVRRLTRRIEALGYSVQVAAA

SEQ ID NO: 101332 - protein, 426 aa, unidentified
MAKVEHTSDARVLVGIDISKHRHEVLIAVPGKTRRRRLTITNSTDDFMRLIALLREYDMPVRIGFEATGNYHRVLMYHLGVAGFDLKLVSSVALARTREALHNSWDKNDPKDAQVILHMLQIGAVQIFQDPMVAGTNDIQELSKTHDAVSRSKTELWHRMLTHYLPLYFPEADRFHRSSRTDWFLAFLEMFPSPHMISAMTKEEFTTAAWEVVGRKVEKSLLLSDIYETAKVSAGLPVSSDSDAIRMFRLMLAEGRSLIRQRNAIEDRAVELLGERADYQLLRTIPGIGPINALTILAETGDLRRFHHHRQFLKFCGMDLATVQSGMFRGRSKISKYGNARLRRTLWLAGQTAVLKKANSFRDKFERYIAQDRHNPDLRRKAYTAIAAKMARTIHAVIKSGEPYRPFFEGTSPGGRTSLSKGRGGA

SEQ ID NO: 101333 - protein, 332 aa, unidentified
MSAVHAGIDVSAKSVELVLRQNGRRFGRETFAQTPEGHRQLERRLRTARPQHVVLEATGVYYVDLAVTLAHAGLPVSVINPRSFHHFAKLKLQGSKTDGIDAELLAEYGERMAPLPWTPPDPSRLALRDLGRQINRLTATRTQAKNRLHALRARRGSLELLIRDEVEAIATLDRRIERLTQAARDLLHQQPDLAEQAQHLEAAKGVAQASAIAVLAQLCVLPASLKTSQVARHAGLDVCLRQSGTSVNGVSRISKAGNAYLRAALYMPALSAVRHDPYVRAFYEALQRRGKRKIQALCAVMRKLLTGFWACLKTAQPFDSAKLFSDVHFAKT

SEQ ID NO: 101334 - protein, 413 aa, unidentified
MERIVERCCGLDVHKASLTACVRVSSESEGFHQEIREFATTTRGLLLLRDWLASFEIELVGMEATGVYWKPVYYMLENDFKCWLLNARHLKNVPGRKTDVQDAEWICQLLEHGLVRPSFVPPKEIRELRNLTRYRKAQIEERTREVQRLEKVLQDAGIKLSSVATRVLGASGRAMLDALISGTTDPEVLAELARGRLRSKIPALKEALEGSFSAHHALMVGRILSHIDYLDESIGELSTEIERVIAPFSDEVELLDTIPGVDRRTAEVLIAEIGVDMSRFPTHAHLASWAGMCPGNDESAGKRRSGKTRKGSKWLRSALIGAAHAASRSKGTYLSAQYARLKGRHGSKKAAVAVGHSILVICYHVLEREVPYEELGEDHFHRQRSGEAYTKRLVRQLERLGHKVVLEPLPQSA

SEQ ID NO: 101335 - protein, 430 aa, unidentified
MGLIVPSTIHPAREDQPLPYEWFVGIDWGSQRHQVCVLDRDRRQVGERVVDHDGASLAQLADWLWTLSGGQPQRVAVAIEVPRGAIVEGLVERGFHVFAINPKQLDRFRDRHSVAGAKDDRRDAFVLADSIRTDQPSFRRLQLDDPQLLRLRELSRAEETLLEDFRRSANRLQDQLHRYYPQMLKLCSAADESWLWELIDLAPTPAHAALLSEEQVQRVLKAHRIRRVKAQEVLTCLQAPALPVAPGAAEAAQAHCAFLLPCLRVLAEQLQACSQQVSALLRALAQEPGEGEGPSDVAIVLSLPGVGRKITAWLFAEAAQPLAERDYQVLRTHGGVAPVTKQSGKRRLVVMRHGCNPRVRHALYHMARVAMQHDAHFSSVYAALRAKGQRHGQALRNLGDRLLRILMAMLRERTCYDATRIRREPVVQMG

SEQ ID NO: 101336 - protein, 406 aa, unidentified
MKQQQGIVYGGVDTHLDVHVAAVVDGTGRLLGTKSFPTSPLGLRRLERWLSGHGQVAGVGVEGTGTYGLGLQRVLQAAGHDVVEVNRPNRQLRRSKGKSDTVDAEAAARAVLAGHATSTPKSRDGIVECLRVLRLADRSMREQMTRLHGQLDHLTITAPEAIRVDMTGLSALRRARKAAACRPSDSIGDVASATKTAMRTLARQWLGLREERARLREQIEQLTAQSNPALLEMPGVGPDTSAALLIAGGDNPARLRSSAAFAALAGVSPIEASSGKKSGHRINRGGDRTANAALHRIVLVRMSRRHQPTMDYIARRTAEGLSKRDIIRCLKRYVAREVYHALTHPEPTADISALRPRRNTLGIPMRTVAEHFQRPINAIARLERGQVRDAELAARYHAWLDAQGAA

SEQ ID NO: 101337 - protein, 332 aa, unidentified
MKIKQTIGIDVSKKTLDVFIHSEKKHKCFKNEPQGFKSLICWVEQNNPFDSRETLYAFEHTGLYSLGLSIYLTEQDHFFVLIAGLALKKSLGLSRGKDDRIDSSAIALYAYRRREELTPSKLPSTNLLKIRKLLSLRDKLVKQRAGYKTTLKETLRVMPEEQDQTYVQIHNEQISGLTQSIKIVEKELHKIIESDDELNSQYLLIISIDGVGSQTAMFMIAFTAGFTLFENSRKFASYSGIAPFPHQSGTSIRGKTRISSLGNLKFKSLLSNCATSSIMYNAEMKTYYHRRLGEGKDKMSTLNIIRNKILGRIFAVVQRGTPYVNTMAYCCQ

SEQ ID NO: 101338 - protein, 371 aa, unidentified
MSDSNTTVYVGLDVHKESIVIAAAEVGRAPARVVATVPHEWKALRRALERLGDPPTVSCCYEAGPTGYGLARSLLTAGWACDVIAPSKVPTRAGERTKTDRRDAVKLAQNHRNGELVAIAVPDEADEAIRDLERARDDAKKAERVARQQLGKFLLRQGRRYPGKTTWHDRHLAWVRSQEFGEAAQRHVAADAVAAVESATLRVAQLTARLKEVTADWDRMPLARALQALRGVEFVTAVTVVAEVGDLRRFPTAGDFMGYVGLVPTEQTSGEVRRRGPISKTGNGHVRRLLVESAWHYRRPPRMSKELRRRSEGLAPGVCAIAWKAQGRLHSRMKKLLGRGKHPAEVVTAVARELAGFVWAIGQSEPLASAS

SEQ ID NO: 101339 - protein, 443 aa, unidentified
MTRRCIGLDVHRDFAQVAIWQDGLVRQAGQIAMTAEALAVFADSLAPSDEVALEATGNTNAIVRALQGRVARIVVGNPQKTRAIAEAKVKTDKVDAEILAQLLAADYLPAVWVADEETQARRRQVARRAHIVRQRTRLKNQVQAVLHRNLIPRCPAADLFGIKGRAWLAEQPLPADERQAVTALLRQLDFHAGELKLIDQELARIALGCQDTKRLMTIPGVDVTVAMAITSAVGDFSRFASPNKLVSYLGLNPRIKQSGGQPASHGRITKQGRAHARGMLVEAAWVAVKTPGPLRAFYERVRARRGMQIAVVATARKLAVLCWHMITRGEDYALARPSLTAKKLRALELQAGMPSRRGQKGKASGYSLKDVRGREKQMAEQAERAYRQLVSDWQAKAPPPRVGVAAANGARLSRPSVGATAARQDTAPDPALRFGVDHAHNAG

SEQ ID NO: 101340 - protein, 321 aa, unidentified
MNTTMPLGIDVSKAKLDCALWLGSKYRTKTFANTPEGFSRLSEWLHQHGADQVHACMEATGIYWEAAALYLADAGQRVSVINPALAKAHGQSLGLRSKTDAVDAKLLADFCREKQPPAWTPPSGAERRLRALVLRHQSLVEMQTQEKNRCESLREEVRTSVETHLAWLAAELERIQQAIAKLLDDDDHLRGQRELLASIPGLGERTIAVLLAYGVSGERFQSARQFVAFAGLSPRLHESGSSVRGKPRLSKIGHAFLRRALYMPAMVTLYKTAWGQRFRQRLATHGKPPKLIIGAMMRKLAQVAFGVIKSGRPFNPAFHGA

SEQ ID NO: 101341 - protein, 320 aa, unidentified
MQIPTQVLNIGADVAKDEIVVACSEGSFPVRKLANQRTTLRAFLKSLPPGSRIGMESTGIYHELFASLAHQLGFIVYVLNPKDARHYAKGVGQRGKTDRVDAELLARMVAHEHADLHAWVPPTPEQREIDRLIKRRAKLSSLRQALGMSLKGLVRFSTDLKTLRQRFDQVIARIDQRVKVLIEANPERKEHVTHLRTITGFGPVVSAAMVNSLERVPMKNADAFVAFTGLDPRPDDSGQHQGKRRLSKRGPSELRRLLYLAALSAIKTKTWRPIYEHYRGKGLSSTAAIVIVARRIARTAWSMYTYKTDFDPGRLMKSLT

SEQ ID NO: 101342 - protein, 351 aa, unidentified
MEEYIAFDSHKHYTWVEHEQVSTGRVRQYRLEHAPGAIRRVLAGCELGTPVALEATANWYWIVDEIEQAGLRPLLVHPRKAKLMMGLINKTDKLDAHGMNRLQRNGTLPTVWIPPGRLRELRELTRTRVVLVAQRTRWKNRLTATLAKYGAPSSEYSDPYGKGARAELDSRIERLPEQTRWAARQMLAQLDTLSEQILQFEGRLKELVEVTPEMQRLMTLPGVGVILAATIALEIGEIERFPSAEHFASYAGTTPRVHASGDRVRYGRTRPDVNRYLKWAFAEAGNSVAVNHTRCPARHVSQLYLRLRLRKGHGKAIGAVARHLAEAAFHVLSRQEAYQDPTVRPGRTREV

SEQ ID NO: 101343 - protein, 351 aa, unidentified
MLIIGCDFHTRFQQIAMMDTTTGELVERRLEHGTGEAERFYAALAAPARVGIEATIATQWFEKMLTRYGHELWFGDAAEIRAAMVRKQKTDTRDARHILNLLMEDRFPRIWVPSAAERDVRQLVRHRHKLVRFRTSVMNQLHALAMGQGLCLKKKLWTTVGRQKLESLTLDPWASRRQRELLELLDQLDPSIEELDRAVITEAESRPEAVCLMQQPGVGPVTALAFVLTIGPVSRFAKSKKLVSYLGLNPSEESSGGRQRLGAISKQGNTLMRCLLVEAAQTAARLDPELRRTYQRLKFRRGHSGVAKVAIARKLAVRLYWKLREAAQPNTAARMQGSPATPVAGESLSSS

SEQ ID NO: 101344 - protein, 372 aa, unidentified
MGDDSVAYVSFDTAKLHHAVAIAEEGRTGEVRFLGEIENSEAAAVKLVKKLSQRYRRLMFCYEAGPTGYELHRLIGRLGHECMVVARSLIPKKAGDRVKTNRRDALELARLLRAGELTAVWVPDVRHEAMRDLTRAREAAVADLVSKRQQVLSLLLRLGRHYEGKRHWTQMHMKWLLSQKLAHAEQRIALEEMLLAVREAQGRVARLEQAIRTALPDWSLAEVVTALMAMRGFDLVSASAFLAEIGDLSRFATARELMGYLGLVPSEQSTGETTRRAGITKAGNRRARRILVECSWSYRHPPRLGKEKLAKVEAAPRAVREIAWKAQHRLTARYRALTRNGKKPTVVVTAIARELSGFVWAIDRAARPATVR

SEQ ID NO: 101345 - protein, 395 aa, unidentified
MISVGIDVAKEKSTVCFLKPGGEVVKTPYDVMHNKADLAALVGCIKSSNEEVRVVLEDTGHYHFPVVKFFMDNGIFVSTVNALRMKKYCSQNIRKAKTDRIDAIRIASYGITYWSELVPASPLDTVYKELQMLSRQYHRTTALLVKAKINLSTILDQVMPGIQNLLQNVRENRKLTNFVAKYTHFENICIMGEKRFISNYCSWAKKQGYRGLHERKAKDIFALAQSGIPVLPNTNSTKIVVEEIVRVLHEIESSRVSILAQMNDLAKTLPEFSLVNSFSCVGEVLTPMIIAEIGDVRRFKNKHSLVAYAGIDAPPYQSGTFNATERHISKRGNSYLRKVGFEIMQSLIKHQPKDDPVFDFIQKKRSEGKSCTEAMIAGLNKFLRIYYGKVKEILT

SEQ ID NO: 101346 - protein, 456 aa, unidentified
MPRSKKRPSRSGQLVVVHPRAAGIDIGSTFHVVAVPRELDDRPVRTFRTFSGDLHQLANWLTGVGISTVAMESTGVYWIPVFEILEARGFEVLLVNARDVKHVPGRKTDVNDAQWLQQLHQHGLLRGSFRPRDGVVRLRAYLRHRERLVDYAASHIQHMQKALMQMNVQLHHAVADITGATGMRILRAIVAGNHDPVHLATYRDVRCHASEATIRDALTGNYRPEHLFALRQALELYDFHQAKIAECDMEIESVLRDLTASRDAPTIPLPAARRGKACRNEPAFDARSPLYALLGADLSQIHGFGPYTVLRLVAECGDDMTKWPTHKHFTSWLSLAPANKISGGRVLSSKTRRSSNRATALLRTAAVAVGKTQTGMGAFYRRLAARVGKAKAVTATARKLAILFYRALRFGLTYADPGVSAYEARYRQRVIHNLHRRAKTLGFTLVAAGAVSPGVS

SEQ ID NO: 101347 - protein, 401 aa, unidentified
MQQRLWAGIDAGKTAHHCMVVDADGQRVLSRRIDNDESALLGLIRAVTSLAEGGHLTWAIDLNAGGAALLITLLLAHDQELLYIPGRTVHHAAGSYRGDGKTDAKDATIIADQARMRRDLHPLRRGDELVAELRILTSRRNDLSADRTRTINRLRDRLGEYFPALERAFDYSNNQAALILLTGYQTPAALRRIGTARLETWLQNRHARKVSSVAASAVAAAHTQYTVVPGEQLAADLVARLTQEVIDLDAALKEIDVMIEDRFRRHRYAEIIVSLPGFGPRLGAEFLAALGGDIALYDSADRLAGVAGLAPVPRDSGRVSGNLHRPRRFNRRLLRASCLAAQLSIRHDPASKHYYDRKRAEGKRHTQAVLALARRRNNVLWAMLRDRTHYQQPTGDPATAA

SEQ ID NO: 101348 - protein, 341 aa, unidentified
MEWTVAIGVDTHKDVHVAVARDRFGAQLDGLEVETTESGYRSLLSWALELGVPAFAVEGCGSYGAGLVRLLELAGLAVWECERPHRRERRRGKNDSIDAALAARRLLTGDGLCLPRGGGQQRDDLRILLLERRSAVRARTAALNQLSALVVTAPDHVRTRLGSLSGERLARAAARQRARPGTSNGVLRRLGRRVERLSQEVAEVERELADLVAELAPDLLSEPGVGPVCGAQLLVSSGDPKRMASEASFAALAGTSPIDASSGKQQRHRLNRGGDRQLNWALHVIALARIRHHAETTSYYERLLATGKTTREARRCINRALARHFYRRLREIPTTCGVPKL

SEQ ID NO: 101349 - protein, 404 aa, unidentified
MVFLGVDWAEEHHDAWLENEQGEMLGKARIANDVGGVRQLHELVAEHAHDPSQVVVGIETDRGLLVTALVGAGYQIYAINPLSVSRYRDRHGTSGAKSDRADAKLLADLVRTDRHNHRRLAGDSELSEAVKVLAREHQDLVWTRKRFINRLRSTLREFYPAALEAFGTDLGALDALAVLERAPTPWQGRQLSHAKIVSMLRKAGRQRNLEPKAAEIQRALRSEQLQAPAQLQAAMAIVVSSCVAMIKSLNFQLEQVATEMTASFEGHPDAEIYLSLPGLGVVLSARVLGEFGDDRARFADAKARKAYAGTAPVTQASGTKKIVLARFARNRRLADACYCWAFSSLTRSPGANRYYRTLRTRGKTHHQALRGLANRLVGILHACLAAGQTYLESLAWPQPYEIAA

SEQ ID NO: 101350 - protein, 353 aa, unidentified
MNSLTDLREVVDVVIGVDTHVHTHSAAVVDAATGGVLGEITVEATCEGYCELVEFANNHPMLRAWAIEGTSGHGAGLSRHLLERSEIVIELDRPKRAARRNGAKSDPLDAIRAAREAMARPRLGTPRVGGERQALSVLLAARRSAVNASTEAQQQVFSLVIAAPEPIRVRFRGQKLAAMLNTAATLRVQSAWDVETTSTVVALRTLARRAHAMLKEARELQKAIVAIIRSWRPDLLEEFGVGPIVAATVLCAWSHPGRIHSEAAFAMLAGVAPIPANSGQVTTRYRLNRYGDRQLNNALHTVVQSRIQYQPATRDYVARRTAEGKTGREIKRCLARYVARDLYRLLENTATAA

SEQ ID NO: 101351 - protein, 361 aa, unidentified
MHNVKISSVSRQVVGGVDTHKDLHVAAVVDEQDRILASESFATTRQGYKQMLTWMRSFGDLARVGIECSGTYGAGLLRYLEQAEVTVLEVTAPDKSDRRKRGKDDTLDAENAAHAAFAGIRTVTPKKRDGMVESLRVLKVCRKTAMQARRITLQLIQNTIVSAPDDLRESLRTLTRMQLIRTLAAWRPDLSSYRQVTSAYRIALKSLGRRYLELHDEIADLDVMIAALVNDLAPELVSRNAIGYETAAQLLLTAGENSNRFRSESSFAALCGVSPVQASSGKVTRHRLNRGGDRAANSALHIIAIGRLRTDARTQAYVSRRLAEGHSKLEAIRCLKRYIAREVYSIIQRRNSIINQSTVST

SEQ ID NO: 101352 - protein, 349 aa, unidentified
MLAEKVDYVIGVDTHRDQHTLAVVAAPAGAVVAQRSVRASAAGYSDALRFAGRHAAGARVWAIEGAGHYGAGLTRYLTSRGEAVIEVGRSARTERRLRGKNDPLDALRAARSALAAETPSLPRAGEYQEALRVLLLARRSAVDVRRRALVQLRSVIVTAPESVREELRQLPVGQLIRRCSRFRRSASRTPDELAIVLALRSLARRIEAATAEAAELEHEILTHVRKLVPKLLDEPGVGPIVAAQLIVTWSHRDRLRSEAAFARLAGVAPLPASSGLTTRHRLSRGGDRQLNRALHTVILHRRQHDPATRDYIARRVADGKSARDATRILKRYLARHLYRVMQNTTPLMT

SEQ ID NO: 101353 - protein, 406 aa, unidentified
MDVIYPRCAGLDVHKQTVVACARIAGAGAPWQEVRTFETTTSGLLALADWLESFGVGHVAMEATGVYWKPVWHVLEGHFELVLANAAHVKNVPGRKTDVNDATWLADLLAHGLIRASFVPPVAVQELRTLTRTRKQFVRERASHVQRIEKLLEDANIKLTSLLSDITGKSGRAVLQALIAGQTDPERLVACIGRVKASRAELLEALRGRVSAHHRFMLQLHQGHIDALDQAIAAIETEVGLGLEPFRQAARLLSTMPGISTISANVIVAEIGIDMPRFASAGHLLSWACLCPRNDESAGKRRSTRLRRGGKWLKTTLVQAAWAAIKVKSSYLQALFHRLRARRGTKKAIVAVAASMLTAAWHMLRDGTEWQDLGAAHFDRADARKTANRLIRRLEQIGYQVSAVPA

SEQ ID NO: 101354 - protein, 425 aa, unidentified
MLEKQYSRQVQNRKRIGNRTLVVGIDIGNAFNAACFMDKEGNVLGRYPKIYNSRKGFDFFHSMVEQTKRKHKLTRVFIGMEPTGHYWRKIAFFAKEKGYEVRFVRTTAVRHQRELDESSPAKSDIKDAFTIGNIAREGKYIDTVIEESVFRNLRTLAHVREKTVRSSTSAIHVLQAVLDDYFPELRDIYWSAKAKGLMALLARYPFPEDIRTAGLPAVTALLEPTNPRRRQAREKAKQIYQAAQESVGLKAIGKADRMRLATALEEVMRTQERIKDIERAIKELLKQIPAAASIQSLPGVGLVSSGIFLGELGNPDYFKNPRQIIKYAGYDPKEDESGLRVGRKIISKKGRWLLRKILFFMTLGVVQRSSFFKEYYEHKKKGIHHPLKKKEALCAVILKLIRVIFALMRDRRMFTEELNRCREAA

SEQ ID NO: 101355 - protein, 457 aa, unidentified
MSKRKSKAKRKSFQVPKLPAQLQHMNLNAAGIDIGSEQHLVAVPEGRDSVSVREFGTFTSDLEALAAWLKQCGVTTVAMESTGVYWIPLFELLERRGFEVKLVDARHVKNVSGRKSDVLDCQWLQQLHTYGLLAGAFRPPDEVCVLRSYLRQREMLTQSASMHIQHMQKALQQMNLLLHNVVSDITGVTGMKIIKAILAGERNPRVLAGNRDERCQHTAVTIAKSLVGNYREEHLFALRQAVDLYEIYQAKIADCNQAIIKHVEQQPDITDDGPPTPEKPVPARDRLREGVDVRDLLFKKSGVDLFAIPGLAADTLLTLASEVGFDLTPWKTEKHFASWLNLCPGTRISGGKLLKNKTKRHPNRATQAFRMAAASLHHSQTALGAFYRRIKSRAGGQYAVTATAHKIARIYYAMLTRGTNYVELGQQAYEQRYKKRRLDHLKVQAKSLGFQLVPCAT

SEQ ID NO: 101356 - protein, 351 aa, unidentified
MMIIGCDFHPRFQQISFLLEETGECGQRRLMHTAEAVEYYRSLCGARVRVGVEATGSYGWFRRLLSELGHELLVGDATQIRASNPRRQKTDKRDAEHILGLLVEDRFPAIWQPPAENEQLRQLLLHRSRLVRLRTRVTNQLEGMAKNEGLLLPGGWSNKRRKAIEALPLPGWYGERRKDLLALLDRLEERIAPLDKAVSQAAANNAEACLLMTHPGVGPIVSLAYVLTIGNWQRFPRGKQVGSYLGLIPSEESSGDKRRLGHISKQGNTLVRWLLVEAATTAQRYDASWHRQYLRLSMTKHHGVAKVAIAHKLAVRLYWMLRSGEDYQHVRERGSTARQSECPGGRSRAAD

SEQ ID NO: 101357 - protein, 354 aa, unidentified
MKRSTKYVALDMHQATTVASVREESGRVIARTVLPTEAAALLECVGGMRGAIHVAFEEGTQAQWLHELLTPRVDRVVVCDRRGDPRQGNKGDFVDADQLSEGLRRGGLRAVYHGDGHRATLKELTRTYQNLVEDSTRVMLRLKALFRARGIAAAGRGVYHPRNRARWLGALAPRGAHFRAEALYAELDVLRGLRPKGKTAMIAEARRDPAWARLRTIPFLGPVRVAQLLATMQTPWRFRSKRSWWAYVGLAVVTKTSAEFTLVAGRPVRRRRAPLTRGLNRNHNRVLKDVFKGAATAATGRPGPLQDWYHGLLAGGMREELARVTLTRKLAALTLRLWKKGERYDPTQLAIQAR

SEQ ID NO: 101358 - protein, 343 aa, unidentified
MQTVTTIGLDIAKSVFQVHGVDAIGQVIIRRQLKRRYVLAFFQKLPPCLIGIEACASSHHWSRELRALGHTVRLMPPAYVKPYVKRQKNDATDAEAICEAVTRANMRFVATKTPEQQSCLMLHRTRHLFIRQQTAVINSIRAHLAELGIVAPVGRKGVMELLHVVADPSDKRVPEVARACLAALGTQLLSLKEQIVRFDRMIMAWHRSNEASKRLHYIPGVGPMLATALVASLADPKAFRSGRNFSAWIGLVPKQHSSGGKDRLGSISKQGDRYLRSLFVAGALSVIRYAKIHGTKHRPWLTALLARKPTKVAAIALANKLARMAWAMMARGERYKEPVALAA

SEQ ID NO: 101359 - protein, 414 aa, unidentified
MNLAGDKSVKSLRCFAAKFSGVVLGFLRHWLKESLGLLDKKGLRNWNVCFAKNKQHTKREPQVNSKSSSKTNYSGAKVYVGIDVHKKTYTFTAYCNGAIVKRATVPADNKKFIDSAKKWFLGAEIFSCYEAGFSGFKLHRDLVAAGIKNIVVNPASIEVSAKDKKTDKRDSKKMGEQLSVGRLTGIHIPTVEEELARLITRTREQLMKERNRAGHRIKSKLFQFGFINKDDDTIMSEKYLRSVESMNLPKELNYAIGLLIKQWRFLSEQLDDVKIEMKAQSFEDSKSEAIYQSVPGVGDVSARVLSNELGDLSKRFKNQESLFQFVGLTPSEHSSGEKVHKGNIDRQGSARVRKILIECAWRSISVDGVLKDCFERIASTRGKKRAIVAIARKLIGRIRACFMNQTEYCIGLEI

SEQ ID NO: 101360 - protein, 450 aa, unidentified
MARKRKQASKSNRAVLPVMKPDAAGIDIGATEIFVAVPADRAEENVRSFPTFTQDLYALADWLKHCGIRTVAMESTGVYWIPLFQILEEREFEVCLVNARHVKNVPGRRTDVSDCQWLQFLHSVGLLKASYRPEQEVCAVRSLLRHRESLVQMAATHVNHMQKALDQMNLQLHHVISDIVGQTGLAIVDAILDGEREPQKLAKLRNERIKASEEVIAKSLVGDYRPEHLFTLRQSVAAYRSYQKLIDDCDWEIRQRLHDFQSPNPPAETAEEKSRKVRSPDGVLKSELKRVFGIDLTQIPGIRTGIAQTLFGEIGPDFTKFRSASAFASWMGLCPDNDISGGKVLWTGTRKVNCRAATALRMAAQSLHHSKSALGDFYRRMRAKLGAPKAITAAAHKLARIIFHLISNRQQFDDSKFAADQLRHQKRQEIKLRAKAKSMGFELIPLQHAE

SEQ ID NO: 101361 - protein, 355 aa, unidentified
MNSEKYIGLDVHQATISIAVMDSTGKVVMESILATKAATILEFFEGLRGTLSVTFEEGTWAAWLYDLLKPHVAKLVVCNPRKNALLKDGNKSDRIDARKLAELLYLNKLSPVYHGETGMRMLRELARSYLTIVKDTARVMSRLKAVYRSWAIPCAGRDVYYRRHRDEWLGKITEAGVRRRTEQLYLQLDMLQHLRQQARRELLAESRRHPITAKLRQIPSLGPIRSALAVALIQTPNRFRTKRQLWAYSGLALETRTSGEYRYVKGQLQRSKKQISIRGLNKDHNHDLKGLFKGAATTASVRPGPFQDFYERSLAKGIKPTMVRLTLARKIAAITLTLWKKGENFDADKLKSQAA

SEQ ID NO: 101362 - protein, 394 aa, unidentified
MKLIGIDIGKNKHFFCVMDQQTGEIISQPVSFSNDKEGFDFLVQKIKSYPKDSILIGMEDTGHYHFALLKYLLDLQYTVALINPKTTDFNRKMQGGITKNDKLDTINICDVLDTPERKKQYRITKVNSFDLYEQKQLTRHHHNLKEEENVYKNRLQKCIDIVFPEFNNLFNSKYGTVYMNILKMFGSAENIANTDIRTIRKCFEIEGRGNRISLTPERLKECARSSIGISSSAEVIQIKHLTAQIELIEEQLTEIDKKIEEFSIQNNSPILSIPGISHFSGTSILAELGDISNYSKPSQIIKFAGVAPLHYESSQFNAQHTAITKKGSKYLRKTLYQIILPVIRHNPVFNKYYQLKISQGKGHRCAQGHCVRKLLRIIYHLLKTNQQFDPQLLR

SEQ ID NO: 101363 - protein, 447 aa, unidentified
MGARSTDPTLTENGDGPGPAGTLYVGIDVGRRSHMVTGIPRLRMEDGSWERVAARRFASSGGGYRELTAWLATSGLDPKQIQIGLEPTGGWYSQTVAAWLVRRGYQISWLQNAALHERRRLAIGKQTKTDALDARLIARLLYERDCLGSQRGFLHRGPRSADALRLLVRNRSKLVEQQTRYRLQLTAIEDVLFPELKEFFEASITGPAVRSLLEAFGTPQQVAAALPDDLYEAVVRKGRARRHAGRMAELQMLAANSAGLVDEIAPILAAQDWLLHQLRLVEGQIANVEEAIANALESWPLPERVIFNSLPGMTALRQAVLLSVMGDLASFQNDRQLRKLLGWYPEAKESGTSVSKHRLGQSGNRLARREIWLWVMFLISPRAPATPFRDYYERLRSRGVAGRTAIGHVAGKLISVLFHCVRSGHLYDPGRHARELGRGDVHPGLGV

SEQ ID NO: 101364 - protein, 341 aa, unidentified
MENCGIDLHQKSSQVTVVDEEGEVLERASIPTTRAGLERWFGKRERMRILLEASGSSPWVVRRLRELGHEVDVIDPRRVRLIAQSTLKTDRIDADILAELARLRTKLRTLVWQRSELTQRQRGHLRVRRALVEARARFIVTVRGLLRSFGFRVASCRSDRFAARCEATAIPPELAEVITPLLTAIRDLDARIAAMDEVVEQVGHLYPAVESFQDIPGVGPVVALAYLLSVEDPSRFRRSRDVPGYLGLRPNLRASADVVRRGRITKEGDSDVRRLLVQAAHAHLRSHADTALKRWAESLIPRIGKRKAIVALARKLAVLMHRLWITGEVYQPFPNHTAMAA

SEQ ID NO: 101365 - protein, 415 aa, unidentified
MERILERCCALDVHKNQVTACVHVPDQAGNRSELRAQFSTMTAELLALRDWLQGLGVTHVAMEATGVYWKPVYYLLEDDFELWLVNAQHVKNVPGRKTDVQDAQWLCQLLEHGLVRASFVPPKPFRELRDLTRYRKSLTWERSREANRLQKQLEDANIKLASVASRVLGASGRAMLDELCEGNNDPKALAELAKGKLRKKLPALRQALEGRFSSHHALLVSHLLAHIDYLDETIASLSAEIEERLRPFEHELELLCTIPGVGRITAEVMLAELGPDMSRFPSDRHAASWAAICPGHDESAGKRRSGKTRKGNRWLRTALIEAANSAAGRTRGTYLNAQYLRLKSRRGHAKAIVAVAHSILVSAYHVLERDQTYEELGGDYFISRVDTEHLTRRLVRQLERLGQTVTLTPSTAEAG

SEQ ID NO: 101366 - protein, 397 aa, unidentified
MIAVGIDISKAKSTVAVIDSDGTVLASPFTMAHTQPEMEAFVSYLKGLGEPTTILMEYTGHYHYPVLKKLQDEGFPVCIVNPYQMKKYGDVEIHKAKTDKKDALRIAAYALEKSYKLVPYSSMEQKYEDLKFLSRQYSQRITYVAKLKVQLIALLDQTMPGITRILPLNSRNPEKCALLLFIKRFKSFDEIQRIGKARFLASYDVLAKKASERSASSKGLSIYELAVDSITTRGEDPYIWISQNQCVDLLSATQNAADEIISQMRNIAETIPEYKVLRAMHGVGDRLGPIILAEIGDVHRFHSGKALNSYAGNDAPPYQSGQFESRNRHISKRGSSALRKACYEVMQALKLTKPQDDPVYLFMLKKEQEGKPFNVAKMAGVNKFLRIYYARAMELYK

SEQ ID NO: 101367 - protein, 421 aa, unidentified
MESRTERRWAGVDWGNERHAVCVLDERGKEVERFEIPHTASGLEELIGRLRALGPTDGVAVETTRNLVVQKLLEAGFVVYPVNPKLSHAWRAGWKVAAPKDDRGDAEVLAEGLRQRHGQLRPLRPDDPRTRELAMLCADEASLIANRTALVNRLQGALKEYYPQALGWFEDWTSPTAWDFVLAFPTPEDLAQARPKKLYGFLKAHCIGLRLIWQERVEGRGNAPRWPNDRATVEAKSFLAIALAKELRALQASLDLYRERIEKLYGDHPDSWLFSSLPGAGPKLAPRLLSHFGADRGRFDSPESLQILSGASPVTKQSGRSKCVHMRRQCQRRFRNTLHLWAFLTIERSVWARAFYDRARRTGQSHSLALRNLARKWLKILYRMWQNHCPYDEGLYLAALIRRRSPLVQEIASLQPSTTGG

SEQ ID NO: 101368 - protein, 347 aa, unidentified
MRYFVGLDVSLKKTAVCVVDEQGKVIREGFAETEPAMLDVWLKETGLAFERIGLEAGPCSSWLYRELTATGWPVTCIETRHAKAAMQAQNIKTDRNDARGIAQMMRTGWFRPVHVKGEACQKIRAIMTARRCLLDKRIDIENHIRATLRNFGLKVGAVTLTSFEARVRELMEGDGDLEACIAPMLEVRNKIHEQFRTLENMVMGVVRKDETCRRFMTVPGVGPLTALAFKTAIEDPRRFNKSRNVGVHLGLTPRKYASGEVDYNGRITRCGDFFAREHLFEAAHSMLVRSKKWSALRAWGMRVAKRSSISNARVAVARKLSVILHRMWIDGTDFRPGKETPNAALAA

SEQ ID NO: 101369 - protein, 388 aa, unidentified
MKKRTTRASGTESTATNSDGAERAAAHRLVKVAPGVGPNRTVGVDLGDRTSHFCVLDEGGMVVERGKVQTTREGFRKRFEGVTPMRIALEVGTHSPWVSRLLKELGHEVLVANPRKTRLIYENRGKQDSVDAEALARIARLDPKLLYPVEHRPESVAQDLAVLRARDALVRTRTLLVNHVRGAVKATGYRVKKCSTRTFSDQAVDQIPPEVHEALSSVLTTIEVVSTQILALDRRIGELGKKKYPETALLRQVGGVGPIVALAYVLTLEHPSRFRKSRAVGPYLGLVPAKSQSGDSDPQLRITKEGDSFLRRLLVQSAQYILGPFGEDCDLRRFGQALSVRGERNAKKRAVVAVARKLAVLLHRLWRTGEVYDPLRKAGTPQEAAVAA

SEQ ID NO: 101370 - protein, 422 aa, unidentified
MSKRRYSAIGFKQVNWARLSEQVVGQRVVFGVDVAKEDFVGALLDAERTPLVRVKWTHPQDLPALVEQLVALSEVAQLAIAMEPSGTYGDALRWQLVRAGLAVYRVSPKRVHDAAEIYDGVPSLHDAKAAYVIGRLHLEGASQPWCEPSELRRTLTAQLNLLQLYKARERAGVNRLEAQLSRHWPEALRVLEPGALTLVQLIATYGDAAQVSAQPDAARALMRRSGRGALRPEKIEQLLASAEHTLGLPCIGAERRLLQALAQDLLETREKRRALEQDLEGQVGADTTLERLAAVVGQTTSAVLVATQGVPQNYPDATSYVKSLGLNLKERSSGKHKGQLKITKRGPGIARYYLYYAVLRWLHSEPVIQAWYQRKVQRDGGLKGKAIVALMRKFSKALWYVARGAPFEPRKLFNIRGLESAT

SEQ ID NO: 101371 - protein, 386 aa, unidentified
MNYIGIDISKYKHDCFIATETINQQFSFENSQSGFKELLGYFKPYSKQEMIIGLEATGHYGENLKSFLTLHGYSFMEINPFLVKKFGEAQSLRKTKTDKKDAQMISTYMRSVDYKAYHHQSYHISALKSLTRLRFKLISIRTKHYNMMTKVLDVIFPEYKSFMREQGYSETSLYLLKHFSSPDRIAKMKENHFETLRKLSRGKFNYPKFVKLKALASQTIGVTQDHQLFKLKTSISYVEMISQDIDETEKQITALMDQYPTYIQTIKGIGVISAAVIICEYGDISLFSNPAEMLSYAGLDSSIKQSGMMSSTGKLVKRGSKYLRATLINICQTVMIYNPIFYAYYDKKKQEGKHHRVALVHLAKKLTRVIHHIETNKEDFDSKKLK

SEQ ID NO: 101372 - protein, 351 aa, unidentified
MSILAIDLGQSKSVFVFGGDQREERFGSFNTNSDAVRKILMKHKPTLVVVEICPLAAMVHDIAAELGIRALVADTTQDAWAWRNVKRKTDRDDALKLLRLAMVNQINPVYIPPPEMRQWRGLLKAREAAVVAQTRCKVRIRALLVTVDRKLPRGKGGWAQAALDELRQWSRPLAECSPTELWRGALAIELEQLELLDKHVDAFDSKLRDWAKTDRRLQLVSTIPGVGTVTAATIVAVLDDPHRFRSRRQVASYAGLTPRRYQSGQMDHQGRISKRGNAMLRRILNQAAWASVRYNPSQREFYLRLSNNGQKGKRKRAVVAVMHKLLVTAWAILRDERPYQTPGSNAAAQAA

SEQ ID NO: 101373 - protein, 328 aa, unidentified
MTRIICGVDISSASLEARIGREGATGSFPNTAEGIAELAAFCHAHQVELVAMEATGGYEKQPFALLSEQDLPVAILNPRAVRQFAQSMGQMEKTDALDAGMIAWFAEVKNSMPLCLAPASHQHLRALVTRLRQLTDIRTAQLNQQRLISDPAVQASFDELLAVIARQIRALAQSIASLIEHDPLWHQLDQVFRSIKGVADRTVARLMAEMPEIGALSNKTISKLAGVAPLARDSGKHQGKRAVRGGRAAVREILFIVAGVVGRYEPDFIAFQQRLSAAGKPRKVIRIALAHKLLVRLNAKAREVRRQLATTSILDATSVLAAPIPVTN

SEQ ID NO: 101374 - protein, 400 aa, unidentified
MKGPIVSIDVSNGNSHFQCFTQRGTKMGKVHRISHTVEGFNFLKSKKEELEKKTNEEVVAVYEATGVYTKPLERFLEKNEIKQYSISPLQSAKQRKTEIHNKKTDKKDPESIAEVYYIKELREDEKEADLYHELRTANRVYEDCLVHLRKYKVTFQSHLSIVFPGYMKLFQDGYSQISLQLLEMYPHPDRLKNKQPEKVAKKLNKQTDHSFEVCLKTAEKVIAFANKTYPGCDKEDAWVAVLVDDIHHLQDTMEEAEAKLDKIIELAKATPYYSIILSIDGIGPNLASRIIAEFGDISKFKTRGAMVAYVGNDPNRAESGDIEGYHLSISKKGNKRLRCILYLAVTCSIRSRKENPINAFYQKKRQQSTPLKSKAAKVACITKLIRTIHGMCKTGTVFTS

SEQ ID NO: 101375 - protein, 455 aa, unidentified
MGKRNGLSRGDARRNARLLRLRGVVRHDRAILAIDLADTSQALAVCDHDSRVLARRSVRGHAWQLEEALRWGRQVAVQHGYAAVVVACEPTGHRWRIVAELCDRLGMELVCVQPLLVARAREGEDLTGDKSDPKDAVVIARLVGELRCYLPERADQVWARLRQLGARRVQLTTTAGACRQQLRDLLECAWPAVLEAAAKPLDSLTWRAAVQVMLAGTKGDPASIRRLGYPRFARRVATALARWGGQRCCLRIMRAVWTAATDPGMATDGVLAQRPGALERARLTLDDWHHALDGLAEAERRMTGILDQLQLTGLVKSIQGLSVVGAAAILAESGDPARFDTARALVKHAGLCPRDNQSGAYAGTTRISGRGRPALRLAAWRAVWGALHANPVLQARHAHLTSRQRNQLTPTQARTALAAALLRWLWVVVTKRIDWQAAIAAGQLDPRKEVTATAA

SEQ ID NO: 101376 - protein, 338 aa, unidentified
MGQVVTIGLDLAKSVFQVHGVDAAGEVIVRRQIRRGQLLQFFAKQPQCLVGMEACASSHHWARQLLALGHEVKLMPAQYVKPYVKRGKNDAADAEAICEAVARPTMRFVAIKTPAQQSAMMLHRVRLVLNRQRTQLSNAIRAHLGEFGIVAPAGRLGLQHLLDVLADEAEERLPSEARTCLQMLASQLEVVKAQILDNDRRILADARSTELGRRLMTIPGVGPLLASALVATGADPSIFRCGRDLAAWIGLVPRQNSSGGKERLGSICKAGHRYLRQMLVVGAMAVIRYADPKRRPWLAQLLARRKAKVAAVALANKIARTAWAMMMTGERYREPLAA

SEQ ID NO: 101377 - protein, 407 aa, unidentified
MTTSITAVIDSPPELEVVAGVDTHHVAVLSTTGTRLGDLQVPARTEGYAQLLAFIRSFGSTRLVGIEGTSSYGAGLARYLMSQGVEIREIVRPRRAQRRHGKSDPIDAYAAAAQALAEPETLPIPKTGDGVIEQIRVLLGVRRSAIKARVAVIRQIKSMLITAPEAIRSRWEGLNERCLVEYLASTRPGPATGSVTTATGHALRRLARRHQYLTVEITELEEELRILVGRAAPAMIATKGYGVITTATLLVTAGANPERLRSEASFAALCGASPIPASSGKTNRFRLNRGGDRQANWALHQIALGRLSNDERTQNYAGRLRTNGKSKKDVLRCLKRAIAREAFHLIVHPEPVTATEDLRDLRRQRGATLVQAAMSIGAESARLSELERGKRPNAELATAYRAWLTAA

SEQ ID NO: 101378 - protein, 412 aa, unidentified
MQDILTCAMGLDIHRDVIVACLAKGELGTDPEIEIRSFSTLIPEMRKLRDWVLEAECRYVAMESTGIYWQPIYEMLEPCFDGQINILVVNARHMKNVPGRKTDMRDAQWIDPLLRAGLLNGSFIPDKTFRELRHLTRYRKSIVRDITAQKNRIDKFLQSSGFRFTAFLSDAFGASGRNIIRHLMEYGNISREALDRCLKTQTRKRIDEILIALNGSLSEHQRGFLRMIFGHLEALEQHRHTVEDAITKEITKHEEALSLLCSIPGIDVTAAAAIIAEIGTDMSAFPDSQHICSWAGLSPGNNESAGKRKSAHINKGDPYLKSMLCEVGWVISGKRTLYLSGWYWRVKQRKGAKRATIALARKLLTLIYTMLKTGTPYNEECFEIRRKQSERKRAGRMVNELQKLGYFVVAPD

SEQ ID NO: 101379 - protein, 358 aa, unidentified
MNKKIVAQNSTVMVGADVHTKKHVVSVKTGREVLGTCNLSPNPEAWRSFLKRFPGCELHVTYESGPHGYNLYDWLTGMNGENGQAVHVAVAPPAMVPKAPGKRVKTDKRDSIDLIRAFETDSFRPVVAPDKQKREERELVRTRSQAKAEEKRLKNQIHGMVKFHGIEYPCGGRWNDKWVQQLVANAKTAASTGDLVFALKLKLKMLGEAQKAVAALDRRIERLYAKGTCSEVAQKLTVLKGIGKLSAVIIATEVADFGAFDNSDAFASYVGVVPGEASSGETTRRGHITRAGNRRLRWIFVECAWTRIRHDPEAKRIYNRIKAGKKDRSRIAIVAVARRLAVKAYHQVVNGEQSCKAA

SEQ ID NO: 101380 - protein, 339 aa, unidentified
MELYAGIDLHSNNSVVTVLDGADRTVYAKRLPNDLGTIMAALRSCEGTLRGVAVESTYNWYWLVDGLQDAGVTVHLVNTTAVKQYDGLKHSGDFSDARHLAHLLRLGILPVGHIYPRAQRAVRDLLRKRSQLVRQRTAQILSVQNLLARNLGARASSREEVKSWQAESIDAMELLEEQKQALRATLAVMRCIDAQISALERSILAKVKMRAEYNALRTVTGIGNVLALTIALETGDIERFAGAGNFASYARTVKSTRESNGKKKGQGNPKCGNKYLAWAFIEAAHFAVRYDATIKRWYQKKCASSLSVVALKAVAHKLARACYYVMKDGRSFDATRAFG

SEQ ID NO: 101381 - protein, 343 aa, unidentified
MNINVLGIDIAKTIFQLHGIDSSGKRVLKQRIGREKLSAYIANLPLCTIVMESCGGANYWARVFQRYGHCVKLISPQFVKPFVKTNKNDANDAEGIVEAASRPSMHFVPIKQVEQQDIQSLHRVRNRLVKNRTALINEIRGLNLEYGIAIPQEALKVKSHLRAIIDDRGNELTASSRELMQDLYDELIELEERLKKIEKKVKLICKENDQCRRLLSIPGIGEVTATAMVAAVPNANAFKNGRHMAAWLGLVPRQSLSGNKQLLLGISKRGDRYLRTLLIHGARAAHCRCKNRDSQYGEWLTRKKETLSLNKAAVALANKNARIIWSLLKTGHEFNSNQQKAAA

SEQ ID NO: 101382 - protein, 348 aa, unidentified
MIVGIDVHKRAHVAALLDERGGELGTLDFANSPEGMRRLRSWLVAHDAGEAVVGVESPAGYGRLLVASLETAGHQVLNVPAWRTHRERGRHGPGKTDPGDAIAVAQVVLRKRAELGPALEPELVRALALLELQRRRLVRDRTQAIQRLRADWNQVDPVAEARVVNLTRQRELRRLKRVSFGDGLVEQVAARCIRDLARDIEDLNQRIAALDTEIAQLLTEHGNPVADLHGAGPQIAAAVIAHAGDVRRFRNAAAFARFCGAAPIPCGSGQTAGRHRLHRGGNRQLNAALYRIAIVQARHHPPARAYLARKIAEGKTPREARRALKRHLANVIYRRLYAWAEATPALNT

SEQ ID NO: 101383 - protein, 344 aa, unidentified
MDHFAGLDVSVKDTSVCIVDDTGKVVREVKVASEPEALLAVLKNPAYHFKRIGLEAGPLSQWLFSALAEAELPAVCVETRHMQAVLKAQINKTDRNDSRGIGQMMRVGLYRPVHVKTLRSQKLRMLLTHRKLLQSKAIAIDNDLRGTLRNFGLKVGMVGNAKFEARIKELVENLPDLAVLVEPLLVVRRVLREQLVILHRRLLAIVRDDEVCQRLMTIPGVGPVVALTYRATVDVPARFRKSKSVGAVFGLTCSRYQSGEIDRSGRISRCGDEMMRVMLYEAAQVVLYSKKWSWLKAWAMQIARRRGMKKAIVALARRLAVLMHRIWVDGTEFRWTRAQAAAAA

SEQ ID NO: 101384 - protein, 362 aa, unidentified
MRIIGCDLHARQQTLAMLDTTTGEVVEVTLKHEGDNVREFYSSLPRPVRVGIEATGSMQWFLNLMEELGIECQVGHPAQIRASAPRKQKNDRRDAELILKMLVEGRFPAIWLPSKELQDLRSLLRHRHQWVRMRTRIQNALQSIALANGLRRGTALWSHEGQSRIAALPLAPHTAYRRSELQAMYEKFEAEIEKLNRRVEEQACQRPGARLLMTHPGVGPITALATEVFLGDPARFADSKAVASYVGMIPREYSSGGRQRLGGLSKQGNPLLRFLWGEAGAHAARKDPELQRFYRRKLVQKGLGKASVAVARKLGIRLWIMLRDQIEYNEFCRRGQKQPKSSDACAGMPETRYGAKSHRPID

SEQ ID NO: 101385 - protein, 360 aa, unidentified
MQTKTNTTNASNANTSAKLYIGLDIHKRSWKVHTSTELFDGKTVSCPASASSLRKYVTKNYPNHEVTIAYEAGCFGYAAHRAFSSYGWRSLVVNPADISKTGKSQFQKTDTLDARLICRELKDGRLNSIAIPTEEREQLRCLFRRRVALVKDFRAIKSRIKMQLLYLGIDIPEAFDKQAKWSNAFLEWIRSQSCGYDTATATIQSELCHYEFVDGQIKQVSNRLRAYCRKHHKEDYFLLRSVPGIGKIVACGIISEMGDLRRFKNFKQLASYVGLCPGVHQSGDNYRSTGLSIRGNRIMRSYFVEASWIALRHDPVMQAYWRTHQGKDPKRILIKVARKLLSRTHAVIKTRIPYQAGVVA

SEQ ID NO: 101386 - protein, 414 aa, unidentified
MKSCLFVGIDTHKNSHTAAVLDGYFDVIATVTFANDKAGFISLEAKLKKLSRGRDIIFGLEDSQGLGSFLASYLLGKKYTALEINPVTTDRGRKHTVSRDKSDERDAIVIAKTLIRERNNLHPVRIDRNSVALREMIGYRQMLVGESTRIKNRLHIVLFNQYKGVLGCFGSPFGKCALAFFLRYPDSASLEEVDPDSLSIFLKRHSKGRFGKKKARAILSSTDNSIADSLTDTRARITAAHIERLLVIQKELKEIKKILTVLVKTSSYYCLTSIPGIDIVTAAKIISGVADISRFSSASKLARFCGIAPSEKSTGRKKKYEKSKYGNKSLHSTIYYVALAHISRTRNGNDKNPISRAYYLKKVSEGKTKKEAITCLVRRLVDIIFAVMRDRSIYNFSKSRFTKQHDAKIDSAAA

SEQ ID NO: 101387 - protein, 412 aa, unidentified
MIVGIDVGSETHYARAFNWRNYEYSKKPFAFSNDEAGFPSFKDWMDDIAEKHGMETVIPGMEPTGHYWLNLGAYLQEQGMKPVHVNPHHVKKSKELDDNNQSKNDRKDPKTIAGLVNEGRFSYPYIPTGIYAEIRNLSNLRIQTQEEITRIKNRIARWFSIYFPEIKDVYRNPDAVSGLMVIKQAPLPCDIKELGVDGVNKIWRDARLKGAGIKRARTLVTAAEHSIGNTEAPRSARKEIRNLLEDYEGYKKWMDELMEEIEKTLSEIPYIDKLMEINGIGIKAVSCFIAEVGDIGRFDNPKQVQKLAGYSIVADSSGKHKGESRISHRGRTRLRYALYEATISVIGKNKEFKEIHSYYRTREKNPLKKMQSVIAVACKLIRIFYTILTKGVDYDGQKMLNDIVRPEIQPAA

SEQ ID NO: 101388 - protein, 312 aa, unidentified
MMQEIFVGVDVAKDWLDSHHPQLGESRIANEPKALRVFAAACAKEGVWVIFEASGGYDRRLRAALEAANVRFSRVNPRQARDFARAMGVIGKTDRVDARMLSAFGARLHPAQTEPLAAARSALQAQATRRRQLVEMRKQEATRLQQTADVEARADIRSHIAVLDRRIDKANERMVALIGADPELADVERRLRTMPGVGPVVAATLIAELPELGRLDRRQIAALAGLAPIARDSGKRHGRRTIGGGRPIVRAMLYLAALHASRHSPGFAAFRRRLADAGKPPKVAIIATARKLLDALNAMLANGTDYRKPAES

SEQ ID NO: 101389 - protein, 345 aa, unidentified
MATMPQTLGGVTVGVDTHGKIHVGAVADPLGRILGTIEVTTDERGFRQLENYAKSFGTIERFGVEGTGAYGATLYRWLTNRGHEVLEVDRPDRKMRRMQGKSDPIDACAAAQAVLSGRASGVPKARDGAVEAIRVLRMARGSAVRGRTQAMNQMHALVTSAVDPLRTQLRSCSPAKLVDRCVGMRPGKLDSPAAATKFALRELARRHRALDEEVVRFDEELSRLVAERAPRLLALVGVGTDVAGALLVTAGDNPDRLRNEASFAHLCGVSPIPASSGRIHRHRLNRGGDRSANQALWRIVMVRLSWDERTRAYAARRTSEGLSKREIIRCLKRYVAREVYEVLVA

SEQ ID NO: 101390 - protein, 399 aa, unidentified
MIAAGLDVHKDTIFCGIHNGKKNLEVKEFSTLTHDIRNLGEYVRSLGGHTIAMESTGIYWIPIWNILDEMGFELILVNPYLIKQMPGRKSDIKDAQWIATLLQKGLLRASLVPDKKIQELRTITRKYMKLQQRGVTIEQNMERILEVCNIRITSLVSNISGKSIYRIIESIVNGVDAPEELEKLVHGRIKNKHKEKVRQSLEGYIPEHHRFTLTLAFEEYNLNLSQINRCLEKMEELCNKEYSKELELLQTIPGVSLISAMILIAETGADMRAFENSGKFTGWIGLRPRNDESAGKYKSTATTKGNVYLRATLVQIAWAATKTKGSYFKEKFNRLAMRKAKKKALIAIARKIAVVIWNVLNDMKKYNPNLLPILDPQKLMASLNYHQKELERLNKLVER

SEQ ID NO: 101391 - protein, 413 aa, unidentified
MKNTSNSQTKSGQKTKTTKARGPVQRDSKEVMAELVAKLSERLEQKPAQEKAAVGKPKGAPGPNRDRLTVGVDLGDRWSNYCILGLEGEALAEGKLRTTREDVAEFFRALSAARVIFEVGTHSAWVREVVVGCGHEALVANPRLMDGTKRRKRKNDRIDANKLARLGRVDPQSLFPIEHRSLEVRQDLVVLRARDALVSVRTQLINTTRGLVKSMGARLPKCSSPSFPKKVEEMLPAEVREALLPLVGLAEALTDCIKDYDKRIEKLGREKYEHTELLRQVKGVGPLTSLAYVLTLENPDRFAKSRDVGPYVGLVPKQEDSGDSQPQLRISKAGDMMLRRLLVGSAHYILGPFGPDTDLRRYGLRLCERGGKNAKKRAAVAVARKLAVLLHRLWISGEVYEPLRQGAPTAQAA

SEQ ID NO: 101392 - protein, 356 aa, unidentified
MVTGLKHQKEKRSMEHFAGLDVSVKDASICIVDGTGKIVREAKVASEPDALLAILKNPAYHFKRIGLEAGPLSQWLFSALGEANLPVICVETRHMRAVLKAQINKTDRNDARGIAQIMRAGLYRPVHVKTLRSQKLRMLLTHRKLLQSKAIAIENDLRGTLRNFGLKVGIVRTVKFEARIRELVENLPDLAVLVEPLLIVRRVLREQIAVLHRRLLVLVRDDEVCRRLMTVPGVGPVVALTYRATVDMPARFKNSKAVGAVFGLTPSKYQSGEINRTGAISHCGDKMMRVMLYEAAQSMLTRTIKWSWLKAWAMKIARHRGIKKAIVALARRLAVIMHRIWVDGTEFQWTREVAAA

SEQ ID NO: 101393 - protein, 309 aa, unidentified
MEHFVGIDVSKDRLDVHLRPGGESFAVARDGEALAGLVERLRELGPALVVIEATGGYETVVASALGAAHLPLAVVNPRQIRAFARATGRLAKTDRLDAAAIAHFAEAIRPSPRPIAEPEALALGELVARRRQVIEMIVAEGNRRRTATQRRVIRAIERHLAVLQTELSELDSDIDGAIRNSPAWQAEADLLKSVPGIGPATLRTLIAELPELGKLDRRKIAALVGVAPINRDSGTLRGRRTIAGGRAAVRTALYMPTIVASRANPVIATYYKKLRAAGKPAKQALIACMRKLIVILNAMLRDQKPWQPA

SEQ ID NO: 101394 - protein, 390 aa, unidentified
MDVLYQSCAGIDVHQANIVVCILHGPLTSTRPKREMATFDTTTKGLRACHDFLSQFHVEAVGMESTGVYWRPVWHALCGDFELILAQPAHMKAIPGQKTDKKDAHWIAKLTRIGLLPRSFVPDETIQELRELTRQRKHYVESRNRETNRIHKILQSGGIKLTTYIEDIMGLSGRNLLQLLVDGTPITPRIVHQSVYTSLKKKVPQLMEALDGYFSDHHRFMLKQSLEIYDFYQKQIGLLEERMNVYLSQYENHVEILDSIPGIDIITASVIISEVGVDMSQFPTAGHLASWAGLCPGNNESAGKKRSTKIRHGNSYLKKCLCQAAFAARNQKGSPLAERFYQIQSRRGSQKATIALAHQLLKIAYILLKEQITYPEFLAQKKTTRDELVA

SEQ ID NO: 101395 - protein, 421 aa, unidentified
MRAVALDVHRDFCEVAIVAEGRLRSAGRIATRPETLELFARSLDAGDWVALEVTGNAWAIARILEAHVARVIVVSPNDTGIRQARAKTDRLDARTVAKLLWAGELDGVWAPDERVRVMRRRLARRAQLVRARSRAKNEIHAVLMRCLADRPPASDLFGVKGRRWLADQQLTVCERETVDSGLRQVDFLDSEIAQVDQLIAADALGWPEVKRLMTVPGVNVTVAATFMAAVGDIRRFGDRRKLTAYLGLDPKVRQSGVGPANHGHISKQGSNSARHALVEACWSTVRQPGPIAAFYARIKAKRGHSVAIVASARKLACLFWCLLTRGEDYAFAQPSLTTKKMRRLELAAGAPRRQGARNVWSTNQAMRGAERELALQAQRAYERTVADWQAATPAKVGASAAPGHASQGSSKDQIARQTTSP

SEQ ID NO: 101396 - protein, 346 aa, unidentified
MRFYTKLHKYYCGIDLHAKNMYVCIVDQQAEILVHKNIPAHPDYLIQLIRPYLEDLALSVECMFTWYWVSDFCLKYGISFVLGHALYMKAIHGSKTKNDKIDSKKIAMLLRGGLIPIAYVYPQAMRATRDLLRRRMYFMHKRSELLAHIQNTRSQYLVEAFDGPVARKRHRHNIIEKFHEQAVAKTIETDLNLLNHYDSVINDVENYLQRSVKEHDYNTFYLLRSIYGVGKILALVMLYEIHDINRFEKVQHFTSYARLVRPQKESAGKVKGGANKKMGNAYLKWAFSEAVLLLIREREEVKQLHMKLKNKHGKKVALAILSHKLGRTVYYMLTRKKVFDVDKYVN

SEQ ID NO: 101397 - protein, 391 aa, unidentified
MIYVGIDVAKDKHDCFITNSNGEVLFKAFTISNNQDGFNFLYQRIESVMEDVTKVKVGLEATRHYNYNLLGYLIDKSLPTYVINPLYTTLYRKSLSLRLTKTDKVDARTIAYILMSDVNLKSYSNTSYHNEELKSLTRYRFDKVKERAKLKTSVSRLVCILFPELEKLVPTLHMASVYALLSEFPGAKHIAGAHLTRLTNLLSDASKGRYGKDTAITFREAARASIGSNMPAKSLELKHTIKLILELGSEIDEIENEIKFIMDEINSPILSIPCINYRMGAMIIAEIGDFSRFDSPDKILAYSGFSPSTYQSGQLDSAYSHMEKRGSKYLRYALYNAAKYVCHWDSTFAGYLAKKRAEGKHYNIAISHAVKKLVRVIYHLVKSNQQYIKVA

SEQ ID NO: 101398 - protein, 348 aa, unidentified
MQITTVGIDLAKSAFQVHGVNEHGKTALKKQIRRDQMVTFFVNLPPCLIGMEACGGAHHWARKLQAMGHTVKLMAPQFVKPYVKTNKNDAADAEAICEAVARPNMRFVPIKNVEQQAVLALHRVRQGFVGARTAQANQIRGLLAEFGLVVPQGLSHVLGRVRELIEDASNELPGSFRLLIERLLDHLKELDRQVGELEAQIKASHRNNEASRKLEKIPGIGPITASALVATIGNAKSFENGRQLAAWMGLVPGQSSSGGKTNLLSISKRGDTYLRTLLIHGARSAVRAFQGKQDQSGNLWLQKLLGRRNLNIAAVALANKNARIVWALLARGRAYEPGFSPAKADAAV

SEQ ID NO: 101399 - protein, 403 aa, unidentified
MHSFYLLVKGCDFMLLLGVDIAKLNHVASLIDSSSGELIFSNFKFQNNILGFSSLLEKISKFSVTEIIIGLESTGHYGENFINFFFQKDFKIAVINPLQTSHLRKASIRDSKNDRLDSINIAKALLFGEHRYITQKNLTNFALKKLTRFRKSLIKQKTKTKIQLVSLLDIIFPELQYLFKSGVHSNAVYTLLKKYPSTEKIAALREKSLFSILNKASKGHYKEEHALQLKSLAKSSVGIKDTSVSMHIPQLIELIEMLDSQIKSIEKEIDSSINEDSPILTIPGINTVAAASILGEINDIDNFDSSSKLLAFSGLDPKIRQSGNFSASSCRMSKKGSPYLRYALIFTAWNLVRNSETFNRYYLSKRAQGKSHYNALGHTAHKLVRVVYTLLKKNISYQENLIV

SEQ ID NO: 101400 - protein, 370 aa, unidentified
MLDTTTFVGLDVHARSIKAVSLDVMTGEVRCATFGYDAGAVAEWVRSVDPKARCVYESGVTGFDLQKRLSGLGVDCAVGAVSKMIKPSADRRRKNDRNDAEFLARMLSVGNVVEVWVPDDECEAARDLTRALEDARDDLSRAKQRLSKFLLRHGLAFDERTPTGRRKGNWTRAHWSWIESIGFAERADNDVLAYYVDAVRRAAEEKARLEGLVEAEARKPRWRRRVDSLRCLKGVDTASAADLVFEAGEFSRFRNARSFAAWVGLTPSEHSSGESDRRGAITKAGNEHLRKALVEAAWHYLTCSGRPKDLAKGQAPDRGARRHAAKGVRRLVERREALLARGVHNNKANVATARELACWVWAVGLMAEEA

SEQ ID NO: 101401 - protein, 428 aa, unidentified
MASNEHVVAVPEDKSKDSVRTFKGFTRDLHQLAKWLLSCKVETIAMESTGVYWFDLYTILLDYGFEVYLVNAHHVKNVPGRKSDVSDARWLQQLHTFGLLRASFQPDNITRSLRNHVRQRKSIVQQMSRKTQHMQKAFDQMNIKLNNVIRDLNGTTGTKIITAILEGERDPKKLAQHRDRRIKASEETLIKSLEGNWREEQVFNLQLAYDHYIFLQKQLKQCDAESEKIIQKMTSGNSPKSRTKKVQKSKNNPDFDVAQYLHAALGVDVTQIYGIKEVTALTIFSETGANLKEKFPTEKQFLSWVNVVPNNKITGGKVISSKVKKKKNAAGQAFRDGASALWRAKNPIGDYLRRKKAKSGAKKAVVATARKIAAIYYKMVTEKVEFNPLEISKGKEQYLQKRLKQLEMAKEQTQMLLSDYQHQNSLVI

SEQ ID NO: 101402 - protein, 423 aa, unidentified
MLAESVDEEQIIARVAALDIGKAELVCCVRVPGAGGAKRRLQEVSTHSTMTRSLGDLANRLVDLGVERVVMEATSDYWKPVFYLLEAHGLQPWLVNARDVRHLPGRPKTDVLDAVWLCKVAERQMLRASFVPPRPIRQLRDLTRYRIDLVGARTAEKNRVEKLLEDACIKLSVVASDIFGVSGRQMMAALIAGERDPKVLAEMARTRMRAKIPQLVEAFTGQFDDHHAFLAHMICDHIDTISRMVAELNTRIDSEIKPYRSELELLDSLPGVDTRTAEVIIAEIGTDMSRFPTADHLASWAGMSPGNDQSAGKRRSGRTTKGDRWLRQTLTQAAWAASHTKGTYLSAQYHRLAARRGKKRAIVALGHTLLTIVYYLLERQTTYVELGADFLDRLDPDRLARQLVKRLEKLGHKVTLEPRQDAA

SEQ ID NO: 101403 - protein, 348 aa, unidentified
MESVAGLDVGVKQSTLCVVARGERSMRVVSRQRTATRPVSIGDWLRSQSIHRVGLEAGAQSSWLARELAGQGFQVTVMETRRQRAFGSYSKVKTDERDARLIGEALASGLHTKVHVRSAWSQEVRALLGARLQLKRQAHQCRQFVRGHLRAVGIEVPRGTGRNWLKQAQVVTADRGGLLGQALQAMLRTVEALHEQIGGLDKQLRQLARQDEACRRMMTAPGAGVLTSLALRASLDDADRFPHSAEVGPYLGLTPSRHQSGALDRRGSITKQGDGLVRAYLYEAAVSLLERQKRDCPLRRWGLANQERLGKRRTRVAVARKLAVLMHRLWQSGQVFDWNRGQEAPTKR

SEQ ID NO: 101404 - protein, 449 aa, unidentified
MEEPREVPDEEHERVWERVAAIDVAKGSGVVCTRVPDEDRPGRRRTHVWGVPARVNAIIELGDHLRGRQVQVVTLESTSDYWRIWFVLLEAAGLKVQLVNARTVKNVPGRAKTDKKDAVWLAKLTERGMLRPSFVPPAEIRRLREFTRLRADLVHERTRFWARLEKLLERALIKISDVTSTLDLKSVRKILRAMIAGERRPKVLADLAEGPLRKKRAQLTEALAGRFEDHHGEIAEIFLDEIDRLSGRIDHLSDRIAELLEQIPAAWGIDAGGSTGPGTGTGPGARVLPAVARLDEIAGCGIYAAQAVIAETGLDMTVFGTPGRLVSWAKRCPQTRQSGKKTTSGKAVKGSPWLNGILGEIAASAARTDTFLGERYRRLARRRGKRKALAAVARSVLVIIFHLLADPAARFRDLGPGYYDNRISRDRKISNHVRQLQALGLTVTIEEAA

SEQ ID NO: 101405 - protein, 327 aa, unidentified
MSTQNYAGIDIAKRHFVIGIHGRDKTKTETNNPKGFAHTIDYLHKHNVGLVVMESTGGLEIPLAKTLHRAGFQVVIANPRCTKNYANGFSLAKTDHLDAKMLADYAQALEIKGLVANMLYIPPSEAEEKLEALVKRRSQLVDIRAAEKNRLEQIHESQQQSVKDLIAHLDKLIAELDKDIDSNAGAFGGKGQVLTAIKGIGSTTSATLLSMLPELGTVPHKRIAMLAGVVPPPNQSGDTDKKAGCIGGRMAVRNMLYMAALTASRFEPKIKAFYERLRAKGKPFKVAINACMHKLLRILNARMRDYLVSLQTKSERQSEQQPAPQCA

SEQ ID NO: 101406 - protein, 392 aa, unidentified
MIYIGIDVAKDKHDCFITHSDGEVLSKSFTISNNRKGFDSLFQKIISVSNDLSKVKVGLEATGHYSYNLLGFLPDKGLTTFVINPLHTNLYRKSLSLRKTKTDKVDSRTIATMMMSDMNLKSYSDTSYHNEELKSLTRYRFDKVKERAKLKSSVSRLVCILFPELEKLVPTLHMASVYALLSEFPGADAVASAHLTRLSNLLSESSKGKYGKDTAVMFREAARSSIGSHMPAKSLELKHTIKLIQELTVEIDEIEAAIKQIMDEEIQSPILTIPGISYRMGAMIIAEIGDFSRFDSADKILAYAGMSPSTYQSGQLDNCHSHMEKRGSRYLRYALYNATKYVCHWDESFGTYLEKKRSEGKHYNVALSHATKKLVRLIFAMEKSRRAYIPVP

SEQ ID NO: 101407 - protein, 383 aa, unidentified
MSDHSEAFVAFDTSKLRNAVAIADGGRGDEVRFLGEFDNTPAATAKLVRKLAAKYERLTFCYEAGPTGYGLYRQIKSLGHECIVGAPSLIPKKAGDRVKTNRRDAISLAKLLRSGDLSAVWVPDRQHEAMRELTRARETAMNDLRAKRQQISAFLLRRGVHYPPDKKTWRKMHINWLMSQKFEFTEERIVFEELMEAMRQAQGRLDRLEAAIRAAMPDWSLCKLVIALMAMRGLDIVSAATIVAEVGDLSRFRTPRELMAYVGIVPSEDSTGDKVKRGPITKTGNRRVRRMLVECAWSYQFPPRLSKDKQVKVEAVPQAVREIAWKAQSRLNQRYRALLRRGKLKNIAITAVAREFVGFIWAVAQAVGAAPAAANTKAPAVAS

SEQ ID NO: 101408 - protein, 345 aa, unidentified
MSESYAGQQIVGIDLHRRRSVIVRMTDAGEHLETVRILNDPERLAAVMARAGETPEVVLEATYGWYWAADTLAELGANVHLAHPLGVKMFSYRRVKNDECDAADLADLLRMGRLPEAWIAPPATRELRQLVRHRAKLVGLRSNLKCQVHAVLAGAGVQVVMSDLFGVEGQKLLARVELPIAARARVNSVLGLIAAMDVEVELFAKLVAARLREHPGYRAIQVIPGVGPVLAAVFVAEIGDVTRFPGPAQLASWAGLTPKHHESDTTVHRGRITKQGSRLVRWAAVEAVQRVPVHTRLGQTRDRVAQRRGRNVGVVAAARELIVLVFYGLRDHHIRCLTPARTRTA

SEQ ID NO: 101409 - protein, 396 aa, unidentified
MATIGIDIGGRTHVAARCRDGMSRADREVVRVSQSRAGFTVLDAWLERQAEPVTLVTMESSGHYWMPLASHLRRRDVPVAVVNPLAAKYFAKSRLARTKSDPADARSLAEMAMRDTPPARDPLAGVELRQAARFAMTLVTEQARVCQRLVRLVELGFPELGELFDDPTCRTAREVLRVAPTARAAARRRTATLANANGGPGHRRLGTAKAERLQVAAADSIAVPELEAEVAFEVGLLLDQYDLLERQIADADARVAALLDGEIARRLQTIPGVGPAIAATLLAEIGDIGRFGDFDQLLAFAGVHPAERSSGRKGANPETAWHMSKAGNSHLRAAAYRMAIVGVQHNPVIAAHYARKRAAGKSKMNALGHCMRKALSIVWGVWRNGQDFDPNWGAEA

SEQ ID NO: 101410 - protein, 374 aa, unidentified
MGKLIRVKGLKQLKAVVGIQTIGLDLGDRFSQFCAVGGKGEILQEGRVPTTVAGMQRFFGGMEPVTVAVETGTHSPWVSRLLFSFGHKVLVAHARKLRLIYENRNKRDEMDARYLARIARVDPELLYPVRHRGESAQKDLAVLRSREALVAARTQMVNHVRGSVKSFGARLPSCSTPAFPKRAAEHVPESLKTALLPVLDCVAQLTEQIKEFDRRIHALIEESYPEARRLMQVQGVGEITSLAYVLTLEDADRFERSRTVGAYLGLVPAKDRSGESDPQLRITKEGNALLRRLLVQCAHYILGAFGSDSDLRGHGLRIAERGGKNAKKRAVVAVARKLAVVLHRLWRTGEIYQPLYNTERKSKRVGSGEKAMAG

SEQ ID NO: 101411 - protein, 413 aa, unidentified
MTDESLSWFAAVDWGSEKHQACILDAKGDVAGEREFPHSGTGLTELCDWLLSVACDTSAVAVAIETPHGPVVDALLDRGFAVYAINPKQLDRLRDRFCVSGAKDDRRDARVSADGLRADRHLYRLVQVSDPAVIELREWSRLLEELQQERVRLCNRVRHQLWRYYPHLLDLTDDVGADWFLELWALAPTADKAGRLRETTIARLLKQHRIRRLNAETACRILRQPAIKVAAGVTEAAVLHLRSLFARLRVVNRERHQAERKLDELCTELSERASEGQSGEPCDVAILKSLPGIGRVTLAALLAEASGPLSRRDYPALRTLSGVAPVTKRSGKSNIVVMRYAAHARLRNTVFHWARAAVQNDPKSSCRYAALRKRGHSHGRALRGVADRLLQVACILLQRQTMFDPDRCQPAAA

SEQ ID NO: 101412 - protein, 351 aa, unidentified
MTLTDLVDHVIGVDPDRDRITAAIVCVKTQGEIASRTFPATARGYGLAMRWAEPFTTSARRAWSIESSGSYGAGLTTALAAKGEFVIEFDHPSSRPSKDGAKTDTLDAARAARELLGRKAWATPRSRGTREGLRTLITARDSAKLARVAAINVLKALVVTAPESLRAELRSRPLMDLVGRCQRLRPDTTTDPELAATKLSLRSTANRVRQLTDECRELEQAMTPLVRTMAPALLDEPGIGVLVAAQILVSWSHPGRCRHEAAFARLGGVAPLEATSGQTQIRHRLSRGGDRQLNRALHTVILARAKHHQPTKDYIARRTSEGKTKREAMRCLKRYYARHLFRLLEAAPMTT

SEQ ID NO: 101413 - protein, 395 aa, unidentified
MFIVGIDIAKRSHEAIIIAEDGQVVRKAFSFRNNCTGYNLLLEQVRRLTLVKSQIVFAMESTAHYWLALYARLLKDGYAVMVLNPIQSHSLRELYIRKAKTDARDSLIIADLVRFGRCKASNVPQDKILALRELCRSRAYLVDMAADLKRKLIALLDRIFPEYESLFDSVFSKASIAVLSKYSTPQKVKNAHLGKLTDILMESSNGHFGEWKAHQLKEAACSSFGIDDSGGVYSTLLGMFLEQILSLTAQADSLEKQISVFFQEFNNPLTSIPGVGTVLAATILSEIGDITRFSSADKLLAYAGLDPSVKQSGEFKSNQNRMSKRGSPYLRRAIWLASTVAVHRDPMFQTYYEKKISEGLHYMNVIGHVSRKMTAVIFAVLRDGQPYQPILQSAG

SEQ ID NO: 101414 - protein, 403 aa, unidentified
MNSVGIDISKGRSTIAVMRPFGEVVISPFEVRHTDSELSELARQLKSLDGETRVVMEATGNYHASVAKLLHNAGLYVSVINAKLVHGYGNNELRRVKTDRKDAVKLANYGLDRWLTLPRYIPEEDTRLLLKNCYRQYRQYSKVQTVLKNNLISLLDTVFPNANRLFSSPIRGDGSEKWVDFVAEFWHCRCASEKSERAFTSKYLRWCRKHGYNFREAKAHTIYAEASGHIGVMPKSETTKLLVKQAVSQLRATSTALAALKQEMQSLASVLPEYPVVMDLFDVGPTLGPQLIAEIGDVRRFYSKKALVAYAGLDAPPNDSGDVTGRHKSMSKIGASSLRRTLFLVMSVYLLTAPLDEPVCQFMDRKRAEGKLYRVYMMASANKFLRIYYATVKAYLESLEHTA

SEQ ID NO: 101415 - protein, 310 aa, unidentified
MDAIVVGIDVSKDRLDVAVRPTGEVFAVVRDAEGLDALVARLKPLAPVAVAVEATGGYETVVAASLAAADLPVVVVNPAQVRSFAQALGKRAKSDPIDALVIAHFVEATRPEIRPLPDAETRLLGDLVSRRRQIVGMITAERQRQKILTGKRLQRSIARLLAALQKELSSLETDIDQAVRGSPAWREKEDLLASVPGIGKIIARTVMAELPEIGTLDRRQIAALVGLAPWTRQSGTWKGKSFIGGGRAAVRAALFLGAMVAARHNPELKLFRDRLVQAGKPKLVALVATARKLLTILNAVIRDRKPWQPA

SEQ ID NO: 101416 - protein, 506 aa, unidentified
MPLYEHDPGLPLINDELFALSHKRINNGSHPGLPRPNRPKRRQVAMARNNKKRKKPVHSLKTIQPDSAGIDLGSREHWVAGPPLEDNTPNVQRFGTTTPELLRLGDWLKEQKVKTVAMESTGVYWIPLFEILDSRGFEVILANARQVSHVPGRKTDMLDCQWLQLLHACGLLRGSFRPSDDICRLRALFRERNTMIDQRSDWVRRIQKSLDQMNICVHHAVSDITGVTGMAIIRAIVDGQRDPRTLAQMRDRRCQKSEDQIADELTGNWRPEHLFNLRQALKMYDQFCQIVTEYDAEIFAYIKTLQPCVDEDESAPPPASKSKARNIAKKGQEPMRQALYQLTGFDLTTIDGIGVDTAAVVISELGLDFSAFPDEGHFVSYLRLAPNLSISAGKKVPSKIKGTTTSRVATALRMAALAARNSKTALGAFYRRISSRKGASVAVFATARKLAQIIYRLVCHGQTYIDIGAKAYEAQFNNRRLKYYTKALKDMGYKVKPLAAEEAQAA

SEQ ID NO: 101417 - protein, 365 aa, unidentified
MPHATTRPRPEVKRNGSMPIVGVDLGDTHSHVCILDPASGDVLEQTRLRTRLVDVERYFARQQCMRIALEVGTHSTWFSRTLEDLGHNVTVAHTARVRLIHGGRRKNDQLDAEKLARLLRYDRRLLVPIKHRSEEAQRDLAVLRSRRAVVRSRTLLVNHVRGVAKSFGFRIPKCETRIFAGHARDVIPPEVLPALEPTVDAIENLTTQVAILDTRVRQLCRNTYPETALLTQVHGVAEITALTYILTLEDPTRFARSRDVGPYLGLVPGQKQSGGTDPTRGITKTGDRALRTLLIECAQRILGKRGIDSDLKRHGLKIASVGTKAAKRRAVTAVARKLAVLLHRLWITGEVYEPLKNATPTAISA

SEQ ID NO: 101418 - protein, 409 aa, unidentified
MERLLERCAGLDVHKKTVAACVRVPGPGGKRGQHVHTFGTTAADLLALGDWLAAHEVTHVAMESTGVYWKPVYAVLEERFTCVLVNAAHVKQVPGRKTDVADCAWIAQLMEHGLVRGSFVPPRPIRDLRDLTRYRTTLTHERVRHANRLHKVLEDAGIKLATVASDILGVSGRAMLSALVAGTTDPAILAELARGRLRTKLPALRAALAGRFRGHHAFLVSQMLGHLDYLDEAIATVTTQIEEVLRPFAAVVTRLDTIPGISRRVAEVVVAEIGTDMTAFPSARHLASWAALCPGHHESAGRQKSGRTRKGNRWLRAALVQAALGAIGTRDCALGARYRRLVRHTGHNKAVVAVAHALLVTIYHVVARETAYTEQGAAYFDARHAERVTQRAVRALERQGFRVVLERAA

SEQ ID NO: 101419 - protein, 413 aa, unidentified
MQQIYERVAGLDVHRDNVVACFRTLGPRGGVVFEKDRFATTTVALRELAAWLAERQVELVAMEATGVYWKPVYYALESSFTVWLCNARNVKNVPGRKTDLTDAEWLADVAAHGMVRPSFVPPPPIRELRELTRYRKTQSDARTAEIQRLEKVLQDAGIKLTSVASKVLTQSGRAMIEALIAGERDGAKLAELALGKMRPKVPALTEALTGHFGPHHAVACARILGHLDYLNESIQALSEQIDQRTAAFAPVYTSLQAVPGFDRLTIDVIIAETGADMSRFPSPGHLASWVGVCPGSYESAGKRRRVATTNGNQWLRRALIQSARAAVRTKGSYFGAQYRQIARRSGPNKAAVAVAHSLIELVWHLLTTGESYQDLGDDYFTSRQDPDRRARQLVAQLEALGFTVTLEAAPAAA

SEQ ID NO: 101420 - protein, 338 aa, unidentified
MLLIGCDFHTRFQQIAMLDSTTGEMRERRLEHPEEARRFYSALPSPARVGMEATGPALWFERMLQECGHELWIGDAAEIRASVVRQQKTDARDARHILDLLVSERFPRIWIPSPAERDTRQLLRHRVKLVRFRTSVQNQLHALAMGEGVCRRKKLWSKAGRKELEGLSLGPWTSRRREDLLGMLDRLHARIEELDQAVKREAESRPAAVRLMQQPGVGPVTALVPPSGMLTIGPVERFRRSKQVVSYLGLNPRESSSGGQQRLGSISKQGNSMLRWLLTEAAQTASKFDPELRRDYLRLQFRRGRGVAKIAIARKLAVRLYWRLREAAQLGAAGSHAG

SEQ ID NO: 101421 - protein, 346 aa, unidentified
MIIIGCDFHPSWQQVAWLDTETGETAERRLVHAAGEAEPFYRQWPVPALIGMESTGNCQWLIDLLNELGHEVWIGDAAQIRATMVRQQKTDRRDAAHLLELLVEGRFPRIWVPSSGERDQRQLLIHRYKLVTLRARVKNELQHLALNQGVQKKARLWSEAGQKLLRELPLKPWASRRREDLLKVLSMLDEQIKPLDEAAQEAAEKSAMARLLMTQPGVGPITSLAFVLTMGDVKRFARSKQVASYLGLIPREYSSGGRQRLGSISKQGNRFLRMLLVEAAQGAVRYDPGFRKEYLHRCHQKAKGVAKVAAARKLAIRLYWMLRTQTPYPEVVRIESSPRVPLVGRS

SEQ ID NO: 101422 - protein, 430 aa, unidentified
MTKLHSTPPDAVLVAIDMSKHRQEVLLERPEGGRQRRMTVMATKADYDRLADDLTATGRPVIVGFEATGNYHRTLAHRLLSAGFELRLISSVALARTREALHNGWDKNDSKDAQVILHMLKIGATQRYVDPLAAGINDLQEMSKTHEAISKAKTQTWHRILTHYLPLYFPEIERFAGNSRSDWFLALIERFPTPGSITSIGREAFTEQAWSLIGRKVSKARVVNDIYETACASIALPIDENSTAVAMFRMVIAQARTLIQQRNEIERIAHDALATNSDYQLLRMIPGIGPINALTILAEAGDLRRFSHHRQFLKFCGLDLATYQSGIFRGRTKLSKYGNARLRRTFWMATQVAIRQPNNSFRDKLSRYVDGHAGDPDRRRKAMTALTAKMARVVHAVIKTGTEYRPFVERADTRWKDPSLLCREGATATL

SEQ ID NO: 101423 - protein, 390 aa, unidentified
MIFVGIDVAKDKHDCFICNSDGEVLFNAFTIQNTIEGFNSLYQRIESVSKDFNKVKVGLEATGHYSYNLLGYLLDKGLTTFVINPLNTNLFRKSLSLRKTKTDKIDAHTIAMMLMSNVDLKSYSDILYHNEELKSLTRYRFYKVSERAKLKTTVSRLVNILFPELEKLVPSLHIKSVYTMLSEFPSAHHIAEAHLTKLTNLLHTASRGRYGKDTAIGFREAAKNSIGSDMPAKSLELKHTIKLIQELTAEIEEIEAEIKHIMDNINTPILSIPGISYTMGAMIVAEIGDFSKFSSPDKILAYSGMSPSTYQSGQITDSYSHMEKRGSRYLRYALYNAAKYVCHWDETFKNYLAKKRTEGKHYNVAISHAVKKLVRVIYHLQKTGQSYQAV

SEQ ID NO: 101424 - protein, 366 aa, unidentified
MKKTSTAVKASKKNLQGKLTIGLDLGDRWSWYCVLGQAGEVIGEQKAGTTPKAIREGFAAMPRCRVALETGMHSPWVSRLLEELGHEVIVAHARNVRLIGESRKKDDRLDARTLARLARIDPQLLCPVKHRSRQAQADLMVIRARASLVRARTALVNAARGMTKSYGERIRGCNPRNMDSEKVQALSPELQTALGPLLQALEALSERIAEYNRQIEQIAEQSYPQTALLKQVKGVGTLIALTYMLTLEDPHRFRKSRDAGCYAGLQPGRRNSGQSEPQMRISKEGDPYLRTMLVQAAHHVLGPFGADSDLRRWGLKLAERGGKNGKKRAVIATARKLAVLLHRLWVSGEVYEPLRNSKPTLLLATA

SEQ ID NO: 101425 - protein, 415 aa, unidentified
MAVERMFLMEVIIERACGMDIHKDSITACIMTPEGKVIQSFSTKTVFLLQLIDWIKEHGCTHVAMESTGVFWKPIVNILEAENIEFLVVNAQQIKAVPGRKTDVKDAEWIAKLLRHGLLKASFIPDRTQRELRELVRYRRSMIEERARQHNRIQKVLEGANIKLGSVVSDVMGVSSLDMLRAIAEGENDPEKLAGFARRSMKKKKAELELALRGYIQPHQRLMIKTILTHIDFLTAQIELLNQEVACRLSTHQEDIERLDSIPGIATRMAEQILAEIGTDVKKQFPSAAHLCSWAGLVPGHNESAGKRKSSTMKKGNKYLKSALIEAAHSVRGSKTYLGALYRRTATRKGKKRAGISVAHAILRIAYYLLTRKEMYVDLGEDYFDKQKEQSIIRYSVRRLESLGYNVTITELGAS

SEQ ID NO: 101426 - protein, 439 aa, unidentified
MKKKIQYRAESVERILPEQLAGTFEVGTRVVVGIDVAKRNFVAALCNSTGDTVLRVRFEHPRQTAQFVGLLAGLQAVERQVEVTMEPTGTYGDALRYRLGSSKIPVFRVSNKHVHDASELFDSSPSKHDGKDSSVIGWLHAQGRSKRWEELDPARRSVRALVAQRDLYDEPMGRLIAQMEPLLARHFPEFEAFFDLSQRMTPWVLLEAFGSPAAMGKLSVDEVLTALKERIRRRPSAEDLQSLLEAAKRTSGVAMVSEETELVRRMATEVLHLMRKRREVDERIAKATEDVEAVKAIRPCLGPVTAAVVFAYLGDPRSYASAAALEKAAGLNLVESSSGTDPNAEDKVPRHISKRGASIVRKYLFLAAMRLVRSDPIAKAWYQARRSFKAQQRTKAIVAVERKLCRSLFHVAKGQSFDTEKLFDNRRLGVVLLSKGEAA

SEQ ID NO: 101427 - protein, 326 aa, unidentified
MNSKIGVDVSKAKFDVALLLDGKKYRSKVFSNDPTGFKGLLDWIGSNVAGGAGHVHVCMEATGVYHENLALFLHDQGIAVSVVNPMLVKRFVESEGVRSKTDSADAKALARYADRIQPELWEAPSPAVRKLQALVARLETLKEMRQAEASRLDVAHEAVRASLLEIMAQLDANIEEVRAQIRQTIDDDPDLKSRRDLLQTIPGLGDKTIPQLLAYIGRPERFKSVKALIAYAGLAPLIQQSGTSLNKKRGTHPLRKEALRHALYFPAMVAGKYNPVIARFWQRLKAQNKPGKVIVVACMHKLLAIAYGVLKSGKPFEAGHSLVSTA

SEQ ID NO: 101428 - protein, 368 aa, unidentified
MPVAVTRISGDRVVVAVDPHKASWTAAAVDGSLQPLATVRVPVSRDGYRALRRFAHRWPHARWAIEGAAGLGAPLTTRLGTDGIEVIDVPAKLAARVRVLSSGHGRKNDDADALSVGIAALTSPALGTAKIDAATPALRAVVEHRDDLVKTRTQTVNRLHVVLTRLVPAGARRHLSADHAAELLRGVRPRDAAAKTLRALAMDLVSEVRQLDRRIAKAANDIQLAVSASDTTLTALHGLGALTAGKILGRVGDVSRFRSAAAFASYTGTAPIEVSSGEVVRHRLSRAGDRQLNFCLHVMAIAQIRHDTPGRAYYLRKRSEGKNHNAAMRCLKRRLSDIVYRQLIGDAVKQKAGPGGHSGAALSSRAAS

SEQ ID NO: 101429 - protein, 342 aa, unidentified
MDTMIGVDLAKNVFQVHGASASGQVQFRKKLTRLQFQRFMAGREPCVVVMEACGSSHYWAREMARLGHEVKLIAPRYVKPFLKRHKNDAVDAEAIVEAAQRPGMRFVEAKTENQQARAILFRTREQLVRQRTDLVNALRAHLYEFGYIVPQGIEYQSRLKQILDEPSSELPELVREVGRILLEQIAGKNDAVANIDQKMKRLAAQSNIARRLQTIPGVGPVTALAVEAFAPSLESFRCGRDFAAWLGLVPKQYSSGGKQRLGRMSKAGQRDIRRLLIIGAMSRLNWLGRKSIVEGSWLDRLVRRKPRMLVAVALANKMARTIWAMLTKKQDYRDPARLLSAC

SEQ ID NO: 101430 - protein, 454 aa, unidentified
MPKTPSGARPELKPVNVGAAAIDIGSKMHMAAVDPGCTDTPVRAFGTFTQDLQELADWFKACGVISVAMESTGVYWIPAYEILEQRGFEVILVNARYAKNVPGRKTDVSDAAWLRQLHSYGLLRGSFRPDAEIATLRAYLRQRERLVEYAAAHIQHMQKALMEMNLQLHHVVSDITGATGMRIIRAIVAGERNPDVLATYRDVRCHASIETIRAALVGNDRAEHVFALTQSLELYDLYQAKMLDCDRRLESLIGALNNKGGKPVGRLSKPRVKTKQVNTPSFDVRTALYGVLGVDLTEIHGLGPSLALKLVGECGTDLRAWPTAKHFTSWLCLAPGNKISGGKVLSSRTRRSSSRTAALLRLAATTVGRSDTALGAFYRRLALRAGKSKAVTATARKIAVLFYNMLRHGMAYRDPGADHYEEQYRTRVVANLTRRAKSLGFVLQVDPGGQLAVS

SEQ ID NO: 101431 - protein, 377 aa, unidentified
MPCSSNVGVDGPRRHRLCQNEVVADLRQWRPSVEQVSRIGMDTSKHFFQLHGVNAAEKVVLRKKLRRKDMVAFFKALAPTVIGIEACGAAHYLARLLGSFGHEVKLIAPQLVKPYVKRGKNDGADAEALCEAMSRPTMRFVPVKTTEQQAALMMVGLRDRLIRNRTQLSNSIRGYAAEFGFTATKGKAHLVTLLERIQADESVPALARELFAAQAAEYARLQAQIDEVDAKLMAWHKANECSRRLAKIPSVGPIGAVLLMMKTPAPELFRSGREFAAWIGLTPKDHSTAGKVRLGGITRAGDEALRSVLVVGATSIIQHVRRGGRGSPWIVDLLKRKPPKLAAVALANKMARIAWKLMITGESYVAKSALATLASAA

SEQ ID NO: 101432 - protein, 331 aa, unidentified
MERIGIDMSKSNFLVARLTAPKKYNYSHVINKDEPIAEFLNGFEASSTHLVMEHTGNYEMKLVVAALDRGFKVSVVSGARVRHFAKMRGVSAKTDKQDAKMILEYAMLEGEKLEDFTFPPEDIAEIKQLRHILDDLKVRKRALVNKQESGKLNPQYSKNVDDYFERELAFIDSEIEMFEQKIAQFIQADDKLSDTRIPRSVPGIGPAIAAEIVLFANLFKDFKIENISKMLKLIGLSPTNNESGTLRGKGTVAKGGYSTLRNKLYMGAVACVTRKKADNPFKDFFLRLRSNGKSFKVSIVAVMAKIAKVVFTLMINQQRYDKAKHQIVVAK

SEQ ID NO: 101433 - protein, 409 aa, unidentified
MRLNHLFVGVDLHKRHHTAVFMNGFKRKLGEFKFDNKPSAFPELMKEAKKYVKKGMRVIYGLEDTGGYGRSLAVHLVEQKLTVKEVNPALPNGVRKSNPTVQKSDAWDAECVGQILVDKLETLPDAKPNDKYWVISQLVTTRIAIVQDITALLNQLHTQLAHHYPSYKKFFSELDGKTSLVFFEKFPAPYYLEGITVQGLREFLLKPSNYACSLKTAEKILTLIREDGCTKSEYQEDRDFIVQSHIRRIQRCKEELQGIEARLAMLMPETGYKLETMYGIDLVSAAAFVAEIGNIHRFNDASKLARFSGIAPVIYGSGDNHKHYKCKQGNRALHELFYRLACRQIGTKRGSKEPNNPYYYEYYQQKLLAGKTKTQAIICIMRKLVDVIYSLMKNKTEYVKPSMQWKQVG

SEQ ID NO: 101434 - protein, 341 aa, unidentified
MKRDISVVGIDIAKRVFHLVGMDERGKIVMRKRCSRGEVLPLLANLGPTTIGMEACGGAHYWARCLREQGHEVKLMAPQFVKPYVKSNKNDMRDAEAIAEAVTRPSMRFVPVKDVAQQDIQALHRVRERLVTARTALVNEMRGLLAEYGIVLPQGLAKFRQALMSTLEAEHTKLTPLGQELFHKLFGELGKLDAELAYYQDKLEALAQAHPVCQRLLTIPGIGPLTATALIAAVGDAGVFKNGRQFAAWLGLVPKQYSTGGQTRLLGISKRGDSYIRKLLIHGARATLRWARTKADRRSQWIRGLLDRRGWNRTAVAVANKNARIVWALLSRGGIYEANAS

SEQ ID NO: 101435 - protein, 667 aa, unidentified
MSHSRPQRARAAAHLATGPEAGAHATTPPANTPARPTAGNATAVAASVPIGVGIDTSRYGHYATFLRADLQPAAADLKLVESAAGYQQLRERLEAIAHKLGGHVHFHVRLDLAGRYADNLLAFLHTLGTQPAEATPLADATFTISCGDPQRNKNYRVAIFGHQKSDPVESAACARYALTEKPKPTPALTPQLRLLCQIASRLESQARQDTRLINQLHNLLARAFPELALVVNDLSAGWVLTLLDRYPTAAKLANARAASLDKIPYLPHEHIPILLRQARSSVGCLSGPAAEELVRDLVRQVKEARSRHHALEKLLVNAYHDLPFVNHLDTIKGFGEVTAAILTAKIVDPQRFAEPAKLVGHFGIYPVEAASGIDRDGNPRVPVRLIMSKRGNDLVRRYLWMAALSAAQHNPAVKPLYQRVRAKHPDQPSIAIGHVMRKLLHIALAVWKTGKPFNPEHYPWDKPAHLQPKAEVPAGSPTHAERPATPGADSAQAAGHKKPVRAPERSVVTAACATTTLPQAPAADNVPPAADGVARPAATTTPDRGRALTPTGDQAATPWIDFEHLKSQLPLERVLEHLGVLATLRGKANQRRGPCPVHAQNGQGKGRTFRVQLDRGVFHCFDPQCGIKGDVIDLWAAVKKLNLRDAAVDLVQTLHLEPAPRTEKRPG

SEQ ID NO: 101436 - protein, 349 aa, unidentified
MRTFIPPAGTRFYAGADLHARAVFLVILDGDGRVVFAKNLPANPDAFLKAVAPFRAGLLVACECMHCWYWLADTCRDHDIAFVLGHALSMKAVHGCKTKCDRKDAEAIARLLRGGNFPPAYAYPRERRGLRDLLRARLRLVRQRAHLYGHVHTARRQANLPPVSSAVKYQCKRDGCTAGLADPFVRRRVETHLTLLEPLDTAIRRLEKEIEDAADRLFPAELAVLQSTPGVGKVLSLTILLESDTIDRFDTRQQFCSYARLCGAVQTSDNKRTGEGNKKAGNAWLKWAFSEAAVLSAQKDERVGALYNRLASKLGKAKAYSALAHKLGRAFYHMLHTKEVFDVNRFVRH

SEQ ID NO: 101437 - protein, 287 aa, unidentified
MELHTIGIDLGKTVFHLVGLNLRGEVVVRKKFSRTQLLRFTANVHVKLIGMEACGGAHFLGRALREQGHEVRLIPAQYVKPYVKTNKSDYIDAEAIAEAVARPTMRFVPIKTDDQLDLQSLHRVRERWVMRRTAVINQIRGLLLERGITLRKGRCYVGAALPGILEDADAKLSGALRMLLAQLKLELDHLDLRIDEADALIKKTVRENEACQRLVAIPGIGPVTATALIAAIGNGAAFHKGREFAAWMGVVPREHSTGGQQKLLGISKRGNSYLRRLFVQGARAVLQ

SEQ ID NO: 101438 - protein, 322 aa, unidentified
MEKNENTFVGIDVAKEELVLHILPNNEQLTVPNSAVGIKTLVKRFKKIEPQQIVLEATGKLERELVTTLAANGFAVVVVNPRQARDLAKGLGELAKTDAVDAKILARIAQLQCLTVRPITSQETRDMNDLVTRRQQLITMRTQEKNRWQQTAQKTIKKSIEKVIAAFDKQIALLDASLKKMIDANPDWSEKDKIIQSVPGVEEKSSQALIAGLSELGTLNRREVAALVETAPRCQDSGKKLGARRIRGGRTYVRAALYRAALNAIRDCEPIKMFYEKLREKGKSFKVTIVAAMRKLITILNVMVKTNTCRQEKKRTAKGTKK

SEQ ID NO: 101439 - protein, 332 aa, unidentified
MDTLLKTFIGIDVSKDDLVTAFPLASEEWKVEKFGNNDAEIAALVQKVKGLDEPHVVLEATGNYSMKVVFALCENQVRVSVLNPKQSKGFIQGVLLSTTKTDAKDACALALYGQLNKPNPYRMPSDKMLEITQLRVYLKQLKKQQACLVSQLHALEFHVQPLAYVQESLQESQALCKRQIQDTEKRLLSISKDCFDKAYELAISVVGVGPAIAQALLIATNGLQDFGNAKQLAKFVGVCPTQCESGSSIKKRGGISKTGDSNLRALLYMGARSAKRFNQPCKDLYERLRGRGKCHKVAMLAVCNKILRQVFAVVKSRVEFDNEYHLKNEKAA

SEQ ID NO: 101440 - protein, 386 aa, unidentified
MQRPNDLSKSLTVLKQDSTLIAVIEMSLSSWLVAGIVPGVERQPLKKLAIDESALLKLLHRWREEAEKAGRKIERIAVAFEAGRDGFWLARWLRARGVEAHVIHASSVAVSREHRRAKTDRLDTELLKRAFLGWLRGEREHCKMVAIPTMEDEDAKRPNRERESLVGEQTRIVNRMKAALSRLGIRGFNPKIKKAAERLEHLRTPEDEPIPPNTLAELRRDMERRRLVSEQIRQIENARLERIKLAPSHGPHAMVRLLARVIGIGIETADMLVQEVLSRNMRDRRAIARYAGLTGSPDESGTRRREKGLARSGNVRVRRGMIQLAWRFLLFQKDSALAQWFRARTENARGTRKTMIVALARKLLIALWRLVREGVVPDGIVLRPAQ

SEQ ID NO: 101441 - protein, 322 aa, unidentified
MAMLSFGGIDVSKDRLDVMVLPEEQCSSVPNDAAGWAKLVEQLRGFSISAVGIEASGGYGRGAVRALLAAGMSVRQVNPFKLRQFARASGVLAKNDPLDARMIASFIAIMPTRPAQPHAPAVERLAEILTVRRQLSDAKVAAENASRLLEDAMLQRLSRRRIARLAADIDLLDGRLVEIVMADAALVRRYQLLTSMPGVGPVLACTLIALLPELGRMNRKQVAALVGLAPYAFDSGKLKGARCIWGGRASIRRVLYMAALIAMRCNPALKAFHNRLAATGKKPKVVIVAVMRKMIITLNAMLRNETPWVDRSSGRHSVLTAR

SEQ ID NO: 101442 - protein, 318 aa, unidentified
MKSDTVHIGVDVSKEKLDVYNPATDVVSELPNDATGFRMVRDMARRGKAVVCCEPTGGCELDMVLFLQRFGVPVAHCDGYRVRHYALSTGEFSKNDRVDARMIARFADCTPVRTLEKKDLAHLELGRRWKLYQTLVDMHVVLAQKASSEPVAEMRSMLRAESARMERKAAKALRSCVELAEGDERMSYLLGRFVEIDGVAEKTAIAIIAGVPEIGSIGDAALSKLVGLVPMDNQSGTKDHAKKIRGGRKDVRRALYLAALPAVQHNHILSAYYNEVKKRIPSKKGAKWAFVPVMRKLIHLMNRLARDPKFQLQKKQVA

SEQ ID NO: 101443 - protein, 411 aa, unidentified
MNQKLKELAFVGVDTHKDEHTACMSDCFGQPLGVFTVENRPDNIGELLKEIDKAAKSHNLRPVFGLEDVMGLGQHLARSLISGGYELREVNPIETERKRLRKAHPDKSDPLDALAISKVLISEFDKLPLIQSLNELYLSIHQLSNWRDSLVKEQTRIKNKLHILLHREYPSYQSMFKRTFSKAALAFWERFPRASLLKGIGVERLSKYLRAHSNNTVSTKKALSILKLVNKDCPPSRLSLVNSSIIRNLVKHLRFIEEQIIIARKELEPLVDETGIKLSTLTGVDTATAAKLIAEIGDVNRFASSDKLAKCAGIAPQQKSSGRKLKFKKSNRGRRQLNTAIYRIALCQIGSDRSGRPRNSKAREYFLRKISEGKTKKEALTCLQRRLCDIIYAMMKNKTEYRFSRTVNLAA

SEQ ID NO: 101444 - protein, 408 aa, unidentified
MNSVGIDVSKGKSMVAAMRPYGEVSITPREVPHTLSALEMLGYDIIGLGEDTRVVMEATGRYHEPVAAALHELGIYVCVLNPIVIKQSGAGSVRKVKSDRKDALKIAKYGLDNWTQLRQHTPLDAVRQQLKLFSRQYNLYMKTSVALQNNLISLLDKTFPAANKLFDSPTRDDGHQKWVDFVADFWHSNCIERMSEKAFIERYQKWCKRKGYHFSKTKAEDVFVASLGHFTTLPKNDNTKLLITSATTELTATRKVLMTIKAEVIRLAKLLPEYGIVVAMYGVGEITGAQLMAELGDVRRFDNRGSIVAFAGIDPEVNESGSYARSSNPSSKRGSPHLRKTLFQVVEAHLLRSPIDEPVYQFLDKKRSEGKPYYVYMTAAANKFLRIYYARVKGYLNEHCPDQGSLPL

SEQ ID NO: 101445 - protein, 342 aa, unidentified
MDEYDGRQFVGIDLHRQRSVIVRQSESGEQLSAVRIVNDPVALRLELERAGTDPEVVLEATYGWYWAVDVLRDCGAQVHLAHPLGVKGFRYRRVKNDVRDAGDLADLLRMGRLPEAWIAPPQTRELRELVRYRAKLVAIRSGLKAQVHAVLAKAGVLIAVSDLFGVGGRQRLAKVPLGAAYAERVRSLLELIDVLDGHEARFAGLIAKRLCNHRGYQALQQVPGIGPVLAAVFVAEIGDVHRFTSPAHLCSWAGLTPKHRESDTVVHRGHITKQGSKLVRWAAVEAIQRYPTTSKIALDRTRIESRRGKNIAKIAAARKLLTLVYYGLRDGHIRALDRPRAA

SEQ ID NO: 101446 - protein, 355 aa, unidentified
MLADRVDYIIGVDTHTATHTAAVVTPTGAALAHRTVPADADGYLHVYRFAVEQAPGRRVWAIEGTGSYGAGLTTHLLEQGEWVVEVDRPARPARRNGTKTDDRDAVRAAREALGREHLAQPRQRGDREAIRVLVTTRQSAMQARTCAINHLKALVVNAPERLRQQLRALATDQLLARCARLRSHPTQPIEYRATIAALRRTAQRSLALAAEADDLHAELDTLIRRRAPWLLAEPGIGVICAAQLLNAWSHAGRLRSEAAFAMLGGAAPIEASSGKVVRHRLNRSGDRQLNRALHTIVLSRMAYHAETRAYVARRIAEGKTAREIQRCLKRYLARRLFKLLEAPPAHAQKEKIATT

SEQ ID NO: 101447 - protein, 343 aa, unidentified
MDHFAGLDVSVKDTSVCIVDDTGKIVREVKMASEPEALLQVLANPAYRFKRIGLEAGPLSQWLFSALAEAEFPVICVETRHMRAVLKAQVNKTDRNDARGIAQMMRAGLYRPVHVKTLRSQKLRMLLTHRKLLQSKAIAIDNDLRATLRNFGLKVGMVGAARFEARIKELVENFPDLGVLVEPLLIVRRVLREQLGILHRRLLAIVRDDDVCRRLMTVPGVGPVVALTYRATVDVAARFRKSKSVGAVFGLTCSKYQSGEIDRSGAISRCGDEMMRTMLYEAAQSMLFHSTRWSWLKAWAMQIARHRGMKKAIVALARRLAVILHRIWVDGTEFRWTREAAAA

SEQ ID NO: 101448 - protein, 353 aa, unidentified
MTKNRISELSSIGVDIGKDVFHLVGFDANGTLVLRKKVKRLSLVHAFEKLPRCIVGMEACLSAHFVSRTLRRLGFEPRIIPAIYTKPFCKGQKNDYNDAEAIAEAALRPNLRCVREKTQDQLDLQALHRVRSRLVSRRTATINQIRAFLVEQGITVRTGANALRSSLFAILENRKDEISPRMHNIIIGLHEDWDWLDGRIETITSEIEQLSRSEASCQRLMSIPGIGPLISTAMVAAIGAGDAFDRGRDFSAWLGLVPRQYSTGGKTILGRISKRGSRYLRTLFIQAAHVIMMRPQNWSKFSFGSWLEEVSKRAHRNKVAAALANKLARIAWGILTSGTSFDQHRAELKAQTS

SEQ ID NO: 101449 - protein, 308 aa, unidentified
MERFAGIDVAKETLDVCVRPDTIRKQFSNNEEGRSNLVRFLGKLKPVLIVLEASGGYEIPVVEVLALRLLPVVVINPRQIRDFAKATGKLAKTDTIDAEIIARFGEVLRPEIRPLKDTDTQRLQALIARRRQLVQMLTEEKNRLQIASSWIREDIEVHIAWLTSCVDKAGKDIRDFIKKSPLWREKENLLRTFKGIGPVNACTLLARLPELGRLDRKKIAALAGLAPMNRDSGKYRGRRTIFGGRADVRAALYMAALTAAVHNPVIKAFYQRLIHAGKLPKVALTACMHKILLILNAMVRTNTPWCAA

SEQ ID NO: 101450 - protein, 605 aa, unidentified
MLPHSGSPSQLSTPPADTGGSPNPTRIGVGIDTARYGHYAVFLRADLQPAAADLAFAESGAGYAELRTRLEQIAQRHTAVAWHVRIDAAGQYADNLQHFLHFLAAAAPSDRSTFTLSLGDPQRNKNYRAAIYGSKKSDPTEAAAAARFALTERPAGVPPMSTELRTLRQVAGRLQATVRQRTRLINQFHKLLALVFPELALLTKDVAAGWVLELVHRFPTARRLAAATPDQLQDIPYLAHDRIDTLLTHARTSVASLHDAALQELIRDQVRQLRDVHARQKRLENTLIAVYRRLPQANHLDTIPGIGPVTAAVLTAFILDIDRFETPGKLVAYFGILPIEAASGIDRDGKPRGPKRYVMSKRGNDLVRRYLWMAGLCAVGHNPAVRPLYARVVARHPQHKAIAIGHAMRKLLHLAFAVWKSGKPFDPEHYPWGAASAASDEAATEDARLRVPKSDPNDMPLSPKQPAAGLTLSAKPAQTEVTAAGNANVSPTPPRREPLVDFDHLKKQLPMTRLLDHLGLTSRLKGAGLQKRCTCPIHRGDARGRTFSVHLGQNVFQCFDKACRHKGDVIDLWAALHGLSLRQAAVDLIATFQLEAAPPTEKRNG

SEQ ID NO: 101451 - protein, 312 aa, unidentified
MKSFVVGIDISKDKLDIGIIPGSEKWSIPNEVEGLAELACRLSDLSPKLVVMEATGGLERPVRAVLEQAGLPCAVVNPRQVRDFAKSKNILAKTDSLDAFVLADFGERMEPKARPAKDKDTQELEAIVTRRRQLIRMLTAEKNRLKQEACAKMRTNIQEHISWIDKCLKDLQKDMRKRIKQIPEWRERAKIICSVPGIGPVTMCTLLGLFPELGKLDRKQIAALAGFAPFNRDSGKFRGQRRIWGGRAPVRSVLYMAALSAIRWNRVIKSFHTRLIEAGKKPKVAITACMRKLLIILNSMVRSGNMWQSQAA

SEQ ID NO: 101452 - protein, 366 aa, unidentified
MFTERTSVGLDVHARSVAAAAIDGDTGELFQAKLTPSYDDITSWLGGMPGPVAVAYEAGPTGFGLYRHLSAAGIRCEVVAPSKLHRPAGDRVKTDAKDAIHLARLLRLQETSPVAVPSVEQESARDLVRAREDCRGDLMRARHRLSKLLLRNGIVYCDGAAWTGKHEVWLRHDALPQLTARTGRATALTFDNDYEAVMATLARRRGLDAAIEQMAADSEFTTLVRRLGCLRGIGTLTGFALAVEIGDWHRFTGNSIGSFVGLVPTEHSSGESRRQGSITKTGNTHVRRLLVEAAWHHKPRYVIGKTMRERWDLASAAARIRGDEGNRRLHDRWVRFIARNKRNTIADVAIARELAGWCWSLAVLEE

SEQ ID NO: 101453 - protein, 342 aa, unidentified
MQITSIGIDLGKTTFHLVALEERGKVVIKQKFSRKQLFAYTANLPSSLIGIEACSGAHFMGAALRDQGHDVRLIPAQFVKPFLKSNKNDFLDAEAIAEAVARENMRFVPIKTDDQLDLQALHRVRDRLVHRRTALINQIRGFLLERGITFAKGPANLRHQMPAILEDAEQNLTPRLRSLLAHLWQEWKTLNSDIERVSDEIDAIAGQDAACQRLRQIPGVGPLVATATVAAIGNGAAFHRGREFAAWLGLVPRQHSTGGKAQLLGISKRGNVYLRRMFIHGARAVLLCVKHDTGRLGQWMRQLELRAPRNKVIVAVANKLARIVWAVLSSGNEYRTVPVAAA

SEQ ID NO: 101454 - protein, 392 aa, unidentified
MVISVGIDVSKDKHDCFILNSEGEVLAEVFTIPNTMDGFNCLLQKIQDSTTPQDKIKVGLEATGHYSYNLLGFLLDNGLSTYVLNPLRTNIYRKSLSLRKTKTDRVDARTIASMLLSDAGLKPYTDTAYHNEELKSLTRYRFDKVKERSKLKSSIARLICILFPELEKLVPSLHMASVYALLEEFPGAKQIAAAHLTRLKTLLETASKGRYKRNMALEIRDAARNSIGAWMPAKSLELQHTIRLIRELDAEIAEIEEQIQSLMEELDSPITTIPGMGFRMAAMILAEVGDFSRFDSPDKLLAYAGMSPSTYQSGQLKNCYPHMEKRGSRYLCYALYNATKYVCHWDPTFAAYLAKKRAEGKHYNVALSHAAKKLVRLIFAMEQSRAPYPMAA

SEQ ID NO: 101455 - protein, 354 aa, unidentified
MIIIGVDFHPEYQEIASVDIDSGEYQEKRLAHPKEAEEFYRSLSCVGQVVRVGMEASGHGRWFERLLEGLGVELWRGDAEVIRAKRGRKQKTDREDARHILKLLLKDDFPRIWVPNWENRDLRQLLWHRHRMVQARTRVMNQLQAVALNEGLRCKKRLFRADGRQQLESFQLAPWASRRRRELLELLDRVNPTIAELSQAVEREAEKCPDARRLMTHPGVGALTALAFVLIIGETERFQCGKQIAAYLGLVPLEKSSGNRRRLGHITKQGSSIVRFLLVEAAQVTVRSLPEWRSKYIHLMMRRGRKIAKVAMARKLAVRLYWMWRKGWDYEHWKKFGSYVGQPVHRYGVQSNTE

SEQ ID NO: 101456 - protein, 317 aa, unidentified
MTKQDEYAGIDVSKKTLDVATLHRGEHRTVRHDEEGIRSICEQMLVLRPKLIVMEATGGYERELAIALVLAGLPVAVVNPRQVRDFAKAMGMLAKTDKVDAGVLALFGERIRPEPRGVPEKEVRELDALITRRTQLNEMLTAEKNRMGVAPRTMRPSILEHVRWMESQVKEREAELNQVIQASPIWRAREDLLTSVPGIGDVTAQSLIAMLPELGHVTAKRAAALVGIAPFARDSGPKKGKRSIWGGRASLRAALYMATLSAIRWNPVLRAHFKQLKARGKLFKVAMVACMRRLLTILDAMVRKNQHWTDVTLVHAP

SEQ ID NO: 101457 - protein, 349 aa, unidentified
MSILGGLDVHRAQITFDWVDRDSGEARRGRITPATRAGVGAWLGELPGAGGGFAVEGCTGWRFVVEELQAAGLVAHLAEPAETSSLRGPKRRAKTDRTDARLLRELLEQDRLPSSWIPPTWILDLRTTVRLRKTLVDQRTAWQQRIHAALFHHGLPRPTQELLSRASRAWLERVTLPPASRQALAVALRQIDGLDAELDPIDQWLRALARRQPGCRALMSHHYGIGAITAPTILAELGDARRFVGGDQVVRYTGLDITVYASDGKRSPGHLSRQGPEVLRWALFEAAKAAARPSSPDYAYYQQVKGRQGGNRATLAVARKLARRVRHTLASLGDAALAPVEDLAVAEAA

SEQ ID NO: 101458 - protein, 355 aa, unidentified
MSQEKYIGMDVHQATISVAVMDARGKLIMECVLETKAATILEFIQGLRGTLAVTFEEGTSAAWLHDLLNPHVNRLVVCDPRKNALLKDGNKNDRVDAQKLAELLRTNQVKPVYHGKHGTRALKELGRSYLTITKDGTRVMNRIKSVYRSWAIPCAGTSVYTRRHRAEWLAKLVEPGVRIRAEHLYQQLDSLQPLRLEVRRQLLLESHKHAAVKLLRQVPAIGPIRAALLVALLQTPHRFRTKRQLWAYSGFAVEVHDSGEYRWVRGKLQRNRERITVRGLNDNHNKEVKSLFKAAAISASIRPGPLHDFYVARVESGMRPTMARLTLARKIAAITLTMWKKGVSFDPKQLHRQAA

SEQ ID NO: 101459 - protein, 383 aa, unidentified
MARSKPQASRTAPPAPTLPPQLAAANLHAAGIDIGAEAHFVAVPPSDDPQPVRGFGAFTADLEALVAWLVACAITPVALESTGVYWIPLFELLEARGFEVLLVDPQQVQKIKGRPTSDVHDCQWIQRLHTFGLLASAFRPADQVCVLRSSLRQRAMLLTYAAHHIQHMQKALTQMHVKLQHVVSDITGGTGLAILRAILAGERDPGTLAQLRDSRCKHDEATIARALQGTWRDEPVFALAQAVALYDVSHQKITACDRHIEAYLQTCADRSEGQPLPPAPRPRTRGRNQPAFAVREPLYRLTGVDLTQIEGIDETTSLVILSEIGLDMTRWPTVKHFTSWLGLCPHHRVSGGTVLSRRTKPCANRAATALRLAAACLHHSQSA

SEQ ID NO: 101460 - protein, 336 aa, unidentified
MSHYCGIDLHSNNHVVVVLDEKDKRVFDRRLSNDLSITLEALSPYQETLEGVAVESTFNWYWLVDGLQDHGFNVQLVNTAAVKQYDGLKCSEDYREAHHLAHLMRLGILPTGYIYPKEQRAIRDLLRRRMSLVRSASTQLISVQSQIWRSTGIRVKTGDLRKPGFSPPLMDHHTLEAIDAGLTVYQTIQQQINALEQSAYQAVKLSDAYTILQTVTGIGKILGLTIMLEIGDIGRFASAGKLASYCRTVDATRTSNGKKKGVGNAKAGNKYLSWAYSEAAHFAVRYEPLAQRFYERKKAKTNGIIAIRAVARKLARATWLILKHQVPYDAKLMFPN

SEQ ID NO: 101461 - protein, 387 aa, unidentified
MMYCGIDVAKLKHAVSLMDDKGEIVKASLTISNTRAGFDQLHAELQALGGAITVGLEATGHYWLALYDDLTRNHYPVIVLNPLQVAAYRKSGIRKIKSDASDAVWIADYIRIATLPPSEQNLPVFLQLRELSRFRFRLTEQVGDLKRKLLTILDRVFPEYERLFSNVFLHASRAVLQEAVSAQEFADFDLQELAQVLAEASHGRFGLEKAEKLQAQARQSVGVGFLTDAVHLEMRCLLAQLELLDSQRAEIDLAIAELMQQIPQHITSIPGVGPVTGAAILSEIGDIQRFETLDKLVAYAGIDATVYQTGQFQASEAHMSKRGSPYFRHALWLAATAAVLHDPSLKAYYQKKRDEGKHHGTALGAVCHKLLARIFVVLKEKRAYVIR

SEQ ID NO: 101462 - protein, 391 aa, unidentified
MIYAGIDVAKDKHDCFITNSVGEVLFKSFTIPNNRDGFETLFQKVQSVSDDLTKVKVGLEATGHYSYNLLGFLLDKGLPTYVINPLHTNLYRKSLSLRKTKTDKVDAHTIASMIMSDVNLKSYSDTSYHNEELKSLTRYRFDKVKARAKLKSSVSRLVCILFPELEKLVPTLHMVSVYSLLSEFPSAHAIASAHLTRLTNLLSESSRGRYGKDTAICFRDAARSSIGSHIPAKSLELKHTIRLILELTSEIDEIEAEIKTIMDEINSPILTIPGISYKMGAMIIAEIGDFSRFDSPDKILAYAGMSPSIYQSGQLDNCYAHMEKRGSRYLRYALYNATKYVCHWDESFGTYLAKKRAEGKHYNVALSHATKKLVRTIYAMEKSGQAYTNAA

SEQ ID NO: 101463 - protein, 355 aa, unidentified
MKRYIGMDVHAASCTLAVISEKGRKLKDFPVETNGQALVEAVRMIPGHKHLVMEEGLQSAWLYETLSPHVDELVVAGITTSRGPKSDKRDAYGLAEKLRVGNLDKHVFKAPRQFTRLREFSRTHMTLVGDVVRAQARIKSVYRSRGVLVTGIDVYSPRRREEWLKQLPSNTQPRASRLYAHLDFLLAQKKQAEADLLREGKKHPIVKILETAPGFGRIRAVRLVPIVITPHRFRTKRQFWSYCGLGIVTRSSSDWVQTADGAWIKARAPQTRGLSRQHNHFLKSIFKGAATTVVTQRNKDPIHARYERLLDGGTKPTLAKLSLARMIAATVLRMWKNEEEYDPGRAGLPTQTRKG

SEQ ID NO: 101464 - protein, 338 aa, unidentified
MTTGLAAGTYELFVGIDIAATTAEVSTQRPGAKAGRSFKIDQTPEGFHRLVHTLQATDNEPSHVLVVMEATGSYWMSLATRLVHEGFRVSVINPSQAHHFAKALLKRAKTDAIDAQTLAQLAMVLQPAPWMPPPQIYYELQQRLAQRDDLLNLRQQVRNQLHALDQYPEVIASVRTRMERLLVLFQSQIDEVEGEIAAALNQDSAWAAAAERLQSIKGVGWVTAAWTLVTTLNFTTCDTVDALTAYAGLAPMPRQSGSSVWHRPSIGHSGNGRLRTAFYMATLTAARFNPAIKAFYNRLLEAGKPEKVARCAAARKLLHMAWAVVKKDRPFDPNYAQG

SEQ ID NO: 101465 - protein, 343 aa, unidentified
MDHFAGLDVSVKDTSVCSVDETGRIVREVKVASEPDALLAVLTNPAYHFKRIGLEAGPLSQWLFSVLAAAGLPVICVETRHMRAVLKAQINKTDRNDARGIAQMMRVGLYRPVHVKTLRSQKLRMLLTHCKLLQSKAIAIENDLRGTLRNFGLKVGMVGTVKFEARIKELIANLPDLAELIEPLLIARQVIRDQFAILHRRLLAIVRDDEVCRRLMTVPGVGPVVALTYRATVDVPARFRNSKAVGAVLGLTPAKHQSGERDQTGGISRCGDEMMRMMLYEAAQVMLMRSVKWSWLKAWAMKIAKHRGLKKAIVALARRLAVIMHRIWVDGTEFRWTREVTAT

SEQ ID NO: 101466 - protein, 338 aa, unidentified
MYQYIGVDVANQTLQVFDGNEDFTFPNESKLKEFNLFIREWKKKIKQSKAIDTELFIIFEPTGPYSSFLRDYCIKKNIKFHVMNPMQSAYFAKASGNRSKSDPIDARMLYSYHIMLKNKECLTPVLSNHVKRLSSYLKSYQLLIKTETAFQNHFQSTEREGSASKSLIKILKKGLENIQKEKDKILEEVISYIKVDLVLAESYQNLCSIPGVGPLTSINLLIHFLKFPTANRNQLTSLAGLDPAIKTSGTSLNKKPHISKRGNSLLRKTLYCAAISGVQCNPDLTKQYEHLQERKKPKKVALVAIMRQILLTAHALYMEKRYYEVREGKIQNISINNA

SEQ ID NO: 101467 - protein, 407 aa, unidentified
MIFVGVDWAEAHHDVHVEDAEGRRLGGGRLPEGVEGIARFHELVGAHVEDPSEVIVGIETDRGLFVAALVGAGYLVFAVNPMSTSRYRDRHSSSGAKSDPGDAKVLADMVRTDRHNHRPVAGDSEVVEAVKVLARAHQSMIWSRGRQANALRSTLREFYPAALSAFDDLASADATEVLKVAPTPSLGAGLSFAKIASALRRGGRQRRIDERAREIQAALRAPQLQGSALVASAMGASVKASVAVISTMNAEIAKLAQQLEAGFEQHPAAKVVRSLPGLGTILGARVLGEFGDDPDRYASAKSRKNYAGTSPITRASGTKRVVLARYARNMRLADAIYLWAFASLTASPGARAFYDAHRKAGDTHHAALRALGNRLVGILHGCLVNGSFYDEHTAWGHRSESQLTEAA

SEQ ID NO: 101468 - protein, 376 aa, unidentified
MMDDTGKVVFKAFSFPNTSDGGNALFLKLASYSLNPTDFEIGMEATGHYWLSVYSFLFEKSFLLHVINPIQTDGWRRGTEIRRRKNDIIDSLLIADLIRYGQFMETRLADEDLFSLRTLTRFRTYLVESISDLKRKVVCVLDQVFPEYQSIFSDIFGKTSKEILLQFSSPIDFEAVSSETLAQLLAQLSRQKVGAAKAEQLKAAASSSFGITFAKNSFTFQLKTLIEQISFIEKQVKETETEISGIMGKLESPITTITGIGSVTGAAILSEIGDISKFDSPRKLVAFAGLDATVTQSGEFEAAHNVMSKRGSPYLRKAIFQSALIASFKDPVLSVYYQKKKAEGKHHLTCVGAVARKMCNIIYAVLKSNQPYVPKA

SEQ ID NO: 101469 - protein, 380 aa, unidentified
MVPLQHHRGTTMDHYAGIDVSLEYSSICVVDATGPIVREDKIASEPEVLIAWFGSLGYALTRIGLEAGPLSQWLYAAMKKAGLAVELLETRHVRDAFKAMPVKSDRNDARGIAQLMRLGWFRPVHCKSIGAQEIRAELTARKLVESKLRDTANSLRGILRGFGLKVGATTERSFPGRVRELVKGHPVLEAIAESLLSVHEVLLREFNGFQKRVQSAACSNVKAKLLMTTPGVGPVISLTYAAAVDDPARFKSSKKAGSHFGLTPKKYQSGETDRSGRISKIGDASVRAALYQAAHVILTKPVKGCPELKSWGMRLAKRAGQEKAKVALARKLAVIMHRMLADGTPFNPTAKAERMAATAAKAARKVLALPANGATVTEAV

SEQ ID NO: 101470 - protein, 324 aa, unidentified
MAKRTMICAGIDTGKHKLDVAIDGSSEQLQIDNAPEGYKVLSDWFRQHRVKRIGIEASGGYEQAVVAELRRKRFVVVVFQPAQVRAYARFKGQRAKNDKIDAALIAACTAAVKTVHDAPDPRLLPFAEQLTMIDQIGEDIARLNNRLESCRNVRIQQVWKEDLARLEKRKRAELKALVAAIREHRDLAARLELIYSVSGAGMPTAVAILVRMPEIGKITREQAAALAGLAPYDDDSGQRVGGRHIQGGRQRLRRALYTAALPASMRWNPQLQKFYKRLIDAGKPHKHALVACARKLLIFVNTVVARGTPWQEQTPQRNEVPATA

SEQ ID NO: 101471 - protein, 383 aa, unidentified
MKAVCGLDVHKDSVYLCILSEFGELIEKVFGVLTFQLEEMRDLMLHHHVVEVSMESTSVYWIPIWRVLSPHFKLNLANPYFIKQLPGRKSDVKDAQWIAECTMKELIRGSFVPPETIQQLRQYDRRIFDLNEEIVRKLSKLDAVLQRCNIRLSNYVSNVDSKSYKAVVRAISQGITDPEELVKLIHGRIIKHHGMDVITASLKGVVSLAEIDMISQLRDELDMAEAHKEKCQARMLEICEREFPEELKRLQTIPGIKERAATSLIAEIGTDMNKFETANHLASWSGLKPRNDESNKKIKSRSITHGNVYLRKTIIECAWAASRTKNCFFSRFSYHQTQVRKKNKMKVLVAVARKMLIAVWHVLHDNTIYIDFTTDRKSSRTKG

SEQ ID NO: 101472 - protein, 337 aa, unidentified
MRSITVLGIDLAKKNFQIHGINDKFQKIAKKSLKRDEFFHEVISLKPKKVAFEACGSAHYWGRRFRDAGIDVMMIPAQFVKPFVRTNKSDAADAEAIANAAMHPSIRTVPLKSDWHLDLQMLHREREQMVAHRTLIVNQLRAFLYERGEIASLGKKNAIKLAREILSQDRFSGEFKACIERMLEQYRSCEEMIERNEERIQAMADSNPDIERLQKIPGIGIMTATAIAAAIPDKTEFKNGRHLAAWIGLVPKHTGTGGKTRILSTSKRGNSYLRRLFIQGAGALLIWVKNKSDKVSNWAAELKSKKGSNKAKVALANKTARIVFAVYCKGIDYKMSV

SEQ ID NO: 101473 - protein, 342 aa, unidentified
MSEIITVGLDLAKNVFQAHGADASGRAVLRKKLRRDQVLAFFSQLPPCGVAMEACGGAHFWGREIGKLGHEVRLIPPAYVKPFVKRQKNDAADAEAICEAAQRPTMRFVPVKSEETQGAAMVFRIRELLIRQRTQAINALRGHLGEFGRIVPQGAANAARLIAIVEDPESCLPADAIATLKVLVGALTHLEAEIGRLDAEIARRAKENEVARRLMTVPGIGPLIATAIAVLAPPPETFRKARDFAAWLGLVPRQHSTGGKQRLGATTKMGERSLRRLLIIGANSVIIKRHVHAAARPGTWLGGMLTRKPPMLVRVALANKMARIVWALMARGGVYQSPVAAA

SEQ ID NO: 101474 - protein, 386 aa, unidentified
MAHSTNIPQHSIDYDQTLILAIELSNKSWVLAAQVPGLSQTKAKRTIEPEKNHLLAAIEGYRIRAATAGRSVKRVITSYEAGWCGFWLARWLMAHGIEVHIVQPSSVPVDRRMRRGKSDGIDAELLLRTLLAWLRGEPRVCSMVPIPDEADEDARRCVRERSELVSERVGLVNRIGAILATLGADDYNPLLQSRRRRLTELRTGLGDPIPPNALAKITRLLTRLELVLAQIAELELERDAVARTDAPDHAGKMIQQLISLRGIGVQSATVLVREAFVRRFANGKALGSYAGLTSTPYSSGGIDREQGIGKAGNRRLRTVMVELAWLWQRYQPGTAQVAWFRERVGSTGRRVRKVMVVALARKLLIALWRFVIDGVMPEGAVTKPSI

SEQ ID NO: 101475 - protein, 311 aa, unidentified
MRRVCGLDVHKDSIYMCILYENGSKIESVFGVLTPELDKLRDLLVSHHVCEVALESTSIYWIPIWNILSVDFSLKLVNPYFIKQLPGRKSDVKDAEWIAIVLQKGLIRGSYVPDRMIQCLRQYERRNHELSKNIVHAEQRMDMILQRCNIRISNYVSCISCKGYQKVVNAIISGESNPKVLVTLIHKRTLNKHGRQVVEDSLNGFVSDTDRDILRQYRDERMQMEQHKSENKAKMQAICEAHYCEELELLQTLPGIKEESAANIIAEIGVDMKMFLTASAIVGWAGLKPRNDQSAGKTCPKNHPSRRLWFS

SEQ ID NO: 101476 - protein, 434 aa, unidentified
MVAVMIGVDPHKASHTAVAIGAAEESLAELRIRACQSQAGQLLAGAQAWPQRTGAVEGAGGVGHLLARQLLAAGERVRDVPPKLAARVRLLQAGDTNKNDPNDAFSVAVAALRSPGVREASRDDHATVLKIWSKRYKDLARRARTQVACRLHQVLCELIPGGVPGQITAGQAAHILKSITPSGAVEAARCQLAAAFTEDLRGIDAAIRDTRKQLAIAVQAAGTSLTGLFGVGPVIAAAVLGDVRAVSRFPNRDHFAACNGTAPIEVSSGGRKIWRLSRRGNRRPGHAIPMAAVTQIRYRHSPGRAYYDKKLAEGKTPKEALRCLKRQISDAIYACLQADARRAAGAKSPGGQRGNDSFTSAAGSHPQHRLFGKATPGPATHPTTPADAAADPASAAFPAWPPSRASGRPGQGPGKARPRSGARRASLTRPSASR

SEQ ID NO: 101477 - protein, 425 aa, unidentified
MDIVAHRSAGLDVHRSIIVACALLTEPNGRVTKERNQFPATAAGLVKLSAWLQALGVSHVGMESTGVYWMPVYAILEQAAGLALIVANAQHVKQVPGRKTDVKDAEWLAQLVRFGLMPKSFVPPKPVRDLRDLTRYRRTLTEVQGSERRRLIKLLEATDIKLAEVMSDVFGVSGRAILRALIEGQQTIPEMTKLARGQLRKKIPQLGEALAGRLDDHHRHMLAIQLARVEAAEADIATLDKQIATRLEPYAVQMELLVTIPGIDWVVAAIIIAEIGVDMSVFPSAGHLSAWAGVCPGNNQSAGKNKPTGARKGNVHLKTALCNAAIGASRKRNSFFKDKYTKLKIRRGGGRAALAIGHKLLVCAYHMLSTGTVYKDLGEHYQDKRDTQRATDRCVRRLEKLGFKVVLEPSEEQDNTPQTELAEAL

SEQ ID NO: 101478 - protein, 298 aa, unidentified
MIIIGADYHPGFQQIAFVDTDSGEFQERRLQHPEEAEKFYRDLAAQGMQVRVGMEASGQARWFERLLSELHFELWIGDAAKIRTKRVRKQKTDRQDAQLILQLLLEDRFPKIWVPSVENRDLRQLLWHRHRMVQARTRIMNQLQAVALNEGLRCKKRLWRKHGREQLEAFRLAPWASRRRRDLLELIDRLNPTIAELSQAIEQEVEKCPEARRLMTHPGVGALTALAFVLIIGQADRFDCGKQVASYLGLVPLEDSSGNRRRLGHITKQGSSMMRFLLVEAAQVTVRSVPEWRSNIST

SEQ ID NO: 101479 - protein, 378 aa, unidentified
MHSMTQENTLVVGGVDAHADTHHAAALDERGALLATKSFPTSTPGYRQLLDWLSSYGEIEVVAIESTGSYAAALVRYLREHDIAVVEVNQPHAHTRRRVGKSDPIDAEMAARLFQAGKAKAIPKRTDGIVESIRLLRVARNGAVKSRSAALVQLRDLLITAPQELRDHLSCRKTLRGKVTVCARFRPSGRDLRSTSQAAKFALRSTAQRIQALDQEITALDRELEQLVATAAPRTVQLLGISTGHAGQLLVTAGQNIDRLRGESSYSMLCGASPIPASSGKTTRHRLNHGGDRQANRALHLIAVCRLRYCDRTRAYVKRRTAEGKTQREIMRCLKRYIAREVYNALRADLADTEQPRPVVSTTIMCGNPGFGINRTRT

SEQ ID NO: 101480 - protein, 342 aa, unidentified
MKLFIGLDVSLAKTAVCVVSEHGRIVKEAEADSEPGVLARWLRDLDGRIAAIGLEAGPLSQWLHRGLTEAGLEAVLMETRQVKGALKAMPIKTDRRDAEGIARLLHLGWFRPVHCKSVSAQETRAVLGARKAIQQNMIALEMSLRGLLRNFGLKVGAISRGRFETRIRELADGNPMLETATAPMLRARATLRQELAALEKQVRQLAQDDPVCHRLMTMPGIGAVVALTFRAAVDDPTRFRSSKRVGPWVGLTPSRNQSGERDLSGGITKAGDVNLRRALCQAATVMMNRGRSTWLRTWGAQLAQRRGRKIAMVALARRIAVILHRIWVDGTTFQSDAAPNPA

SEQ ID NO: 101481 - protein, 407 aa, unidentified
MNLNVGIDVSKLKLDYCGMDSNKQVCFQGEVTNTPKGAGHIRDEILKRSQQADQIIIGMEATSVYNFHPTLFFEQDDRLNQLNVTVVTLNPKVTHRYSKLFDDDKTDTVDAFHIADFLRIGRYQVPVTRDEKHIALQRLTRERYHLVHQINDCKNHFLNNLYYKVNTIDTVLPTSVFGSTMLSILSDEKYSLDDLVQIPLSALTDELNHLSHGRFGDAKSVAKALKKAIRSSYRLSKTVADSVDQVLAMYANQLRMLNQQLKLLNKSISDLCSVISGADSLQSIPGIGPVYAAGLLAEIGQIDRFPNDASLAGYAGLSWQRSQSGNHERQLTPRTKSGNQYLRYYLVEAANSVRRYDPTYARYYQKKFREVPKYQHRRACVLTARKLVRLIINLLTEHKLYTPPKLV

SEQ ID NO: 101482 - protein, 426 aa, unidentified
MKNHMILSTFFVGIDVDSKRNEVCVIDFDETRYLEASFTNNQPGAIALAEKLASIMKEHIDFSRLVIALESTASYSTHIATFLSSTEILMPFSPYVYCLNPKTTANYKKSYVSVGKTDPIDAFIIADFARVGRIKTEPWRGSQFLALQRLTRHRLHIVEAITREKTYMLSNIVLKFSELAVASEGDSPFSSKYGTTAAAVLTDFLSPEEIVSMPSEELAAFICEKSKNSFAEPDKVAALLKKAAADSYKLDKCLYEPLTVSIASSFNCIKAFESEVKTLNKAILKAIKGFNTNEYQSLLSIPGIGPVYASAILAEIGSVKAFKSHDAIAKYAGLVWNPYQSGNFSAEDTYLSKAGNRYLRYYLIEAANSVKNHDSTYNDFYFKKFNEVKKHQHKRALALTSRKLIRLIFGLLDNNQLYSKNVEQKI

SEQ ID NO: 101483 - protein, 316 aa, unidentified
MNTQKHNEINIGIDASQPRLDIHVRPVGAFQSFENNPEGIRRAIRFIKPFKPARVLIEATGRLEMAFFCAAHKAGLPICVCNPIRVRKFAQSNGRMAKTDKLDAEDIAYFGEALKPRLTDLKPAKLRLLSDLLTVRSQCLDMSTMQKNRLQRMPRTVQKPIRNILKRITQEIASIDQQLDKLIAEIPQWQERVDQLTSAKAVGKVVAYTLLSELPELGRLNRKQIAALVGIAPMNRDSGRYKGKRFIRGGRHKVRTVLFVSMMSAIQCHPKIKPMYERLVAAGKPKKVAIVACMRKQLTILNTMAKNGTYWDENMA

SEQ ID NO: 101484 - protein, 426 aa, unidentified
MLNSQINKIQAITSDTLIVGVDIAKNIQWAQFINFRGIEVSKHICFENNYSGFNSIMEKIEEIKSKNNFLSVIVGMEPTGHYWKTFATFLHNNGIKVVQVNPYHTKKAKELDDNSQTKSDKKDALVIAKLIKDGRYSAIYFPEGEYADLRNLSNTGLEVSRLLNICKNRIHACVDEYFPEFETVFKSFIKGKVALHILKRIPFPTDILELTLEDIISVIREAAKKSVGKKKAEELIRAAKVSIGVKVGLEGARIRLNNLLEEYELYHDQLEKIEKEMAQELEKTGYKDILTSIPGIGIISAASFIGEIGDPKRFSNSQQIIRLAGYNLVEDSSGKHKSKTMISKRGRKILRTILYKISLIVVCKNQEIKLLYKYLITRKENPLKKKQALIVISGKIVKIMYSLIKKEEVYDKEKVLGIYRKQQIVA

SEQ ID NO: 101485 - protein, 366 aa, unidentified
MMKKEYYIGMDVHKDTVQMAVFTEKGEEPIYERRLKNTTDLLIKEVTSFCEKGETVIAYEAGSCGYVIYRAMEQANVPCYVLPASKLAKKRSDKIKTDKRDARLIGRELRSNSIRPISVPDEVDEATRDLLRCREAVSEDLRRVKQRLLKFMVRHGYSYKGGGNNWTLLHWSWMDRRLFRNNHEKLVYEEYRSQIHSLEERLVRLEQQVIETAENPRYKKAVNRLRAFKGIDYIIALALVCEIGDFRRFANAKAFMSYLGFVPSENSSGRKRNQGSITKAGNGHLRRLLIEGAWHYTKNARPGKRLEKRRQGCSADIIDTADRALHRLHKKYIRLVFKGKHVNKAVTAVARELAGFIWAVQVSSAA

SEQ ID NO: 101486 - protein, 416 aa, unidentified
MNAVGIDVSSRKSTVAVLRPLGEVVCLPFDVTHDIAGLASLVEKLKALDGETRVVMEHTGRYYEAVEKALHEAGFFVCAVNPLLIKEYGANSLRRVKTDKADAVKIARYALDNWADLRDFTPMDAIRYDLKTLNRQFQLASKQRTASANNLIALLEQSFPGIRKCFDSPVRSDGTQKWVDFAHSFWHVDCVRKQPFPAFCERYRKWCKRHAYLFKQSNAEEVYALAKRAVVLTPKSKVVKVLVQEAANQLISISRSVEVYRAEMDRLAAMLPEYPVVMAMYGVGKSYGPQLMAEIGDVRRFERKQALVAFAGIDPMPNQSGDKNVRSNKSSKRGSPYLRKTLFNVIRTYLQCAPQDEPVFQFLNRKRAEGKPFYVYMLAAANKFLRRYYAKLRDYFASLDTLQPVAPIPTILKATL

SEQ ID NO: 101487 - protein, 351 aa, unidentified
MPRKSNIEAIATLGIDIGKNFFHLIGLDHRGAIVLRQRLTRSQLWVRLANLPICLIGLEACVGAHYLGRQLEEMGHDVRLMPANYVRPYSKGQKNDFRDAEAIAEAVQRPTMKFVALKSVEQLDLQALHRVRERLVSQRTGVINQIRAFALERGIAVRQGAAALRIELPRILAATEKLSPCMIQIIQSLGDDWRRLDQRIHAASSEIEAIAKNNADCTRLMTVPGIGPIVSTATVAAIGAGDLFTKGRDFGAWLGLVPKQNSTGGRTILGRISKRGNRYLRVLFVQGANAVLMRPACWERHGLKHWIEAAAKRLHPIKLVIALANKLARIAWGVLTSGRNFEVIPIAARPQ

SEQ ID NO: 101488 - protein, 379 aa, unidentified
MRKDIRHVGFDVDSDKIAVAVAEPEGEVRSLGTIPHTSESVRRLVKKLGPASRLRVCYEAGPHGYGLYWLLSSLGVHCDVIAPTLVPVKSGDRVKTNRRDAMKLARSYRSGDLTAVWVPDAEHEALRDLVRAREVAKKDQLRARHRLGKFLLRRGLRAAAGMKSWTKKYLLWVKTLRFEQPAQEATYLDYLHEVEHAAARVARLERSIDQAIEALPVEMRALIAGLQALRGIKQVSAATIVAEVGPLSRFPRPKQLMGYSGMVSSEDSTGDSVRRGAITKTGNAHLRRIVGEAAWAYQYRPAMSPEIKKRQEGLSEEVKEIAWKAQHRLCTRFKRLSAKGKLRQKVTTAIGRELLGFIWAIGTQVEREQRSAKLTRRAA

SEQ ID NO: 101489 - protein, 349 aa, unidentified
MRHYAGLDVSLEETAICVIDEAGRIVKEARVLSEPEALVGFFQALGHTVERIGLEACSLAAWLHEGLAAASLPAVCLETRQAKAAMGAMPNKTDRNDARAIAQIVRTGWFRAVHVKSPASRSWRALLTARRMVLNKLRDLENGVRALLREAGLKLGTPGRKQFAERVRELTAEEPVLAALAEPLLSIMATMAHELAQLTRRVLEVVRGEPVCRRLMSVPGVGPLTALAFRATIDQPGRFRRSRDVGAHLGLTPKRYQSGETDVQGGISRCGDELARTALYEAAHVLLVRSQKWSALRAWGMKVAKHRGMARARVAVARKLAVILHRIWIDGSAFRWGKESQQAAAPALG

SEQ ID NO: 101490 - protein, 308 aa, unidentified
MQQIVCGIDVSSEELEACILLADDTVNPHRRTFSNTRKGIKKFISWLRGNKVELVVMEASGGYERVCRRMLRELGIQAHVVNPARVRHFARGIGKLAKTDKIDARVIARFGQVVKLEELGEISEMELEIQELIKRRQELQEMVVAEKNRLRIAEREKAKSLKRIIKVLEKELKLMDERIKELAQKDDQIMRKVRFLRREKGMGFITAISLLSCLPELGRVDRKKISALAGVSPFNRESGKWKGKSFISGGRGLIRKILYMPVLVAIRFNQKLKEFYQRLLASGKAKKVAVVAVMRKLLIICNAILKNA

SEQ ID NO: 101491 - protein, 379 aa, unidentified
MRRVCGLDVHKDSIYMCILYENGSKIESVFGVLTPELDKLRDLLVSHHVCEVALESTSIYWIPIWNILSVDFSLKLVNPYFIKQLPGRKSDVKDAEWIATVLQKGLIRGSYVPDRMIQCLRQYERRNHELSKNIVHAEQRMDMILQRCNIRISNYVSCISCKGYQKVVNAIISGESNPKVLVTLIHKRTLNKHGRQVVEDSLNGFVSDTDRDILRQYRDERMQMEQHKSENNAKMQAICEAHYCEELELLQTLPGIKEESAANIIAEIGVDMKMFLTASAIVGWAGLKPRNDQSPGKIKARKITHGNKYLRKILVEAAWSAARTKDSRFMKMYQRLLARGKSKQKALIAVARKLLVLIWNMLSKKEAFNPEYKRRIQAA

SEQ ID NO: 101492 - protein, 377 aa, unidentified
MHSENIAAYIGLDVHKETLAVAIAAPERLGEVRYYGTINNEAQAVRRLFQKLQGLYGNILSCYEAGPCGFGLYHQLTAMNIKCQVIAPSRIPKSPTDRIKNDHRDAISLARLLRAGELTPVWIPDLTHEAMRDLIRARAAAKRDSRVARQRILSMLLRTDKRYAGKHWTGKHRTWLANQSFSQPSQQIAFQHYCQSLEQIEDRILQLDQEISRLLPEWSLCNLVCQLQALKGVGQLTAITLVAELGDFSRFSSPKQLMAFLGLVPGEYSSGNSIRPRGIIKVGNSELRRLLYEAAWSYCTPAKVGAWLIYYRPDSVTQYSKDIAWKAQQRLCSRYRSLTAKGKKSQVAITAVARELTGFMWDIALAAQSPFSQQKQN

SEQ ID NO: 101493 - protein, 360 aa, unidentified
MAQVRTWVGLDVHAAKVVAAIADAESAELRVQRMGGQTEQVAEFCAGLPAPVRVAYEAGPTGFGLARALAARGIECTVAAPGKIERPAQDRVKTDRRDAERLVRLLMIGGLHAVRVPTPAEEAMRDLVRAREDIRGDLMAARHRVGKLLLRHDLRFEGNNWTQRHLDWLGRIELPEPVAQSVLLDGIGSIDALLVRRESLETQMASLVEGSPWEQTVARLRCLRGIDTLSALGLCAEVGDFERFARPAQLMSYLGLVPSENTSGEKRRQGSITKSGSRHARRLLVEAAWHYRRAPRKGTALRRRQEGQPQAVCAISWKAQQRLHRSWVRLDSERGKRRTLCAVAVARELAGFCWAVTTAD

SEQ ID NO: 101494 - protein, 307 aa, unidentified
MCCVLMVVIAPKKFANTTKGHDELVSWLKGHKIDHAHICIEATGTYMEPVAECLYDAGYIVSVINPALGKAFAQSEGLRNKTDTVDARMLAEFCRQKRPAAWEAPHPLERALRALVVRHQALTDMHTQELNRTETAREVQRPSIDAHLLWLEAELKRLEKQIKDLTDDDPDMKHRRKLLESIPGIGEKTSAVLLAYIGLKDRFAHARQFAAFAGLTPRRYESGSSVRGESRMSKAGHVSLRRALYMPAMVATSKTEWGRAFRDRLAANGKKGKVILGAMMRKLAQVAYGVLKSGVPFDASRHNPVAA

SEQ ID NO: 101495 - protein, 351 aa, unidentified
MEPPVLKQALGIDVAKDSLSLCLGTLTQDLEKQFIAGSDVSNDDKGFQRMEKWLVKLSVHPQKLVVVMEATGVYHEALAVYLHEKGYTVSVMQSGRVKRYAQSLSQRSKTDALDCRMLAMLGCERKLTPWSPPDKTLRHLKALSRERSFLLKEKNVEKNRLHAIETSAYSNPKEVKRQAKRLKLVEVQLQEIEAEMKDLVDGDAALGKKIQYLESIPGISFLSAATVVGETCGFKEITSAKQLASYAGYDVVLKESGTFRGSTKISKKGNSHLRSILHMPSMTAVRVNPTLKQFYNRLKPNKAKPIIALVAVQRKLLLLMYSLYKKNEYYNPQFEKKQQEPKPLLHRIEAI

SEQ ID NO: 101496 - protein, 427 aa, unidentified
MQYALPQVLPDVPAGGVCAGIDWATADHAVCVVDMAGRVTDRFSAAHDKAGIATIITRLRRNKVTEVAIERGDGPLVDALLAAGLTVVVITSRQVKNLRSRFGAAGAKDDRFDAFVLADTLRTDRARLRPLVPDTPATISLRMAVRARRDLVRHRVAACNQLRAHLAVAFPAGTRLFHDLDSPISLAFLARFGSQDNAAGLDEQAIGAWLATIAVRGRPAPASELHARLHAAPPGATGADGAAQAGITAALTATLTALSAQIKTLETQIAGQLAGHPDRHIFTSLPRPGTVRAARLLAEIGDCRSRFPDPESLAGLAGVAPVTRQSGTRTAHHFRWAVNRQLRDAICDFAADSRHASPWAAAIYDDARARGKDHPHAVRITARAWSYVIWRCWHDGTAYDPAKHNALQAILARQDAQAAGPAPQEDR

SEQ ID NO: 101497 - protein, 400 aa, unidentified
MGQPLWAGVDAGKSDHYCVVIDADGKRLLSRRVANDEAALLELINAITALADGGELTWAIDLNAGGAALLIALLIGAEQQLLYISGRTVHHASGGYRGEGKTDAKDAAVIADQARMRRDLQPLRPGDDIAVELRILTSRRTDLVADRTRAINRLRARLLEYFPALERAFDYSGSKAALILLTGYQTPDGLRRAGAVRLAAWLRKRRARNADAVAAAAIEAAKSQHTVVPGQQLAAAMVARLAEEVMTLDTEIGDTDAMIEERFRRHRHAEIILSMPGFGVILGAEFLAATGGDVAAFGNTDRLAAVAGLAPVPRDSGRISGNLKRPRRYNRRLLRACYLASHIAIRTDTASRIYYNRKRAQGKHHTRAVLALARRRLNVMWAMLRDHKPYQPTAPNATAA

SEQ ID NO: 101498 - protein, 350 aa, unidentified
MKIVGCDFHPEWQQIAVFDVETGEISEHKLMNGDGEAEEFYRRLEVPALIGVEACGNSQWFIELLERLGHQVWIGDAAQIRASYVRKQKTDRRDAGHILKLLMEKRFPKLWVPTAEQRDLRQLLIHRHKLVEIRTRVKNGLQHLAMNRGVQKHSRLWSVRGRACLEKLPLSGWSARRREDLLKLHAELDMQVGELDTAVEQAASQHPQARLLMTQPGVGPITALAFVVTVGDVSRFEHSNQVTSYLGLIPREHTSGGKQKLGAITKQGNRFMRQLLVEAVQTTCRLDEGFRKQYAARCHHKPKGVAKVAAARRLTVRLYWMLRQNVGYPEIAHIESSSRVPLKGNSISRP

SEQ ID NO: 101499 - protein, 376 aa, unidentified
MKKIRFVGLDVHAETIAVAVAEPDGEVRSLGTIPNREESVRKLVKKLGPPHQLRACYEAGPTGYVLYWLLTSLGVQCDMVAPTLVPVKAGDRVKTDRRDGLKLARLHRSGDLTAVWVPDEAHEALRDLVRAREAAKQDQLRARHRLSKFLLRHGRRFPEAGKAWTLKYMVWIRQVRFTQPAQEYTMLDYLHEVEHMNERVLRLEQAIAEAVKLAPVWMQEVVQALQALRGVAKISAATLVSELGEISRFDNPRKLMGYSGAVPGEDSSGERVRRGAITKTGNAHLRRVVIEAAWSYRLRPGIGAALRQRQKGVSEEVKEIAWKAQNRLHKKYQRLMAAGKDQRKIVTAVGRELLGFIWAIGRVTEARGKQQRAMTA

SEQ ID NO: 101500 - protein, 468 aa, unidentified
MNHKTRRHAKQKTTHRSTDATEAFPLINPHAAGIDIGAEKHWVAVPADRAAQPVRCFGCFTADLYALAEWLQHCRITTVAMESTGVYWIPVFQILERQGFQVKLVNARHVKQVPGRKTDVSDCQWLQRLHTYGLLQGSFRPDDQVCVLRSYWRHRDTLIQYAAAHVQHMQKALTQMNLHLHTVISDITGATGLRIIRAILAGERNPLVLGQMKDRRVQRSVHEIAKALQGDYRAEHLFALQQALELYEFYHQQIRACDCQIQECVQRFESKGTLPTVPLPAPQQLSRKPRRNQPSVDLRTHLYRITGVDFTQIAGLDVSTVYTIISEVGLNPHAFPTAKCFASWLGVCPDNRITGGKVKSSKTRKVVNRAATAFRLAAQTLARSSSALGGYYRRIRARRGAPKAITATAHKLARLFYHLWKTGQPYVDKGADYYEKMYHERVLRTIKRKAQQLGYHITLQPINTVQVS

SEQ ID NO: 101501 - protein, 476 aa, unidentified
MKPKKTASRPTRINWQQMNRKQRREMTRTLQSGDLSLEVVHPDAAGIDIGNESHYVAVPPTRESEPVRRFGCTTAELKSMADWLKQCAIRTVAMQSTGVYWIAVFDILEEAGFEVYLVNARETKNLPGRKSDVQESQWLMKLHTYGLLRNSFRPSQEIRTIRTYWRQRNDLVRSAARHIQRMQKAMTQMNIQLANVLSDVSGVTGQAIIKAILAGERDPQKLARFRDWRVKASQEEIARSLEGNWQEDLLFVLKQEQDNYDFCQKQMAECDQQLQQYLQQRQDRSVGINLREEKRKARLKKQRGNAPQFDLRAELFRMTGTDLTQIDGIDIMTAMTILSEAGSDMSKWKTEHHFVSWLRLCPDNKISADKVIGKGRLPTKNRITSALRMAASTLRLSNTYLGAQFRRLRTRLGPPIATKAMAAKLARLVYRMLRYGMQFVDKGTEFYEAQHRKQQVNYLKWKAANLGLQIIEVPAA

SEQ ID NO: 101502 - protein, 482 aa, unidentified
MKKRNIFQNQSQEILTLFESAGNRSKVMCVPIDYAKKDHIAMFCNGNGRIIRKPFSIKNTLEGKKYLVDEVTKSCRHHGIKMEHVFFGGEDCGSYADNFITTLRSENWLVSGVNARDAKTYRENMQASTDRLDLLGICKMLLTCRGKCFPTQSGVYWDLKALVRQRRKLVHMTTGVKNRIHTIVDRLFPGFLDEKKSGIPPFSKCSLSLMKGRFSAHQIHKRKRPALIKFLSRQQTHPPERCVQKLQTYAAQVLKPPGKHIATLQLSLQQQIKLFDCLQDNIHQLDEQIAVHLAQTQGAFLTSIRGIGITLAAGVTAEIGDPSKQRAINNIISYSGIIPKVKQTGGLQGKTQITKVGKRCNRVLKDYVVQSASHIGLHGPEELMADYKRRDAQGQHANFGTARRFLRMAMCLMRTHQIYLPKRLRNAHAESIDRAEYYLASWPQIYKKWNKANAADVAFHIDMPLGQWRNVVQEVYGIKLES

SEQ ID NO: 101503 - protein, 346 aa, unidentified
MMIIGCDFHPSWQQIAWLDSETGETAEQKLVHASGEAKQFYQQLAAPVLIGMEATGNSQWFIELVEDLGHEIWIGDAAQIRASYVRKQKTDKRDAAHILKLVVEGRFPKLWTPDREQRDLRQLVLHRHKLVEIRSRVKNELQHLSMNKGMQCKHKLWSQAGQKLLCELPLKPWASCRREDLLGLLAMLKQQIGKLDEAVQQAADEHPQAQLLMTQPGVGPNTALAFVLTIGDVSRFPRGKQVASYLGLIPREESSGGRQKLGAITKQGNRLVRSLLVEAAQIAVRLDPGMKKQYLHRCHQKPKGVAKVAAARKLAVRLYWMLRTQKPYPEIVCIESNPRVALVGAS

SEQ ID NO: 101504 - protein, 468 aa, unidentified
MPKVRLAGVLPIWLLERQGRKSTRLPAVRSSSPCRCLGDPLESCSHEMARNEAKLGLVYEPHDTPRHARKDSCMTKRFFGFDVHQEFIVAVAVDAGQNAVYKPRKITSDEFEKWVAKTLTREDEAVIEAMSGSWITHDLLSQYAGRVLVVHPYHVKLIGSSFVKTDKRDALTLAKLLAANILPEVWVPPKHVRELRSLVYHRHKLAQRRATAKNRIRGILALHRVIGPKGLSAFSHEYWDSLQLPSSDKLRALHAIADIEMLTGQIKSVEAELSKVSVQEEWVDDAACLLQMPGIALLTAMTILSAIGDITRFPTSKQLVGYAGLGARVHSSGKSHSTGGITKQGRRELRYAMTEAAWNAIKYNPLWKARFERLAVRIGRQKAATAIARKLLVLVWKVLTERLSDHNVDDNTVAKCLFWWGSRYSLAQSLGMKPNIFTRQRLEVLGRGHELSQVVFVSRVWALPPPGS

SEQ ID NO: 101505 - protein, 367 aa, unidentified
MKKLSTAAGKESRDFRQQKLTIGLDLGDRSSWYCVLDEAGNLAMEQRVSTTPKALREVLGGMPRSRIALETGMHSPWVSRLLSELGHEVIVAHARNVRLIGESRKKDDRLDAQALARLARIDPQLLCPVKHRSARAQADLTVIRARAGLVRARTALVNTARGLAKSYGERLRGCNVRNMNPEKAEGLSPELQRALEPLLAALESLSEQIREYNERIESLAGESYPQVGLLKQVKGVGTLIALTFLLTLEDAQRFRKSRDVGCYLGLQPGRRNSGQSEPQMHISKEGDPYLRTLLVQGAQHILGPFGTDSDLRRWGLRLAERGGRNGKKRAIVATARKLAVLLHHLWVSGEVYEPLRNSHECVVTAAA

SEQ ID NO: 101506 - protein, 403 aa, unidentified
MAAVMIGVDPHKASHTAVAISGSEEQLGTLRVRAGAAQAARMLEWAAAWPERTWAVEGAGGLGHLLAQQLLAAGETVLDVQPKLGARVRLLSAGRSNKTDPNDARAVAIAALRSPGCRAVTADDHAVVLKMWSRRYRELSQARNQIACRLHALLCDLIPGGIAKQITAEYAASILQGTVLADAVQAARRQIAAEYVRDLHHLDLQLRDTKAEITAAVRASGTTLTSIFGVGPVIAAAVLGDTGDITRFPDADHFAAYTGTAPIEVSSGNRKIHRLSRRGNRHLNYMIHMAAVTHIRNKHSQGGAYYDRKITEGKTPKEALRAPKRRISNTIYRALKADARHAARPAETGPGGQPGNDPESSAAGSHPERRLFGQATPRPEPSLRPATATPQARSRARNNHKAT

SEQ ID NO: 101507 - protein, 355 aa, unidentified
MRSTAIQYVGIDVHQATLVCVVKDEAGQTTIESKVATRREAIESFVRGLGGRVRIAFEEGTQAQWLYELLRPISERVIVCDPRKIATKGNKDDQRDAERLCELLRLNALQPVFHDHSDRKLKELVQCYEALVDDSLRVMLRIRAIYRSRAITVKARSVYHPARRSEWLEQITDGGGHFRAEQLYIQLDHLLELRRRARTMVLRQACNQRAYRLLRTVPGIGPLRAAEIIAIIGDPHRFRTKRQLWAYAGLGVITRSSGEWIADSRTGRIRRSSRPPLTRGLNPNFNRPLKKIFKMAAHDVTGRPGELDQRYERMIARGMRPEMAYLTLARKIAAIVLAVWKKGVSFDPRLIAQSV

SEQ ID NO: 101508 - protein, 445 aa, unidentified
MADRVRAQVLEVAHPNAAGIDIGSGSHFVAVRADADERPVREFLSFTEDLEALAQWLTQCGVDVVAMESTGVYWIPLYELLESRGFVVHLVNARHVKNVSGRKSDVLDCQWLQQLMSYGLLSGAFRPQEEICVLRAVARQREMLVQYQAKHIQHMQKALAQMNVQLDNVISDLVGATGQKIVRAIVAGERDALKLAKLRDVRIRASEEDIVKSLQGNWRAEHLFALKQAVSLYDSYQTSIAECDEQLAQVLGRLAVHDDAPEPPKSGRGRPVKVEKFDLRKALYRACGVDLTRIEGIDVGTALTMISEVGPDLSRFKTVRHFASWLGLCPGTKISGGKVLSGASKRIANRLAQALRLSAVAAGRSRSALGAYYRRLSARLGKAKAVRATAHKLARLIYTLMTKGEAYVDQGQDYYEQQHQQRVLKNLKKKALEMGFSLTPVAAAA

SEQ ID NO: 101509 - protein, 295 aa, unidentified
MKILSLDLGKNKTVGCDYERESGQHRFKTAFSTRSGLAQLVKEVKPDRVVIEVCSTAGWVCDLLREMGIEVQVANTNDDAWRWRKVRKKNDRGDALKAAQLSAVNQLREVHVPRIEVRQWRALIAFRQKLVQRRTKMKNHIRDLLLREGQILPSGQKCWTQLGMARLESMARPLSELGLHEMWRGELDIELRQLEAVQQEIAVIEERLDAIGAADPRVRLLRTIPGVGPRLSEAIVALLDRPERFRKAREVSAYIGMVPKQLDSGETQRRGRITRQGSRLVRSLLVEVALDRSAA

SEQ ID NO: 101510 - protein, 386 aa, unidentified
MHDGTNLPVPEQTGIRGDCATLFVSLELSRSTWVATSLAPGSKKMSKHTLAGGNGRELLDLLARLKARAEQRIGAPVKVVAIHEVGLDGFWVHRLLGANGVESHVVDPASIAVPRRHRRAKTDAIDGETLLRTLMAWQRGEPRVCAMTVPPSPSEEDRRRISRERAALLRERIRHTNRIRGLLFGQGIVNYNPLNKNRRVCLEELRTGDGRSVPAHLKAEILREIDRLELVLRQISQVEAERDEMLRPAEANSPAALLMRLKGIGAEFATVLYLEGLFRHFENRRQLAAYAGLAPSPWKSGSIDHEQGISKAGNPRLRTTMVELAWMWVRYQPDSALSCWFRQRVGSERGRTRRISIVALARKLLIALSRYVIHGEIPAGAVMKPV

SEQ ID NO: 101511 - protein, 416 aa, unidentified
MKVDHGRLPEGAVFAGVDTHADSHWLCVLDARGGVLLSGAYASDGAGCRELARAVLAAGTPVAVGVEATATYGAGVARALAEAGAPCWEVLSPERARRRPGSRKSDPADAERAARQAMAGEGLSAPKDPDGWVASLRALLAARDRLVASATAASNAAIGIARSAPERVASRLRGLRAAAAMPAVLDMAEPGDPAGAATVRALRALAESWRASREAADALLADIRALVEENCPSLLAMHGCGPVSAARLAAAAGGNPERLRSEAAFAALCGASPVEASSGRTARHRLNRGGDRRANAALHQIATHRLRHDPRTVAYAERRRSEGMSEREILRCLKRYVAREAYRALKNPHRVRDRRAEAARLRGARREARVSQAAAAGALGVSPSLIGLMERGEGGSPAMVERYARWIEDGFPIPAD

SEQ ID NO: 101512 - protein, 351 aa, unidentified
MNNPIVVFNPCGIDVSQLTLVVAWRAHDHAEPLREFPNTREGHQARLRFLERSARPLRVVLESTGLYGLDLALTLHQAGVAVMVANPRAVRHFAQALLQRSKNDQRDAEVLREFAARMPFQAWRPPSAAALKLVAVARRLEALTDMMAAEKNRAHAVSLSEALPVIIRRDIQRSIQTQQRAIDRLTRAAQEFLLAHRELARRYELLLSLPGFGATSALPILAELTLLPADMDVRQWVAYAGLDPREYTSGTSVHKKVRISKAGNKHLRRALYMPALVAVRHDPHVRAFYEHLLARGKTKMQALVATMRKLLHAIYGMFKHDQLFDGQKLYTSRAAVLAPTLSDSEVVCLQT

SEQ ID NO: 101513 - protein, 482 aa, unidentified
MVVPNQEPKKPAKPRKPTNPKKPARPGKSRERSFPVPVPTSPAALQIINPDAAGIDVHSDMHMVCVPADRDANPVRRFGANTVDLHEIVAWLKKCRIKTVALESTGVYWIPLFELLESEGFGVNLVEPGQLSRCGARPKTDVLDAQWIQRLHSYGLLRASFRPPDSVLALRAYWRQRQMLVRYAASDVQHMQKALEQMNVKLTEVVSNITGVTGMLIIAAILQGERDAIKLARLRDPRCGHGQDEIALALQGTWRHEHLFALRQAYDLYQFRHAQIAACDEKVKAELANFPSRAGEKTHKVKPRKRGRKSNDVRFEATGPLFKALGVDLTLIEGIDVGTALVILAEIGADVSRFPTEKHFASWLRLCPPQNESNNTNRRHRNRKGTNRVTIALRMAAQSVGRTMTPLGLFYRRIRSRIGGLGAVKATAHKLACLVYRMLKYGQEYVTQSMEEYEAKVKANMLKALTRKAAAMGFQLSPLPTP

SEQ ID NO: 101514 - protein, 352 aa, unidentified
MNDTSIAWLGLDAHSKNCVLGHLDDQGTELKWWGFPTQPALLVQHIQDIPATHKRLMLEESNLARWIAQLLKPHVQQLVVCDARRNRLISQDHHKHDKRDAFALARLLRLNEFKPVWQPTEDQRVLFKRIAKAYENSVLRQTRLKLQLKSLFQHWGLFPAGTTVYSKPGRVAWLKQLPHDPLRAQALLLYELLDQALAGQSQFRRLMCQTGRQFPEIQRLRSTPGVGLVGAHLFVAYIQDPKRFGKFSRLSRYCRLAIRDRTSDDKPLGYQQLDRQGIGTLKAISYRAYLQAAKRRTGPVWDFYQASLRSTGSTTHARLNTQRKILLTLWTLWLTGREFDPKEFFRSQPIDV

SEQ ID NO: 101515 - protein, 372 aa, unidentified
MKHTIIHVGIDVDDTQYHGSALDKSTGEAIDFKCRPTLKGLLGQLEKLSKYFPGRTLTLCYEATYIGFTLQRDLAEKGYSCDVVAPTSIPSPRGKQIKTDRIDAAHLAQFYANGLLSFVSVPEREQEQDRDLMRSRQNLVQQQTELRKHMQALLRRNGLHYKEQTENKTHWTKHHYCWLERTVDASTGSLKANLALLLRQLKGLNSILAEYDQHIETLAETPRYEQSVQALTCYKGIKNLFALTMITEIGDVKRFPHPRQLVSWIGMDIREYSSGGKHNRFGITKHGNRYLRTAFVEANQRGYRTARISKDLMARRKNTAPELINIADRCLRRLNKKGNRLLLAGKHPNKVKVACAREMVGFVWESLKQAAA

SEQ ID NO: 101516 - protein, 403 aa, unidentified
MAEYEPGIYGGVDTHLETHVAAVVDSTGRIVAVESFRADGTGYRSLAVWMAGHGELVRVGIEGTGAYGAGLARHLAGLGVEVVEVNRPNRQTRRRHGKSDTIDAEAAARAALNGEATATPKSHDGLVESIRVLRVAFCSTRSTRTRLSNQLRDLILTAPEQLRRALEPLSTVDRVVRCARFLPGPSTDPTEAAKAAMKILARQHQAMTIDLDRLRGQLDDLTLAANPALRAANAIGPDVASILLVAAGDNPERLTSDAAFAALCGASPVQASSGKTTRHRLNSGGNRQANHALWRIAMVRLTHDPATQAYAARRRAEGKTPREIIRCLKRAIAREVYGLLTNPQPLTDTTDLRPARHAAGITLTTVATELGTHPSRISELERGTRRPRELEHRYRTWLDQQAS

SEQ ID NO: 101517 - protein, 449 aa, unidentified
MASKKKGTKKMAPLAPVNRRAAGVDIGSTFHVVAVPQELDAEPVRSFRSFTTDLNALADWLGRLGVTTVAMESTGVYWIPLFEILQARGFDVVLVNARDAKNVPGRKTDINDAQWIQQLHSYGLLRASFRPEGEIVALRAYLRHRERLLEYAAAHVQHMQKALMQMNLQLHHVVADICGVTGMKILRDIVAGQTDPEVLAAHRDMRCKSSIETIRDSLTGNYRPEHVFTLKQALELYDFYQAKLSDCDVEIERALLALPKRTAPGPTRSRQRGKNEPQFEIRLVMNALLGVDLTENHGLGPYTVLRIFAECGSDMTRWPTAKHFTSWLTLAPGNKISGGKVLSAKTRRSANRATVLLRLAAVSVSRTATALGAFFRRLAARVGKAKAVTATARKIATVLYNTMRHGKAYVDPGAMYYEERYRERAVSNLRRRANAMGFALIAGALEGAS

SEQ ID NO: 101518 - protein, 352 aa, unidentified
MLHSGIDLHPRSIAIATVGSDGEPVQDATLPTTRAALHAYFAALPGPHRAVVESTASWYWVRDLLVSAGIDLRLGHSKYIKAISYAKVKTDAVDAATLAQLLRSDLIPEAHMVSPEWREVRDLLRARLQLVTQRVRCQNTVRSLLTQYNVATPAALPPLVQFRVAALEEQQALLTRQARQLVAALTPRLIPTPDVQRLVWIPGIGSIVACTIVLEVDGIQRFPTARTFVSYCRLVPGAGNSGGKNRHKHSKDGNRYLKLAFSHAAVRAIQYCPEIRTFYRRLARRKPAAVARAVVAKELARIVYVVLSKQEAFSGTFKGTPLSRPKTPKWPRLASPRRGTGTGPPGPASPQV

SEQ ID NO: 101519 - protein, 419 aa, unidentified
MSFKILKNNCCGLDVHKTWIYACIGITDSFKRTEYKQARFSSFTKGLQELCLWLAKYNCIDVCMESTGKYWIPVFNVLEKNNIFVTLSHPKYTKPQKGNKTDRKDAKWICDLYMCGMVKPSFIPPADIRQLRDLVRYRFKLTCMITGEKNRAHNCLTVSNLKLDDVFSDIFGKSSRSITEQILQHPGEVFDVAPFVDSRCKTPIEEIQAAVDGAISHEQAVKLRQCLKHIDELEMHKAEIEREIFRLSQKYESVLDLIRTIPGFDKNPLTAIQVLSEIGADMSVFPTAKNLVSWAGCCPRNDQSSRKIKSTRISRAGSYFKPVLVQIANALIKSKKHPEFTTRYRRIKARRGHKKAIIAICRMILTAIWHILTDLKPYTPEGFLDSRPVNKEKVLTTSQALNLLKQRGYFIKDDPLSVS

SEQ ID NO: 101520 - protein, 422 aa, unidentified
MSYCPVAGIDVSKRFSDMCILSPDNKIFAQEKIYHDETSINRANALLQKAERLFFRKPVIVMESTSHYHLILFQFFSEHGYDVIVVNPLQSNSMKDFSIRKRKTDRVDAFKLAMIYRTKTLRPSQIPQTATRALRQLCRHRAELLNDVSSYKNRLTALLDQTFPGYDKVFSDVGGVTSCAVLVRFPTPTILLVEEESELVEVIAAASKSGYSFAKKKAGLLISAAQKAQTLGIHSCADETLIVCTIQMLRTLSESVLQIETAIDNLLAQIKEMRNNVSLLQSIPGVGSHSAALLLGEIGDISLFKKPKQLAAYFGLDPTERQSGSFRGTKNKLSKRGSPYARAALHMGVVNSICKRGKDSAANPVLLSYYEKKCKNKPAKVAQAASMHKLVFIVFAVLRDQKPFELKTPEQHAVEQGFVKAA

SEQ ID NO: 101521 - protein, 316 aa, unidentified
MEEFRCVGIDVSKDTFDVAMEPDSERETIEHDGAGIERAVKVLAAARADLIVLEATGGLEIGLASALAQAGLPVGGVNPRQVRDFAKSLGILAKTDRIDAKVIARFGAATRPEVRALPEEATRDLAELMRRRQAVLKMIVSEQNRLERSRSREVRRRITRHVRFLEKEIEDIDQELRKQIERSPIWMATTDLLQSVPGIGTTTAIVLLSLLPELGSLTRKQVAKLVGVAPLNNDSGKHHGSRHIRGGRACVRHKLYMATLAAIRWNPVIKAHYRHLVDQGKNKKVAIIACMRKLIVILNAMARDGHRWNPERAAEA

SEQ ID NO: 101522 - protein, 351 aa, unidentified
MKTKNTAQPKLFIGIDMHKASWSIRLATDLFQGKRMTIPADPENLRNFVEKNFPDHEVHCAYEAGCCGYSAHRAFQGFGWNSLVFNPSDISRTGKSQFQKSDQIDADLICRELRDNRLVGITVPDMERDHLRCLFRRRNDLVKDLRQIKSKIKMQLLYLGIKPPPEFDNANWTKGFRRWIDELSFENETVKAAMNSRKAQFDFIEASVREVSNELRKYCRQHYKKDYRLLRSVPGIGGIVACAILSELGDLRRFNNFRQLAAYVGLMPSLYQTGDNVRSLGINPRGNGIIRSYFVEASWQALRFDPAMQAYYRTHAGRNSKTILVKVARKLLSRTMAVIKTQTPYQVGVIA

SEQ ID NO: 101523 - protein, 424 aa, unidentified
MTKRVHASGKTQVHARFSITGGCDTDQNIIVAAVYHANSGSLEARKFRQHREDALQAAEWFRSQNVEFVLIESTANYHILYYDTLREQGINIAVINPQVVKSLLRVEGKSDKGDAMSLARLAASFALKTSNMPDSQQRELRLMFKRIDVRKVQRTQLTNCTNGTLTAHGFTVFRMVPINSSAGMKIMQAIIDRRSPAEIAALHRNKAKRAEIEKSADVHLPDYILVYLQEVLSEVQFLNQHIQLGEAALLAKITDCGLRDQVDLMCTVPGVTKMLALRVIAEMGANYHQRYPTASAFAKAIGGVPSNEVSGGKLLKRRASHGNQRLKFHLLSAAMAFAIHGRGPLRSWFDAYRSRSNFFKSTSALARRMAEALWWVMLRNEPYKFWQGESAREGAEVTQIGDLLVSATTGEVLATIDDAQSVAE

SEQ ID NO: 101524 - protein, 343 aa, unidentified
MEYYVGLDVSLKQTSICVVDQAGLVVREGVVDSDPEAISVYVTSRAPNAVRIGLETGPTSTWLWTELKRLGLPVICIDARHAKAVLKMQINKSDRNDAIGIARIMQTGWFKEVHVKDIDSHSVRALLASRALLVKIKRDLENHVRGLLKNLGLVIGRAKFNVFAVRAEEVIEGRPELVAAIRPLLEARNAVEQQVSELDRKVMKLARHDAQIRRFMTAPGVGPITALCFKATIDDPARFARSRSVGAYVGLTSRRHASGEVDWTGRISKCGDAMLRSYLFEAAGVLLTRVPKWSSVKAWGVRLAKRNGLRKAKVAVARKLAVILHRMWVDGTEFNWSKKEIAA

SEQ ID NO: 101525 - protein, 332 aa, unidentified
MYSIGLDVSKSSINIFISREELDLEIENNSKALNSLYSKLKKIYKKEIDKVVFVFEPTGSYSELLHQFCASKNIQIFMINPKQARNFSKAIAQRNKSDVIDARVLAQAISIARKNEIRIPTINPIVEEIKELMSYYKLKVKQRVQLSNHLEALSVKNSNKTLVKTIQKELKALKNQEETIIETINSIINKDEVLLKKYNAIISIKGIGNIAAIVLLHLFIKYSNANQRQIVSLTGLDPVVRESGTSVRGRSKISKAGARIYRGTLFMAAIVATIHNKQMKSFYERLKKKDKHTTVAQIAVIRKLVIIAHSLYKNEEMYDEDKYMKSTGVSNV

SEQ ID NO: 101526 - protein, 360 aa, unidentified
MFTERTSVGLDVHARSVVAHALDTITGEVLRARLCPDPVEVTRWVKGLPGPAAVIYEAGPTGYGLARVLGSEQIRTVVAAPSKLQRPAGDRVKTDAHDAEHLATLLRLDAFTAVTVPDEATEAARDLVRAREDCRADLMRARHRLSKLLLRHGIVYSGGKAWTGTHQAWLRRQRFDSLLTQAAFDEAYDTVASITARRDRLEQRINVLAGDSQYTAVVRRLGCLRGISTLTGLGLAVEIGDWTRFSGNSIGAYVGLIPSESSSGQSRSQGPITKTGNSHVRRLLVEAAWHHRVRYVPGKTMQDRWDLASPAARARGDLGNRRLHQRWEQFQARKKRPTVANTAIARELAGWCWSLAVLDP

SEQ ID NO: 101527 - protein, 356 aa, unidentified
MTALYDYHIGVDYHKSYSHLVVQDSAGKTLRSGRVKNDRRSLGSFLERYRENSHAVVEATRNWMVMYDWLDDICDDVVLAHPLKVKAIADAKIKTDKIDATVLAHLLRADLVPEAYAPSENARELRVALRERMFYVRLRTMVKNRIVTVFDRYPEQTAQLRKLGDLFGKTGRQQLAMLTVSEIDRTQIDRGLEFIGDIDGRIRQSEATIKAMTKANANVKLLKTIPGIGEFFARLIDAEIDDISRFRSPKKLAAYAGLVPSTYSSGGKTYHGKIIKQGNKWLRWAFVEAVTPAVATDPQLRAQYEHLKFRGVNKARVAIARKLLTIAFQILRDQRPYERRDANSEEGASSMISRLS

SEQ ID NO: 101528 - protein, 403 aa, unidentified
MNTDTTLVQRVIGLDAHPDTFTAALVRGPTPAAAVVEHTFNKVPMAQLQRWASKHTTTEDLIVLEASGNSFQIVRTLAAVERQALVLESCQMGKLKEAHANNDKISAVRIGKAYLAGTAKIVWVPDARTQERRDWFHAHRKAVKRTTQMRNRLLSYLSDNGVRLKQRAPLNLDAFQQTRDWSARQWQVIEGLHMEWEHAQQQRRHWRSFIAQEVLTDPQLLSIVRLCGVRDIVAFALGALVGDIHRFATPAKLVKYIGLNPAFDDSGQGTWSGGIGGHGRKDLRCLLIEAAQAILRSKSPLAQWGKKLLARKGAVNLVVAAIARKLAVAVWYLMMGRWTPLEDIDSRLSIKVSKIISQVGAKGLQQLGKTRQALRQETHHSLKHGKPYVLDPDKKFPLTPSLA

SEQ ID NO: 101529 - protein, 517 aa, unidentified
MYLQSPQVLAQGVAHQCGTIPLGPARGLIGGPEKLFIEDNLNGFHMSISFHSILHSPLETDDIRCCRVPNRGVMARLAAKLTVVGLVDFVDAVEAVDIRGQQHQPHLQQSLWSDRRRCADRGLSWERPKDGQFRATSGREPVMKEKLRFLGMDVHAETIAAAIAEPEGEVRSLGTIPNRMESVRKLIKKLGPVEKLRVCYEAGPTGYVLYWQLAELGVQCEVIAPSLVPMKAGDRVKTDRRDAEKLARSYRSGDLTAVWVPDEGSEALRDLVRAREAAKQDELRARHRLGKFLLRSGQRPPSGVRSWTHLHLIWVSQIRFAQMAQEATRLDYLHEVEHMRERVLRLEQAIAEAVKLASPTLQEVITDLQALRGIAQISAVTIAAELGQISRFAGARQLMGYCGVVPSEDSSGKRTRRGSITKTGNAHLRRIVVEAAWSYQRPPAIWAGLRKRQQSASEEAKEIAWKAQHRLHKRYARLAAKGKDKRKIVTAVGRELLGFIWAIGTKAEATVRQRIAT

SEQ ID NO: 101530 - protein, 412 aa, unidentified
MLFVGDDWAEDHHDIEIVDGDGKLLVRRRLPEGLEGVTRMHALIAAQMPDDGINRDPDEDAASVKIGIETDRGSWVAALVAAGYEVYAINPLSVARYRERHSTSGAKSDAADAHLLAEIVRLDRAHHRPVAEDTDLGQAIKLTARNHQTLIWDRSRHVARLRSTLREYFPAALLAFEDLDAPDALELMGRAPEPDQAARLRLTVIAAALKRARRRRVDERAQQLQKILRAPELRQPPVLQAAYAAVVSSEVAIIAALNTQIDKLGAVVEEHFGRHRDAEIYLSMPGLGVTLAGRILGEFGDDPDRYADARARKNYAGTSPITKASGTKKVVLARYARNRRLGDALQQWAFCSLRGSPGATAYYHQLRDRKIGHEAALRQLANRFVGILHGCLKTHTNYDEHTAWSHILARTA

SEQ ID NO: 101531 - protein, 343 aa, unidentified
MNVTRIGLDLAKNVFQIHGVDRDESVVVKRKCTRRQVRDYFEKLPPCRIGMEACAGAHYWAREFSHRGHEIKLIAPQFVKPYVKSQKNDANDAEAICEAVGRPNMRFVTVKTVAQQDMLAVHRIRSELVRQRTAKANQIRGLLAEYGVIVPVGINALRRALPEIQEDVENGLSGLFRRLLGGLQADLVELDRRVDQLDGEIQIAAKEDETARRLQSIPGIGPITATALAASVGDGRQFQHGRDLAAWLGLPPGQHSSGGKDRLLGMSKRGDCYLRTLLIHGARSVIQAAANKTDPRSRWIVGLAARRHKNVAAVALANKNARIAWALIVRGGTYDNQFGMAAA

SEQ ID NO: 101532 - protein, 434 aa, unidentified
MRTIGLDVHKRFAEAAILEPGRPLQRRRIPTTPAELRGFIDELGPDDQVILEATFNTWQLTDLLRARAGRVVVSNPMKTKAIASAKVKTDKVDAEILARLLASEFVAEVWVPDTQLRALRRRLSHRFSLVRQRTQLRNRIHAVVSRNLLNCPYTDLFGKAGQRWLAQQDLPADERAVVDGTQRLLASLETEIEALDRPLAEHALGDSRVQHLVTIPGVGLVTALALVAVIGDIHRFSRPNQLAGYLGLDPCVRQSGEAPARLGHISRQGQSHARALLVEATRAAVRFPGPLHAFYQRIRNRRRSQIAVVAVARKLAVLAWHLLTHDTDYRWAPPSLAQRKRLTIERRAGRPGTGAPKRPAQDQERRILVQAEEAYRILVEARRQQQDAAASTGKRAMGSKPDARRNSHSQAPVFSSRVDRVQNNLTNNGQPLRT

SEQ ID NO: 101533 - protein, 418 aa, unidentified
MEDSHSKKVKHINKKTLMVTLDIGKAVHYGYMRTPTGEDVKPFPFDNKRKGFNELWDKVCQFKQAQGLDNIVIGFESTGPYAEPLFHFLRTKPVRLVQVNPLHSKRLKELTGNSPCKTDQKDPRVIADIISLGHALTLVVPQGAAAHLRRLTQARERATQRRTALLNQLQHVIFIVFPEFLHEFKRVHSKSALYLLQHHPSPQDILALGYESLAGLLKRVSRGKIPAQRARQLFEAAQGSVGIREGRASIVVELQHLIKAIGHEDQLIDDLEQQMKDYVQQIPYSQSMLSIKGLGTVTVAGLIGEVGDFDAFATVAEVMKLAGLDLYEVSSGKHRGRHHISKRGRALMRKLLYFAALTMVRKQGIMHEQYHHMLDRGIPKVKALVAISRKLLRLIYALVRNRTVYVAHYHQRTIGIAA

SEQ ID NO: 101534 - protein, 361 aa, unidentified
MSERMALVGLDVHQAQSVAAVLDPLSGELSVERLRGAPTRVVLGFLEELGRPVRAVYEAGPSGFGLARAAAERGVDLRVIAPGSIPRAPGDRVKTDRRDAKRLVRLFAAGELSFAFVPSEADERFRDLVRCIDDARKDLMRCRHRLSKFLLRHDLRFAGRSWTVPHQRWLGNLCFEDALSRATFVDYVCAVDALAQRRQALIGVLEQAAPQSSHADTIARLRCFRGIDTLTAAGLCAEVGSFERFAKPALLSGFLGIVPCEYTSDTKRVQGQITKAGPPHARRLLVEAAHHYRHRPAVGETIAARQAGQDPRVVAIAWRAQKRLNARWTHLGARRGKHTGTVAVACARELAAFCWEAATLN

SEQ ID NO: 101535 - protein, 360 aa, unidentified
MQRNKISFKGQKIFIGIDVHKRNWSVTVLTEAGYQRTYSQNSSARELFDFLDKHFPDGEYKAVYEAGFSGFSTYYALTALGIDCIVIHAADVPTTQYENVMKSDKVDSVKMAKALRAGLLRGIYVRPLDNLDDRSVVRVRKTVQKDLTRYKSRIKHLLLSNGVDIPNEFDPRNGTKWTNAFIDWLKNDVELLSTTRYSLDILIAQLERMKVALKEVGQEIKKMSQSERYKNDYELLRSIPGIGEIVAMTLLTEINDIRRFKNERQFASYLGLIPTSHSSGDKISHGENTFRGNKTLGPMLIEASWKSIQHDSGMASAFTHYCRRMKRNEAVVRIARKLSNIIMAVLKTKQRYVPYIQYTP

SEQ ID NO: 101536 - protein, 352 aa, unidentified
MLRYQNLGIDLAAKSFRVCLKVKNEDLSVKIKGQRKFDNTTSGFEALNSWLKKKADTGLTLTVTMEATGVYYERLAYFLHGAGYKVHVLLPNRIKGYMKFLNLKSKTDKLEAKALAELGLGTKLPEWKPASPQMYTLKRLSRERNTLKEEKTALSNRLHAEESCQKPEKLAIKRLKQRIALIDKQVVQVEKQMHQLAAKDQELQGRIENICKIKGVAFITVLAVIAETNGFELVEHKSQLVSYAGYDIVERESGSSVKGKTRISKKGNRHIRHALHFPAISVVKYHEEFKSLYERVFDRTKVKMKGYVAVQRKLLVLIYTLYKKNMPYDPVYYKTQAVGQGGRQDTMPAYTG

SEQ ID NO: 101537 - protein, 342 aa, unidentified
MTVMIGIDPHKASHTAVVIDNTECVLDELRVRACSKQSDQLRAWAAPFPDRVWAIESARGLGYLLAQQLVAAGETVVDVPPVMSTRTRLLGSGKGQKNDPNDARSVAIAALRNEALGRVVLDDHARVLKLLVKRHRDLGRLKNKSACRLHALLMELEPGGMAKEMSVTRANEILDRIEPATQMTEHRLAVARETLADIDHYETQMKASLKRLRSAVAASGTSLGEIRGVGVVVAAMLIGHTGDISRFASAAHFASYNATAPIEASSGEKKRHRLNQRGNRQLNWAIHVAAITQLRQPCAGREYYDRKRAEGKNSKEAIRALKRQLSNVIYRTMVADARRLEQ

SEQ ID NO: 101538 - protein, 320 aa, unidentified
MAPEVVDVIIGVDVCKERLDLFEYHSERSYWISNDAAAIKAWLDGFAGRLKLALEPTNRYHLGLAEAAYARGHEVYLIDPYRLSHYRAGLGRRAKTDAQDAQLLARFLERELGELRPWEPMIPGQQRFWQLLKRRAALVRCKVQLNQSLVGLGVLQEDAEALVQQCEQMIRKLDRALLKQAQELGWAEWIERCQAIPGVGPLTAMALVASWQRGQFRSVDAFVAFLGLDVRVKQSGRWQGRCKLTKKGDGEVRRLLYNAAMQGRRSSQWAPYYLRLRERGMSSTAALVALSRKLARVSFALLRTDARFVPAAPEIACVST

SEQ ID NO: 101539 - protein, 346 aa, unidentified
MTIVETRAITGGVDTHADVHVAAALDPVGGLLGVEEFPVSPAGYARLLGWLGGFGAVALVGIEGTGSYGAGLARHLACAGVRVVEVDRSDRQDRRRQGKSDPLDAVSAARAAQSGRARGAPKGRDGAVEAIRALMVAKRSAAGERTRTINQARALLLTGPDDLRARFANHAPAALVTGIAALRPRPGAAAGYATRIALRELGRRAVFLDGQLERLDELIVPLVTARAPGLLALYGVGPNTAALLLIAAGDHPGRLRSEAAWAHLCAAAPIPASSGKVTRHRLNPGGDRQANHALWRIVFTRMGSDPATRAYVERRTKEGKSKAEIIRCLKRYVARQVYPHLRPAGD

SEQ ID NO: 101540 - protein, 359 aa, unidentified
MPFYNQAHQFYAGVDLHARSMFIHVLNAKGKTVFENDLPAGPDEFLDAVKPFRKNLVVGCECMFAWYWLADLCEDQRIPFVLGHALAMKHIHGGKAKSDRIDAGKLAAMLRGGLFPLAYVYPKAKRQTRDLLRRRSFFVRQRAQLITHIQNTNSQFNLPPFPKKLTYARNRSADIAARFADPSTRLSIQANLNLIDAYDEQIATIERHLLHSAKVDDPVTFGFLRTVPGIGPILGLILLYEIDRIDRFPEAGNFLSYSRLVRCAHESAGKVKGFGGKKIGNAHLKWAFSEAACLMLRSSAPVKAWLQRQEAKRGKRKALSVLEAKIGRTVYHLWRKQRAFDVQRFLKNGEPQAEEPRRK

SEQ ID NO: 101541 - protein, 355 aa, unidentified
MNDAKYIGMDVHTATISAAVRDSSGNLVMEATLETKAETILEFVHGLRGSLHVSFEEGTCAAWLHDLLKPHVTEVLVCDSRKNALLRVGNKNDREDARKLSELLFLNKLHPVYHGETGIRTLKELARSYLTITRDLTRVMNRLKAIYRGWGIACAGRQVYAPRYRAEWLAKITEVGVRRRAEIYYEQFDALAALRQEVRRELLAESRKHPAMRLLRQIPSIGPIRAALLIALMQTPHRFRTKRQLWAYCGLALRTYDSGEYHFVGGQLKRSKKAVTIRGLNKNHNHDLKNIFKGAATRAAATAGPLQNFYEARIANGMKPPMARLTLARKIAAITLLVWKKGVRFDAEQLKQQAA

SEQ ID NO: 101542 - protein, 418 aa, unidentified
MIDDVQWFVGIDWATQSHRVCLLDVDGRQVSERDFAHGGAGLSELRDWLLEKTKATPGQIAVAIETPHGPVVEMLLDHAFLVFAINPKQLDRFRDRFTVAGAKDDSRDARVLGSALRTDRHAFRRLVVDNPAIIELREWSRMAEELQQERTRLANRIRQQLWRYYPQAIELTDDVADDWFLALWQQVPTPASAANASEKTVARLLKEHRIRRLDAATVLQTLRKRPLFVAPGTTEAACVHIRSLAARLHLVNQQIKEAHRALDDLCAKLEAPTESPSGQNREQHDVTILRSWVGIGRTVSATLLTEATEPLRRRDYHALRALAGTAPVTRRSGKQCFVIRRLACNKRLQNAVYHWSRIAIQRDAASRRRYDALRRRGHGHARPLRTVGDRLLYALCTTLERQTPYDSNYQTAQVTAGL

SEQ ID NO: 101543 - protein, 346 aa, unidentified
MKEHSHEIEVSVVGIDLGKNAFHVHGVDGSGHVVLKKQVTRKGLVQLMSQLPRCLVGMEACGGSHDWARRLMAMGHDVRLMGAQFVKPYVKSNKNDFADAEAICEAVRRPNMRFVPVKGMEQQDVQSIHRARSMAVSHRTAQANQIRGLLAEYGLVLPQGMASLRGRLPEILADADNELTPMFRDLLAGLMDEVRHLDERVAGYDGQIRRLAQASDACQRLMTIPGMGAMTATALVSAVADARAFGNGREMAAWIGLVPRQCSTGGKTRLLGISKRGDVYLRKLLVQGAQAVLRHAEGKPDRRSRWLCDLVARRGRNVATVALANKNMRTAWALLTRHETYRTATA

SEQ ID NO: 101544 - protein, 405 aa, unidentified
MIINNTSQIYVSIDIGCRQHSVAIGLPKGDVLDEFDILHRPEGFKQFFERIEHHHRYHGGTVVVAMEGYNGYARPLDTLVRVRGYQLYNINNLKLARFKEIFPAAAKNDRIDACKGLELFQLRDHLALAKDVLQEIMPAPRENDMLKRLSRRRRALVDEKSRVQSRFQGDLHAVCPGLLDITKDADNLWFLRFITSVDELTKLSRLRLSTLLKIPGVGRKFAAEIRAWQSHASFSHEVEWVSEMIIEDARRILALKNDIQALESRCKTLMQASQTAKLIDSIPGFAVVCASELAGEIGTIDRFASERSLALYLGMANLDNSSGKFRGSKAPKHVNTRAKGAMMAAVDKHRKCVPESQGYYEKKRIEGKSHNQAIRALGRQLCRIIFRMLKQNRAYEMRTKINENT

SEQ ID NO: 101545 - protein, 384 aa, unidentified
MFNSSIVFIGLDTHKEFVEVAYVQDERTAKVTHLGRVSSSKLSIKKLARQFQSKYPKATLHFVYEAGPCGYWIYRLLTSLGHPCYVVAPSLIPKKPGEQIKTDKRDAMKLANLLRTGDIDPIYVPEPEDEAIRDLSRARETAMKDLKDAKYQLKALLLRNNIKPTVKDNWSQQHLRWLTELVLPYPSQQIVLQEYIQTITERVKRLERLDNELIHHVKNWRYYPVVKAIQAMRGVRLLVAVGVIAELGDLTRFDHPSKLMSYLGLVPSEHSSGGHRRQGSITKCGNSRARRLLIEGAHSYRYSANISTDLQKRQESLSKEIVDIGWQAQLRLCRRYQRLMKRGKHYNVIVTAIAREMIAYIWAIVREVVLSPVDPTKRLARVPA

SEQ ID NO: 101546 - protein, 351 aa, unidentified
MWIIGVDYHPSVQQIAFVNTDTGECGERRLSHSDREAEKFYRELKAAGCSVRVGMEATGHARWFERLLAELGFELWIGDPAKIKAKRVRKQKTDRLDAALLLELLLEDRFPRVWVPSPENRDLRQLLWHRHRLVQMRTRITNQLQAVAMNEGVRRKKALWSKPGRAQLESLPLAPWAARRRQDLLELLDRLNPTIEELSAAVEQQVKHRPEVLRLMTHPGVGPITALAFVLIIDSAERFACGKQIASYVGLIPCEDSSSDQRRLGHITKQGNTLLRYLLVEAAQAVVRCDPDWRRRYIHLAMRRDKRIAKVAMARKLAVRLYWMMRKEWNYEQLKKFGSYAGESDLVHGVQ

SEQ ID NO: 101547 - protein, 343 aa, unidentified
MAIIGGFDLHRRQLTYDYLDVVTGQVERGRVVPADRGHLRSFLARFEAQAEVAFAVEGCTGWRYVVEELERAGIGAHLAEPAETAAKRGRKRRAKTDRSDARHLRELLVKGDLPESWIPPAHVLEARARVRLYKDLEEERTAWLQRVQATLYHQGVPVIASLTSAAGQARLSAAELSPAGRQAVEVGLRQLDRLTGELDPLRAELARFSRRQPGCRALRTTHFGIGPITSVAIWAEMGDTRRFASSDDAVRHAGLDITVYASDSKRARGHLARQGPATLRWALYEAAVCATRPNSPDHAYFLAVKRRADGHLGVISVARKLARRVHHTLRALGDQAWEPAPAG

SEQ ID NO: 101548 - protein, 332 aa, unidentified
MSAVVCGLDVHKETIYATVLDRDGQVLAQRKMMNDDIPAFLNMTRPDKLAMEASTYIIPLYRKLTEQGYDVTVSHPRKTRLIAEARIKRDRVDSRALAELLRLYSLPTSYIPPRDIAAIREKVRRRAFMVRQVTKLKVKIRDVLAAEGVKTPEGFGLFTAKGVEWLRSLKLEPVDCYLRLIEPLKDEVKLVSGDLKRSAGKDAEVQLLMTIPGVGYYMALLVKSEVGDIRRFSSGDHLASYAGLVPSTRSSGGVERHGGITREGSRWLRWAMVEAAMVHIRFDTPVTRFYHGVAERRGKRAALVAAARKLTEVCFSVLVHGRPYFNPLDAQA

SEQ ID NO: 101549 - protein, 510 aa, unidentified
MAMVRMVAGVGKNPGFDRVGEIFKPFATGLNLIPNWHREAGMQVKPGWWRNRKERKEWARRLRSEDPGLEVVHPQAAGIDVGNGAHYVAVRPGRDPEPVRRFECFTADLYRLADWLKACGVQTVAMQSTGVYWIPLYDVLEERGLKVYLVNARHTKNLPGRKSDVQECQWLLKLHTYGLLNNSFQPTSEIRVMRTYWRQRGEHVRAAATSIQRMQKALTQMNLQLANVISDLSGWSGQRIVRAILAGERNPEKLAELTDPRVRASRAEVAKSLEGNWRPELLFVLQQEVDMYDTYQRRMAECDQQLKQHLSTLIDKRDPDPPASPEAPRKASKHRKPRRNAPQFDLSQQLERITGVDLTRIDSIDAMTAQTVLSEVGLDMSRWKTEAHFASWMGLCPDNRISGDKVLRRGTRPVSNRAASALRIAACTLLRSRSYLGAQYRRLRSKLGPPKAITAMAHRLARLIYRMLKYGQRYVDKGAEFYEQRYRNQQIQSLHKRAAKLGFQIVALAS

SEQ ID NO: 101550 - protein, 356 aa, unidentified
MNTAKYIGMDVHQATVSVAVSNAAGKIVMEGVVESKRESILDFLAGVRGSLHVAFEEGTMAAWLYDLLVGRVTRVVVCDPRKNTTKKANKSDRIDARKLAELLRLNALTPVYHGEKSVVRLRELARSYVTLTQDGTRTMNRLKAIYRGRAIECAGRKVYSPRYRQQWLEQLKEPGVRRRAERLYQQLDGLQQLRREARQELLAESRKHSVSKRLRKIPCLGPLRVALLLAWMQTAHRFRSKRQLWSYSGFALETHASGEYRVVGGELQRKRKAPQVRGLNVNHNRGLKEVFKSAATQASGSPRGGVLYEFYQALLAKGLQPEMARLTLARKIATLVLTLWKKGEEFNAELVKSKQA

SEQ ID NO: 101551 - protein, 449 aa, unidentified
MTKSKRSHPERDISPTHRDAAAIDIGAKMHVAAVPPDRDTEPVRSFGTFTGDLQRLADWFERCGVRTIAMESTGVYWIPVYEILEQRGFEVMLVNARDAKHVPGRKTDVSDAQWLRRLHEYGLLRPSFRPKGELAALRAYLRQRERLLDYAASHIQHMQKSLMQMNVQLHHVVTDITGATGMRIIRAIIAGERDPATLAVHRDRRCHATVEVISAALTGNWRDEHVFALGQALELYDAYQAKLTDCDVQIEAVLRRLRNAANPAGPLPAPRHRDNTANAPTFDARAALHAVLGVDLTQIHGLGASLALKLIGECGTDLTAWPDAKHFTSWLCLAPANKISGGKILSRRTRRSGSRAAALLRLAAVTVGRTQTALGAFYRRLSARLGKAKAVTATARKIAALFYNTLRHGMAYSDPGASYYEQRYRARVLSNLQRRAKSFGYVLQEASSA

SEQ ID NO: 101552 - protein, 349 aa, unidentified
MFAGVDTHKDTLAVAVIDHAGRVVRQLELPNQDSGYVRLLALLTSHNVVRVGIEGSGNFGWPAAIYLLKRDLNVVEVPPLMTSRERLSRPGQGKTDPVDAVAIARITAREPSLPPVRPMTGHAADLRVLTEYRDQLVNERTATANRVHTDLLWLRPGYQHQLPHLTNTAHLRAALELLSGDDSVRAAVTRSRLDRMLTLTDQLADLRIQIDALVKASGSTLPEVYGVGPVVAATIIGHVFDVRRYPTRHHFATANGTAPIPASSGRTVRHRLNRGGNRQLNRALYTIAITQIRADTEGRAYYQRKRTEGKTSREALRCLKRRLSDLIYRTLRADLANAAQPTPTLRIAA

SEQ ID NO: 101553 - protein, 339 aa, unidentified
MKYSAIDLHSNNSVVVVTDEQDRVLAQKRLPNDLSVIVAFLAPHQSELVGVVVESTYNWYWLVDGLMAAGFVVKLANTAAVKTYDGLKHSGDEADARHLAQMLRLNILPTGYICPPAKRALRDLARRRLQLVRNRTLHILAVENQVTRQTGRNIRSNDVKRLTAEAVDGWKLPPDVATGIKANVAIIGVLNTEIDKLESRLDAAIAATDEWKLINTVPGIGKTLARVILLEIGEIGRFDDVGCFASYARCVDSARMSNGKKKGEGNRKNGNKYLSWAFVEAAHFAARFYPEAKRFYQKKFAKTNGAVATKALAHKLARASYHVLKTGKSFEMQRCFAGM

SEQ ID NO: 101554 - protein, 398 aa, unidentified
MDLPVYYELETNNGNRDYRIQIGGHYMNYNTVYVGMDVHKESFTLCSCKYEDEKASHYQRTPASYKNVLRYLAFLRTIYGEDTRFVCGYEAGCLGYSLYHQLENFNVECVILAPTTMLEQRSKRRIKTDKRDAEIIARSLAQHNYSPVHIPTETDNQTKEFIRMRDDHKAELKKIKQQILSFCLRQGYQYDGSGNWTAKHVKWLRSLKPAGLYKEILDEYLLTYTILTDKLNRLDQRIEELASKEEYTESVSKLTCFLGIKIHTALSVIVEVGDFQRFVSARKFAGYLGLVPGQHSSGDDRNGLGITKAGNTHVRRLLVESAQSYTRGKIGYKSRVLRSRQAGNSPQVINYADRANERLRRRYYKMVLKDGKKYNIAKTAIARELACFIWGMITDNIY

SEQ ID NO: 101555 - protein, 348 aa, unidentified
MAYFVGLDVSVKETSVCVVDDSGKVISEQKVLTEPDNIITLLTSTGETYARIGIEAGPLSQWLVNALIAADLPVICVETRHMKALLTAQQINKTDRNDARGIAQMMRVGLFKPVHVKTLVAQEQRMLLTSRKLLQRKLLDVESDLRGTLRNFGLKVGAVSGGRYDARVRELVEGFPGLAAIVEPLLTVRRVMRQQFAVLHKMLLDTVRDDPVCRRLMTAPGVGAVVALTYRATIDQPQRFVHSRAVGAHVGLTPKRYQSGEIDYDGGVSKCGDALLRTMLYEAAQTMLTRAKKWSWLKAWGMRVAQRRGIRRAIVAVARRLAVVLHRMWVDGTEFRWSKDSATVLNAA

SEQ ID NO: 101556 - protein, 415 aa, unidentified
MDVLYERCCGLDIHKKLVVACMITPSSKGTPRKEVRSFGTMTADLLVLSDWLEEQGATHVAMESTGVYWKPLFNLLENRFTLVLANAQHIKQVPGRKTDVKDCEWIADLLRHGLLRPSFVPDRPQRELRELTRFRTTLVRERAREVNRIQKTLEGANVKLGDVASDVLGTSGRAILDALVAGTTDTALLADLAHGRLRDKRASLERAVDARMGAHQRFLLAEQLAHYDALNQSVDRVSAEIAERVRPFEPIIQRMDAIPGIGRRVAEVLVAELGTDMSRFPSAAHLASWAGICPGNNESAGKRKSGRIRRGSPWLRTALVEAAHAAVRAKDTYLSAQFRRLAARRGAKKASVAVAHSILVIVWHLLQHDCQYVDLGTNYFDEHDRQQVARRLVKRLEGLGYRVALDSLPPSASAA

SEQ ID NO: 101557 - protein, 345 aa, unidentified
MQYVGIDYAKLRSHFTVTTPEGRVMKRGYVANTPEALATFMDALPPDQRAVVIEACRNWTVIHDLIEPYAQAITLAHPLKVKAIASARIKTDAIDSRTLTDLLRADLIPAAHIRPPAVRARQHVLRQRAFCTKLRTSVRNQIHTLLDRQAPAGRAAYHAFKDVFTKAGRAWMQTIDLPEAERMLLTRYLAVEQTLTEQRAATTAEVTAWVTEDRAMQLVDSIPGIGAILAALIAVEIDGIRRFGRAGQLASYAGLVPSTHSSGTVTRHGPITKQGNRWLRWALIEAVWPAIQCNAALRRFYERIKARRGANPAKVATARKLCALVFQVLTRQTPFEVTRRVVHAT

SEQ ID NO: 101558 - protein, 358 aa, unidentified
MKYVGIDVHKKMCQAAVLDEDGTLLDEIRFANDPEEIEEFSGKLTTLHDEVRAVVESTGNLWIPIHDRLEERGVDVALSNPSKTRLIAEAKVKTDKVDARTLAGLLRADMIPTCYVPGEELRSRRELLRHRLNLVKNRTEVKNRIHGLLDKHGLRMPGTTPFSKENIAWLREQNFGFMDDAILRSDLVVLEAVDSQVTLIEEKIAVLAAEDRSVRLLMTMTGVGYFTAMLVVSEVGDVGRFRGDKEFASWMGLVPSVHQSGERTRMGGISGPGNKRLRWALVESAQTAVRHDSRLGGMYERVSRRRGSGCAIVAVAHEMARIMYFMLVRGEPYRGENRGLVERKLKSMSKKAFDGLRN

SEQ ID NO: 101559 - protein, 361 aa, unidentified
MNRVQINKLDFKGQNIYVGIDVHLKSWSVAVLSEHSVLKKFSQNPDAEALFKFLATSYPGAIYHSVYEAGFCGFWIHERLVSLGINNMVVNPADVPTMSKEKLRKTDAVDCGKLARELRSGTLKGIYVPCVEALEIRSLIRLRNSIVKDSTREKNRIKSLLHFHGIKIPEQFTQNSVGNWSKHFLEWLRGLELSTEYGKKALDLHIEQYVRLREMLLQETREIRKLSRTELFADSLKLIMTVPGIGTTTGISLLTEIDDIGRFASAEQLAAYIGLIPMCHSSGEKEGVGGITIRKHAMLRCLTIEAAWVAIRKDPAMTMAYTQYRKKMNSQHAIVKIARKLVNRIYFVLKRKLEYVPCIVK

SEQ ID NO: 101560 - protein, 297 aa, unidentified
MDKYIGIDVHSASCTIAVVDAHGKRAGLHVVATNGQEIVECLAVIPGQRHVCFEEGTQSGWLYEVLEPHAVEVVVAGVAGSRGAKDDKRDAFGLAEDLRLGAIKTRVFKSGGPFKPLRELARTHRMVVADVVRTKNRIKSAYRSRGVPVAGKSAYSSAGREQWQEQLPEAYRGPLLTLYAELDALEEVRSDAEKALVQEARKFPITKLLATCPGLGAIRAAQLVPIVVSPHRFRTKRQFWSYCGLGIVMRSTSDWLPDPPGTSTSVPVSFGKAKSFRDDDARTRPRSRGCDSLLLLA

SEQ ID NO: 101561 - protein, 396 aa, unidentified
MISVGIDVSKGKSTVCILKPYGEIVSKPFNITHTHKDLSELSSMLFRLNDEVKIVMEATGIYHLPILTYLQEKGFFVSVINPYLMKSYRNESLRKAKTDKIDSRIIANYGIDHWFKMKEFQTSGEIYEELKLLGQQYRHYMKLHLLSLAELTHLLDLTMPGIKNLLASWNETNRKDKRSDFVERFWHYDVITSMSEQEFTEEYILWAKEKKYVPSQEKAKVIYTLAQESIPTLPSETSSVKMLVTEAVRVLKEVDATLGLILSRMQEIAKTLPEYSVVREMGGVGNTLAPKLIAEIGDVRRFRNGKALVAFAGIDPPPYESGQFVGCNRKISKRGSASLRKVGYETMRSLKMRSRPEDPVYRYVVKKESEGKSKKNIEISRKIYRACLKNHFCNTF

SEQ ID NO: 101562 - protein, 347 aa, unidentified
MVTVGSDSHKRTHTFVAVNENGKQLDFQTFAATTPGHLEALRWAGQWPDRRWALENCRHLSRRLESDLLHAGEAVVLVQARLMATVRVTGRQLGKSDPIDALAVARAALREPNLPVARFEGKSREVKLLLDHREDLVAERTRICCRLHWNLHEIEPGVVLSDSALIRWCVMDRVEKIVRHHTGLLAEIALEQLETIRRLTRRIKALGLQLRALMRQLTPSLLELQGCGPLCAAKIFAESADIRRFETRGAFALNNGTAPIPVWSGNNVRHRPNRGGNRQLNAALYRIAIIQARDEGLGRTYIAKRLALGNTRREALPSLKRRISDEVFRRLWNDLPLVLNERFSEAA

SEQ ID NO: 101563 - protein, 358 aa, unidentified
MEVLHQRCAGLDVHKATVVGCLRVQEHGRVRHEVRRWGTTTAELLALGDWLRQAGCTHVAMEATGVYWKSVWHILEGELDLLLANPAHIRNVPGRKSDVNDATWIADLLAHGLIRASLVPPGPIQALRDLTRTRKQLMREIGQHKQRIQKVLEDANVKLASVVSDVFGESGRRMLKALSAGETDPSQLAALRDGRLTASRETLAAALHGKVTAHHRFLLSQHLGTIAHLEQTVAAFERQIEAVAAPFNPAVACLVTIPGISVTAAHVIIAEIGVDMSRFATAAHLRSWAGLCPQLNESAGKVMSRRLRHGARGSKPCWYSARGPRPAIRTTISTRSLSSGYAHGAVHKRPLSRSPLRS

SEQ ID NO: 101564 - protein, 343 aa, unidentified
MNDITTIGLDLAKNVFQLHGVDASGEVVLRRQLRRRQLLAFFKTLPPCLIGVEACATSHYWARELQAVGHTVRIMPASYVKAYVKRNKTDAADAQAICEAVTRPTMRFVGVKSAEQQSLLMLHRSRSLLIRQRTMLVNAIRAHMAELGIVAPVGRRGVAVLCAIIADPEDEQLPALARRCLESLVATLMTVEREVAGHERRIHAWHRSNEVSQRLETIPGIGPIIATALVASVSDPTVFKSGRELAAWIGLVPKANSTGGKERLGRISKQGDPYLRWLLVAGAMSVIRHGRKTNFATRPGLADLVHRKPPKVAAVALANRIARTAWALLAKGGTYQTPAPLPA

SEQ ID NO: 101565 - protein, 430 aa, unidentified
MLGDPVTAFSSPFQYEEVRLMKVVFPTCCGVDVHKRFLVATIITSPTDSLQPHYQKKRFSTFNSDLNRFADWLHENACLDVCMESTGKYWVPVFNILEMRGIRVVIANPKWVKAVKGNKDDTKDSKWIGDLFRIGLVKSSFIPDKSIRILREFTRYRYKLTSMKSSEKNRFQNAFTVCNVALDSVVSDMFGKSATAITDYLASNEPFDVEHCVSLLQRSLKKKADAVIESIEGYSITDEQKLRIGIIRQHLDHLVDLIDKMDDCINTLVSGYEGQINLLCTIPGVRRDTAITIISEIGVDMSQFGSSKRLCCWAGLTPANNESAGKKKSVRISRAGVYLKPALVEVAHAAVKDKTDPYYALKYERIAKRRGKKRAIIAIARMILTAIYEMFSTGEVWNPVDLYKVDMPEHLKEKQLAKAVITLAIKYPYC

SEQ ID NO: 101566 - protein, 386 aa, unidentified
MPKLNDLSRSLTAFEQDSTLIVVIEMSQASWLVAGIVPGVEREPLKKLEPNGDAVLRLLQRWRDEATKAGRTLKRVVVAYEAGRDGFWLARWLRERGVEAYVIHPTSVAVSREHRRAKTDRLDTALLKRVFLGWLRGEPKHCSMVAIPTLTEEDAKRPNREHESLVGERTRLVNRIKSGLVRLGIRTFKPMLRRAPEHLDALRTPEGAPVPVNTLAELRRDLARLHLIRAQIKVIEAARLERLQQGPEQGPHAMVRLLARVIGIGVETADMLVQEVLSRNLRDRRAVARYAGLTGAPDESGAKRREKGLAKAGNARVRRGMIQLAWRFLMFQSESALAQWFRSRTAQAPKTRKTMIVALARKLLIALWRLVRTGAVPEGLALRPAI

SEQ ID NO: 101567 - protein, 343 aa, unidentified
MIHYVGLDVSQKMTAICAVDAQGQRLWRDQCGSTPEQIEVAVRRRAGTEARLGIETGPMTPWLVHELRDRGFDIVCLDARHARAALKMQLNKTDQNDAEGLAQIMRTGWYRSVHVKSFDTHRARALLGARAQLVGMTTRLSNHIRGVLKTFGLLPGAMRGLPFDRRVEALLTDRSDVAPVVQPMLVAWRQLREQIAVFDKAVRVLVKASPVCRLLMSVPGIGVLSVLAYVSTVEDPARFRRSRSVGAHCGLTPRQYQSGEVDRSGRISKCGDILTRTLLYEAAVVILARIKRASPLKEWAEAIARRSGNGKARVALARKLSVILHSIWRSGETFRWPEDPATA

SEQ ID NO: 101568 - protein, 313 aa, unidentified
MPVALSNPIVGVDVAKNELVIYQADSDLLEAIPNTKTSIKQWLKALLGPVSIAIEATNIYHLEFADLAYAAGCTIYMVGGYELKHYREGVKIRAKTDALDAKLLARYLKNEAEELRPWTPPSPLYRQLLSLFRRRAALVQARVGLVQSWSNEPLLKAAFAEQIKSMQRLETMIEKTINDQLKQAGLLGQLKRCLKVEGIGFLTGARLLTAFQRGKFSNADAFIAFLGMDLRVSKSGQKDGRRSLTKRGDPEARRLLHNAAMSASRTKAWKGFYEAQRARGFSTTQALVMLARKLARVVFALLKGQSEYQTKVS

SEQ ID NO: 101569 - protein, 423 aa, unidentified
MIKLKYSICCGLDVHKNVIVATIVTTNKDGISEYLQKSFSTINSDIQRFHNWLIENNCYHVCMESTGKYWIPIFNYLENDIDICLTHPKYVKAIKGKKTDKKDSKWIADLYKFDLVRCSFIPPKDFRQLRELARYRFKLVCMKSSEKNRIQNCMTISNVGIASVLSDPFGKTATEIMSYLLEHTADSMDEKAVRKLIKKGAKAKSDEIIEAIKGYNIETDQAKKLELAQGHLEYLDDMITQTEVELYVRIKPYYEFVEFVSTMPGMTELSSTIVLAETGVDMDIFDDAKHLCSWCGLSPANNESAGKKKSVRIAKAGDYLKPMMVQCALAAIKSKKQPYFAIKYGRIKKRRGHKKAIIAIARMMMVCIYHMVSEKKPFTPTDYEELMNPQNHVERVVLNENNVFAYLESLGYDSSKLVKRNDN

SEQ ID NO: 101570 - protein, 368 aa, unidentified
MLCQITDRPPPGSQRPCAARSLSDFMCINPYSRLSPFLELESTREGNHHMSKSFIGIDVSKNNLDVHILPEALSFSYPYEPKTIKALIKKLKSFTPELIVMEATGGYEVGIGVALAGAGLNVAIVNPRQVRDYARALGKLAKTDKIDAYIIARFAKDVKPESRTQLTLKEFELKSLVARRQQLIDMRSAEKNRLSRASVAQVKNGIQKIIRVLDAQIKAIDDDLHNEIKNNPVWHKKLELITSFNGVGDNTAHMLLFSLPELGNLNRQQIAALVGLAPFNRDSGMMKGKRTIVGGRANIRRALHMPTLSAATRWNKTLGEFYCRLIAKGKKHSVALTACMRKLLITLNAMVKNNEPYNPKLCKITVDN

SEQ ID NO: 101571 - protein, 345 aa, unidentified
MENMYYIGLDVHKKTISYCVKDGSGRIYAEAEIPATRLDLDMWMKTLPQPWTVAMEATIFTSWIYDHLLPHAAAVKVAHPLMLRAIAAAKKKNDRIDANKIADCLRCDFLPECYMASTEIRERRRTLRYRNLLVRQAVQMKNKIAVLLMEAGVSYNKQKLHKVGYFRELLATNQDIDEGLKPLLRLCRETVVRLGKTESALVRSLQRDSLLMERVERLMTIPAVGPITALTWALEVGDVQRFSSIKKAISYCGLCGAEHSSANIIKRTPLSKQRNKHLQTILIEAAKMAPRNSVDLAMIYDREKQKDNANRATLAVARKLVAYLVAVDRRQKDFLVVENKNRTAA

SEQ ID NO: 101572 - protein, 347 aa, unidentified
MLADELDYVIGVDPHRDTHALAVVDVRTGGVVFEATTVADGGGYACVLRLADQHAPGRRVFAVEGTASFGAGLTRFLISHEERVLEVGRLRRERRVGKSDALDAIRAARSVLGQTRPARPRAGGEREALRALTAAREGAVTAKRAGLCQLRGLLVSAPEPLRAELRSLTRAQLLRRLAAVRPERRQDPELRGTLLALRALARRVKALTVEERELAREIEALTRKLAPQLLDQPGVGPLAAAQVLISWSHRGQITSEAAFARLAGCAPIPASSGQTIRYRLDRSGDRRLNRALHMILVTRRRSHPATIAYVERRIQEGKSRREATRCLKRYLARSLYRLLEHGASPAT

SEQ ID NO: 101573 - protein, 403 aa, unidentified
MNAVGIDVSKGKSMVTILRPFGEIVSSPFEIKHTSSDIHSLIKLIHSIEGESRVVMEHTGRYYEALAHQLSAADLFVSAVNPKLVKDFNNDSLRKIKSDKADSVKIARYALDKWQSLEPYSITDELRAQLKVMNRQFHFYVKQKTAMKNNLIGLIDQTYPNANTYFNSPTRSDGSQKWVDFVSTYWHVDCIRKMSLNAFVEHYQNWCKRKKYAFNKSKAEEIYTKTKELVPVFPKNKITKHIIRQAVDQLNSTSVTVETIRTLMNETASKLPEYSIVMQFKGIGPSLGPQLMAEIGDVTRFTHKGALTAFAGVDPGVNESGSYAQKSVPTSKRGSSNLRKTLFQVMDVLIKTMPQDDPVYQFMDRKRTQGKPYYVYMTAGANKFLRIYYGRVKEYLSVLPDPS

SEQ ID NO: 101574 - protein, 568 aa, unidentified
MNTDFTTKARRREAHYLIAEIAEIQSSSSLCSLRLAPLVTPLSPLPDTVSKLNHSVDCGNTAVNKFAARKSRVVNKLSDIAKDLRPVETDAGREPHRSAWSLRYHSARVYRRTPAERRDPVQRSERTSPHEGSCIRATGDRTQRGRLKGPPMNNWNELKHFVGFDWAKDHHQVVVVDRHGTITSEFEFEHSLEGWSKWRQKMSDYPAAAVAIETNQGAAVEQLLQQGMMVFPVNPRSAKAYRTRKVPSSNKTDRLDAWSLAEALRSDGHGWRSLQPLDPIIQELRLLCRDELHLIEQRTVLVNQLQQALAEYYPAALEAFDDWTVPATWKFLERFPTPQALVAAGPRKLENFLHCHKLYRENVHARRMETFARAGQWNVRDAIARAKSLLVLSLVKMLVILNKQLNEYRTQIEKLFESHPDHDLFGSLPGAGPKMSSRLLSEIGADRTLFPDADSLRCYAGTAPVSYQSGQVHKVYLRRQCNKYLRCAIHLWADLSRRWCQWAQVYYRQLRKRGKSHAEALRCLGHRWLKIIWKMWQTRTLYDGDLHMRNQLEHGSWVLELMTPKNGE

SEQ ID NO: 101575 - protein, 349 aa, unidentified
MTTVRMADGVSGVVVGVDTHADVHVAAALDPLGRHLGTLEIATTTRGYEQLLRWAKTFGPVTRFGVEGTGSYGAGLARHLAGAGCAVTEINRPDRRARRARGKSDPLDAEAAARAVLAGAAQAIPKADHDRVGMIRTVRVARRSAMKMRIQVSNQMAALVVTAPEPLRDQLRSLSLAHLVRVCAMLRPGAVSTPTAASKLALRSLALRHQGLCSELEMLDRELARLTREAAPALSDLTGVGPDVAGALLVAAGDNPDRLRSDSAFASLCGASPVPASSGKTNRYRLNRGGDRIANNALWRIVMVRLTCDARTQAYVARRTAEGMSKREIIRCLKRYVAREVFHALLDKA

SEQ ID NO: 101576 - protein, 342 aa, unidentified
MEKIKIYVGIDVSKDWLDFACYRPGEGIGYRGRCENTPSGVTKALNEVRKYYKVAVSDLLFCLEHTGVYCAPFLGRASKLNLLVWLESAWKIRRTQQPRGKTDKMDAARIAEYAFRYKDRVRLWVPEPVAVTRLRDLLALRERLIRAANALKVPKSEAKASGKELAAADMARFSDPAVKSLEKQLKQVETQIDELMAQDSACKKNLDLLCSIPGIGRMTALSLILFTRNFTLFNDARKLACYCGVAPFEYSSGSSIKGKTRVSHYANKSLKTLLHLAAVSAGTHNPDMNAYKKRKLEQGKHKMSVINAIRNKLLHCVMAIITRQTPWVAKFSKAEENLATVV

SEQ ID NO: 101577 - protein, 380 aa, unidentified
MVETIPYTVSSAVVILGLEARRSDQRSHQLVVANHIERYRGPLEPECMRPIEVRYIVDGESSYVDVLGVDISKADFHACLLQGHKAAKKTFPNTPAGYRQLQRWLTNRKCSAVHACMEATGAYWMGLAVALYESKAKVSVVNPSRTAFFARSQLRRTKTDRVDAEMIAQFCRTQQPEAWVPPAPEVLELRGLLTYRDHLVQEQVRFKQLAREIRVGKKLKSLHAQQLERLQDAVAQVNAQIEALVQAHPALKAPVLALTAVRGIGLLTAASLVAKLPVERLRNEKAAAAYAGLTPREKQSGTSVHGKPRLCKTGNASLRRDLYMPAITAIKYNRHLQRFARRLKAKGKAPKVIIAAVMRKLVVLAYRIMKGAASTTLIAA

SEQ ID NO: 101578 - protein, 353 aa, unidentified
MNSRGCLYVPGIIVGVDTHKDEHVAVVVDKLGVRIGQRSLPTTNMGYVSLERWASGLGEIDAFGVEGTGSYGAGLARFLRGQGHKVVEVNRPDRSTRRRLGKSDPTDAEMAARSVLAGVARDQPKSGIDKVEMIRMLKSTKDSAMKSRIQAINQMKALIVTAPVELRAVLRGLITNQLVARCARWRHGQLRTPTAAAKYTLRSLARRHIQLTQEIEALDAQLARLTTAFAPALMESFGIGPDTAAALLVTAGSNPERLKSEAAFAALCGVSPVPASSGKTNRHRLNRGGDRKANAALYRIVIVRLRYHDRTKTYFQRRMEEGKTKTEVIRCLKRYVAREVFSILHDIGKRYMA

SEQ ID NO: 101579 - protein, 327 aa, unidentified
MTASVSSHNHIFIGIDVGGASFEAAWHRGGCTQYQNRPDAIAAFIARLSAEKQIIRIAVEPTGGYEKRLVKALRGAGLPVEMVHTSRFAAYRTLIGAKAKSDTSDARLLAAYAAAPEEVRGRKAGHVVLPQDDVREQLAELAARRDQLKHMIHAETCRLSTVRSRSIRDDITAHLQALRQADCKTYDAMMQLVRQRDELRNAKRLLQTIKGIGDKTALTSIAAVPELGLISNKAAAALVGVAPFVRQSGTMRAPAHIRGGRAAVRNAFYMAAVTASRHNPVLAPFYARLIAAGKPVKVALVAVMRRLVVFANAVLRSGQPWKGAQII

SEQ ID NO: 101580 - protein, 321 aa, unidentified
MTIIGFDVSKNELVGARINKGASVKETIIMENTAEKIDQFLEDAKETYPHLIIASEATADYHRMLAERCVKRNIPFRLLNPILTKQFTRATIRKKKTDLTDAHIIAKLTLQGEGTPLTLHAFDPAKSIMRTASKINRLYKTLSAVSSRMERVFPDQQVIIAELKKPLAPLMETAEKLRREAQGRVDQNMYALLCSIIGIGRTLAPVMITEIGDIARFSSGKSLVAYAGLDPKVKQSGMSLKHNTKITKRGSPYLRHAAYIAATIAKRHDPELKIYFEKKIKEGKRYKEATVATARKILYRVYAVWKRGTPYVKKGYPQLAT

SEQ ID NO: 101581 - protein, 351 aa, unidentified
MMIIGVDYHPSFQQIAFLIEETGEYEEQRLNHEGGEAERFYRDLKRKGIRVRVGMEATGYSRWFERLLAELGFELWIGDPAEIEAKRVKKRKTDREDARLLLRLMREDRFPQIWVPSPENRDLRQLLWHRHRLVQMRTRIMNQLQALAMNEGKRWKSKLFSQKGRAEFEKLALGPWASRRRSELLELLDRLNPSIEELTTAAEQEVKKRPEALRLMTHPGVGPITALAYVLIIGTPERFARGKQIGTYVGMIPIEDSSGDKQRLGHISKQGSSLLRYLLVEAAQAAARFNPHWRRRYIHLAMRRHRSIAKVAMGRRLGVRLYWMWRNGCDYSPSFEFGSYVGQLGTGHGVQ

SEQ ID NO: 101582 - protein, 346 aa, unidentified
MPETEVDTFAGIDVSARELSVALRRGKAEDKPAMAKFSNHPSGHKALIAHLLRGGRRVRVCLEASGNYSLDLALTLQAHRQVEISVINPRRARRFAESLGQRSKTDPVDARVLCEYVARMPWVAWQPPSSVALHLRAVARAIADLGVIHTQQNNRAHASAASQALPVLVVKEMQRHQKYLEQRMTRLRREALRLIAGDSELDRRFRLMLTTTGIAETSALQILGELAVLPDMLDARQWVAFSGLDPRLFKSGKSVEKRPRISRGGSRHLRRALYMPALVALRRDPCLRRFYQNLLARGKARLQAVVAVMRKLLHALFAMFRTNQPYDGSKLCCAVDMAGNAIAACA

SEQ ID NO: 101583 - protein, 431 aa, unidentified
MRNYKRKSKKSRKFCQNKATNKLRQKVRQIGGDKFGLLVVDSSKNNFAVKLADFYGEPLWEPDPIPNTKGRLEELPFKIRHQMKENQLQELAVGIEITGRLHQPVKRILEKIWPVKMIHPFTTKQLRQPASFGVKTDDVDLDAMIRAMISGYGRDDCPLPISYQKWQCLNRAREDLVKKRSEIKTQCQEHIQALMPGYSRLFKDFWSSETALTIVTEYGSPEAILKETVESIFKKLKQQHVRCLRRTLHRIYAWALEAPVHNQIQSFEHRILCDYLKLIRTLSQQIHDYEKELLEYLVKTSGILLLSIAGVNIVSSSGYVSELGPIENYPTSRHISGRAGLFPSCYQSDEVNHRDGPIVKGHNARLRDAILEIAFNILNHDNYFKAWAELRKKQGWEDKKNYCRHGESIYSIQLLYGGRLSAVQSPKKSAQ

SEQ ID NO: 101584 - protein, 413 aa, unidentified
MDVLHPRCCGLDVHKSSISVCILLREAGRVQKQQRRFGAMTQDLQELAEWLRRFGVTQVAMESSGVYWKPVWNILEGQFTVVLANAQHIKNVPGRKTDQKDAEWIAQLLQYGLLRPSYVPCEIIRDLRDLTRMRASLSQEASRISSRIQKVLEDANVKLASVATNVLGKSGRAMLEDIISGEDDPEHLASLALGHLRVKIPQLRLALEGKIRSHHRFLLRRLIDQIQFMEHEIALLDERLEEIGRQRPDLAQTVARWDTIPGIDRVAAWALLAEIGDNMAQFPTAEHLASWAALCPGNHESAGKRLRGTTRQGSPWLGRMVCQCAWAAARTKNTYLSSQFRRIAARRGKKRAIIAVAHTLIVIAYHLQKNQSNYDDLGGNYFDRIHSDGLRRYLVKRLQQLGHKVTLEPIEAA

SEQ ID NO: 101585 - protein, 343 aa, unidentified
MSIQVIGIDLGKSNFHLVAHDPKGQAILRKKLSRQQLVQFVQNTPASTIAFEACGGAHWLGRLCMTYGHTVKLLPPQYVKPYVKGNKNDFIDADVIAEAATRPSMRYVPVKSEEAQLLSAIHRIRQGYIKDRTACMSRIGALLLEFGVSLPQGHSVMKALPAWLAEHARHLPALIHNELCGLHQHYQVLMLKVAEQDNKLKRYLASNEDAQLLKSIPGIGDITASQCIAELGNGGQFTNGRNLAAWLGLVPHQHSTGGKARLLGISKRGNKHLRTLLIHGARAILSRPEKTGAVFGNWLTKLRASKPFNVVCVALANKLARMVWAVLKYRREFNAAKLQSGYA

SEQ ID NO: 101586 - protein, 414 aa, unidentified
MKLFVGIDVSSEELEACFMNPEGDTLETLKVENNLHGASHLRDRIVAACDKLPASEIHIGLEATSVYSWHPAMYLHEDASLQERKTKVFTINPKLIHKFREAYADLDKTDRIDAWIIADRLRFGRLTTTIVMQEQYFALQRLTRMRYHLVHNLTREKQYFLQNLFYKCNAFRSEVDSSVFGHAIMDMLSEKYSLDEIADMEVADLADYLKEKGRNRFPDPERVARCIQKAARASYRLSKVVEDSIDLVLGTSIQAIRSIQSQLKELDKAIERILAGIPGAQCLRSIPGIDRVYAAGILAEIGDIERFSDQAAVAKYAGLTWRKHPSGGFEAEDTKRIRSGNRFLRYYLVEAANSVKNREPEFGEYYRKKYNEVPKYQHKRALVLTARKLVRLVDALLRNGQLYTPGRKVKPAEH

SEQ ID NO: 101587 - protein, 412 aa, unidentified
MNLTQNDRLKQVTSDTLIVGVDVGSQTHFCRAFDWRGFELSRRVFKFSNTGMGFLTFLRWTEELMNKTEMKKVIVGCEPTGCYWLTFQKFLQDHDVQLVTVNPFTVNRSMELDDNSPEKSDLKDPKTIALLVKDGRFSTSYLPSGVYAEIREASVCRDQIMKQHVRLSNQIQGWLQKFFPEYFECYADWDSTSGLMLLREAPLPQDILKIGAGGINQIWRDAKVRAAGIKRAQTLVEAAQNSVGLEAGEAARLEIWVLVNDYILKAEQLKRLDEYLEEKVKEVPNVEKLLAIKGVGMSTVIGFIAEVGDIGRFTDPKQIQKLAGLEIVKKSSGKKKGQPRISKRGRRKLRRTMYESARALMTWNPAFQDVFLYYRNRTKKPLGGMQAKIAVACKAIRIFYVCLLYTSPRPRD

SEQ ID NO: 101588 - protein, 340 aa, unidentified
MNTTQIGVDLAKSVFEVAVSHAPGRVHERQRLSRGQLRRFFAERAPCEVVMEACGSAHHWGRELQALGHRVTLLPAADVARYRDGNKTDRADAKAALEAARNTAIDRVPVKSVAQQALGALHRLRQGYLQTRTARINAVRGLLREFGITLPLGAARVVAQAHAAVAEAELPPYLRHALHDALEEIGALERRARGLEQQLAHLAPQLPAVALLDSVPGIGLLTATALLAFVGDIRRFRSGRHFAAYLGLTPREHSSGLARRLGGISKRGNSYLRMLLIHGARAALRAGHVTKQPDDLRTWALALARRHGHNVAAVALANKLARVCWRVWRDQRPFVRRVPA

SEQ ID NO: 101589 - protein, 349 aa, unidentified
MRFYTKHHRFYCGIDLHARTMYVCIMDHEGTILTHRNLPAATEALADVLQPYREDLVLAVECIFTWYWVADLCSRIGVEFVLGHALYMKAIHGGKVKNDKIDSQKIASLLRSGMLPMAYTYPQAMRSTRDLLRRRLYLSRHHAQLQTHIQNTNTQYNLPSFEKRIDRSSNRTGIEDRFTDPMVRTTIKVDGALMDALHKQILAIERQINAHVPEHDPVAIHLLRTIPGVGKILALVIFYEIHDINRFPRVGNFISYARLVKCAHESAGKRKTGKNSKIGNVHLKWAFSEAACLFLRSNEQAKRYHKRLVSRYGKAKALSIIAQKLGRTVYVMLKRRTPFDAKLFFETVG

SEQ ID NO: 101590 - protein, 377 aa, unidentified
MSKVRFVGLDVHADTIAVAVAEPGGEVRAHGVIPNRLESVRKLIGKLGPAEEIRACYEAGPTGYVLYWQLTQLGVACEVIAPSLVPMKAGDRVKTDRRDAEKLARCYRAGELTAVWVPDAAHEALRDLVRAREAAKKDQLKARHRLGKFLLRHGKRPEGMKAWTKQHLEWIGTHVKFDQPALEATLQDYLDEVKHVAERIVKLEKAIDEAVRQAPPQIRAVVEALQGLRGVAQTTAATIVSELGSLSRFESPRQLMGYSGLVAREHSSGNRVQRGAITKTGNAHLRRVLVEAAWAYQHRPNVTGFLLRRQKSLAISDEVKQIAWKAQYRLNKRYKAMSARGKNKNQIVTALGRELLGFIWAIATSVEKQQQAQAAAA

SEQ ID NO: 101591 - protein, 367 aa, unidentified
MKKVSTAAVTTTKNFSQPKLTIGLDLCDRNSWFCVLDESGQIQREQRVRTNASALREVFSAMPHRRIALEIGTHSPWISRLLSELGHEVIVADARKVRLIGESRKKDDRLDAQTLARLARIDPELLYPVKHRSAQAPADLATIRARAGLVRARTALVNTARGLAKSYGERLRGCNVRNMNPEKAEGLSPELQAALQPLLSAMQSISEQIAEYNERIEQLAEQSYPQVELLKQIKGVGTLIALTFLLTLEDPHRFRKSRDVGCYLGLRPGRRNSGQSQPQLHISKEGDPYLRTLLVQGAQHILGPFGIDCDLRRWGLKLAERGGKSGKKRAIVATARKLAVLLHHLWVSGEVYEPLHNSSRMTVAAAA

SEQ ID NO: 101592 - protein, 376 aa, unidentified
MVNSATASHEQSIYAALELSKNSWLLAIQVPGRDNPSLHPLLGGNVEGLMAKLDAARDRVAKATGQPPAVTLCYEAGYDGFWLARFLEQRGITCQVMEPASLRVNRRARRVKTDRIDVENILYTLIAWCRGERHVCSMLVIPSVEEEDLRRCHRERDRLIRERTAHTNRIKGLLFGQGIRGINVKSRYKTLKPSELVTGDGRPLPDRLGREITREIERLAQVQAQIVSVERERDHPVTSCAATEIKRHDLLRLKGLGPALSSTLTREVYYRRFTNRRQVASYIGIAPSAYDSGDGHRSQGISKAGNRLARVAMVEAAWLWLRHQPDSALSQWFHDRTQGQKGRIRRIMIVALARKLAIALWRYLETGLIPEGAVVK

SEQ ID NO: 101593 - protein, 468 aa, unidentified
MKLKRRRSAGKIHVSPTRLKEINANVAGIDCGSAEHFVAVAPDRDPNPVQSFRTFTSDLIRMAEWLTACRVTSVAMEATGVYWIPIYEILEARGFEVLLVNARHFKNVPGRKSDVSDCQWLRELHSVGLLRGSFRPKADIVALRTYLRHRQTLVETASTYIQRMQKALVEMNLQLPLVVSDITGMTGLRILRDIIAGERDPQHLARHRDPRCHASAAEIVAALTGHYRPEQLFLLQQNLDLFDACQAHLAKCDAMIEGQLHTLTAQRPAPAAALPAGRRPRRKSAHGNEPSCDVRAPLFHLTGGVDLTQIDGIGPHTALKFLSEVGTDMTRWPTEKNFTSWLTLAPNNKITGGRVISSRTPRSANRAAGILRMAAMTLGRTQTALGAFYRRMAARLDKPQAITATARKLAILIYRALKGELVYRDPGANGYDAEQRSRVLRRLRQRAASFGFELVNRTTGEVIVTGVS

SEQ ID NO: 101594 - protein, 374 aa, unidentified
MKIVGCDFHPSWQQVAVFDPETGEIAELKLVNGDGEAERFYRELEAPALVGIEACGNSQWFIELLERLGHAVWVGDAAQIRASYVRKQKTDRRDARHILKLLIESRFPRLWMPTAAQRDLRQLLIHRHKLVEIRTRVKNGLQHLALNRGVQKHSRLWSVRGRAYIEKLPLEGWTARRREDLLKLLAELDKHLDELDEAVTHAAEKHPQARLLMTQPGVGPITSLAFVLTVGDVSRFKHSNQVTSYLGLIPREHSSGGKQRLGSITKQGNRFMRQLLVESVQTVNRLDEGFRKEYAARCHHKPKGVAKVAAARKLAVRLYWMMRQNVGYPEIALIESSPRVALTGTSGTLGSPLRGSPDAASQVVMLNGRSRIQQ

SEQ ID NO: 101595 - protein, 346 aa, unidentified
MGMDIAVLGVDLGKNVCSVVGLDASGAVVMRRKVRRETLIRLAEKLPPCVVGMEACCGAHHLGRLFAAHGHDVRLMSPEYVRPYVKAQKNDDRDAEGIAEAATRPTMRFVELKSQDQLDMQTLHRSRDRLVGERTALINQLRAILLERGMIAPQGKRKLEQFLSVLMDEQDGAGLSPRMVILVADVRAQWAELDRRIAAFDGEFVRWARENEDARRLVTIPGFGAIIASALVASVGRAEAFDRARDLSAWLGIVPQQFTTGGKPKLLGISKRGNKYLRRQLIHGARAALPYVAERDTPLGRWAKALLERAHRNVAVVAFANKLARIAWAVLRRVERFVATGMPRAA

SEQ ID NO: 101596 - protein, 380 aa, unidentified
MESTLSADETLYYSLQYRTKAAIKQRSNRKGKKMKNKSFILALDAHNGQSQLAAIDESGKILSCRHCSTAAPALIEAVSKFKGQTRLVVEESHIADWIKRTLEPYVSELVVADPKVNSWIANGENINDTVAAVRLARLFRGGYINPVYHPDSKRQQFKELVLHYHDLTRQIVSFKNKLKSEFNGKAVCVKGPRVYSEKGFHSAIKNLEPFTETSFQANHYFDIIQHIVNKKLATLKRIRSYYEIYPEINQMRQLAGIDQVTAFTISALIDTPYRFSNKRKLWSYVGLSKSEKISNNRIYRSGASKGGNRLLKYLLLQAAMRILRSKKETTFKAIADRLEKLGVNPKNIRRSVARKIITVIISIWKSGETYRPQNCMLEQN

SEQ ID NO: 101597 - protein, 421 aa, unidentified
MKQKDNTDRDERYAAWVGFDWGDQEHVWALQWTDTGERERGRLEQTPEALDVWLGQLMSRLNGRRIGVAIEQKHGAVVWMLLKYECVEIYPVHPQAAGQFRQALYPSGSKSDPADGELLLELLVHHRDRLRPLEQDDEPTRRLLMLVEQRRHWVEEKKRHGDRLSARLKVYFPQVLNWFDDIGAAPVLDLLARWPRLEQLQKAQRKTLETFLRQHRRTPEEAAAWAKQVSAAVPAVQDSVLLDSYVLEVAALVALLKQMQTSIKKFDTAIAETSRQHPCWAIAQSLPGAGPVMAPRLLAAIGNGKRYQNAHEMQCATGIAPVTVASGRTRIIQFRRAYPKFLRQTFHEWAQHSMKSCRWARVYYDQLRTVGKRYHAALRALAFKWQRILFRCWKDGIAYDESKYIASLKKRNSPLSAWLPE

SEQ ID NO: 101598 - protein, 360 aa, unidentified
MTSTMTWVGLDVHARSTHAAAIDRESGELTRTRFGAGAEPVVAWLQGLPQPIHGCYEAGPTGYALYRAAAAAGLRVDVVAPSKTPRAAADRVKSDRKDAELLVRLLLAGSLSVVAVPPASVEAARDLARAREQVRFDLARLRQRLSKLLLRYGRIYDGGGTWTQAHRRWLAGQRFEHVPTELAYLDALAAIDGLLARRAALDERLSLLATEPEHWPTVARLRCFRGIETLSALVLHLEVGDFGRFQRPGQLAAWLGLVPSLHQSGESETRGSITKTGSGFARRILVEAAWHYLREPRIGVTLHNRQAGQPDHLLQIAWRAQQRLYRLHQRLRGRGKPGNVAVVAAARELACFLWAAAVAD

SEQ ID NO: 101599 - protein, 343 aa, unidentified
MKIYALGIDLGKTVFHLVGLDASGQVVVRKRCSRTQLLAFTANLEVQLIGMEACSGAHFLGRALRAQGHEVRLMPAQYVKPYVKTNKSDYIDAEAIAEAVQRPRMRFVPIKTEEQLDLQALHRVRERWVMRRTAVVNQIRSLLLERGLTLPKGRSHLDEQLPRILEDAELNLSGSFRVLLAQLKLELEQLAGRIEQMDRVIQKTAKENEACQRLTEIPGVGPVTATALIGAIGNGSAFGKGRALSAWMGIVPGEHSSGGKQKLLGISKRGNKYLRRLFVQGARSVLQQRHRQAPGLRDWLTQLLGRTHQNVVVVALANKLVRMAWAVLCKNERYRAPVLAVTT

SEQ ID NO: 101600 - protein, 355 aa, unidentified
MDSKKYIGMDVHKESISIAVMNGAGKIVMECIMETKASMILQFIDGLRGDLQVTFEEGTSAAWLYDLLKPHVTRLVVCDPRKNASMREGNQSDKIDARRLAELLRLDHLTPVYHGEHGLRTLKELVRTYLTVTKDLTRVMSRVKAIYRSWAIPCTGKQVYAQRHRAEWLGKINEPGVHRRAEFYYQQLDALRVVRQEVRRDLLAESKKQKAWKRLCEIPSIGPIRAAVLLGILQTPHRFRTKRPLWNYGGLAIEMHSSADHRKVDGQLQRSRKNVLVRGLNRNCNHDLKNLFKGAAAVASSKPGPFQEFYTALLAKGMRPEMARLTLARKIATIVLIVWKRGVCFDAQHLKPQTA

SEQ ID NO: 101601 - protein, 393 aa, unidentified
MEALYAGIDWGGQAHQVCLIAADGRRVRELRVGHDVAGLAALDEALGAAGSVAIAIERAEGLLVEHLLEAGHVVYPVNPRIAARIRERYRVAPTKDDSFDAFTLADGLRHEQARWRPIRLYSPLLGELRALVRDRERIVDQHVRAAQQLRAILETYHPAAARLFSSPSRQVALQFVRDYPTPERAARLGERRMQRFLERCSYTGRVPAAELVERLRANLMHASPGTTTGRAFSALHYVELVAQLVTIREAYDDQIALLLARHADAVIFRSFPGVGPVTAASLLAEIGEDRDRFPNAEALLAEAGLAPVTRRSGQTRRVRFRYAANHHLRQSFTWMAYNSLEESDWARNAYRDARQRGQRSYRALRGLGSRWARIVYRCWQDRTTYDASRHHTS

SEQ ID NO: 101602 - protein, 345 aa, unidentified
MKIVGCDLHTRYQQIAMLDQETGELVERRLEHESGEARAFYAALSGPVRVGIEATGHTRWFERMLAELGHELWIGDAAQIRASVVRKQKTDARDAAHLLELLRSERFPRIWRPTLAERDLRQLVWHRQKLVWMRNAVGNQLHALAMGEGVCRKKKLFTKKGRAELESLGLGVWASYRRQELLTMLDRFDGSLRELDRAVAEQAEQNAAAVLLMTHPGVGPVTSLAFVLTLGPVERFERSKQVVSYLGLNPREHSSGGRQRLGAISKQGNPMMRPLLVEAGHTAARLDSELRQDYQRLKLRRGSGVAKVAIARKLAVRMYWMLRSQASYAQLVRMQGSPWATLVKE

SEQ ID NO: 101603 - protein, 356 aa, unidentified
MKIHKVQEFVVKGKEVFVGLEDSKTTWKIAVRCDRMLIHRVSMEAKYPALIRYLRNKFPDCTIHVIYEAGFKGFNLFDRLTEDSIDCVVIPPHMVTEPKVNKVKTDKRDANRLSLILENHDFEDPCHVPDRERREDRQISRTLIAMQKDVIRTRNRIRKLLDFHGIELTFPDRWRRDQFQALKDLSLPGPLRISLDVLLTQLEQLWAHQVTLRAALRTLCRKERYEKAYAIARSLPGIGWFTAIRLVLELGEDLSHFTSGKKIASFVGLTCSEHSSGETEWKGHITGMGSGFIRGTLIENSWMAIRKDPALLAKFSRVWRSSGSKKKAIVAVARVLIVRLRACVLSGMPYATGVVE

SEQ ID NO: 101604 - protein, 344 aa, unidentified
MDISVLGVDLGKNVCSVVGLDASGAVVLRRRAKRETLIALAAKLPPCVIAMEACCGAHHLGRVFAGHGHDVRLMSPEYVRPYVKAQKNDDRDAEGIAEAATRPTMRFVGLKSQEQLDMQTLHRSRDRLVGERTALINQLRAILLERGIVAPQGKRKLEQFLTVLMDEQDGAGLSPRMIVLVADARAQWGELDQRIAAFDTEFIRWTKENEDARRLASIPGVGPTIASALIAAIGKGEAFEHGRDLAAWLGLVPRQFTTGGRPKLLGISKRGNRYLRKLLIHGARAALPHVAERDTPLGRWAKALLERAHPNVAIVAFANKLARIAWAVLRRGERFVVRGLPLAA

SEQ ID NO: 101605 - protein, 344 aa, unidentified
MLYAGVDTHKKYSRVVVTDNLGNQVARASLANDLDSFSNFFLKLGESTRAVVEAGRNWGIIYDMLDELGTEPTLANPLKTRAIAEAKIKTDTIDAHTLADLLRANLIPKVYVPSKQVRAQKDLLRQRLWLVSIRTMVKSRIHHILDRNHVAMSYHSDIFGKAGREELSRIDIPAPDNLLLKAHLEILDHIQDQVGNSEQWIRDAVVDNPGMAILRTIPGLGKVLAALVIMEIDDIHRFSSPGKLCAYAGLVPSTYASGGKVRHGRLISSCNRWLRWAYVEAAWIAQRTSPYCRSYYERIKRRKGANSAATALARRLCEITWYCLADKRTYEERPTPAAFCGTWS

SEQ ID NO: 101606 - protein, 397 aa, unidentified
MPVIWAGVDIGKEHHHCVVIDADGKKLLSRRVLNDEAALTGLVGDVLALDDGVLWAVDINHGGAALLIGLLLNRDQPMVYITGLAVHRASEGYRGVGKTDAKDAFVIADQARMRKDLGQLRPGDEVAVDLRTLATRRADLVQDRTRAINRLRAQLLEIFPALERALELTNKGPVLLLTGFCTPAAIRAAGVAGVESWLRTRKVRGAAGLAAVAVQAADEQSVSLPGERLAAEMVARLAKSVIALDEEIAEVEALIEARFRDHPAAKVILSLPGMGPMLSADFIAATGGDMTAFGSPDRLAGYAGLAPAPRDSGQVSGNLRRPRRFHRGLLRAFYLSALASLKSCPASKAFYQRKRAEGKGHKQALLALARRRVNVLWAMIRDGALYQPMPVMTARTA

SEQ ID NO: 101607 - protein, 530 aa, unidentified
MSRAVRTVTPRRRENGVGLPADADYSVGCEPVYEPGVGARPGRVTHCCLEHAGQTFGSLTDAPGQPSRWKICGLGWRTSEVRMQPEEIPDDDHELVIERVCAIDVAKASGKVCVRTPHPNRPDRRTSRVWDVSATSRAVTELAEHLIGEGIERVTVESTSDYWRIWFYVLEAAGLDVQLVNAREVKNVPGRPKTDKLDAVWLAKLTEKGMLRPSFVPPVEVRQLRDYTRLRVDVTRERTRYWQRMEKLLEDALIKVSSVVSRLDSMSVRDMLEALIAGERDPRRLAELARGKMRPKRAALIEALTGRFDDHHAELARLLLSQIDALSTHIDTLTRRIDELLAILTDPTRGPDGGYRIGDDGAAPFVNGLQAAKRLAEITGIGPVSAPVILAEIGMDMTRFPTAAHLVSWAKLSPRTIQSGATQRGGKTGKGNPYLKGVLGEAAAVAARTDTFLGERYRRIVKRRGKLKALVAVARSILVVVWNLLADPTAHFHDLGADYHTRRADTDRRLRNHLAQLAALGYRVTVEPAA

SEQ ID NO: 101608 - protein, 343 aa, unidentified
MNVTRIGLDLAKNVFQVHGVDRDERVVIKRQLKRGQVLGYFEKLPPCRIGMEACAGAHCWARAFSRIGHEVKLIPPQFVKPYVKGQKNDANDAEAICEAAGRPSMRFVPAKTVAQQDLQAVHRIRGELVRQRTAKANQIRGLLAEYGLVVATRIDVLRRALPDIQEDPDNGLSGLFRRLLDGLRQDLVELDRRVAELDGEIQTAAKADETAGRLQSIPGIGPITATALVASVGDGRQFKRGRELAAWLGLTPGQHSSGGKDRLLGISKRGDSYLRTLLIHGARSVIRTAANKTDPRSRWISAVAARRHKNVAAVALANKNARIAWAVLTQGGRYDSQYGMAAA

SEQ ID NO: 101609 - protein, 345 aa, unidentified
MKITTVGIDLAKSVFQIHGVDERGKAVLRKQLKRSEVLGFFANLPRCLIGMEACGSAHYWARKLIERGHEVKLMAPQFVKPYVKTNKNDRNDAEAICEAVERPNMRFVPVKSPEQQALLALHRARAGVMKARNEQANQIRGLLGEFGIVLPQGIGQLRRRGPELLEDGDNGLPGLMRALLSRLLAQLAQLVQQVVALEREIVLWHRHNDDSRSVERIAGIGPLTASAYVASLGNAKGFKNGRQVAAWLGIVPRQDSTGGKPKLLGISKHGDVYLRTLLIHGARAVLRHLQHRPDQADSWLKRLMIRRGKNVAAVALANKNARIAWALLAHQRDFDPHYASSAPSR

SEQ ID NO: 101610 - protein, 343 aa, unidentified
MDHFAGLDVSVKETSVCIVDDTGKVVREVKVASEPEALLQVLMNPAYHFKRIGLEAGPLSQWLFSALAEAGLPVICVETRHMRGVLKAQVNKTDRNDARGIAQMMRAGLYRPVHVKTLRSQKLRMLLTHRKLLQAKAIAVENDLRATLRNFGLKVGMVGTAKFEARIKELVENLPDLTVLVEPLLIVRRVLREQIYILHRRLLAVVREDDVCRRLMTIPGVGPVVALTYRVTVDVPARFKNSKAVGAAFGLTPTRYQSGDIDRTGGISRCGDEMMRAMLYEAAQVMLIRTTKWSWLKAWAMKIAKNRGMKKAIVALARRLAVIMHRIWADGTEFRWTKEVAEA

SEQ ID NO: 101611 - protein, 353 aa, unidentified
MAVIIGMDPHNRSATIEVVDERAQVLAVGRYGTDKIGYAQMLAAGRKHPDRVWAIEGCNGIGKHIAHRLVHDGETVFDVPPKLSAQVRVFATGNGRKTDPVDAHSVATVALRTPHLVRVNVDPELVVMGMLVDRRDELGRARTQTINRLHRVLLELFPGGAKQFLSSHQARALLATARPRDIVGKTRRRLAVELVGELEGIDKKIKIAEKDLKELVLARGSTLMDLHGIGPSGAARLLPDVGDIRRFADRDRFASSNGTAPLDAASADQKQHRLSRAGNRRVNRALHIMAVVQLRNPTEGRAYFDAKEGRRQDLDGVDARIETKAVQRRLRAHGRGPETQRSGGPGRATGQRL

SEQ ID NO: 101612 - protein, 449 aa, unidentified
MSKGSGITRGDRRRNARKARLRVLVPARYAVAGVDLGEKKQALVVTGADGLVLARRSPQASVHELGPLLDWALAQARAAGYAGLSVACEPTGSGWMAVQDLCSVRGLPFVCVQPLMSHLAREQEDLTGDKTDGGDCVLIARLARELHCYEPERLEGAWAELREEGRRRAQLITSATAAKQLLRDKLGLVAPALLEAACEPFDSPAWLASLEVVLERCGGDPSTVTAMGFAAFAAAVRAALPGWGGQRAGGTCRQLFGALGDGRGVARMRRAALRRARGALADLKYARARRAQTEADMTALLAELGIDTARICQIPGLSPVTLAAILAETGDLHKYETSSSVVKHAGMSPARNESGSFRGQAKISRRGRPALRLATWRATWAVLRHCDVLAAKHAALTSRGDDSRLTPGQARVACAASLLRWIWSLTVHGTQWDPRIAAGQLGHHHAMAA

SEQ ID NO: 101613 - protein, 345 aa, unidentified
MPIVGGLDIHRKQLTFDYLDTATGEVKRGQVAPADRAHLRSWLGRFAGRDDVAFALEGCTGWRYVAEELAGAGVAAHVAEPADTAFARGRKRHAKTDKTDSRHLRELLAGGRLPECWIPPSHILECRALLETYHDLRAEHTAWVQRIHAVFFHQGAPALGDGALRTGDDLEALRAAAACHLSPAGQLQVTTALDMLAALEARLDVLRHRLLDAARSLTGAKVLAARLYGVGPVTALAMTCWLGGAGRFSSSRKAVRFAGLDITVWSSDRKGPPGRLSRQGPEVLRWAVYEAGKTHARASAPDHRYYAAVKDRQGGKRAALSEARKILRQACHILAELGDDALTAA

SEQ ID NO: 101614 - protein, 346 aa, unidentified
MMIIGCDFHPSRQQVNWLDTETGETGEQKLVHASGDAKQFYQRLAAPVLIGMEATGNSQWFVELVEDLGHEVWIGDAAQIRASFVRKQKTDKRDAAHILKLVVEGRFPRLWSPDRDQRDLRQLVVHRHKLVEIRSRVKNELQHLALNKGMQRKGKLWSQAGQKMLRELPLKPWAGCRREDLLGLLAMLNQQIGQLDAAVQKAAEEDPGSQLLMTQPGVGPNTALAYVLTIGDVSRFRRGKQIASYLGLIPREESSGGRQNLGAISKQGNRMLRSLLVEAAQIAVRFDPGFRKQYLHRCHQKPKGVAKVAAARKLAVRLYWMLRTQTGYPEIVRIESSPRVPLVGAS

SEQ ID NO: 101615 - protein, 392 aa, unidentified
MIYIGIDIAKNKHDCCIIDSDGVVYNDSLRISNSRQGFELLYSSILSILPDKDISNVKIGLESTGHYSTNLQNFLYAKGFKLSILNPLATNLFRKAQSLRKTKTDKTDALVIAKMLFSDDTKSYSPVSYQIQELKSLTRHRYRLIGYRSKLKTSVNRLVDIIFPELPDLFWSIHQSSSYALLSILPSPKDIAGCHLTKLTNILNTASRGKYGKDKAISLKESAANSIGTNSRSLSFELKQTIRLIQSVQHEIDSLELLIKEIVVEINSPLISIPGISYTLAAIILAEIGDIKRFTTPCKLLAFAGLDPSTYQSGKYTASHTPMVKRGSAYLRWAILMAGRTVSMRDATFSAYLSKKRSEGKHYYVAMSHVAKKLIRIIFHLLKTNATFAPQI

SEQ ID NO: 101616 - protein, 341 aa, unidentified
MNYYVGIDVSLEASSLCVVDANGKIVREGKVASEPDALIAWLKGLKLELTRIGLEAGPLSQWLVAAMRQAGFAVELLETRHVCAALKTMPVKSDRNDARGIAQLMRLGWFRPVHCKSMAAQETRALLTARKLLQTKLHDLELSLRGILRGFGLKVGPTTPARFEERIRELVAGHPRLEVIVNSLLAARVALRREFDRFEKQVRDAARCDTRVRLLTSIPGVGAIVSLSFTAAIDDPARFKSSKRVGAYLGLTPTKYQSGETDIDGRISKIGDASVRAALYESAHIILTKPLKGCTALKSWAMKIAKRSGMKKAKVALARKLAVIMHRMLADGTSFRNAAAV

SEQ ID NO: 101617 - protein, 376 aa, unidentified
MSNVRFIGLDVHAETIAVAVAEPDGEVRSVGVIPNRPESIRKLVKKLGPAAQLRICYEAGPTGYVLYWALTSLGVRCEVVAPTLVPVKAGDRVKTDRRDALKLARSYRAGDLTPVWVPDAEHEALRDLVRAREAAKKDQLRARHRLGKLLLRQGRRPSTTMTAWTQAHLTWIKTVHFAHAAQEATFLDYLHEVEHVADRLDRLERAIDEAVKTAPPRMRSVIEALQALRGIALVSAVTIVAEVGALSRFAKPSQLMGYSGAVASEDSTGTRIRRGGITKTGNAHLRRVVIEAAWAYRYRPHMGATLRKRQASVSEEVKAIAWKAQHRLYARYRHLTARGKCKQETVTAVGRELLGFIWAIGVHVEGTGGHQDSVAA

SEQ ID NO: 101618 - protein, 336 aa, unidentified
MSNLPVFVGLDYHQDSIQVCVLDQTGRTLLNRAAANDWRELDRLITPLGRVQRVGIEACCGSADLGEELVERLGWNVSLGHPAYVARLKRSPDKSDYSDGRLLADLTRVGYLPQVWLAPASIRQLRQLVNHRQAQVDHLRTLKLRVGAVLRDQRVRIARDRGGRWSKAWCASVRDNDRLDEQSRWIVNDLLDEIVHGYQKLSATETRLREVTQGDATIEKLMQQPGIGEVTAWVLRGCIGDFRRFKTAKQLSRYCGMSPCNASSGNKVADAGLINGCNRMLRMIIVQAAHRLIRIAPRWSGLAASLKARGKPHCVIVGAVGNRWVRTLHHVMKNGG

SEQ ID NO: 101619 - protein, 355 aa, unidentified
MNAIKYIGMDVHLATISIAVLDAKGKLLMELTIATQAGALLDFIRGLSGTLSVTFEEGTSAHWLYTLLEPQVAKVVVCDPRQNPRRWGEKKSDRLDARKLAELLRLGTLKPVYHGYSLGPALKELVRSYRTLVGDTGRVMSRLKSLYRARGIRCAGTRVYSPRFREQWLVQLREPGVRGRAERLYKQLDLLLPLRQEARAAMLAESRQHPAHKILCSIPGFGPVRAALLIALLQTPHRFRGKRQLWTYAGLALVTRTSADYEVVDGAVKRARKPPLVLGLNANHNHALKGLFKDAAVTVLTRPGPFKDFYTTRLAQGMEPELARLTLARKIAAIALTLWKKGECFNAEYLKAQAA

SEQ ID NO: 101620 - protein, 344 aa, unidentified
MNKLSRVGIDLAKNVFQLHGVDRNEKAVWRRRLTRNNWQKVLLDKVEPGCTIGMEACAGSHHWARQLQARGFTVKLIAPQFVKPYVKSNKNDANDAEAICEAMSRPGMRFVTVKTVEQQDIQAVHRIRSELLGQRTSKANQIRGLVAEYGLVAPQQMTCLRAAVPDWLEDAENGLTCRFRGLLNGLWDDLIRLDNRMAELDREINTIAQHDPVAKRLQQLRGVGPLIATALIAAVGNAEQFTNGRQMAASLGLTPKQHSSGGKDRLLGISKRGDVYLRSLLIHGARSVIWNAKKKDDRLSQWVTSVAIRRHPNVAAVALANKTVRIAWAMLRQGTDYQPDQIAA

SEQ ID NO: 101621 - protein, 324 aa, unidentified
MAAEVSIGIDVSKARLEVALGATGELFAVANDARGIAGLSARLVELGPELVVLEPSGGWETALVAELGAAGLPLAVVNPRQVRDFGRAGGQLAKTDTLDARLLARFGDRMRPAVRRLPDAQELELKALVARRRELVEMITAERNRLGTAAKVLRKEITAHIRWLEGRLKERDRELGRMLRSSPLWREREDLLRAVPGVGPVLCATLQANLPELGQLSRHQIAKLVGVAPLNRDSGAMRGRRTVWGGRAQVRATLYMAILAAVRCNPALKTFYLRLRNAGKPAKLALTAAMRKLIVILNALLKKPYSLELPMRPNHLTPNTVALP

SEQ ID NO: 101622 - protein, 404 aa, unidentified
MTSDDRPLIFLGLDIGKSAHYAVGVDRAGQTVYSEPVANEESALRLLVLWARAHQATVIVDQPGGTAALLLKLCWDAAIDIGYVPGLAMARARDFYAGDAKTDPKDAFVLADVARAHPNRVVWLRETSAARTQLELLNSYDADLREDAHRLTNRIPALLATYWPAFERAFGDRLDTIGGTALLKLYPSAPQLRQAGAKRLVTLLRATHRVHQPEPWVEQLLVAAKSQTVVVAGADTAAGLIAELAEQLHRVLARRQRLEKEIERAFFNLPEASILRSMPGIGPRLGARILIEIGDIRQFRTSAQLAAYAGLGPTPHQSGTSIRGNRATRFGNHRLKDAFFLAAFSSLKHPPSRTYYDRKRKEGKRHSQAVLCLARRRVDVLHAMLMTNTHYQVPSHPSDLKTAA

SEQ ID NO: 101623 - protein, 344 aa, unidentified
MTFVGCDLHTRMQQVAVLDTRTGEVSERQLAHDGSAIEEFYAALLGPVTIGIESTGYAVWFHTLMQRLGHTVLVGDAAKIRAMVVRKTKTDRRDALHLLDLLRHDRFPTVWVPDPATRDLRALLTHRMRLVRIRTMVKNGLHAIALNYRLARGSKLLRQAGLAQLHALTLPPHTAQRRDQSLELLAGLTTQIRELDDAITIAALAHPDGPRLITHPGVGALTALATIVVLGPVARFHDSKHVVSYVGLAPALNASADKYHLGHITKQGSTLLRFALGQAAAHAARMDADLKRTYFTLVHRRGRPKAKVAIARKLLVRLFIMLRDQIDYDEFQRRGRRTLAIASG

SEQ ID NO: 101624 - protein, 341 aa, unidentified
MEPICTIGLDIAKHAFQVHAATASGRVVLRKKLRRQQVLSFFSALPRCTVAMEACAGSHYWGREFERIGHQVKLIAPAYVRPFVKRQKNDAADAEAICEAAQRPTMRFVGVKTEDAQAAAILFRARDLLVRQRTQIINALRGHLMEFGIIVAKGRQNVVKLIKLINESDDTLPPGARPVLALLVEQLRAIDMQVARLDREMIERAKENGITRRLMTIPGVGAVTAAAITALAPAAATFRRGRDFAAWIGLTPLQRSTGGKERLGRISRMGDRTIRRLLIIGASAVARWAVRNGTPAGSWLARMIARKPPMLLRVALANKMARTVWALLAHGGIYRAPVAAV

SEQ ID NO: 101625 - protein, 350 aa, unidentified
MVTLGGDSHKQTHTLVAVDDNGRQLAQKTSPATKTGHLEVLQWARRWPERRWALEDCRHVSRRFEADLLVAGEVVVRVPSKLTGGARKVARTSGKSDPIDALAVARAALREPDLPVAKLEGPGRDVRLLLDHREDLVGERTRIQNRLRWHLHELEPEAAIPARMLSRYHSLAEIEQRLGRHRGVVAEIALELVVRVRDLTRRINELEADIEHRVGGLAPTLMSLSGCGALCAAKVVGEAAGVSRFRSRAAFAMNNGTAPVQASSGNQKRHRLNRGGNRQLNVAMHRIAITQLSRPGPAKDYVAKRLAAGNTKTEAIRALKRRISDEVYRRLLQDERASLTNNVSSSDAAA

SEQ ID NO: 101626 - protein, 395 aa, unidentified
MFIVGIDIAKRSHEAIIIAEDGQVVRKAFSFRNNCTGYNLLLEQVRKLTLVKSQIVFAMESTAHYWLALYARLLKDGYAVMVLNPIQSHSLRELYIRKAKTDARDSLIIADLVRFGRCKASNVPQDKILALRELCRSRAYLVDMAADLKRKLIALLDRIFPEYESLFDSVFSKTSIAVLRKYSTPQKVKNAHLGKLTDLLMESSNGHFGEWKAHQLKEAACSSFGIDDSGGVYSTLLGMFLEQILSLTAQADSLEKQISVFFQEFNNPLTSIPGVGTVLAATILSEIGDITRFSSADKLLAYAGLDPSVKQSGEFKSNQNRMSKRGSPYLRRAIWLASTVAVHRDPMFQTYYEKKISEGLHYMNVIGHVSRKMTAVIFAVLRDGQPYQPILQSAG

SEQ ID NO: 101627 - protein, 415 aa, unidentified
MTEQRWYAGVDWASESHHVFLTDGAGRKIGEKIFKHSGEGLAEMAAWLLTASGAASSSQIYVAIETPHGPVVETLIERGVTIHAINPKQMDRFRDRFTLAGAKDDSRDAEVMASALRTDPTCLRLLAALDPTVIELREWSRIASELGAERIRLTNRLREQLWRYFPAMLELENDFGAPWLLDLWELAPTPGKAARIREATVAKLLKRHRIRRFDAAHVLDVLRKPAVQVAQGTVEAASAHIKTLIARIRLVNGQVKEAHRRLDALTARLIPAEEAGAGRQKQHDVEILASLPGVGRIVLATLLAEAWDGLKRRDYAALRSLTGVAPVTKKSGKSCIVIRRQACSNRLANVMYHWARVAIQLDAASKAKYATLRSRGHSHGRALRSVADRLLSVACAMLKNGALFNPSFNAQNTPC

SEQ ID NO: 101628 - protein, 391 aa, unidentified
MIYVGIDVAKDKHDCFITNSDGEVLFKAFTITNNLDGFNELHQKIASVMDDVTKVKVGLEATGHYSYNLLGYLIDKGLPTYVINPLHTNLYRKSLSLRQTKTDKVDARTIASMLMSDVNLKSYSDISYHNEELKSLTRYRFDKVKERAKLKTSVSRLVCILFPELEKLVPTLHITSVYALLSEFPGAKHIATAHLTRLTNLLSEASKGRYGKDTAITFRDAARASIGSNMPAKSLELKHTIKLIQELDSEIDEIENEIKLIMDEINSPILSIPGINYRMGAMIIAEIGDFNRFDSPDKILAYAGFSPSTYQSGQLDGAYAHMEKRGSRYLRYALYNATKYVCHWDPTFTAYLAKKRAEGKHYNVAISHAVKKLVRVIYHLEKTKQQYIKAA

SEQ ID NO: 101629 - protein, 414 aa, unidentified
MGEEINKSCGLDIHKRFVIATILTRSGEKQQQRFDRNDDGILNLKNWVTSEKCDVVACESTSDFWIPIYESLIDHLPVIVGNARDMKAFTHKKTDKIDSEVIAQLALNKMIQPSRVFPKRHREFRSYVRLRLTLVRKRTDIKNEAHAILSSEMLHLGDVLADIFGKNGRAILAGISSGKNVEQIIGSLSPNVRKKSVQIREILDREISQSAAIRLQICLNLIKHLDDEIEVLEREIFNYAYQKHKREMEILMSVPGIGELGAATLIAEIGNFSDFPSGDKLASWLGIVPNVYQSADKYHNGRITKRGSKVARWILTQIAQAAARKKNSKLKEFFNKKKKSIGYAKAIIALARKIATIIWYLITNDEMYQDETGYQKGEVQKRKIVETEIFSVDERIIIISGITAIVGKKEREST

SEQ ID NO: 101630 - protein, 311 aa, unidentified
MTHDTIGIDISKLHFDAHRRMTGRHARFDNTAAGFKAFSHWIGADHPDLVVFEPTGPYHRDFEAAFAGRLPLVKVNPLQARRFAQSQGTRAKTDAVDAAMLARMGRALELVPDRPAEEIQTVLRELRVARAGLVRDRTALMNRLSAARLPLVRRLVKARLAQAERQIATLDAEIDGRLDACPRRRRAAQLLTSIPGIGRITARSILAECPEIGTLRHKQIAALAGLAPMTRQSGTWCGKARIEGGRRHLREALFMPALVAMKKNPDLSAKYDQMRAAGKPHKVALTALMRKLIQLANTLIREDRTWHPKCA

SEQ ID NO: 101631 - protein, 421 aa, unidentified
MARKRQDTRLLSVIHLICCGLDVHKGKISACLITTDESGKEEYEIREFGTFTDELIELREWLLASHCLIVAMESTGVYWRPVHNVLEGYLEVILVNARHVKNVPGRKTDIEDSRWLAGLLRVGLVRGSFIPEKSIRQWRELGRSRKKYSQSLGDYKRRVHKVFETANIKIDSIVSDLFGLTGRNLIELLCIEGCEVGLEKVEQCAKGSLKSKVTELHRSIQGFFEDHHRFLIMSLMRTITIIETEMAFISERMKAVMQDYDDTITRLDVVPGINELSAQYVLGELGPTLKEFRSSGALASWSGLCPGNNESAGKRKSGRSPVRKHVFKTIMVEIAWAAVKTKGTYYRDKYYRLRTRLGPRKAIVAIAHRILKAIFAIIKDGEEYKELGEDYLSKKNAKNKLNNLKRKAKELGFDLVPVVAS

SEQ ID NO: 101632 - protein, 326 aa, unidentified
MQGKVTLERSAKSRVYAGIDVCKDRLDVYIASTGEQLHVENTRKGLGTLARHLRAACVERVVMEPTGKYHRMAARTLHAMEFGVCVVDPLRARRFAQSTGKLAKTDRLDARMLALMGALFEVEATPPTSVLLEELQEVLRARQSAVDDRTALSNRLGESKSKLVCRQLKRRIPQLDADIAKLDAELKRLIASDPVIARRCEIVDSIVGVGPVATAWLVIGVPELGSCDDKQAAMLVGLAPIACESGDQRGKRKIRGGRADVRRGIYMAATSAASSNPTLSVFYERLVRAGKLKKVAITAVMRKLVVLANTLIKQDRLWQPAPPKPA

SEQ ID NO: 101633 - protein, 403 aa, unidentified
MNKNSLRSYSIPLRLQRVAGIDCHQPTFKVAICIEGEVPIINTFNTYTEDVYQLKDHLVGYLIKDVIIESTGIYWRFVYRVLTEAGIKVVVVNPFTVKQNPLLKTYKRDAVWLATLLMNGMVQPSIMVNEQQEALRELTRQRLHYTQQLTRIKNKIIRTLESSNFKIMSVISNISTKTGMRLVDKLSKGVTDINELIECCHHSVIKRKGEFLPKALTGKLTINHQMQLTLFLEDMMHVETQKAKVDAAIKSLFTEKQKQMMVKLDEVEGIAMESAEVIMAEMGLSIALFKNEDSAVKYAGFAAGVHESSDKKVVVKCHPGNKYLRTAMVQVAWAAVKAKNGYWWAVYQNLKKSRGSKKAIIAVARRLVKVIYKILVHEHRYEKWDAAKYYDNRANVRHYKKAV

SEQ ID NO: 101634 - protein, 424 aa, unidentified
MSKKKSSVAGLGALYARVCGMDVHKNSVVACVRILNAKDGTVQSTLRRFGTMTADLLELRQWLREQQVTHAAMESTGVYWQPVFNLLEGHLEVWVVNAQHIKKVPGRKTDMKDAEWIAQLMQCGLLKPSFVPEREQRELRDLTRQQSKLVQQRNAVDNRIQKVLETANIKLGSVASDVLGVSGRRMIEALIAGEQDTSVLADLAQKKLREKIPQLQRALEGEVSEHHRFLLRQLLDQYDFLEKEIARVSERVGAVAPSSFRAAVEQLDAIAGVGERGARALLAETGTDMSRFPSHKHFASWAGRCPGNRESAGKRKSGKTPAANRHLDAVLTEMAHAAVRKKDSYFKSQYHRLAGRRGKKRAIGAVKHSLLVTIYFMLRDHKPYKDLGADYFDKLNPQHQIRYHVRKLKDLGQKVELSPTADAA

SEQ ID NO: 101635 - protein, 465 aa, unidentified
MRNARESGKAKRSTVPTGLQAIRPMVAGVDIGAREHWVCGPPRAYGETNVRVFGTTTAQLEELVDWLVEQGTESVAMESTSVYWIPLFELLESRGIEAVLVNARQLHNVPGRKTDFHDCQWIQLLHSCGLLRGSFRPGDAIVAMRAIHRQLANLVEERTRCVAWMQKALDQMNVQVHRAVTDLTGTTGMAIVRAIVAGERDPVRLSALRHHRCHKSGEQIARHLTGTWRDEHLFNLASALQLYDTVEKLIASHEARLLEAIETLQPPERKNAPVPAHPNSSKEKDIKSHGDQPARTALWRLAGLDLTRIDGIRIGAAQTILTEVGTNLSAFPSEHHFVSWLRLCPRIPISGGRPLKKRRNGTGANRIAAVLRMAASALQRSRTALGAAYRRIARYKGASVAVFAIARKLAQLVYRMIRYGQDYVDVGERTYELQFETRRLAGIKDAAKSLGYSLTKELTPAPATG

SEQ ID NO: 101636 - protein, 418 aa, unidentified
MLRIVFPICCGIDVHKKFVVATIGSTNKSGVTDYQTRQFSTFTESLHKLLDWLKSQSCINVCMESTGKYWHPVFNVLEEYCDVVVANPKYVKGIRGKKTDKKDSIWLCDLHKHGLVPSSFIPPLPIRQIRDLMRYRFKLINFKSSEKNRIQSSLTVSNIMISSVVSDTFGVSSMKVINHILDNPDDKDFDVSLMLHGTMQNKAETITKSINGNLTKPQADKMRVCLHHLENIEKHIEDIETVVLGLAQPYLPQIEIILSLPSIKNIFTAIAIIGEIGSDMSVFNSSKHLCSWAGLTPQNNESAGKKKSVRVSKAGVYIKPLLVQCANAAIKSKKCTYFKIRYDQIRKRRGHKKAIIAIAHSLLNCIYHMLDKDESFNYDLYTIDSKPKQTYASQITEEMAIRYLQTLGYQIPDLHNTT

SEQ ID NO: 101637 - protein, 338 aa, unidentified
MKYKRIAIDTSKHVFTLHGVDEQERPVLRRELRRGQVEAFFGKQDATEVVLEACGGSHHWGRLFSRLGHRVRLIPPQYVKPFVKRAKNDRNDAEAISEAASRPCMRSVVVKTVDQQADGIILKHREMLVSQRTQAINALRGHAAEFGVVAAKGIVKVAALLMELAADNAIPATARAMFEQMGAHIEALDQRVAAVDSELAALHKANPVSQLLAEIPGVGPLGAITMVLTVEPGNFASARHFAAWLGLTPKEHSTGGKQRMGKISKAGNERLRQLLFVGAMSVIRFAKPGSKSASAWLLQLLERKPRKLAAVALANKMARIIWAMMSRGEAYRRQPVAA

SEQ ID NO: 101638 - protein, 356 aa, unidentified
MQTQVTKKIDFKGKDLFIGLDVHKKSWSVTIVVDGIEHRTFTQPPDPMGLYNYLQRSFPGGTFNSAYEAGFCGYGIHRELNSLGIKNIVINAADIPTSQKDKLHKRDPIDSRKIARGLENGSLHGIHIFDRDLEELRSLNRTRFYLMRDLRRSKNRIKSFLQYYGEHLPAEFDNNQWSLKFVSWLKQVQMNTPGGLDAFSHLIESYEHNRQQLLILSRIVRLRIREYDKELYNLLKTISGIGPLTSSALITELGDINRFPHIDHLSSFVGFIPRVRESGETIHTGGITFRCNTFLRTLLIESSWQAIRRDPALMQYYQQHVINSKGHKVIIKVARKLLNRIRYVMKNRQPYVTGVA

SEQ ID NO: 101639 - protein, 350 aa, unidentified
MKKVTPITPEALNAVVRVGVDLAKSTFAVVAVDRREQVQFKRMLKRADFERFLGCLPAGCGVAMEACSGAHAWARECSARGLQPRLLAPQAVKPYIGEQKNDLRDARGICEAAGRPKIQPIRVKSVAESDLQMVVRVREGRVAARTAKSNQLRGFLAEYGLTLPRGAAALESHVPALLEDAENGLSAQAREVLASLYREWQAAEAEVAEADGWVRRLTREIAASQRLQRIPGIGPIIALALLALLGDGRGFRTGRALAAWLGLTPNQRSTGGKTRLGSITKHGQVYLRTLLIHGARAALNSCKASDDRVLRWARGLAERVGKNRAAVALANKLARVAWRVLVSEAEHRPA

SEQ ID NO: 101640 - protein, 408 aa, unidentified
MLFVGDDWAEGHHDVEVMDASGRRLAKARLPEGIAGMTRLHAMIGQALGDNIEDDAVEVKIGIETDRGPWVQALVAAGYTVYPVNPLQAARYRERLALSGAKSDAADAHMLADMVRTDSHQLRPIAEDSAEAEAVKVVTRMHKTLIWERTRAGQRLRHALREYFPAALDAFEDLDAADTLELLAKASDPASAARLSISQISAALKRARRRDIPAKAAVIQAALRAEHLRQPPVVTAAYAATVRALAAVLVTLNEQVKALQGQVEAHFGQHPDAEIILSQPGLGSILGARVLAEFGDDHDRYASAKARKNYAATSPITRASGKKRTVAARFVHNDRLVDALMTQAFSALKASPGARAYYDRQRARGAGHNAALRQLANRLVGILHGCLKTGTPYDEATAWSHHLIEVAA

SEQ ID NO: 101641 - protein, 335 aa, unidentified
MYTLGIDVHKDESHVVVLDDTDEIHDEVRVQNANLDEIAKQYAGSKAAIEATSNYYTIYDTLNEHLDVVVADPNQTKALGVVEAKNDRLDAKLLAQLRSAGMIAESYVPSKELRERRALVRGRKQLVEKRTDFKNQVHAVLDQQGVSYEWDPFSQDGREILAGEDLSLGTVARTLIESYLSVIDELDEQIEQLEELIQERAASLEETQLLMSIPGVSFYSSLLITSELGDIDRFDRDKEVVSYAGLDPVVRESGDSRTEGRISKRGSPRLRSILVQCVKVAVHTCEDEYLTRFFERIKRRKNYSIAIVATARKLLVSIYHMLDRKEVYDPPGVSA

SEQ ID NO: 101642 - protein, 396 aa, unidentified
MDRAWAGVDIGKQHHHAVVVDDQGTRVLSRRVANDQAALEELIGQVTELAGAVAWAVDLRSSEAALVVALLLAHDQTVVYVPGMTVNRAASAYPGAGKTDAKDAYVIAEQARMRRDLQVLRADDELIVELRLLVARRQDLAADRTRAVNRLHDRLLAVCPALERVLDLGNRGALVLLTGFQTPAALRALGVAGLEAWLGSRNVRGAAKLAAAAVDAADAQAIRLPGEQVAARLIADLAEGVLALDGQIKDVDKRIEDRFRRHPAAEVICSLPGMGVLLGAGFLAATAGDMTAFGTPDRLASLAGVAPVPHDSGRVVGNLHRPQRYHRGLQRVFYTSALISIRCCPQSRAFYDRKRAEGKRHTQAVLALARRRVNVLWALLRDERCYALTPPEPQAA

SEQ ID NO: 101643 - protein, 356 aa, unidentified
MQTQFTKKIDFTDQNLFVGLDVHKKSWSVTIIVDGIEHRTFTQPPDPESLCNYLHRMFPGAYYHSAYEAGFCGYSIHRELNSLGIKNIVINAADIPTTQKDKLQKRDPVDSRKIARSLEKGSLHAIHVFDRELEELRTLNRTRFYLMRDLRRSKNRIKSFLQYYGEPVPLEFDNNQWSLKFVFWLKQVNMQTGSGQDAFLNLISSYEYHRGQLLTLSRQIRQRIRDYDNELYSLLKSISGIGPLTSSALITELGNINRFNNIDQLSSYVGFIPRIRESGETTHTGGITFRCNTFLRTLLIEASWQAIRKDPAMMQYYHKHLVNNKGHKVIIKVARKLLNRIRYVMKNRQPYITGVA

SEQ ID NO: 101644 - protein, 318 aa, unidentified
MAQKRTLVGLDIAKEKVDVAIRSTAVEATFANSAAGRRQLLDWLKEQSACKAVVEASGGYEKSWVELLRAAGLEVVIVDPKRVRHFAKSAGRLAKNDSIDAHMIAWFGEVFGEMPGQSSDEGSQELDRLVTARLGLMRLQGQIESWGEHEQPKAVQKIHRALLKAVATQLAMLQNMIRVKLATTPRFSQRAEIIHSVPGLGDAAAAGLIAFLPELGCVDRQAAAALLGVAPFDDDSGKRHGPRRIMGGRHKLRCLLYMPIMGAATQHNPVLKAHYQRLLAKGKEPKVALMACMRKLIGILNTMLARGEKWDATRHAVA

SEQ ID NO: 101645 - protein, 427 aa, unidentified
MPYRISGIDVHKKMLAVVVSDVEIESEYQFERRKFGSNPAELRALATWLLEQEAEEVVMESTAQYWRPVWEALERYWKPIREKREGAGRRAGTLHLAQAQSNRGRRGRKRDFPDAERLVKRLVSRELVLSFVPDPEQRLWRTVGRRKYQLTRDRVRLQNQLEALLEEAHIKLSSLVSDLLGASARRMLKALAEGETNPAALAVLADRQLRATPEQLCDALGACTDLKPVYRRLLNMILEQLQFLEKQIDHLEQEMASLLSQHQDAVQRLAEVPGLGVDSAQQIIAEVGPTAATFPSGKHLSSWVGACPGDDESAGVNYSHRSPQGNRHMRRLLNQSANAAVKAKGSIFEIVYRRTVPRLGHPQTIGAIAHRQCRLIWLILHQGVRYEERGPAVNQKSKQARTARMIRQLRKLGYQIEPPKPAPTQRE

SEQ ID NO: 101646 - protein, 359 aa, unidentified
MTSMSHEVPRRRVVIGVDTHKYIHVAVALSDIGGVIDSQRFAADSGGYEQLIDWAAGLGHKLTFAIEGTGSYGAGLTGAVRRRDIGVIEVMRTDRRDRRLRGKSDTLDAENAARTALAGNATAVPKSADGVVEMIRQIKVAKDVAVKGRTSAMITLKQLLVNADPELREALQPLSKMALINKCANLRPGKVSTVTAAAKHALRATARRWQLLDAEIKDHEKVLTELTTELAPQMVDAFGMGPDTTAELLIVAGDNPERVKSEPAWARLCGVAPIPASSGMTTRHRLNRGGHRQANAALYRTVIVRMQHHQPTKEYVARRTAEGKTKGEIIRCLKRLLAREVWALMRPLREPAKALPVAA

SEQ ID NO: 101647 - protein, 407 aa, unidentified
MEVMYPRCAGLDVHAKTVVACVRVATGGTVTYAHQTVATDTRGLLALADWLATFEVTHVAMEATGVYWKPVWHVLEDAFTLVLANAQHVRNVPGRKSDKTDAKWLADLLALGLIRSSFVPPAPIQELRDLTRTRKQLVRELSRHTQRIQKTLEDANLKLTEVISDVLGQSGRAILTALVAGETDPERLIDLTHGLKASRAELVQAVHGRVTPHHRFMIQLHLTQVAALEQGIADLDARIGDALAPFRAAVDLLTTMPGLKTTAAAVIIAEIGVDMAVFPSAGHLISWAGLCPRLDESAGKRRSRRTRQSAPWLKTTLVQIAWPASRKKESYFHAQFLRLKSRRGPKKAIVAVAASMLTDVYYMLRDGVEFRDLGSQYFTQRDKSRITKRLLQRLHDLGVDVEVKNAA

SEQ ID NO: 101648 - protein, 345 aa, unidentified
MKIIGCDFHPSFQQIAICDLETGELQERKLSHGDGQAERFYRELGEPALIGIEATGNSQWFLDLVQRLGHEIRVGDAAKIRASYVRKQKTDKRDAGHILKLLLEKRFPQLWRPSAAMRDQRQLLRHRDKLVEIRTKVKNSLQHLALNRGMQKKSRLWTRQGMEQFQQLAMPGWAGRRREDLFELLKELNGQIEPLDQAVKQAAEQHPQAQLLMTQPGVGPVTALAFVLTIGDVARFAGSKQLTSYLGLVPSEHSSGSKRRLGAITKQGNCFLRKLLVEAAQTTVRKDEGFRKEYQHRCHHCPKAVAKVAAARKLAVRLYWMLRRNVGYPEIVHIESNPRVPLGEV

SEQ ID NO: 101649 - protein, 387 aa, unidentified
MKKAYIGTDTHKEQNMIAIALAGRGDPELYGKAPADLDAFVRVLRRVLEKYGLAKEDVAICYEAGPTGFVLCRRLRALGFECEVVAPSKIPKTDSDRVKTDRRDARKLARLFRSGELVFVNVPDVADEVIRDVCRGRTDAAEVRGRARQQLGALLLRNGYRYGGGSTWTEPHMRYLRELVLPDPAQKFVLEEYLQRVDASVAQVERIESQMARLLPDWQRRKFVEAMQGFRGFQLVAAMTLGSELGDLLRFDHPRRLMAYVGLVPGENSSGERRRQGGITKCGNSHVRWMLVEVAHHYRYPPKVSKELSLRQAGLGRDVRAVSWRAQERLHRRFCRLLLRGVHPNKVVIAIARELVAFVWELAQVLEKERAAADPQQAARPAARKAS

SEQ ID NO: 101650 - protein, 383 aa, unidentified
MGNSITLYVGLDVHKDSIDIATAESGRTGEVRHVGSIGGDLAALDKALRKLVSRGEHLHVVYEAGPCGFVVWRHLTASGLSCEVVAPSSIPKRSGDRIKTDRRDAMMLARLSRSGDLTAVRVPSAADEAVRDLVRARDDAVRECRNARHRLKALLLRNGITYEGRSTWTAAHLRWLSRLKMQHAAQQIGFQEYLHSVTESSARIARLEQAMRDALPDWSLKPLVQALQAMRGVQLIAAMTLVAELQDFTRFESARKLMAYVGLVPGEHSSGPKRRQGSITKAGNSAARRMLVEVAWHYQHNARVTPIIARRQDQLPKAITDIAWAAQLRLHAKFKRLLARRVMKTKAVVAVARELTGFVWAIAGEVHNSGWQGVAITATDNAA

SEQ ID NO: 101651 - protein, 403 aa, unidentified
MTMRRRTWVGIDVGKTSHHACAIDETGKVVWNQKVSNEQRAIEQLVTRACKGAEQVRWAIDLTSPMALMLITVLLCAEQSVVYVPGRTVNTMTHAFRGEGKTDAKDARVIAETARLRNDLSNVVLPDELVVELTQLTGYRADLMADWVRGINRLRALLGSIFPGLEAAFDYSTRTPLILVSGLCTPAEIRAAGIDGMTAFLVENHAWPTGIAKSAATAVALANDQPLALPGEAGTAALIKRLARKLLELDRELKDIDKTITERFREHPYARIIESLPGFGPGLGAEFLVVTRGDLASFATAGRLASYAGLVPVPKDSGRITGNLRRPKRYNRRLRRVFYLAALSSLRADGPSRRFYDRKRAERLIHTQALLALARRLIDVLWALLRDGREFTPEKPTTATAAA

SEQ ID NO: 101652 - protein, 342 aa, unidentified
MARQEIIKQVVGIDIGKEKFFACYQIKDLNEHIVIKGTKSFRNDNGGYKEFLLWCKRREKPTVASTVYVMEATGIYYEDLAYFLYENGCKVSVHLAQKLTYFAKSNNLKTKTDKVDAKMIATFGIEKALETLGIWEPPSKEFRVIRDLAREHTSLKEDLTAAKNQLHAMEHAHQTYERVIELKEEMISFYQEQLKSIEKELKVLIKANHQLSNKIKNIETIKGVGFITIVKVLAEVNGFLLFKNIRQLVSYAGLDVVEKESGNFKGKTRISKKGNARLRSALYMPAMTAATHNSNIRTFYQRVNTDRKIKKHGIVAVMRKLLILIYTLWKKEEPYQIDYEMG

SEQ ID NO: 101653 - protein, 352 aa, unidentified
MIMNDFLKYSVGIDVAKEKFDCCISVIARDQSVTIKGTRKFDNTIKGIKALIEWSKNKHKVNIPMVFLMEATGIYHENLALTLFIQGLDAIVVLPNKAKKYMQSFGYKSKNDKIDARGLSRMGAEQHLDLWHPYSENIYPIRSLTRHNEDLQQEKTAAGNRLESQIYSSHPNKTVCKQIGSMIKFIDKQISQTKSEINNLIENDVILKEKFEKIETIKGVGRMTVATVIAETNGFTLFNNARQLTSFAGYDIVEKQSGKTSGKTRISKRGNSHIRRALHMPSFCAVKNDPQNFGVFYKRVYENTGYKMKGYTAVQRKILCLIYTLWKKNEVYIENYEGLKNKEKLGKKILKY

SEQ ID NO: 101654 - protein, 314 aa, unidentified
MTIPQTYAGCDISKAHLDLCITRGEKTVFAQRFANSESGVASLMRAVVRHDTALLVYEPSGGYERGLARGLDIARRAARRINARQIRDFAKSLGLLCKTDRVDAYVLAQYAAKIQPQARPPASEKVSQLQAFVRRRAQLVEARKKEKQHLSICSCKEIAVEIEDEIKRLSEKISLLEKKIRTNIDGDENLSRRAEIIGSVCGLGPVSIATLLTEMPELGSLSGKAAANLAGVAPHPRDSGALRGRRTCWGGRKAVRDVLYMASFAACRRVPRWRALYDRLREAGKPHKLAAIAVVRHIIETINAMLRDGKMFYA

SEQ ID NO: 101655 - protein, 326 aa, unidentified
MLIVGVDVSKSTLDIFLMPLGVCRKIKNSQPGFNQWLKELKKISSPSSKLLIVMEHTGQYSHRFELFLRSQGIDYCKIAALEIKRSLGIVRGKSDKVDARRIANYGWLRKDILTADPGCHEEIWKLKNLLSLRAMMVRHRSGYLARLKEMKASGTCKPSDLEIQLQQQMIDFLSKKISLLQKQIQTLINTDQSLSKTSELLRSIKGVGWITAAYMIGCTENFKRFSNARKFNCYAGLAPFKHESGSSIKGKTRLSHLANKQAKALLNLAASSAIQYNPEMKAYYQKRVAEGKRKMSCLNIIRSKLVARMFAVIKRQSPYQQVAPAA

SEQ ID NO: 101656 - protein, 475 aa, unidentified
MNIKGTKKKNQVVTANIFEQQELLKKAEVIKENLTASTWRELETNGKFDKNKKLSFISDDMLILGCDVGSETHYVRAIDTRGRELSKSAYSFNNDYEGFQSAKEWAVKIAAEHDKSQIVLGLEPTGHYWFCLATWMIANGISVVQVNPYAVKQTKEVEDNSQLKDDRKDPKLIANLVKDGNFGMPYLPEKIYAELRRLSMFRDQLNEDRIRTINRMHREMKIYFPEYKEALGKVDGAFSLELLKEVPFPDELTALGEEGIRQIWHAAKLRGRGYSRAREILQYAKASVGIKDGSIASKAAVKWFVQKIMELDVELAVIENQINQKCQEIPHTGNVLEISGIGENTLSGILAEMGDISRFDDVKEIQKLSGLGLVACSSGKHKGETKISHRGRKRLRYWLFQAAKSAVAHAEEFKELHMYYTTRADNPLKKMQSLIVIACKLLRIIYTILNTGTKYAPKKMLMDIRRPENKEAIVA

SEQ ID NO: 101657 - protein, 434 aa, unidentified
MNLLKHNMNQTIAASTFAATIGLDWADQKHDLWIQAATGAKPEHLILEQTPEAIHEWVAKMCVRFPNQRIAIAVETSRGAIISALQAYAFIVLFPINPKMLCSYREAFCVSGAKDDRTDAMLLEEYVRFHFAKLRPLQPDTELTRKLSGLVENRRDLVDERTRLVNQLHSLLKTYYPLMEVLFDDLTTLLATQFLLKWPELASAKRAGAVALRKFFYGHNCRSAQTLERRLQALEKAQPLTTDPALIEPAVLKVKALAGMLKVLHEAIAEIQDHTNQAMDAHPDAPLFRSFPGAGPVMAPRLLVAFGTNRDRFENAQETQQFFGIAPVKKQSGQSKVIHMRYRCPKFGRQTFHENAGHALRKEGWTKVFYDQQRERKKGHHAAVRSLSFKLIRIYFRCWKDSKPYDRALYEKALETHGSPLSTALKKKGTGPTK

SEQ ID NO: 101658 - protein, 350 aa, unidentified
MDYFAGLDVSLETVSICIVNAAGDILLEKKIEAEPAAIIEVLKDFGCPLKRIGLEAGPTSSWLYSELRGIGYPAICLECRHVKAGLSAMRNKTDRNDARGIAQLVRLGWFRQVHVKSEDAQRIRMLLVNRQQLLTKALDLENSVRGSLKVFGLRVGTVTRRAFEARVLELVAEDRSLMAITEPMLRVRRVLIAEFERLDRLCRMLARRDPVCHRLMTVPGVGTVVALTFRTGIDAPERFSRSRDVGAHFGLTPRRYSSGQTDYDGHISRCGDAMVRTALYQAANVLLHHGRWSSLRSWAMRIAKRGSVKAAKVALARRLAVVMHRMWVDGTDFRWSAVAAAAPAATAIAR

SEQ ID NO: 101659 - protein, 340 aa, unidentified
MSSQFFCGVDLAKHHFSLHAVDDRGKVILHKSVSRAKLLTTLANMSTMRIGIEACSGAHYWAREFIKLGHDARIMAAKYVAPYRTKGKNDLNDAIAICEAVQRHATRFVPVKSPERQAILSIHRMREHWVQERTALINRIRALLAEFGIVIPTGRHAIQRDVPLILEAADNGLPDIARAVLGDCFEHLQVLNQRIDDTELCFDMVTKASPNAQRILKVRGIGPQTATAIIATIGKGEQFDSGRDFAAWLGLVPKQYSTGGKPRLGRISKRGDKYLRTLLVHGARAAITNLGEKQDRLSVWGRNILERRGMNRAIVALAGKNARIIWALLHNQTDYQDYAA

SEQ ID NO: 101660 - protein, 388 aa, unidentified
MDAVVIGMDPHKRSATIEVMDAGEAVAGGGRYATDVAGYRAMLAFARRFPQRTWAIEGCSGIGKHIAHRLIADGEQVVDVPPKLSARVRVFATGQGRKTDATDAHSVALVGTRMTGLRPVVDDEQLAVLRVLVDRRRGLGEDHTRMVSQLHQLLLELIPGGAKKDLSAAQAKALLAKVRPRDAAGKTRRRVAAELIGDLERIYARKKAANKELNDLLAATGTTLTRLHGIGPSGAARLLVEVGDITRFPSKAHFASWTGTAPIDASSGDQVRHRLSRGGNRQVNKLLHIMATVQLRNPTDGRAYFDRKKAAGKTSMEAMRALKRRLSDVVYRQLLTDAMRPSRTGPGGHSGTSLKSSVADSHPDIDTSDQSLPGPATTKPRTAVVVAS

SEQ ID NO: 101661 - protein, 431 aa, unidentified
MLKINPLSTLYVGIDVSSKSNYVCALDFFKNKYINSSFANNQPGAEELALKILECLNQHPDLTMVVAALESTSVYSIHIANYLSSCEELMRFKPYVFVLNPKCTANYKKSYIGLGKSDPIDAFVIADYARAGNIESEPWRGSQFLALKRLTRHRLHLVECMTREKTYLVSNLYLKFSELQMLEGDDQPFCDIYGATSSSVLMEYLSPEEILVSSEEDLIAFLAEKSRNRIKDISKTADLLKKAARDSYRLDKALYEPLNVSIASSFNCIETFKREIKVIDNAIEKEIKGLNPNAFIILQSIDGIGPVFAGGIIAEIGDITAFHSSDALAKYAGLTWKSNQSGDFDGEDTPMIKAGNRYLRYYLGEAANSMRKHNVEYGAYYRKKYNEVPKHQHKRALALTSRKFVRLVYGLLARNQLYSGVSLDTSIKDSN

SEQ ID NO: 101662 - protein, 353 aa, unidentified
MQTKTTARTNMPRRKNQPTRYFGVDLHRDSFLVCVREEGAARCQRWSLEQVAEFAGGLRPQDELAVEATGNTRWFCQQVAARVRRLVVVNPHQFRVISESVKKTDRRDAALLAEYLEKDLLPEVRQKSAAESELAQMAQARDQLVKMRTMLKNQLHGLFSSYGVALPKKALASRRQRTALRGRSLSPLADVQRRVLLGQIEALDAGIAELEQTLTEAARSLPGYEHLVSVKGIGSLGATILLSAIGRIEDFSEPGKLAAYFGLVPRVEQSNQTEHHGRITRRGNKLARTTLVQCALIAKRYSPFLRRFYERIQHRRGTGKAIVATARKLLTIVYYTLKNHWTFRDFTQFQLAH

SEQ ID NO: 101663 - protein, 351 aa, unidentified
MMILAIDLAKARSLFCWYDVVKGTHQMKTIASTPKAFHDALTRQKVERVIIEVCDMAGWIKDLCDSLQIPLQIANGNTEGWRWRNVKKKTDKEDVLKLVSLSLTKQLPTVTLPDRPVRQWKSLILYRQKLIERRTRIKNKIHAILVSEGKAISGGRKVWSEESLAELCRLARPLSDCPIEELWRGQLHMELEGLDDLDRLIATLDKKLDALGEKNAEVIRLQTIPGVGPRLSELVVAVIDDPKRFKNVRQVGSYAGLVPRRYQSGSMDRSGRISKAGCSKLRKLLLEIAWGMLRHNAHGQSVFKRISKGQKTRRKQAAVALARRILGWCWAMLRDGSNWRDPAASGSPAAT

SEQ ID NO: 101664 - protein, 338 aa, unidentified
MKVYVGMDLHATNTYVGMVDEENKVLQKQRFRNELPLILAGLDPFKKDIEGVVVESTFNWYWLVDGLMAEGYRVHLANVSAIKQYEGLKQIDDKRSAFWLANLLRLGILPTGYIYPKEERPTRDLLRKRLQLVRHRTSHILSVKNILARNLGLRMKSEDIKKITDPEVRRFFPDKEMQTMVLASVGLIRHLQVEISAIENMITKKLKVRKEFAKLMTVPGIGKILTLTIMLEVGDICRFPTVGDYSSYCRCVKSIRTSAGKIIGYGNRRNGNKYLSWAYVEAAQAARRFHETVRTYYEKKMARTNRIVAIKALSHKLTRASFYVMRDQVDYDPARLFR

SEQ ID NO: 101665 - protein, 341 aa, unidentified
MQITTIGLDIAKNVFQVHGIDAAEKVVIRKQLRRGQVMKFFEALPRCLVGMEACATAHYWARELTKLGHEVRLMPAKDVKAYLKRNKNDAADAGATCEAVRRPTMRFVRVKSAEQQGQLMQHRTRDLLIRQRTQAINALRAHMAELGIVAAQGHDGLKKLLAIIADEKDERLPVDARASLIVLAAQLQALQTMIGSIEKRIIAQHRAREESKRVATIPGIGPLGASAITATVTDPSAFRSGRDFAAWVGLVPRQDSTGGKQKLGPISKQGDRYLRRLLVVGAHAVLKRARLHPQKYPWLTQLLARRPFKVVAIALANKMARVAWALLARGQTYRVPRLAAA

SEQ ID NO: 101666 - protein, 375 aa, unidentified
MSDHSEAFVGLDSSKLRNAVAIAEGVRGSEVRFLGEFENSAAATTKLVKKLAAKYQRLTFCYEAGPTGYGLYRLIKNLGHECIVVAPSLIPKKPGDRVKTNRRDALNLAKLLRAGELTAVWVPDRGHEAMRDLTRARETAMMDLRSKRQQISAFLLRQGLHYSERKKTWTRTHMNWLASQTLEYAEQRLVFEEMMLAMRQAQERLERLEQAIRVAVPDWSLAAVVTALMAMRGIDLISAATFLAEIGDLSRFQHPSELMGYLGLVPSEDSTGDKIKRGPITKAGNRRARRMLVECAWSYQHPPRVGQEKQEKVAAAPRAVREIAWKAQCRLHGRYRALVRRGKLKTVAVTAVARELAGFIWAVSRAITTARAVAK

SEQ ID NO: 101667 - protein, 412 aa, unidentified
MEVVHRCCCGLDVHKDTVTACVAWAEATGKKRHDKRQFGTTTRDLLALADWLRGCGVTHVAMESTGVYWKPVWHILEGSFELLLVNAQHVKAIPGKKTDRRDSGWLAELLQHGLLKSSFVPPAPIAELRDLTRYRVTLCQECNRIANRIQKVLEDANVKLASVASDPLGASGRAMLKGLIAGEDDPVKLADLARGLLRRKIPALQAALDGRVTPHHRFLLQELLDHLEFVEAKIVRLETTIEERLRPFEDTVRRLCTIPGVDRVSAWGIVSEIGLTMDQFPDARHLASWAGLCPGNWESAGKRTSGRIRKGSAWLRRHLCQCAWAVSTKRHTYLSALFRRVAARRGVKRASVAVAHAILTITYRIIRDGSVYRDLGPDYFDTLDPARLKRKLVKRLEGLGFQVTLAAQSLPA

SEQ ID NO: 101668 - protein, 358 aa, unidentified
MSDSLPTVTTEREWAAFAAIDWADQKHFWRLVPAGSQHAEQGELENTPEAVEAWATTLQQRFGGRPIALCLEQKRGAIVYMLTKYAHLVLFPVHPTTAARYRETFCTSGAKDDPSDTASLLDLLLRHPERLTPLQPDTTETRLLQFLVERRRQIVDEKTRQKNRLTDCLKLYFPQLLRWFDDVSSPLVGALLERWPGLEQLQRSHPGTLRKFFHQQNCRGEELIEERIRAIYQAIPATRDAAVLEAGAMTARGLVALLTTLRGNIAELDGRIAQLVAAHPDGALFDSLPGAGPALVPRLIVAFGTRRERYDNAYQMQCYSGIAPVKAASGNTQRVHIRRACPKFRHPDLQGNYFEPSL

SEQ ID NO: 101669 - protein, 344 aa, unidentified
MSYYAGLDVSLRTVNVCVINNKGERIAEAKLASDVPDIVAYLDDLELAIASVGLEAGTLAQYLTYGLQSAGFEVICMEARQVKAALSAMRNKTDKHDARGIAQLLRTGWYSRVHVKSMESHHIRMLLASRKAVLSKCIDLENEIRGLFKVFGIKLPPRLGHGAFDVAVRDIIEADKILSQALLPMLDARLVLYRTFRVLDNRTRHLAHDDPVCQRLMTAPGVGFVTALTFKAGVDDPHRFKRSRTVAAHFGLTPRRIQSGELDIDGHISKCGDAAVRCTLYTAANAMLTRSSRWSSLKAWGMRLAKSRGHRRAVVAVARKLAVILHRMWIDDIQFQWGTEAARS

SEQ ID NO: 101670 - protein, 343 aa, unidentified
MQSITTIGLDIAKSVFQVHGVDANGLVVIRRQLKRRYILAFFEKLPPCLVGVEACASSHHWSRELQALGHTVRLMPPAYVKPYVKRQKNDMADAEAICEAVTRANMRFVPTKTPEQQSGLVLHRMRHLFIRQQTSVINAIRAHLAEFGVTAPVGRKGIEDLLGVIADPSDKRVPDVVRACLAALGSQLLGLKKRILDFDRMILAWHRSNQTSKRLNCIPGVGPLLATALVASVADPKAFRSGRNFSAWIGLVPKQHSSGGRPRLGSISKKGDRYLRGLFVAGALAVIRYAKLHGTKYRPWVAALLARRPTKVAAIALANKLARMAWAMMARGERYNYPAALRV

SEQ ID NO: 101671 - protein, 435 aa, unidentified
MEKIRTNVAGIDIGAKKVFTAVEGQPVVSHLTFTEDFMLLRDYLLKHKVKTVAMEATGVYWVILYEMLEAAGIDVWLVDGRQTKQVPGRKTDVKDCQWIQELHGYGLLNRCLVVDAHIKELRGYLRLREDHINASAMHINHMQKALTLMNIRLKEVLSQIHGASGLAIIKAILNGERDKYVLVNLCHLSVLKSKKELVLKALEGKYAEAHLFALQQAYDGYTFYLRQIEECDKRINTVINRLGFSGEGQDVKKKRKAIRHHKPAVEKMGSNLINIFDGKDATVVSGITDYTWMQLLAETGPEMKKWPTEKHFTSWLGLSPGQNNSGKMRRNAKKKGRPKAGQIFRVIAQGLINSKDIAIGSFGRRIRGRKGSSIAIKAMARKVAVLYWRVMVKGLDYAEQGIKRYDEQILANKMKIYNKLAKELETQIPVNVHFA

SEQ ID NO: 101672 - protein, 449 aa, unidentified
MGKGSGVTRGDRRRNAKKARLRALVPHENAVAGLDLGEKRQALAVTGADGQVLARRSPQVSVHDLGQHLDWAAGQARAAGYAGLSVACEPTGSRWMAVQDLCEARGLPFVCVQPLVSHVAREQEDLTGDKTDEGDSGLIARLARELHCYVPEHLAGAWAELREEGRRRAQLITNATAAKQLLRDKLGLVAPALLEAACEPFESATWLASLEVFLERCGADVARTTAMGFEAFAARVSAVLRDWGGRRLGGTCRQLFNALGNDRGVARMRRAALRRARGALADLKYARARRTQAEADMIALLSELGVDVDRICQIPGLSPATLAAILAGTGDLRQYESSSSVVKHAGMSPARNESGSFRGQAKISRRGRPGLRLAAWRATWAVLRHCDVLAAKHAALTSRDDDSKLTAEQARVACAASLLRWIWSLVVHGTCWDARIAAGQLGHHHAMAA

SEQ ID NO: 101673 - protein, 386 aa, unidentified
MKRNDLSRSLVAFDQASTMVAVVELSFRSWLVAGLVPGLTRQPLKKLGPDAQALLTLLRRWQGEATKAGSTINRIVVAFEAGRDGFWLARWLRARGIEAYVIHPTSIPVSREHRRAKTDRLDTGLLMRAVLGWLRGEPKHCSMAAIPTIAEEDARRPNREHQTLVQERTRIVNRMKATLIRFGIRTFNVKLRKASDRLAVLRSPEDEPLPPNTGAELRRDMARLQLIRDQIKVIEEARLQQLKHAPRKGTHPMLLMLAEIIGVGVETADMLVHEVLSRKLRDQRAVARYGGLTGAPDESGTKRREKGLARAGNARVRRGMIQLAWRWLTHQKNSELAQWYQTRTTGAKPAARKTMIVALARKLLIALWRYVTTGEMPAGVTLHPAT

SEQ ID NO: 101674 - protein, 324 aa, unidentified
MNKDTLFYGIDISKDVFDVMDEKGVHSQFKNNYSGFKKYLKLLDNYSHCVMEATGYYHYKLAYFLLENNIKVSVENPLSVKRYIQMKLSKIKTDKSDAKMICSYARSVDLRLWKGHSESQQECLQMTRILSVYTKQSTALKNKIHGEEVLGVPSKDVLRSIKRSLKSIEKEIKLIEQKLSKLIKEEYQELQTLVESIPGIGRKTGTMLLVLTDGFQRFNSASELCSYAGITPVIRQSGSSVRGKARISKIGNQKLRNLLFLCSFNACKYNQACKALYDRIVAKGKSKKLALIAVCNKLLKQAFAVAKSRIPYDENYRSTLVKIS

SEQ ID NO: 101675 - protein, 361 aa, unidentified
MTDGSKQRPLMTAGLDIGGDKYSYLCLIDSEDGQMIEEGRLRTTPEALRRRFASERPLRIAIEAGTHSPWVSRLLEECGHEVLVANARKLRLIYANKRKTDQIDAENLARLARLDPRLLYPLKHRGEDAQAHMALIRSRQALVDCRTQFVNHVRGAVKSFGHRLPKCPARSFHKRASEHIPEALWPALGPILEQIGSLTERIRQYDRKLETISKERYPETELLRQVEGIGPLTALTFVLTLEDPYRFEKSRSVGAYLGLVPATDRSGDSDPQKRISKEGDQMLRKLLVGSAHYVFGPFGSDSDLRRHGEKIASRGGKNSKKRAAVAVARKLAVLLHSLWISGEAYEPLRNAHRCGGREKAA

SEQ ID NO: 101676 - protein, 523 aa, unidentified
MAHASSRKRSRARRVDVVQKPSGTFHPRVQKVGPEHFGIVAVDCAKARSKWMLADFYGNVLVRPTLLAHNRPALEAALDQLRQAIRDHDLKDVLIAVERTGRYHRTVQRAFASAGFDTRIVHPFATKQFRQPADPGNKTDDNDLMALQRAAVSGFALIEAERDEAWVTFQLLIRHRRELVRKSAMLRSQIREHLDAAFPGFAANFADLWERACAWHVIRHFATPADIFAAGLNGLCRSLDAADVRYQRATIATILEWAEQAAPPDLAAAARRRFALALDDDLVHKAHEIQAIERDIAAALCRTPYVLLLSFPGVNVVSAADFTGEMGPIEHYANSRAITGRAGLRPSRYQSDAVDRPNGPLVRCCNRKLRAAILRVADNLIKCNHHFNALAHQWREQKKDPRHTHVKVALRFCRIAYQIVAGRQVFHHPCLQERHYVLAKLMAFQREHDTGSVESLRDLQAALEQVPQREHRAEAQPLHEELARIQRGGRHGPQLLGDILPIVLARLGVGGVQSTASGEEDPT

SEQ ID NO: 101677 - protein, 383 aa, unidentified
MRKSSNLYVGMDVHKESIDIALADGDERQEVRHYGSLGGDLPALDQAVRKLQGTGKTLHFVYEAGPCGYVIYRHLAGKGLDCVVVAPSMIPKRSGDRVKTDRRDAEMLARLHRAGELSAIYVPHPEDEAVRDLTRSREDAKEAQTRARHQLKAFLLRSGIRYAGKTAWTPAHVRWIAGIKLNQPVQQIVFQEYVDAVTAASERLERVEGNLRDAVVEWRLKPLVEALQALRGVQLVVAATLAAEIGQIDRFDNPRQLMAYLGLVPSEYSSGPSTRRGSITKCGNTHARRVLTEAAWAYRLPARITTIIAKRQDKLDRNVRNIAWKAQVRLCKRYRSLRAKGKEQNKVITAIARELSGFVWAIARVVSAIASKDGLSTGATLRA

SEQ ID NO: 101678 - protein, 372 aa, unidentified
MPLSRKIWAGLDLGDDFTSICVIDDVGTVLQQSQCPTRLECIHQEIHWLRRRRFARVGLEASSSFTLARGLQSRGYPVDIFETRQLSKFLAIRRNKTDANDAQGIAEAMRLGGRLLSKVFLKSAECQALQSRLTLRRHLIRQRVAMLNLLCRQIRQYGGDLKPPKTASHLRSRAEREIQRTFGKVSTPLVLELRYLLHHCEELMMHQRHLDRELASLARLNDVCRKFMELPGVGTICSLAFYSAVGDPNRFKRATDVGSYFGLTPKVSQSGTITGPGRISHMGNRVVRSLLNRAALTIMRSNGRECVLRDWALQVEKRRGRARARVALARKLAVIMLAMWKRGENYRPEGLSLSPIVADAALSARTAFVPIR

SEQ ID NO: 101679 - protein, 341 aa, unidentified
MKKFIRIGVDLAKNYFQVHALVSDVGPAVTRKLRRSKMHEFFSQIEPSLIGMEACGSAHYWARELKAMGHEVLLMPPAYTKPYVKRGKNDAVDADACCEAMSRPGMRFVPVKSAEQQATLMLHKTRELLVKQRTMSVNALRGHLSEFGIIAAKGIGRVDELLDLVESYTTLPNAARASAKVLAHALEGLDKAIDDLEDEITNAQAQNEMTRLLYKVPGIGKIIASVIAASVPDPSVFKSGRDFTAWLGLTPRQNSSGGKQALGAITKQGNRYIRKLLVLGATSLLNVVGKRKGALRDWIVGLLAKKPARLVTVALANKLARILWAMMKTGESFRTEMFAKA

SEQ ID NO: 101680 - protein, 396 aa, unidentified
MVGKTGGVRNLIREPAAMSSKTTIYVAIELSASSWLVAARLPGIQKVPVYRLESGDTMGLLKLIADLRSQVATKLGVTADLACCFEAGRDGFWLHRLLTANGITAYVLEPTSILVNRRARRAKTDRLDAEGMLRVLANWLDGDRQVCSMVAVPTPEEEDAKRPHREREHLVQDKQRIENRIEALLFTQGIRGRPSLRPWTPHVAELQTGDGRALQPGLLAELDRLRRRLVFVLELIRELETDRVRALEEAKADDAIAGKIVALQCIRGIGDNFAAVLTHEVFYRSFDNRRQLASYVGITPMPYQSGGMDRDRSISRAGNPRARTTMIQLAWLWLRYQPDSALAIWFRERVGTLQGRTRRISIVAMARKLLIALWRYVETGVVPEGVALRANKASVA

SEQ ID NO: 101681 - protein, 386 aa, unidentified
MPQSNDLSRCLIPFRQDETLVAVVEMSKTSWLVAGMIPGVARHPLKKLVPDEKALFELLERWRDEAVKAGKIITRITVAYEAGRDGFWLARWLRARGFEVYVVHSSSVAVTREHRRAKTDRLDCEMLKRVFIGWLRGERDHCRMVAIATQTQEDAKRPNRERENLVGECTRIVGRLKAGLARLGIRSFNPKLRNAAERLETLRTPEDVPVPANTLCELRRDMARLRFVKDQIKQIERARVRQLEQAPEQGPQQMVRLLARVLGIGIETADMLVHEILSRNLRDRRAVARYAGLTGSPDESGQKRREKGLSRAGNARVRRGMIQLAWRFLMFQKTSALAQWYRVRTKDAGGAVRKTLIVALARKLLISLWRFVTTGEVPVGVTLRVA

SEQ ID NO: 101682 - protein, 345 aa, unidentified
MNKTRVIAIDLAKSVFQVCLFDRSMRVQSNRPMSRARLQTLLVRQAPAQVVMEACASAHFWGRWAQSQGHDVVLLPPRQVTPYRQGQKTDGNDALAIGIASQQPQLKTVAVKTLEQQALQTLKRTQEHLSDQLTATGNALRGLLAEFGLIIAKGPSSLKRRVPAILEDAENALPMSARHALALLWASWQQLVEQRASVEQQLRAYSATLEPCRRLQAIAGIGYKNAVGLYLRLGDGQRFKNGREAAACVGVTPRQHSSGGKVRMGGIGHHCGDQRLRASLITGSHSVIHALRRRAPKNGTEQWLVRLIERRGPGRAAVALTNRNIRTAWAMLRRATEYQPAAMAA

SEQ ID NO: 101683 - protein, 410 aa, unidentified
MIKEDMIFVGVDLHKETHTAVVIDCYNNKLGEITFANRPADFPKLVTKVKKCNTDEKEVVYGLENAYGYGRALAVWLIDKGYLVKDVNTAISHRQAKHRGAMYRKSDSDDAEAIALATLNMLDKLPDACPNDAYWSLGQLVHRRDNIMKQRTRLVNQLHEQLHIAYPSYKSFFNDISRPTALYFWEHYPSRKYLKGKTVEDLRKELVPVSHNKCSTKTCETILDAVAGDKVKNIDYQDARDMVTLSIVSDLQHYNKQLAEVDEMLTKMYKMLNCTLTTIPGVNVITAVKILSEIGDIKRFGNANKLAQFAGIAPLHLSSSGKGKDFATKQGNRRLQATIYFLAIQMIQISSKGTPRHPAFRAYYEKRKAEGKTSQQALICISRRLISIIYGMLKSGTEYRMPVVESTGER

SEQ ID NO: 101684 - protein, 403 aa, unidentified
MNSVGIDISKGRSTVAVMRPFGEVVISPFEVRHTGSELSELARRLKSLDGETRVVMEATGNYHAPVAKLLHDAGLYVSVVNAKLVHGYGNNDLRRVKTDRKDAVKLANYGLDRWLTLPKYVPEEDTRLLLKNCYRQYRQYSKVQTLLKNNLISLLDTVFPNANRLFSSPIRGDGSEKWVDFVAEFWHCKCVCERSERAFINKYQRWCRKHGYNFSETKAQTIHAVASGHIGVMPKSETTKLLVEQAVAQLRVTSAALAALKHEMQTLASQLPEYPVVMDMFGVGPTLGPQLIAEIGDVRRFYSKKALVAYAGLDAPPNDSGDMTGRHKSMSKVGASSLRRTLFLVMSVYLQNAPLDEPVYQFMDKKRAEGKPYRVYMMASANKFLRIYYATVKAYLESLEHTA

SEQ ID NO: 101685 - protein, 365 aa, unidentified
MQKISTMRASGKKIFKGQLTIGLDLGDRSSSYCVLDEAGEVILEQKLPTTPEAMRQTFAKMPRSRVAMETGTHSPWVSRLLKALGHEVIVAHAQNVRLIVKSRRKDDRIDARTLARLARIDPQLLSPVQHRSAQAQLHLTEIRARAGLVSARTALVNAARGLVKSHGERLRKCGTFQVSREITSGLSTELREALQPLLREVESLNERIQEYDRRIEKMAKEKYPETALLKQVKGVGDLIATTYVLTLEDRHRFRKSRDAGCFVGLQPGRRNSGESEPQMHISKEGDEYLRTLLVQGAHYILGPFGEDSDLRRWGGKLAARGGKNGKKRAVVAVARKLAVLLHRLWVSGEVYEPLRNSQKTMSTAA

SEQ ID NO: 101686 - protein, 359 aa, unidentified
MREQRNKISFRGQKIYVGIDVHLKSWSVTVLSETSVLKKFSQNPSPEALHGFLTRSYPGAEYHSVYEAGFCGFWIHERLTALGIDNIVVNPADVPTKSSEKLRKTDTVDSGKLARSLRANELKGIYTPDSVSLEMRSLIRLKNSITKDTTRQKNRIKSQLRYLGIEIPQEFLEPFSNWSKRFFAWLKEVETFTPSGRQALDIQIRHLEELRRQKLEMTRALRALAKTDRFREPLRLIMSVPGFGQATGMAFLSEICDITRFRNAEQLAAYIGMIPMCHSSGEKDGTGDITIRKHAVMRCNLIEAAWVAVRQDPAMNLFYTEQCKRMPKSKAIVKVARKLVNRLFFVLKHQTEYVNSIVS

SEQ ID NO: 101687 - protein, 352 aa, unidentified
MKKGITKVVAVGIDVGDKTSQVCAKDATGAVVWEKKVKTTEAGFRGALGKAGPCRIVLEAGSQTHWIKACLEVLGHQVKVADPRKLRRIYQSESKSDVRDARELAEEALWRWDRMSEVTLRSQRSQEKLAVLKARDALVRARTALVNLARSVLKQEGVVVPKGTPEAFPKKAEPLVPEGQRAALGPVVKQIAMQTEEISGYDRWIEKAGLAEGPVRLMRTTTGVGPVTSAAFVWTLDTPDRFAKSRTVGAFVGLRPRRDQSGDTDKELPITKTGNAFLRRLLVGCAQYILRRSSPKSALKDWGLKLAGRGGKRAKRRAVVAVARKLAVILHRMWVTGEEYVPFPQRARAHAA

SEQ ID NO: 101688 - protein, 392 aa, unidentified
MYIVGIDIGKNHHEASIVSPEGKQIGPSLRFATTHKGADSLMSFIFKNIGNSPCVFGMEATGHYWYPIYSFLKAKGYTIYVINPIQSDSLRKMYIRQTKNDSIDSFLIAEVIRFGQFSTTSMADENILAMRQLCRYRDSVISSRTEIKLRISTIMEQIFPEYEKQFSSLWLSTSMGILEKYLTPENIENAPIDELFEIIKDKSHNRLTKAKAISIKEAAADTFGIKIAQDAFSFQLKQLIDRMNFLDKQIEALDIEIMKYYEQFDCYLHTIPGIGIIGAATILAEIGDISRFKNSSSLIAFAGIDPTVRQSGEFNSTHNHMSKRGSPYLRHAIFLAATTCSFHNSPLNAYYKKKRDQGKHHLTATGAVARKLTTVIYAVLRDSKPYEPKKFC

SEQ ID NO: 101689 - protein, 444 aa, unidentified
MNRNTKNKQNARKIYRSQNARIKAITETTMIVGIDIGSEKHDARAFNYRGIEITEEPLEFSNNEEGFETLLAWMEDLKSRNGLDAVIPGMEPTGHYWFNIGAFLQSHGMRPVLVNPYHVKQSKELDDNNPLKTDRKDPKVIAGLVKDGRYQIPYIPEGVYAEVRSLSVLRYQAQEALTRVKNRLARWFSIYFPEFRDVYTQPDPVSGIMVLKKAPFPEDIVKLGADGIIKIWREAKLRGAGEKKARQLVDAAVHSIGRKTAHEAARIEMKELLEDYDKYSNRVDELMSLLEQKTQEIPYIDKLLEITGIGERTAYGFVAEVGDIRRFEDPRQLQKLAGYAIVEDSSGKHKGESHISYRGRKRLRYVLYEAAVSVVGKNKEFKELYNYYRNRKINPLKKMQAMIAIACKLIRVFYKILTSGVDYSGTKMLEDIRRTSEDVNTVAA

SEQ ID NO: 101690 - protein, 381 aa, unidentified
MKLHQTTTEFNCGIDLHARNMYICVMNREGKKLLHQNIKGNNFDYFLQIAAPYIHDLTVACESTFNWYWLADACMLNNIKFVLGHALYMRAIHGTKTKNDRVDSEKIAHLLRSNMLPEGHSCSPEKRPVRDLLRRRSILVRHRSGILCHMSESVQIHGQDKLTRQEKRKSSRAAAVPERFVNPLLKFSMKVDTYLARQYDSVIKGIEKEVIAHTRLLGSKEYALLKTVPGTGKTLGLIILYETDDIRRFKNSSHFCSYAMLTPAKATSDGKNVGNQGRKIGNHYLKWAFSEMVVIAKRNPYIKAYSLKLEKKHGKTKANAILRHRFGHVVFNILKHEKVFSIEKFLKGKIDMKKIRNNGKCHKTESLTEPSKDSNISAVIE

SEQ ID NO: 101691 - protein, 339 aa, unidentified
MNEVTVIGIDLGKHSFHLHAQDAAGRMVFRKKLSRQQLLRTLANVPCCRVVMEACAGSHWLARQLAGMGHEPRLISPQFVRPFVAGNKNDFGDAQAICEAACRPSMRFVSPRNEAQQTVSAMHRLRERLVRERTATVNQIHGFLLEFGISLPRGAALMSRLPTVLDHETLPPRLVGLVVRLHAQVHYLEEQIRQVVQDLKASLREDDKSRRLLEIPGIGPITASALAVELGDARQFANARQFAASIGLVPRQYSTGGKPTLLGISKRGDRNLRRLLVQCARAVMQHTASRTDALSLWVKTLSTRRHSNVVACALANKLARIAWAVLARGTHYQARALTT

SEQ ID NO: 101692 - protein, 312 aa, unidentified
MAAMVRLAGIDVSKETLEVHVLPCGTSRTVTYDRRGLLELRRWLLDLGVGVVALEASGGYERQVSEVLEEAGLTVHRLNPLRVRRFAELRGRLAKTDRLDARTIAEFARAYPQERQIGRDARRDCLAEHLLVRRHTQDTLLDCINQLEHLRDGRLRRLVTARKASLAKTLATLDRRLAELIAEPDDLAELSDRLRTVPSVGPVLATTLIALLPELGTLTRRQVASLVGVAPFDRSSGRQIGSKRCQAGRTLVRKALYMAAMVACRHNPAIKAFAERLAGKPGKGRLVACMRKLIVTLNAMVRDGAQWQPRAA

SEQ ID NO: 101693 - protein, 369 aa, unidentified
MSKPITYVGLDVHKDTIAVALAEAGLRGEVREHGKIPNTPAALKALTVKLAPARKELRFCYEAGPCGYGIQRQLTEAGHECAVVAPSLIPRKPGERIKTDRRDAINLAKQHRAGELTPVWVPDQAHEAIRDLVRARQAAVRTLRQARQQLSGFLLRHGRHYHRPAWTLLHRRWLASLKFDQAVHHIVLEDCIAAVEAAMARRNRLEAHIEAVLPEWSLAPVVEALQALRGVRLVAAATLVAELGDITRFTNPRQLMAYLGLVPSEHSSGRTRRQGGITKAGNGAARRMLIEAAWSYRFPARISREQLLRQERQVKPIRDIAWKAQERLCRRYRKLARAGKQPTVITAAIARELAGFMWAIAKQVPPMAT

SEQ ID NO: 101694 - protein, 336 aa, unidentified
MDTACALVGIDVSKKKLDVAMLVSGKIKAKVVENTAEGHKSLLAWLSKSSVPMSSIHVCMEATGVYSEPVALALHQEGLIVSVVNPACIKGFGASENIRNKNDAIDAALIARYCAAMRPAAWLPPPLEQRQLRAWTLRVQALKDIRQQEENRLEATAFIGMEDVAAHVHQHIAWLSAEIAKLESDINDHIDRHPRLKHDAQLLVSIPGVGMATAARILGQLGDIRRFCNAKAFAAFLGVTPRQRNSGTSVKGRTMISRTGNTSLRAALYMPSLVARRYNPILCRFAERLSATGMAKKAVIGAIMHKLAHLIYGVIHTDRPFDAHYLAKGLVIQDGI

SEQ ID NO: 101695 - protein, 403 aa, unidentified
MNNVAGIDVSKGKSMVSVLRPFGEVVAKPFSIGHTGSELKELADYLKSLDGETRVVMEHTGRYYEPVARFLHEEGVFVSAVNPKLIKDYGNNTLRKVKTDKADARKIARYGLDNWAELRQHTPMDTIRMQLKTLNRQQSLYAKTKTMMKNNLIALLDQTYPGVNALFDSPVREDGSQKWVDFATAFWHVDCVRNMSLTAFAERYRKWCKRHGYNFSQSKAVEVHTGAQDLIAMLPKDALTKTMVRQAIDALNAVSASLERLKAEMQALAAQLPEYPVVMAMHGVGDSLGPQLMAELGDVARFTHRNAITAFAGVDPGADQSGTHEAKSTRVSKSGPPELRRALFLVMDCLLKTQPQDDPVYRFMDKKRAEGKPYLVYMTAGANKFLRIYYGRVKEYLASLEEN

SEQ ID NO: 101696 - protein, 407 aa, unidentified
MIQVDDLSRSLIAFEQISTLVIVVELSQSSWLAAGVVPGIERRPLKKLDPDPTALLHLVEGWRDRATKAGRAITRTVLAFESGRDGFWLARWLRVRGVETFVMHSTSVAVSREPRRAKTDRLDTEMLIRVFLGWLRGEPRHCKMVAIPTLEEEDARRPSREREILVGERTRIINRMKAALVRLGIRGFKPGLLTAPQKLDALRTPEETPIPPNMLDEMRRDMARLAWVREQINAIEQARLERLERAPATGRHAMVRMLARVIGVGVETADMLVQEVLSRNLRDRRAVARYAGLTGSPDESGSKRREQGLSKSGNARVRRGLIQLAWRFLRFQKESALAQWYRGRTEDAAGKRKRTMIVALARKLLIALWRLVTIGEIPVVSRCGRLSLEPSDRTGAKEHPVSASFAH

SEQ ID NO: 101697 - protein, 344 aa, unidentified
MKHYAGLDVSVKETSVCIVDEAGKTTREAKVASEPEAILAVLMDEALTIERIGLEAGPLSQWLYSGLAEAGLSVVCVETRHMKAALSAQLDKSDRNDARGIAHMMRVGLYRPVHVKTLASQKRRLLLTSRQLLQAKALDIENDLRGTLRNFGLKVGMVGVAKFEARIRDLVVDHPDLAAITEPLLIARRVLREQLGVLHRRLLAVVRQDEVCRRLMTVPGVGPVVALTFRATVDVPARFKNSKAVGAVFGLTPRRHQSGEIDRMGSISKCGDAMVRTMLFGAAQVMLTRTIRWSWLKAWGMKIARHRGMKRAIVAVARRMAVIMHRMWADGSEFRWPKPSTAAA

SEQ ID NO: 101698 - protein, 392 aa, unidentified
MRINVGIDIAKEMHWVTAVDSDGVILIDRKLANTPTEIAGLVQELARLGGAVRVGLDVIGGIAGLAEAMLAEAGFALVHVPGLAVNRARQGTVGGENKSDPRDARAIADQVRTRGDLRAIESETELDLEIRLLVGRRRDLVDGQTQRVARMHDLLVGIFPGLERALDLTTKGPLHLLTKFVTPAELRAAGKKRLVRHLQTAGGVPKIDDLADRALKAGAEQTIAVPAERMTARLIRELAAEALAARARIRELDRELEALLASHPDAALIRSLPGMGATLTAELIAEAGNLSRFRSADALASAAGMAPVLRQSGRTRFLRRPSGGNKGLKRVFYQSAFCSLANPDSRAFYERKRREGKRHHQAVIALARRRVNVLWAVLHNRTPFQTGFKIAA

SEQ ID NO: 101699 - protein, 315 aa, unidentified
MERLAASPSFVGIDVSKDRLDVNVRPSGQAFAVVRDGKGLDQLVIELRSLAPALIVLEATGGFEITVAAALASAGLPLAVVNPRQIRDFARATGRLAKTDVLDAQVIALFAERIRPEPRPLADADSQSLTELIARRRQVVEMIGMETNRLYQARNSRVLRMLRTTLKTLKVQLAELDRDIDDTIKRSPIWRAADDLLTSVPGVGDVTAHTLIADLPELGQLDRRRVAALVGVAPVNRDSGQRRGKRTIAGGRTDVRNALYMATLSAIRWNPVISKHYKCLVDRGRPKKVALVACMRRLLGILNAIMRTRTPWQCA

SEQ ID NO: 101700 - protein, 428 aa, unidentified
MNCNTQNAKIASITEKTLIVGIDVGSETHYARAFDWRNYEYTKKPLEFSNTEAGFQTFKAWMEDMAEKHGKTAVIPGMEPTGHYWFALGKFLQDNGMKPVHVNPHHVKKSKELDDNNPNKNDRKDPKTIAALVNEGRFSYPYIPTGIYAEIRSLSNLRFQTQEELTRIKNRLARWFAIYFPEYKDVYGDLKAVSGRMVLKEAPLPEDIRKLGVEGVNRIWRDAKLRGAGMKRAKTLVSAAEHSIGSKEAPEAARIELRNLLNDMDVYVARLEELLHSIEEKLKEIPYVDKLMGIKGIGLVTVSGFIAEVGDIGRFDNPKQLQKLAGYAIVSNDSGKHNGESRISYRGRKRLRYVLYEGAISLIGKNREFKEIHEYYRTREKNPLKRMQSVIAVACKIIRVFYTILTKGVDYDGNKLLGDIRRPQMQAA

SEQ ID NO: 101701 - protein, 507 aa, unidentified
MLGLPRWVGRAIGLDVHRDFCVVAICEDGVTRSAGRVPSTPEGLRALAESLSPTDRVALEVTGSCWEVVRILEPRVQRVVVVSPDDTGISSARAKTDKLDARKLATLLWKGELEAVWVPDERCRILRRRLARREQLMRARTRSKNEIHAALQRRLQAKPPCSDLFGVKGRRWLGALQLPLEERESVDAAIRHIEFLDAEIAAVERLIAQQALSWPEIRRLMTVPGVNLIGAASFIAAVGNADRFLTSRRLVAYLGLDPKVKQSGEAPARSGRISKRGSASAWAATRVLSAHPRAARSRQGDRRYRPQAGDPVLVHAHPLRGLRPPTTLTDPQEAAATGDHRRRSQEHTPCRGDLVHQRPHACRRARTRRASRTLIQATGPRPASRWTGEKGGRERDTGARIDQGPRRASRAAGSQAPDACRLTRHRLAPNHNLTRSTHVDHPDDDRPCANTGHNRANPTTHQPNRPHSRPSAALNNPPRPIGHPKTSQNRHRNPFDFHRSIKATLCT

SEQ ID NO: 101702 - protein, 396 aa, unidentified
MEVYSKYVGMDVHKETIAVAVAEANGGEVRFLGEYRNTLEAVVKLVKQLRKGGAELSCCYEAGPCGYGLHRQLVGMGVANQVIAPSLTPKKPGVRIKTDRRDSLTLARMLRAGELTAVWVPDVAQEALRDLTRGREDLKHLEKQAKQRLQAFLLRHGEVYAKEKKWTRMHFRWLESLTFELPVQQIVFQEYLDTLQSLTRRVDALDGQIHQAGAESKSAPVIAALMALRGVNQLTATTLMAEIGDLRRFPTAPQMMTYLGLVPSENSSGETRSRGPITKTGNGHVRRVLVEAAWTYRFPARKTTYLQQRAKRAPEVVQEIAWKAQTRLCARYRTLEGRGKLKVKVCTAIARELIGFIWAIGQAVPGPEANASGPSVKPQCVGSRTDHGGRTLQDPM

SEQ ID NO: 101703 - protein, 411 aa, unidentified
MEAAVITAVGIDVSKSKSTVAVRRPGGEIVLRPFEVHHTNSDLKKLASTLKKLGGDIRIVMEHTSTYWRPIALTLKEAGFFVSVVNAILIHDFSDNTIRKLKTDRADALKIANYALTFWDTLPPFNNEEETRLLLKMQSRANERITATATALRNGLIALADQTFPGVNIAFDPNTKNANGHEKWVDFFLRYWHKDCVCQYSMEAFTESYRGWCKRKNYKFRTDTAHKIYLLAQEGVATFPKCESTKMLITQACKSLNAVCEAKQSTQLEMQRLATMLPEYEVVMQMEGAGPITGPALMAEIGDVRRFKNKKALVAFAGIDAPPFQSGAFESKSRHVSKRGSPHLRRTIFIVSNIILTRPNPENAVYCFMDKKRSEGKHYYVYTVAGSAKFLRVYYARVTEFLRSQPSPDAC

SEQ ID NO: 101704 - protein, 397 aa, unidentified
MYIVGIDIAKRKHEAAVIDGEGAVIIKPFSFTNNCSGYNRLLAMLAKAKLPLDEVSFAMEATGHYWLALFTRLQKEGFRVQVINPVQTNSIRNFYIRQAKTDPRDALLIAEVIRFGHFSESTLHPENIYELRELCRGRHAIVSMQADVKRKVVALLDQVFPEYETAFTNMFSDTSMAILQTCPTPKELSEMPLEELCHLIEVSSHKRFRMAKARELQALARNSFGFAMAGDVFSTMIRLYAKHLVFLKQQVQEMDRKIAEIMDTLDTPITTITGIGPTLGAYILSEIGDINRFSSSAKLAAYAGIDPTMRQSGEYNGVRNRMSKRGSPYLRHAIWLAASSAVLHDPALKLYFQKKRDEGKPYMASVGHACRKMVSIIYAVMRDNKAYTPCIPNEISA

SEQ ID NO: 101705 - protein, 320 aa, unidentified
MNQESTFIGIDVAKTRLDVAIRPTGQQWQVSYTEKGIQGLVDQFADLHPTLVLLEASGGLELRIVTALAAAGLPVAVVNPRQVRDFAKATGELAKTDVLDAQILAFFAEAVRPTPRSLPDTETQTLAALVARRTQVMSMLVAEKNRMNASRPPVRQRIQAHITWLKQELDKMDRGLNEALHKSPVWREKENLLRTVPGVGPQLTMSLLAYLPELGTLNRKSIAALAGVAPFNRDSGTLRGKRTVWGGRSRIRTSLYMGTLVATRYNPVINTFYQRLVAAGKPKKVALTACMRKLLIILNAMLKHHTSWQSLNPQLLGACS

SEQ ID NO: 101706 - protein, 381 aa, unidentified
MLYVGIDVAKNKHGVTVIDNTGKMVLKPITITNRKQGFELLHNTLKQLNQNCLIAMEDTGHYALNLLTFLHQNNYQIYTYNPLLIKEFTKSLSLRKTKTDKKDARTIALKLLSDPNRALFMHDNRQEELKIMTRHMNRLKKHQSDWKVQYTKCLDIIFPELHQVVTKHSDYVYELLKRFPSPEKMVTAGFDKLIEIKRLTAKHALDILELAPNSIGTTSLAREFELIEIIENIQHYEKLIKQTEKKIDELMAELNSVITTVPGISNRLSSVILAEIRNINTFNHSDQLQAFAGLEPAIYQSGQLDAQGKMVKRGSSHLRWALIQAAIKVARYSPAFKAYFKTKLAQGKHYNVAISHVAKKLIRVLFYLLKNNETFDEDKLR

SEQ ID NO: 101707 - protein, 338 aa, unidentified
MKLYGAIDLHSNNNVTVLIDEKDKVVYQKRLANDLPSIVEQLSPYSSSIEGIVVESTYNWYWLVDGLMDKAYRVHLANTAAIQQYEGLKYTDDDSDARWLAHLFRLGVLPEGYIYPKEHRPVRDLLRKRSQLVHHKTAHLLSIQNLYSRNTGSTISANRIKQLSSEKVDALFTNCDLALAVKANFTVMRSLETEIAILERIVKERVKLKPAYRYLLTVSGIGQILALTIMLETGDIRRFSKVGNFASYCRCVKSEKLSNGKRKGSGNTKNGNKYLSWAFVEAANFAIRFEPLIARYYQRKKAKTHRVVAIKAVAHKLARGCYYIMRDEVPFDVDRAFA

SEQ ID NO: 101708 - protein, 482 aa, unidentified
MKKTNIYQNQSQQLLHLFEEAGSGEKVMCVPMDYAKNDHLVMFCNGHGDILRKPFSVKNTPEGIAYIDEQVTRCCRRRSIRKKHVFLGGEDANSFAKNFVSALRSKGYVVANVNAHDAKKQRVNLQASTDRIDLMGIATMLLNCRANCCPAQSGIYRNLRTLVRHRRRLVQMLTEVKNRVHGIVDELFPGFLNEKNTGIIPFTQTSLYLMQDRFSPKQIRRRRRQKLIEILKRLGTSKAEYTAAKLQQYAAKVLHVPVEYVDTMQLSLAQHVKHIRCLKQSVAQMDKEIALNLAQTQGAFLTSVRGIGLVLAAGVTAEIGDLNEQKPLNNLTSYAGIVPRVKQTGGSNGKTYMGPVAKRCNRILKDYVVKSAYHLGLHGPPDLMADYKRRDASGQHADFGIGRRYLRMAISLMRTSQVYLPPNLRKADSTPQQRAGYYLTSWPYLRQKWEKVGALEAAFVNNRPLGLWRQIVQELYDIKLKL

SEQ ID NO: 101709 - protein, 433 aa, unidentified
MLLTPYNSIEPLVPKGVPMALKIVYQICCGIDVHKTFVVACIASTNKQGVTTYKCHRFSTFTQGLKELLQWLLDNHCKDVCMESTGKYWIPVYNVLENDCTIVLAHPKYVKAIRGKKTDKKDAKWIADLFKHDLVAGSFMPPADIRQLRDLMRYRYKLTCFMSSEKNRFQNCLTVSNIQLASVVSDTFGKSSQRILDKILENPHDTSFDIESLIHGSMKKKLPELELAIDGFITPEQAGKLKIIKKHFEDLESRKAELEELILALASPYQQELDLILTAPSFKNTFTAIGIISEIGVNMEAFPSAKHLCSWAGLTPTNNESAGKKKSVRVSKAGCYIKPLLVQCANSVVKSEKHPEIRNRYLRLRKRRGHKKAIIAIARMLLTALYNMLKNKEPYNAELYRKSDVLPVNREITVEQAILMAQFQGYKIKSATE

SEQ ID NO: 101710 - protein, 359 aa, unidentified
MARKIMPQPEPLYVVMGVDTHKDLHVARAKDQVGRLLGELTVPAETTGYRKLQAWAHRFGEVDSWGIEGTGSYGAGLSRYLREHGEEVIEVIRPNRKERRDNGKSDPADADAAAMAVLSGKAKARAKAGDGTVEMIRVLRVARASAIKARTQTANVLQALVVTAPAPLRESLHTVSTINLVSICARSRPGQMSDATSATKSALRSLAVRYEHLDAEIAALERELNRLVPKAAPELIARFGVGPETAGQLLVTAGDNPDRLDSDASFSMLCGSSPLDASSGKQKHHRLNRGGDRHANSALYHIVICRMRHDPRTKQYVAKRTAEGKTTKEIIRCLKRYVAREIYGVLKNMQHAPAVTTAA

SEQ ID NO: 101711 - protein, 314 aa, unidentified
MQNQTENNIFIGIDVSKKKLDVAIYSKTGVKQFDNNEKGIGSLIKYVSKLSPTLIVMEATGSYHFLCLSELMNHSLSVSLINPRQSRDFAKATGHFAKTDAIDAKVLAHFAQAIRPEVRHQVSDQTLQLNDLTRRRTQIVQMIVIEYNRLESCHSKGLKSSIENHIQFLDTQKALIEKEIDIIIDENSFMKKQEEILTTVPGVGKVVARTFLAELPELGQLNSRKISTLVGVAPLNRDSGFSKKRRMICGGRSRVRSMLYMACVSAMRWNPILKSFADRLKESGKPYKVVATAVMHKLLIILNAMVRDNTYWKY

SEQ ID NO: 101712 - protein, 439 aa, unidentified
MILIREVADAPVIMGISKPAGLKSPCGEVKIMNPLFVGIDVSSRNNVAYLMKPDGSKHSSFSVQNNLGGAKILSERIVSALESVPLSDLVIGLEATSIYGDSLVYALREDGSLGRFQRKIHVLNPKQVRKFKEAYPDLPKNDWVDAFVIADHLRFGRIAKEVYMDDYRYQALRTLTRSRFDIIQNLTREKQRFANYLFLKCSGIAQAKDIQNTSATTIALMERFETVDDLANADLDELTAFIAETGRGRFADPDAAAKAVQAAARGSYRLPKTVNDTVNQAMAVSIASMRALKEQVKVLDKAIEQQFEIIPNTLTSIPGIGKVYSAGIIAEIGDIHRFESQASVAKYAGLVWNRNQSGDFEAEHSRMIKSGNRYLRYYLLEAANSVRRCDSEFRRYYDLKFKEVNKYQHKRALALTARKLVRLVFRLLKDNRLYIPPED

SEQ ID NO: 101713 - protein, 329 aa, unidentified
MRFYTNPHNFYCGIDRHARSMYVCILSYDGESLVHRHMKAAPEPFLKAVAPYREGLVVAVACMFTWYWLADLCAEQEIPFVLGHALSMKAIHGGKAKNDTIDSQKSAALLRGGLLPKAYVYPAKMRATRDLWRRRTPLMRKRAALLSHGHNTTSHYHLPDIGKKIAYNANREGVAARLNDPAVQTTIAIDLALITSDDALLRDVELSMVQTAQQPEAQTLSVLQTVPGIGTILSLVLLDASHDIGRFPSVQDFASDARLVTCSTESAGTRLGTSGKKIGNAPLKWAFSEAATWFLRNHPHGQKLLARLAKKHGKGKALTILAHKLARAV

SEQ ID NO: 101714 - protein, 402 aa, unidentified
MIQRACGVDVHRDNFVATILTSRGCETRSFEKTVDEIEAFKAWLKAKKCRAVAMESTGVYWIPLYAALEDEFDVKLANAERTRRTAGRKTDQSDSEWLAYLLRAGLIEASYVPGRKIRVLRELTRLRTKMVQNRTDYKNRVHKVLQRCNIRLGSKLHSVFGKAGMKVLNGLMAGKSLDQIVNESNSKVLKEKRSELEKVVRAGLDQEDIFVLKRCLRMVERIDEELKELDARIAMLIADREKDMKNISKVPGVAQVSASSILAEIGDAKRFADGKKIASWSGLCPSVYQTADKNLTGNLKQGSRNLRRMMIQVAHVASRAKNSRLRLFFLRVAARREKKKAYVALARKILCIIHHLLITGEEYVEEGFVKKFKAKMKALEDLPLDEMARILTGAGYLVHAPV

SEQ ID NO: 101715 - protein, 356 aa, unidentified
MFIIGIDPHKGSHTAAVLDCHEQLVGELRVCADRLQRDRLLAFAQRFEPHVWAIEGATGTGALLAQQLVGAGERVLDVPPKLSTRARLLDSGRSDKTDAHDARSAAMVAMRHRGLRAVGVEDHIAVLRLLAKRHHDLVARRTQSICRLHAVLCVLVAGGLSRNLSAARAASELRRVRGADAVGLERRRVAHELLGEVRRVDAELSALKARITVAVAASGTRVTEVFGVGPIVAAYLLGYTGDVARFATAGHYARYNGTAPIEASSGAKARHRLNPRGNRQLNHAIYMAALTQVGHDTAGRAYYLRKQAEGKSKKEAMRALKRRVSDAVYRQLLADARQRVGPGGQSGATLQSSAAG

SEQ ID NO: 101716 - protein, 374 aa, unidentified
MNTIYIGVDFHARQQTICYLKTETGELVTCELRHEDKEKVRAFYAQFPGPVIIGLEASGYSPWFEAMLEQLGCEVWLGDATEIRRRARWRQKNDRRDAELILDLMVHHEFPRLHRPTVQSREVLRMLRYRQKLTKLRTMSKNSLQAIALQSGLAKGSRLFTKAGETEFSAAEMSPVMHWQREHWLQLLQPLNQQLLETMVWFKAQSKGDVCVTRLRTHPGIGLLTALCLVHTLQPVSRFRNQRKVAAYVGFDPVERSSAERQRFLGISKAGSRVLRYLLVEATHTAVRKDEDLKRFYKRLVERRGRPKAKVAAARKLLIRAYIMLRDEIDYAEFRRRAVAARLARRGQRPEVPEVLIGQPASAGCQEQTHGSEK

SEQ ID NO: 101717 - protein, 330 aa, unidentified
MHSFTHVYGIDVSKDNLDVLQLSNDASSKEKTQVKNRLKKIESWVKTLCAHSSFCVVEATGTYSSTLIYLLDKYKITVAVVSPFKSKSFMDALGISSKTDDQAAYCLALMGLRLHLKPYQMPSIDRQKRKQVQNAHHAMMKQQRMLKNQLHALDQLPFVETTARNAYEQILQSVELQIQQLEEQLLELDEDEEYQRIKSFVCSVTGIGQRTAHAMMLASNCFENFETADELSKFFGLTPNSHYSGSSIRKKGRITKMGAHYVRALLYMCSRSAIRYNHACKELYQRLRAKGKSHKVAAVAVMHKLVKQVFACVKKQCDFDNQYYLKFKIN

SEQ ID NO: 101718 - protein, 443 aa, unidentified
MHHESPVRRPGRWCQAQSANERDGETSMPQGQSQEQRAVTGGVDTHSEVHVAAVVDEAGRVLATGSFPATGAGYKKLLAWMGQQGSLVRVGVEGCGSYGAGLARCLAGEAVAVVEVNRVNRQARRRRGKSDTTDAVAAARAALNGEASGTPKSADGPIEALRALRVARRSAVKASTQAANQIRDLIVTAPDELRAGLRDLDSDERVRRCARLRPAPPSTPAEATKASLRCLARRHLALGAEIAELDAAIGALCATVNPALLAANGVGGEVASALLVAAGDNPERMRSEASFAALCGVSPVEASSGKVVRHRLNRGGDRDANNALWRIAMVRLAHDRRTRDYAARRRAQGHSDRDILRCLKRYLAREVYRLLTNPPQLPDAADLRRRRLDSGLSLAAVAEQLGSWPSRISQLERSLIHNAELATRYQLWLDHHHPQPKNHPQAA

SEQ ID NO: 101719 - protein, 373 aa, unidentified
MKHVTTYVGIDAHKKDLFVAMLIGNEKTVTWQLANEPRAVHRLVRKLERETPGPVRVFYEAGPCGYALQRQITTARVTCDVIAPALMPRTPGERVKTNRRDARKLAELGRAGLLTVVQPPTPADEAVRDLARARDDAREDLQRCRHRLGKLLLRRGLHYAGRNWTRAHRRWVESVTWTYAAERAVVDDYLLAIDHTEARLRALDARVAEIAAQEPYRTPVGWLRCFRGIDTLTAMLILAELHDFRRFGSARALMAFLGLVPGENSTGETHRRGRITKTGNALVRRVLVEASWHYQHRPGVGRALAARRQGQPSRVIAIADQAQQRLCRRFRRLAEQHKPKPKIAVAIARELAGFVWAALQPAPAGGAARHADD

SEQ ID NO: 101720 - protein, 482 aa, unidentified
MKKRNIYSNRSQELLGLFEQAGNNSKVMCVPIDYAKKDHVAMFCNGYGDIIRKPFAVKNSPVGVTYLLEQVNRSCRHRGIKNEHVFFGGEDVNSYAENFANTLRSKGWLVANVNAHDAKKQRENLQASTDRLDLMGIATMLLNRRANCMPAQSGVYRNLRTLVRHRRKLVKMKTEVRNRTHTIVDRLFPGFLNEKKSGINPFSKSSLYLMEDRFSAPQIQRRRRSTLVAQLKRLGTPNAEQIAAKLQVYAAQVLTPPDEYTATLQVSLSSHATHYHCLLDSAEQLKREMALLLCQTQGTFLTSIKGIGIVLAAGVTAEIGNPYEQKPLNNLVSYAGIVPRVKQSGGPEGQPHAGRVSKRNNHILKDYVVQSAFHIGRYGPADLLADYKRREANGQHADFGMARRFLRMALCLMRTSQIYLPPHLRNLKTKPQERADYYLALWPYLKDKWNKLGALKAAFAKDRPMGQWRYIIQEFYDIKLSL

SEQ ID NO: 101721 - protein, 402 aa, unidentified
MNSVGIDISKGRSTIAVMRPFGEIVISPFEVRHTDSELSELARRLKSLNGQTRVVMEATGNYHAPVAKLLHDAGLYVSVVNAKLVHGYGNNDLRRVKTDRKDAVKLANYGLDRWLTLPRYVPEENTRLLLKNCYRQYRQYSKVQTVLKNNLISLLDMTFPNANRLFVSPARADGSEKWVDFVAEFWHCECVSERSLKSFVNKYWRWCRKHGYNFSEEKAHAIYDEASGHIGVMPKSETTKLLVEQAVSQLSATSAALAALKQEMQSLSSQLPEYPVVMGMFGVGPILGPQLIAEIGDVRRFYSKKALVAYAGIDAPPNDSGDVIGRHKSMSKVGASSLRRTLFLIMSAYLQNSPPNEPVYQFMDRKRSEGKPYRVYMMASANKFLRIYYATVKAYLETLEQF

SEQ ID NO: 101722 - protein, 431 aa, unidentified
MLGGNQEKLMSQNQPEIQYAAFVSIDWADQKHVWSLQEANSSTREHGEVGHMPEAIEAWIAQMSQRFVGRQIAVAVEQSRGALVFLLSKYEQLHIFPVPPAMTANLRKAFYSSGAKTDPADTDLLQDVLQMHREKLRRLSPDTEATRLIQNLVEERRKLVDEKTAQSNRLEAHLKIYFPQIPQWFGDVDSPLVCALLERWSALEALQKARPDTLRSFFRKHHCRKEELIESRIKAIGEAMPALKDRAVVEAQLAVVKVLVQVIQVLHQGIEDFNRQIQEAAEAHPDFFIFESLPGAGAVMAPRLLAAFGSQRERYRNAAEVQTLSGIAPVTESSGKSSWIHFRFACSKFVRQSFHEWAALSITQSQWARAYYELQCRRGKRHHAAVRALAFKWIRIIFRCWKERVAYDEKVYLAALAQHNSPLLAATKIAL

SEQ ID NO: 101723 - protein, 317 aa, unidentified
MEQHQSSTRVAGVDVGKKRLDAAVHGLEDAVVVDNTVAGVGELIAWLRAREVGRVGLEASGGYERRVRQALEQAGFEVVVHQPLEVRRFAQLKRRRAKNDRLDARLIAAATAQVDAVRAAQDPRLAELAERMSAYEHITDQVVAQKTFLESVTLKDVIALVRGQIRNLERVKAKLAAEILQRIKAQPDLLARFRLLTSLPGIGPIVAACLVIRMPELGALRRGQAASLLGVAPFDRDSGQWKGLRFICGGRSRPRRLVYLAALAAKRCDPALKAMAERLSARGKPAKLITVAVMRKLIEAANLVLQRGQPWLKQPAT

SEQ ID NO: 101724 - protein, 517 aa, unidentified
MATRSRRSVRKYLIQKPNGQVTQRVQAVGPEHFGVLCFDCAKARSKFMLANFYGSVLIPPQTVAHTRGHLQTVVDQVRQACAQHQLRDLIVAIERTGEYHRPVQRACKQANFDTRLVHPLTSKQFRVPADPGNKTDDTDLAAIFRAAVNGFGLVEPVLPEDYQQLQLLVRHRRDLVQKMTTLCCQIREQLHALMPGYAECFSDLWDSALALPLARVTGSADLIRQGGGEGLLRLLVQHQLSTRRDSCAKILAWAEAAPAAHPQHALLLQIVGALDDDRLRKSQEITVLEQRCAHYLARTPYLLLLVIPGINVVSAADVAGELGPITFYPHANAITGRAGLMPSRYQSDRVDRPDGPLRRRANRRLRTALVQVADNLIACNHYFGAKAAHWKSQGKDARWQRVKVAKVFSRLLYVMVAGRQLFPHPCRQQRHYILHKLMEFHRDADTHMSQVLADLDAATQQLPRSAHAVEAKPLAERLKEVQHRKGPQPLADIIPIVLARLGARSVQSEASEAPGPS

SEQ ID NO: 101725 - protein, 353 aa, unidentified
MSSLTDLREVVDVVIGVDTHVHTHSAAAVDAGTGGVLGEITVEATADGYARLVAFADEHARLRAWAIEGTGGHGAGLARHLADGEEIVVELDRPQRAQRRHGAKSDPLDAIRAAREALSRARLGTPRHGGDRQALSVLLAARRSAVEATTDAQRQLFSLIIAAPEPIRARFRGQKLPGMLTTAARLRGHSSWDAETTATVTVLRCLARRARELAAEAASHEKAILAIVRSWRPDLLAQPGVGPIVAATVLCAWSHPGRIHSEAAFAMLAGVAPIPATSGQVTTRHRLNRYGDRQLNRAMHTIALSRIRYDPTTRDYVARRTIEGKTPREIKRCLKRYIARDLYRLLEHQPNPA

SEQ ID NO: 101726 - protein, 303 aa, unidentified
MATSSEIYVGIDVSKDRLDVAVLGEEHTWQVENTSKGIDELVEWMQGWQPELIVVEGLFQAGLAVGVVNPVRVRQFARACGLLAKTDKLDAQVLAVFGQRVQPKRYEGKSEAEKQLSALLVRRRQVEEILKAEQNRLRTISHSLKSSVERIIACLQEEKKLLDAQIQQFVTEQEAWQEHTEILRSAPGVGMVTTATLLAELPELGKMDRKKIAALVGVAPMNYDSGLKRGYRKTKGGRGDVRSVLYMSTLVATRYNPVIQAQYHQLLKRGKEKKVALTACMRKFLTILNAMLRDRQPFRCAAA

SEQ ID NO: 101727 - protein, 343 aa, unidentified
MDHFAGLDVSVKETSVCIVDDTGRIVREVKVASEPEALLAVLTNPACRFKRIGLEAGPLSQWLFSALAEAGLPVICVETRHMRAVLKAQINKTDRNDARGIAQMMRVGLYRPVHVKTLRSQKQRMLLTHRKLMQSKAIAIENDLRATLRNFGLKVGVVGTVKFEARIKELVENLPDLVVLVEPLLIVRRVLREQVGILHRRLLAIVRDDDVCRRLMTVPGVGPVVALTYRATVDVPSRFRNSKAVGAVFGLTPSKHQSGESNRTGGISRCGDEMMRMMLYEAAHIMLVRSAKWSWLKAWAMKIARHRGLKKAIVALARRLAVIMHRIWVDGTEFRWTREVAAA

SEQ ID NO: 101728 - protein, 402 aa, unidentified
MTVRPQVWVGIDVGKSSHHACAVDETGKMAWTQKLANEQAAIEALIDRAQNTAVAVRWAIDLTSPMALMLITVLLAAGESVVYVPGRMVNTMTGAFRGEGKTDAKDSRVIAETSRMRTDLAAVTMPDELVVELTQLTGYRTDVMADWVRGINRLRSLLGSIFPALEAAFDYSTRTPLILVAGLCTPAEIRAAGTEGVMTHLAGNKAWAPGIAKTATTAVALANAQHLALPGQAGTAALVKRIAAKLLELDREIKDLDKTIAERFRDHPYARIIESLPGFGPNLGAEFLVVTRGDLTSFATSGRLASYAGLVPVPQDSGRVTGNLRRPKRYNRRLRRVFYLAALSSLRTTGPSRQFYDRKRGERLIHSQALLALARRLVDVLWALLRDGREFTLDRPAALAAA

SEQ ID NO: 101729 - protein, 362 aa, unidentified
MRNVNDPLAAAKKILALDLGKFKSVACVLDAASNTHRFETIITSPSAVHDLLVEVEPDRLVIEACSISGWVCDIARALEIVVQVANTNDQAWNWKKVKRKTDRVDAFKLAKLSLLGQITEVHIPEPPVRQWKSLIKYRHGLIDRRTAIKNTIRSLLDSQGLSMPHKARAWTKMAIAELSELARPLSECSPLELWRGQLHIELRSLKEIGESIAECDGKLNPMAAADERVARLQTIPFVGPRLAELVVSTIGDPHRFANARQVSAYAGLVPRQFQSGTLDHLGRITGQGPGLLRRVLVQAAWGMQRKETRAKIVFERLCHGQKTRRKKAAVALARKILVWCWAMMRDGTKWDESFECEAAAAT

SEQ ID NO: 101730 - protein, 387 aa, unidentified
MPQPNDLSRSLVAVDQNSTIIAVIEMSQSSWLVGGVVPGIERQPRKKLEPSPERLLAVLHRWRDEAVRAGRTITRIALAFEAGRDGFWLARWLERRGVEAHVIHPSSVPVSREHRRAKTDRLDTELLKRGFLGWLRGERGHCSMARVPTIAEEDAKRPNRERESLVGERTRIVNRIKSTLARLGIRNFKPTLRKAAERLASVHTPEGMPLPPNALAELQRDMARLGFVVSQIREIEDARQKRLEQQPETGAHAMVRLLARIVGVGVETADMLVHEVLSRPMRDRRAVARYAGLTGAPDESGAKRREQGLARAGNARVRRGMIQLAWRFLLFQKESALAHWYRARTADSRIGTRKTMIVALARKLIIALWRFVTTGEPIEGVVLRPAS

SEQ ID NO: 101731 - protein, 410 aa, unidentified
MDAFCGIDWAEDHHDVALVDHGGAVLARLRISDDAAGLTRLLGLLAEHGDSAENPVPVAIETPRGLLVACLRAGRPVYPVNPMAVARYRDRHSVAGRKSDKGDAAVLANVLRTDIHAHRPLPADSELAQAIAVLARAQQDAVWDRVTAHNKLRSHLREYYPGFLAAFAAAKGGIMRPEARAILAAAPTPATAARLTLAQLRALLRKAGRSRGIDAEAARLREAFRQEQMRQPPLVEEAMGRQSRALLRQLDAACQNASDLEAAAIGSFSQHPDAGIITSFPGIGALTGARVLAEIGDDRSRFADGKGLKAYAGAAPITRASGKSRSVTRRHVKNNRLAAAGYIWAFSALTASPGARAHYDRRRDAGDRHAAAERNLFGRLLGCLHHCLATSQDYDEATAFPSHPAIPAAA

SEQ ID NO: 101732 - protein, 349 aa, unidentified
MLIIGCDFHPAFQQVAIFDEQTGEIAQRRLAHPGEATEFYRSLAAGVLVGMESTGYSGWFERLLEELGHQVWIGDALQIRASMTRRQKTDKRDAEQMVRLLMEGRFPRIWVPTAKDRDARQLLVHRHKLVQLQTQVKNQLQFLAMNQGWQLKQKLWTQSGRQQLEQMPLGAYASARRASLLALLDQLEEQIGGLEATVLREAEARPECVRLMTHPGVGPVISLAFVLTLGPAERFAGARQVGSYFGLIPREHSSGGKQRFGSISKQGNSFLRYLLVQGGHGAARWDPELRRFYGHCKHTHEHAGVAKVAVARKLAMRLYWMLRDGVDYATLMHRRRSHAGEPESWRGRN

SEQ ID NO: 101733 - protein, 412 aa, unidentified
MKVVHEICCGIDVHAKMLVACLLLANGEKEIRTFSTMTDDLLRLRDWLVAARCTHVAIESTGVYWKPVFNILEDALTVILINPEHAHALRGRKTDIKDAEWLADLLRHGLLKASFIPPPEIRELRELTRYRESLVREQSAVANRIQKVIESGNIKLGQVASDALGVSGRAILWALAHGETDSVKLAALAQRQLKKKVPQLRRALQGRLTVNQRFVLRELLRRWEELEAADGRVTQEIDRYLQDRPKLARAREIVDTIPGLGPRAAEVIVAEIGVEMKANFESDAHLASWAGICPGNKSTGGKRLSGRTRKGNTYLRSTLVQAAWGASMKKNCYLSSQFFRLLKRLGRKKALVAVGHSLLVIIYHVLERDQTYTELGGDYFDRHHVEQQRDYYLRRLQMLGLKISVEELPKAA

SEQ ID NO: 101734 - protein, 392 aa, unidentified
MVVSVGIDVSKDKHDCFIVSSEGEVLADAFTIPNTLDGFHCLLQKIRDCTTPQDKIKVGLEATGHYSYNLLGFLLDNGLATYVLNPLRTNLYRKSLSLRKTKTDRVDARTIASMLLSDAGLNPYTNTAYYNEELKSLTRYRFDKVKERAKLKSSIARLVCILFPELEKLVPSLHIASVYALLEEFPGAKQVASAHLTRLKALLETVSKGRYKRDVTLEIRDAARNSIGSWMPAKSLELQHTIRLIHELDSEIAEIEEQIQSLMDELDSPITTIPGLGFRMAAMILAEIGDFTPFNSPDKLLAYAGMSPSTYQSGQLKNCYPHMEKRGSRYLRYALYNATKYVCHWDPTFSAYLDKKRAEGKHYNVALSHAAKKLVRLIFAMEKSRTPYRLAV

SEQ ID NO: 101735 - protein, 366 aa, unidentified
MDSSPERHHRANYHSALKGHNSKEEPMSSLQIGVDLAKSVFEVALSPVPGQVRARRRLSRAGVTPFFAQQPPAEVLLEACGSAHHWGRELQRLGHRVALLPPREVARYRAGTKTDRADAKALLEAARNADLHRVPVKSIEQQAVVALHRLRQGYLRTRTARINALRGHLREFGFVIPVGARHVRPRAHAALAADAVPAFLRPALQQVLEDIGTLEDQAEAVRTQLTALAEQMPDVQRLLTVPGVGILTATALVAFVGDIHRFRSGRHLAAWLGLTPREHSSGAVRRLGRITKHGNTYLRMLLIHGARSALRAGGGSRQPDDLRTWARAVAARRTHNVAAVALANKLARVCWRVWRDQRPFVRRDAR

SEQ ID NO: 101736 - protein, 389 aa, unidentified
MRLLDAGVLQEKLEQLGVPPEQVLIGLEATSRYGENLYHFLESRGYQLCLLHPRQTHQFAQQRGLRAKTDKLDATTIARVLLSGEARRGYVPSDLIATYRELVRLHTQLSDEVARSKNEIQALLTVLFPEFSQVFADPCRATALALLKLYPSAQAIATAGVEAIAAKLHELAPRNYGRSTAEHLVQLAQHSVSRGFAVAARSTSLKILCDQREHTQANMAQLEREIDNLLETDAGAKGLISVPEFGHKTVAVLRAELGDVTRFQRTDQVVAYAGLDIEVKESGKWKGQAKLSKRGSGRLRRILYMATVRCIRLPGSAFGAYYHRLVARGMKKCDAMMAVMRKMLIVAYRLLRTEETYDPTKVCAVVVTQPVELPPLHTPSSTKVVAAKA

SEQ ID NO: 101737 - protein, 343 aa, unidentified
MDHFAGLDVSVKETSICIVDDTGKIVGEAKVASEPDALLQVLKNSAYHFKRIGLEAGPLSQWLFSALAEAGLSAICVETRHMRAVLKAQINKTDRNDARGIAQMMRAGLYRPVHVKTLRSQKLRMLLTHRKLLQSKAIAVENDLRGTLRNFGLRVGMVGKVKFEARIKELIENLPDLAVLVEPLLVVRRVLREQLGILHRRLLVIVQDDEVCRRLMTIPGVGPVVALTYRVTVDVPARFRNSKAVGAVLGLTPSKYQSGEINRTGAISKCGDEMMRVMLYEAAQSMLVRSTKWSWLKAWAMQIARRRGMKKAIVALARRLAVIMHRIWVDGAEFRWSKNAVAA

SEQ ID NO: 101738 - protein, 418 aa, unidentified
MKYALGRVLPDVPPGGVSAGIDWGTASHAACVVGAAGRVADEFAVADDRAGLAALTARLRRAGAAEAAIERGDGPLVDALSAAGITVVVITPRQVSRLRERHVASGAKDDSFDAFVLADALRTDRARLRPLVPDSPQALALRAAVRARKDLVAQRVAACNRLRAHLLTAFPGAAGLFSALDSRLSLAFLDAFPSRASAAGLDEAALAAWLATVPRRGGCAPAAVLARRLAAAVPGTGHDAHLAAVTRALAGTVAALAARIRDLETAVAAQLAAHPDAEVFLSLPRAGTLRAARLLAETGDSRARYPDARALAGAAGVAPVTRRSGKWTSHEFRWAANAHLRDAWTDWAGDSRHASPWAAALYDAARQRGKDHPHAARILACNWISVIWPCWQQGVPYDPAKHRSLQEILTRQQQPPRQ

SEQ ID NO: 101739 - protein, 364 aa, unidentified
MVEVLATPVTWVGMDVHMSSIAAAATVGETGELRQARLAGDVGQALQFVKSLPGQVRVTYEAGPAGFGLARALREAGIDVLVCAPGMVPRAPRNRIKTDKRDAELLMRCLMAGQLSEVRVPTIAEEGLRELVRAREDLRRDLMSTRHRVTKMLLRHGLRHPGKVGRWGRDHRLWLGKVTLADPAAQSAFFDLLGVLDFLAARRSQLEHELFARVDASAWADTAARLRCFRGIDRLTASGLVAEIGDFGRFERAPQIMSWVGLVPSERSSGEQRRQGAITKAGSSHARRLLVEAAWKYRNPPRRDTNLLARQKGQPAEVIARTWQTQLRLHKVWANHEARGKRRTVTATAVARELVGACWAVALM

SEQ ID NO: 101740 - protein, 338 aa, unidentified
MKVHTLGIDLAKNVFQLHGVDRKGRPLLVRRVRREQLLKVLGELESCLIGIEASTGAFYWQRQFEKLGHVVKIMAPQYVKPFVRRQKNDSNDAEAICTAVQQRNMRFVPKKSLEQQDIQALHRARQRLVNHRTALISQMRGLLLDRGIAIAVSAARARRLIPKILSESNDELTGMMREIVSSLYAFMLQIDERIKAFDRKITAIFKASDVCQRIAKIRGIGPKTATAMIAAIGDGSDFKNGRHLAAWLGLVPRQHSSGDRKVMMGITKRGSQHLRTLLVHGARAVVRTAVRKTDSRSVWVNELRQRRGYNRATVAVANKNARVIWAVLTSGEPYRAAA

SEQ ID NO: 101741 - protein, 440 aa, unidentified
MNRVIPTSAAATKRKESEKMKAWNEVTHFAGFDWAKDHHDVLVLDSTGKITSEFRFDHNATGWTLCQEKLKQFPELAIAVEAGHSAAIERLVALDYRVYPVHPRSSKSYRTRKLPSGTKTDRRDCWALADALRLEGESWRVLTTPEPLVQQLRLLCRDEVALIEQRTALINQLQQALYEYYPAALEAFEDWCAPSAWAFVECFPTPQTLVQAGKRKWQNFLHAHKLFHPELNQKRLEIFARADQFCGPAPAIAAKSALAVAVAKMLQTLEAQLARYRSLITECFKQHPDHALFTSLPGAGPKLAPRLLGELVALKPLADTPQALQCLAGMAPVSYQSGKVSVVYLRHQCNRFLRHTVHLWVDLSRHYCDWARIYYEAHRKKGQSHACALRCLGMRWLKIIAAMIRNQTPYDAAVHTRNQLQHGSWVMQLQPVQIIKKDAS

SEQ ID NO: 101742 - protein, 391 aa, unidentified
MEVMVETCCGIDVHQKSIVCCILDGPLDTNTPKKQHRTFGTTTKKLREALTWIQSQNVTHVFFESTGQYWIPIFNIFYDSNLTLILANPQHIKNLPGKKTDMNDAEWIAQLGRCGLIHPSYIPCEEVQQLRLLTRRRKAYTERITQCKNEIHNILQRANIKLTSYLSDIYGITGITLLEMFIDGEVITEQTILPKIHGKVKATAAELVEAMDGKLSFEDRFLLGQSLEHYRHSVNQVEEITVVIKQYVLERFEREYNLLIELPGVSAIVACVILSEIGPNVEAFKSQGNLASWAGVCPGSYESAGIKKSSHTTQGNKYLKSILFQAGGTAGRSKDEAFHNLYARISGRSSKMKAIIACAHKMIRVIYKILSTGEHYDAKKALGLRQQARAK

SEQ ID NO: 101743 - protein, 339 aa, unidentified
MNATTYAADIAKNVLQVHWVDPLSGEIGRKKLTRAKFTEFFASRQPARIVMEACGSAHHWGRTLGAMGHEIELLPAKQVRAFVRGNKDDAADARGIWLAAQQGDIRRVPIKSTEQQAVQFLHRTRSHWISIRTATINALRSMLYEFGVVLPQGKTHALKVLGEHRADIDGHLPATIQRLVDAQLQALRDLESQVRVVEAEIELVQKQSDTAKRLRQIPGIGLLGATALTAMLGKDGKGWRNAREFSSCLGLPPKHAGTGGKVRMGGMSKRGDPYVRTLLISGARCLMSQKDAPPWIVKLLSRRPPNVVAVAVANKLARTAWALIANGREYEPQYKPATC

SEQ ID NO: 101744 - protein, 398 aa, unidentified
MTESSDYESVQVFIGVDVGKDTHHAVAINRSGKRLFDKALPNDENKLRSLISDLKQHGQILLVVDQPATIGALPVAVARSEGVLVGYLPGLAMRRIADLHAGEAKTDARDAAIIAEAARTLPHALRTLKLADEQIAELSMLCGFDDDLAAQTTQASNRIRGLLTQIHPALERVLGPRLDHPAVLDLLQRYPSPEKLASLGEKKLAAQLCKLAPRLGKRLAADIAQALAEQTVVVPGTNAAAVVLPRLALQLITLRKQRDEVALEVEQRVLAHPLYPVLTSMPGVGIRTAARLLTEVACRAFASAAHLAAYAGLAPVTRRSGSSIRGEHPSRRGNKALKRALFLSAFAALRDPISRAYYTRKMSQGKRHNQALIALARRRCDVLFAMMRDGTFYTPQAS

SEQ ID NO: 101745 - protein, 350 aa, unidentified
MVVIGVDAHKRTHTFGVVDEVGRELANRTLPATLDGHRAALRWARTWPERIFALEDCRHLTRRLEADLIRAAERVVRVPARLMATARRTGRELGKSDPIDAIAVARAALREPGLPMAQLDGETRRVRLLVDHREDMVAERTRMQSRLRWHVHELFPGLEIAPKSLGRLHVIAAVDRRLRQVEGTVAAIARELLGRIGDLTMRINELEREITQLVRPLAPNLLAMPGCGPLSAAKILGEVAGPARFRSRAAFARWNGTAPIPVWSGNDTRHRLNRGGNRQVNAALHRIALTQWRGVGPGRAYVQHRLAAGNTKTEALRLLRRRLSDEVFRRLLVDETLIGSTSVGEEVIAA

SEQ ID NO: 101746 - protein, 341 aa, unidentified
MTKNVHFVGLDIACDDFVASIYQSPKESIITKEGIKNTFEGFNVFIAWLKEHGLSKTNSIICMEATGVYNEAIAHYLVSQGFRVSVEPPLKVKRAFDPVGHKTDPVDSRQIAEYAYRYSDELRFWKPRDEIMEKTKHLLTAREQFTKQSTAIKNAMKAYEKHIVQVSLIVKAHRQTLREIRKHITEIDKELDRIIRQNPSISKMNNQLKSIPGYGLLLSASLITLTGAFSDISHHKTLAAFLGICPYQHQSGKSIYRQPHMRSFGPAYPRKLLTLAARSVATHNDVFKKYYARKLAEGKDKKLVLNNISNKLIKLACALIKNDSRYTATYRSVNPMFLDIS

SEQ ID NO: 101747 - protein, 410 aa, unidentified
MELLHRRCCGLDVHKETVVACLRLVSDGKVTTEVRTFQTTTADLLRLSEWLAANACTHVAMEATGVYWKPVWHVLDDGEFELVLANAAHVKNVPGRKTDVNDAMWLAELLAHGLIRASFVPDQQTQEMRNLLRTRKQLVREQSRHLQRVQKILEDANIKLDSVLSSLMTKSGRAMIEALIAGETNPVKLASLADPRVKASPKELREALRGRVTKHHRFLLRLHLDQIDALGTAVATVDVQVETNLGPFRTAVDLIKSIPGFDNLGAHVVVSEIGIDMSRFPSDAHLISWAGICPRNDESAGKRRSNRLRKGAPWLKTTLVQCTWAAIKKKNSYLQAQYHRIKARRGPKKAIMAVAASILTAIYHMLKDGTTYQDLGYNHFDRRSTEQQKTRLIKRLADLGYAVEIKPLAA

SEQ ID NO: 101748 - protein, 328 aa, unidentified
MLYVGIDVAKNKHDVTVIDNTGKMVLNPITITNRKQGFELLHNTLKQLNQNCLIAMEDTGHYALNLLTFLHQNNYQIYTYNPLLIKEFTKSISLRKTKTDKKDARTIALKLLSDPNRALFMHDNKQEELKIMTRHMNRLKKHQSDWKVQYTKCLDIIFPELHQVVTKHSDYVYELLKRFPSPEKMVTAGFDKLIEIKRLTAKHALDILELAPNSIGTTSLAREFELIEIIKNIQHYEKLIKQTEKKIDELMAELNSVITTVPGISNRLGSVILAEIRNINTFNHSAQLQAFAGLEPAIYQSGQLDAQGKWSNEAHHTYVGHSYKLPLK

SEQ ID NO: 101749 - protein, 394 aa, unidentified
MRKNNKEKMEKEQSVVQKTGGVLLRKLKIARAKKAKAVLERVEYYIGIDLGDRKSYYCVLDKSGEILAEGNMPTTAAGFEGHFKLLGRSRIAIEVGTHSPWVSEQLAKQGHDVYVANTRKMSGGKKSRRKNDRLDAEILARQARSDPKQLYPIRHRRAKARQGLVLLRARDAMVSARTKLVNGVRGLVKSFGYKLPKCGTEVFHKVCIDGLAEELRMALKPILEQIGQLTEKINGYDKEAERISLKEYPETKILRQVKGVGTLVSLAYVLTMEAPVFFRKSRDAGPYLGLVPKQYDSGNSSPQLRITKTGDRMMRKLLVQSAQYILGPFGEDSDLRRHGLKIAERGGKNGKKRAVVAVARKLAVLLHRLWLTGEVYEPLYNNRTKEENELRECA

SEQ ID NO: 101750 - protein, 343 aa, unidentified
MHYIGMDCHITTLDFVVVDEAGKVTKTGKVVTSAKNFMEFIKSVRQPRAVYMEEGTLAAWALEVCVRFGEKLVITDPRKNHWIGSSGQKDDPIDALKLAQLARGGYIKEIHHPVGQRRRFRELMTAYHDTNRSITRIKNKIKAKFRQNGIQCTGQTVYSKVHREEWRRKLPQDPTLLVILDSLWLQMDQTEQTERNILSTAKAQGKQYPEIRLFEEIPGIGFISAATISAILETPHRFADKRKVWMYAGLGIVRRSSGGKLYTEKLTKEYNRLLKYTAKQAAQAAIQAKDNPFRRTYLEMTLIKGIVPHRAILTIARDILSTMWAMWRNGEKYNPDIDKKVKT

SEQ ID NO: 101751 - protein, 368 aa, unidentified
MSHKSSKLYVGMDVHKESIDIAVAEEGGEVRHHGQIGGDMNALWRAVRKLESSGRELVFVYEAGPCGFGIYRGLTGRGHSCWVVAPSNTPRRVRDRIKTDRRDSLKLAGLARAGELTPIYVPDVRDEAMRDLVRAREDAVVMQRQARQRLAALLLRNDVRYAGKTAWTAAHRRWIAELRLPQPAQRLAFEEYVQAVEEASARVQRLSQCIEQELAHWRWRPVVGALQGCRGIQLIHAVRIVAELGDLSRFSHPRQLMGYLGLIPGEDSSGEHRQQGAITKAGNSSARRALVEAAWAYQFSAKVSALIARRQADVPKAALDIAWKAQVRLCARFRRLAARGVNRNKIVVAIARELAGFVWAIAQQVKPV

SEQ ID NO: 101752 - protein, 475 aa, unidentified
MPSGAIKQQHGMGAPLDISANPIKVELHSEGIGIGHCQPCPLAFGRTDGAEQIGVLITLICRLPGASTALRPQPYDAIFLAYASLVLKPNFYGLAFGEVANMGVQGSREIYGMARPCIVPHVGRIIQGRSRAMEVVVLGIDLGKNSCSVVGLDQAGRVVLRRRMRRESVIKLGASLPACTMAMEACCGAHHLGRILEAQGHKVRLMSPEYVRPYVKAQKNDDRDAEAIAEAATRPTMRFVELKDEEQLDMQTLHRARDRLVGERTALINQLRAILLERGITAPQGRRKLAIWLDLARSNGELLLGRRVAVLIEDMQAQWSELDRRIQAFDEEFKSYALADAACRLLTSIPGIGPLNATALTASIGEAQLFTRGRDLAAWLGLVPRQMTTGGKPRMLGITKRGNKYLRKMLIHGARAALPTLSSATTPLGAWLRGLLGRAHKNTVVVALAAKLARIVCGVLKSGRPFDHGVTPAAA

SEQ ID NO: 101753 - protein, 482 aa, unidentified
MNCRRLVGIDLGIASAHTVRVLDGEGITIAKRKAWPTVESLTDVESAALADCPAGTGLEVIVEPTGPAWLPIAVFFSARGHVVYRVSSAKAADLRRFLSRHTKTNGIDADTLARLPLFDPAGLQPLELPGADRAALDRRVRATDRLTQAGAEHKRRIKDLVRQLLPMTPLTGDLGVADLAVLERFADPNALVKLGLKRLSALIAKASHNHQGTERARQWLDAAEASLELYAGHPAVAFADLAAEVATEVRLLRAIQAELAAHATERENRYRRVDPTELARSLPGLADVGGPALVACMGDPARFERGKQFRRFTGLTPKASETGETDRKGQAMSKAGSSLLRTTMVRAADTARKLDPQLARIYWVQMVERGKDHLGALCVVAAHLAERAWAVMHRGTPYVICGTDGRPVTSEQAKTTIAQHWTVQAEVRARRRSKKVGKAPQKVLAGQSKPRARSARTRGDLPRPASSPSAQQPVKQLATTPT

SEQ ID NO: 101754 - protein, 354 aa, unidentified
MAGIVPGVERQPLKKLAAEENGLLKLLERWRLEAEKAGHKVDRITVALEAGRDGFWLARWLRARGIEAHVIHAASVAVSREHRRAKTDRLDTEGLKRAFLGWLRGERDHCKMCAIPTSAEEDAKRPHRERETLVGEKTTIINRIKATLARLGIRSFNPKLKKAPERLEDLRTPEGEPIPPNTLAELQRDLARKQLVAEQISQIEKARLEQLKQAPKTGPNLMVLVLMRVIGIGIETADMLVKEILSRNLRDRRAVARYGGLTGSPDESGKSRREKGLASSGNARVRKGMIQLAWRFLDFQKDSALAKWFRARTENARGSRKKMIVALARKLLIALWHLVRDGVVPEGVVLRPAH

SEQ ID NO: 101755 - protein, 369 aa, unidentified
MDHSTEVFVGIDVAKSRNAVAIADGERGGEVRYLGEMDASEENMRRLVKRIAAKHQRVHFCYEAGPTGYGLYRLITGLGYPCTVVAPSLIPLKPGDRVKTNRRDAVALAKLLRADELTAVWVPDEGHEAIRDLVRARSGAVETLRVHRQQVSAFMLKHGRIFPRKTTWGARHLRWLQEQSFDHAAHQIALQEMVEAVRISKERVERLEAAIEEFVPAWSLAPVVQALQALRGVGLIVAVTFATEIGDPRRFESPRQLMGYLGLVPSERSTGDTIRRGGITKTGNGRVRHMLVESAWTYRHPPRIGKTKLYRLEAVSPRVREIAWKAQTRLTGRYRALSGRGKKTTVVCTAIARELVGFMWSVAREAQTA

SEQ ID NO: 101756 - protein, 343 aa, unidentified
MKNITLLGIDLAKDVFQLHGVNEHGKKILGKKVKRSELPTLIANLASCKIVMEACGSSNYWSRKFMSYGHEVFQISPQHVKPFVQGNKNDKNDARAIVIAAQQDNMPTVPIKTIEQQEVQMLHRYRESLIHERTALGNRIRGYLREAGLFLVQGLSQVRKQIPLILEDAENELTSGMREIIFSCHKKLLDLDKEIEKYTQKIEHFCKQSSVCERLMKLSGVGPIIASIVYATMGSPTNFKNGRHFAAFLGLVPKEHSSGGKQCLMSISKRGDRYIRSLLIHGGRAVVKNSGKKTDYLNCWIQRLHKERGYNKAAVAVANKNARHMWAIMAYDDKYVDHMKLCA

SEQ ID NO: 101757 - protein, 361 aa, unidentified
MSQSSWLVAGIVPGVERQPLKKLAIDEHALLGLLNRWRAEAEKNGHRVTRIAVAFEAGHDGFWLARWLAAQGVEAHVIHASSVAVTREHRRAKTDRLDTELLKRGFLGWLRGERGHCKMVAVPTLAEEDAKRPSRERETLVGEASRIITRIKSAFVRLGIRSFNPKLKAAAARLETLRTPEGEPIPPNTLAALKRDLERHRIVKKQIRELEQTRLENLAQAPAKGPNVMVLLLARVIGIGVETADMLVREVLSRTMRDRRAVARYAGLTGSPDESGAKRREKGLARSGNARVRHGMIQLAWRFLLFQKDSALAQWYRQRTANAPSTRKPLIVALARKLLIGLWRFARDGVVPEGVRLRPAA

SEQ ID NO: 101758 - protein, 415 aa, unidentified
MSENIITAVGIDVSKGKSMVAVRQPGGKILLGPFQVEHNALGLKQLTETLKCIDGEIRIVMEHTGMYWRPVALTLKEAGLFVSVVNAILIRKFSDNLLRKVKTDKADSLKIANYALAFWNELEEYSLEEENRQMLKVQSRLYERTIKGSVALRNGLISLVDQVFLGANDFFSGSPKESNGHFKWVDFIRHFWHKDCVTRLSLNGFAEKYRKWCNREGYRFISSDVARIYKAALESTATFPKSDSTKILIRQAADSLNAVYDTLHILRAEMLRLARLLPEFDVVMYMYGVGNITGSQLMAEIGDVRRFHSKSALVAFAGIDAPPFQSGNFEGSNCHISKRGSPHLRRTLFQISSTILKKSNPDSSIYQFMDKKRAEGKHFYVYMVAGAAKFLRIYYARVTGYLDAIEATENNNLTG

SEQ ID NO: 101759 - protein, 321 aa, unidentified
METEQVQVTFEQVIDRGCGIDVHKKVLVATIRGKGIKEETRTYSSFTESIEELRDWLKANEITHVAMESTGVYWKPVFNILEEDFEILLVNASHLKNIPGDKTDKKDSKRIAKLLLAGLLKGSFIPCKSVRELRDLTRYKRKLVGQIASEKNRIHKFLEDANIKLSSVVSDLSGAVSTRIIDAMIGGQEDVEELVKLRHGKMKSTVEELSSALKGNLTDHHRFMLELVKKSIWDKESIIELLDKEIDRLLKENEMVLDAQLLSTIPGVDKDSAASILAEIGNKMEQFPNEQHIASWAGLSPGNNESAGKKKVQESRQATTG

SEQ ID NO: 101760 - protein, 415 aa, unidentified
MDEQTNSSAGLDWAKDEHALCVLEEASGRVLLERRFTHQEQAINELCRELVHTGVERLAIERPEGVLVERLLEAGIVVITIHPNQLKASRPRFRASGYRSKSDSFDAFCLAELARTDHHRFRALVPDSDETKALRALTRAREDLVRTRVALANQLRAELEAFWGGAANLFSEIDSSISLAFLKRYPSLKDASKLAEKRLENFLSKNHYCGRKSAPELLGKLRKAPKGRAGEAEMEARQEAVLALVATLKALVERIKLLEDRIAKAVRAHPDGEIFLSLFVSPNSTLTAASLVAHMGDQRERYPTNEALAAAAGMSPLAIESGKRKVASFRRACDKRLRRAVATLAESTRHHNRWAKDIYLRARGRGCDHAHAIRILGRAWVRVIFRMWQDGVPYDPPLHGGLQRLRSAQRLPQGV

SEQ ID NO: 101761 - protein, 385 aa, unidentified
MQTITTKPATAAEAILAIDLGKYKSVACLYGAADDVRFLSIPTSRDELTRLLAKHRPAVVLIEACLLSSWVHDLCVAQGVKCLVANTASEAWKFKHTKRKTDRDDAKRLAELYVLGQLPTVMVPAPQTRQRRALIEHRQKLVSRRVAVQNRIRAIFVSQGLPAPRGAAAWSKTGLAGMASQARPLAECDVLELWRGRLHLALTELEQVIDLQGQAERKLDDLAKGDANVQRLQTIPGVGPRTGEAVVAFLPEPKRFKSGKQVSSYGGFTPRQYQSSELDRRGRISKRGPATLRKLLVECAWCLLRYNAWARAVYHRLTHGGKARKKQAIVAVARKLLVRCWAMLRDGQSWHDAQTGPKPKLSPSKQRRQAEAQRRRQATQQAAPA

SEQ ID NO: 101762 - protein, 407 aa, unidentified
MYNAVGIDVSKGKSTVAVLQPGGVIVRKPFDVVHSISGLKELTDYIVSLDGDTKAVLECTGRYHEPILRSLSEANIFVSAVNPHLIKDFGNNSIRKVKSDPADAKKIARYTLDNWADLQEYSSMDNTRTQLKTLNAQLDFFTRQKASAKTNLISLLDMTYPGLNDLFSSPARPDGSEKWVDYAASFWHVECVRGSGLKTFTERYKAFCKREGYNFSETRAKTLYENAKELVAVFPKDRSNKNLIEMAINQLRSLTECTIRLKNEMDELASTLPEYSTVMEMNGVGKVLGPQLIAEIGDVSRFTHREAITAYAGVDPGVDQSGKRASKSNRASKCGSARLRKALFLVMSVLLQTKPDDAVYHFLDKKRAEGKPYNVYMTAGANKFLRIYYGKVKAALAAQANSNSDQS

SEQ ID NO: 101763 - protein, 321 aa, unidentified
MNKDTEIYGVDISKDVFDVYSVTFGHKQFKNDERGFTAFLKSLPKHSLVVMEATGYYHYRLAQYLYKQDVLVSVVNPLSVKRFIQMKLAKVKTDKSDAKAICEYGQMNEVPLYTALTDVQSECLQMFRLLDNYLKHRTATKNKLHGEEILDIPSKFVYRSLKRDLKHLNKEITSTESRLLELVKQDYQEQLTLLKSIPGIGVKTVLFLIVITDGFRKFETASQLCSYAGITPTIRQSGSSVRGRSRISKVGNRKLRNLLFLCAFSACKHNKACREIYERITNKGKSKKLALIAVSNKLLKQAFAIAKSGLPYDENYVSKLN

SEQ ID NO: 101764 - protein, 426 aa, unidentified
MDFDVVHLICAGLDVHKKSVVAAVAVTDPVTLEASYSVKSFSTNNSDIVSLRDWLLSQNCHDVCMESTGKYWIPIFNILESHMHVILTHPKYVKAIKGKKTDKRDAKWIANLFRFDIVKASFIPPPDIRAMRELSRYRLKLSYMRSAEKNRYQNCMTISRIRIDCVLTDPFGKTATRIMDYLLSDKPFDEQICRELIHGGVKVGSDAIIESIKGYDILSEQRFKMTHTKSHMDFISCSISELETELFRISRPYDTLIKRIATQPGITELSAVFILSEIGSDMTVFESDKHLASWAGLTPSNNESANKKKSTRCSKAGQYLKPLLIQCALAAVKSKKHPYYAIKYQRIAKRRGKKKAAIAIARMMLISIYHMLLNNEDFHPDDYEAVIHPVKQKPVTFTVENVLQFLREQGADDNTLNLLKQQYNIL

SEQ ID NO: 101765 - protein, 412 aa, unidentified
METQYILAGIDVHKKMLAVVVANAGEIELQFECRRFGTTVSELRHLSAWLQERAVQEVVMESTAQYWRPVWLALEGQCRLHLAQARSNRGPRGRKTDFRDAQRAVSRLISGDLILSYVPEAEQRCWRTLTRTKYQLTRDRVRLQSQLESLLEECQVKLSSVVSDLLGASGQRILRAMAQGETDPVRLAELGDKRLRASDAELRDALSGEPQGRHRQLLSLYLARLDLIESQMASLDKMIAEAMKAHQDAIVRLAELPGLGIDSAQQIIAEIGPQADAFPSAAQLASWVGVCPGRQESAGVSSSDRSAKGNRSMRRLLNQLAHAAVRKEDCQLQIVFRRLSARLGYAKAVWAIAHRLCRLIWKVLHEGISYVEYGPAPTPITLKRRRQRLVTQLKNLGYEVQLTPRLPDSSGA

SEQ ID NO: 101766 - protein, 409 aa, unidentified
MELFVGIDWAEEHHDVCVMDAIGGVQARGRVGNDLSGIAKLHDLIAGSVAGEVDDDDPVVTVGIETDRGLVVRALVAAGYRVLAVNPLAVARYRDRHRVSGAKSDRGDARVLADLVRTDAHQHRPVAADSDLVEAIKLVARSHQSAIWSRRRLANQLRSVLREYYPAAVDAFDELTNGDALEVLSVAPTPTLGRGLSRSKIASALRRGGRQLHIDTRAEQIQQALRVDHLAQPAIVADAYGAIVASLTAVITAHNRQIAQLEQVLDEHFAQHPDAAILRSLPGLGVVTGARVLGEFGDDPDRYDSAKARRNYAGTSPLTVASGTRTIVRARHIRNRRLADALHWWAFNAIRRSPGARALYDRRRAAGDTHPGALRVVANRLVAILHGCLRTHTPYNEHTAWAHRHDLAA

SEQ ID NO: 101767 - protein, 421 aa, unidentified
MLKIVYPICCGIDVHKKFVIATIATTNDKNVTSYQTRRFNTFKNDLIALNNWLVENKCKDVCMESTGKYWIPVFNVLEDFCTITLANPRYVKNIPGKKTDKRDSIWLADLHKHALVKGSFIPSKPIRELRDLIRYKSKLTNVSSSEKNRVQNSLTVSNIMLANVVSDTFGKSASSIIKHMIENPDIIDFDYSSMLHKSLKKKSDEIEQAVAGKFSKEQAAKLSVCYEHYNSVEKCIEILEATILELSLPFKEQIDIIATLPGIKQASATAILSEIGTDMSVFTSDKHLCSWAGLTPQSNESAGKKKSVRISRAGVYIKPLLVQCANAAVKDKSCTVFKNRYETIKKRRGHKRAIIATARMILTCIYHMLSKNEPFNPLLYDDNAKSKKRNQQDSLSIEQAIAFLQANGYTVNISDLVAITN

SEQ ID NO: 101768 - protein, 344 aa, unidentified
MSEVIIIGLDIAKHVFHAHGADERGRAIFSKRISRGKLLDFFAAQPSCTVALEACGGAHHWARQLAELGHEVRLIPPAYVKPFVKRQKNDAIDAEAICEAAQRPSMRFVAVKSEQQQAAGLVFRTRDLLVRQRTQLINAIRGHLTEYGWVAPKGPSHVAMLTDLIEEEEMASSLPKAAHAMFRLMLDLLADLNGKVADLDQEIARRAREDEVSRRLMTVPGIGPISATAIAALAPPAETFAKGRDFAAWLGLTPLQRSTGGKQKLGATSKMGERTLRRLLIIGSSAVVQQASKRGAPRGSWLEQMLARKPRMLVTVALANKMARIVWALLVKCENYRAPVAAKA

SEQ ID NO: 101769 - protein, 269 aa, unidentified
MADTSHGSVHTLASAGSPALSTPQAPIPEVFIGIDVAKASLAVDAYPLRHPLSVGNDAAGIKALIDFLLPLAPQRIVMEATGGYERCLAAELLSAGLAVVVVNPRQVRDFARGIGQYAKSDPIDAQVLAHFAAVVKPKPRTAQTMPDEILAELVGRRGQLILQRDQERNHLEHVRFKKVRASIEKVLKLLEAQIDELDALIADRIDSDDGLKENNAILQSVPGVGPQTSAMLLALLPELGKLNRRQIAKLVGVAPFDNESGKFKGRRSI

SEQ ID NO: 101770 - protein, 339 aa, unidentified
MAIVGGLDLHRKQVTFDVLDTATGVCKRGRVAPADRESFRRWLAGFEGGSVDLAVEGCTGWRFVVEECQAAGVHAHLAEPADVAGLKGRRQHAKTDRLDARHLRELLEDGKLPECWIPPRQVLEMRAKVRLYKDLLEERGGWQQRIHATLFHLGAPAQPDLLGPDPDRLARLEALSPATRQATAVALRIIDALVGELTALRAELVAFGRRQPGCRELQHEYGIGALTAVVIWSELGDARRFRNSRNAVRHTGLDISVYSSDGKRSRGHLTRQGPPLLRWALYEAARCAARQTSPDHAYYERVARRVGKQRAALSVARKLARRCHHRLRALGDDALAPVA

SEQ ID NO: 101771 - protein, 351 aa, unidentified
MSRKSSVRTVTTIGIDMGKTTLHMVGLDSCGAIVLREKVSRGRIASRLANLPPCLIGIEAGMATHYVARELAALGHDVKQVPPTYAKPFRQGHKNDFRDALAVGEGGQRPTTGFVPPKSNEQLDLQALHRVRSRLVSQRTAVINQIRGFLLERGIIVRQGLRFLRQLLPDILAKRTDVLSPRMVRIVSDLAGDWRQLDDRIETVTDEIETLAKADDSCRRVMTVPGIGPIISSAMVAAIGNGSAFSRGRDYSAWLGLVPKQMSTGDRTILGRISKRGNSYLRMLFIQAARVILLRPANWPKHGFGAWLVRAIQRLHPNVLAAALANKLARIAWTVLAQERSYEARVTKAEA

SEQ ID NO: 101772 - protein, 447 aa, unidentified
MKKKSGFPILYPNAAGIDIASREHYIAVNPTVDEHPIRSFGCFTEDLYAIANWLIECKVDTVAMEATGIYWVSLYLILEEAGLNVVLVNAKHVKNVSGKKSDVKDAEWIRQLHSCGLLSSSFQPDIFTRTLRTFMRHRKNLTEMAATHIRMMQKAMEQMNIKLQNVIADITGKSGQRIITAILEGERRPEVLIQLLDGRIKASREIVRKSLQGVWKEENLFELKQSFELYHIYREKLRECDAQIETHLATKTPEVKKEVSQPKQVRKTKAKSNKNNLNFDATEMLQKIVGTDLTEIFGFTDTSAAELISEVGCDVNKWPTPKHFTAWLNLAPNNKKSGGKVISSKTQKKRNRAGQIFKMAAYSIQRSKNWLAMFYHRIKARCGPSKAITATARKIAVIFYKMIKEKTRFNPLTTELYMQTYKEEQLKKLKKQVAKLGLLLVPNELVT

SEQ ID NO: 101773 - protein, 347 aa, unidentified
MDVHQATISAAVRDSSGNLVLEATLETKAETILEFVHGLRGSLRVSFEEGTCAAWLHDLLQPHVSEVLVCDPRKNALLRVGNKNDREDARKLAELLFLHKLHPVYHGEAGIRTLKELARSYLTITRDLTRVMNRLKAIYRGWGIACAGQQVYAPRYRAEWLAKIREAGVHRRAEIYYQQFDVLAALRQQARRELLAEARKHPALRLLRQIPAIGPIRAALLIALMQTPHRFRTKRQLWAYCGLALRTYDRGEYRFVGGQLKRSKKAVTIRGLNKNHNHDLKNIFKGAARRAAATAGPLQNFYQARLASGMKPPMARLTLARKIAAITLLVWKKGVCFDAKQLKQQAA

SEQ ID NO: 101774 - protein, 343 aa, unidentified
MTKTIMIGVDLAKNVIQLHAARMTGEVEYRKQLSREKFRRFMAEQPPAVVVMEACGSANYWARELSRVGHTVKLIAPHYVRPFVKRQKNDAADAEAIVIAAQRPEMRFVAAKSEDQQGRAMLFRTRTRLVHQRTELINMLRAFLYEFGHAVPQGVQQCQRIEAIVKEANSDLPEIVRSECLEILDQITGMTARIKRSDERIRALAAQTDTARRLQTMPGVGPMTALAVDAFAPPMKSFKSGRDFAAWLGLVPRQHSSGGKARHGRISKAGQADIRRLLIIGAMSRLNWMGRKSIIAGSWLANLSARKPRMLVAIALANKMARAIWAMLTRQENFRDPMAATVA

SEQ ID NO: 101775 - protein, 341 aa, unidentified
MKNLFIGVDFSKEKVDVAILFADGLVETAARVFNEFKTTVSGYRQLVKWVEQNSCGIDSSLWLFCGENTGDYSKGLCNFLYGKGYDMWLENAKSIKDASGLRRLKSDRADASMIAEYAMRNYDKAVMYEPLSESLTQLRELFLYRQMIVRHRCSFQVRRGEKRLTMEKSPVKTMISQSGRHIVSELNKEIEKIDKRIADLIKSDEELTKVFTIVTSVPGIGTQNAVCLMVYTDNFRRFNYDSRKIACYYGLAPFGKDSGTSVHSDPHVHYMANRQIKAMLTQAALAAVNFNPIMARYYMRLVERGKKKQVALNNVKNKLVHLVTAMVRNRQTFTPEYKISA

SEQ ID NO: 101776 - protein, 343 aa, unidentified
MFAESVDVVIGVDTHRDSHALALVDAGLGALIAEERVDANREGYRRALKLASDCGRRRLWAVEGTGSYGAGLARFLQQQGERVLELERPVRSGSRGRAKSDALDALRAARAALTGEPLAELRCGGKREALRVLLVSREASVAVRRSGLNQLRALVLTAPAELRERLQGLPKRALVKRCVALRPRSSQPPQLRGTLLALRSCGRQVELASREAALLERELAVLVEQLSPQLLSHYGVGPITAAQLLVSWSHPGRLRSEAAFARLAGAAPIPCSSGKTIRHRLDRGGDRQLNRALHTIVLARRRGDQRTIAYIHRRTSDGKTEREAIRSLKRYTARSLYRLLEHA

SEQ ID NO: 101777 - protein, 499 aa, unidentified
MPSTKVAAAPILGAMKRKNIFRNESQKLDAAFIEAGLPERVLLVPLDFAKITHYACFCDGRGTYVRKAFTVKNTQEGIDYLVDQIERTRVARSIKSKRHVIIGGEDSASYTRNFMDRLYELGYLTVRLDSKEVHRQAESVDSSTDKTAVRAIAKTMLNRDARQTGGSDLYAQLRGLTRQRRRIVHLSTAVKNRIHTHADCLFPGFLAKDSAVAAFSQASLELMSHNFSAAILARKSEKTLTRMLSRQGVRGAIEVAAKLKEQARNAICADDATVRLSAQLIESELSLFKTLQSNLAGLDKEAARILLRLPEAFAVSIKGIGITLASSIFAEIGSLSQVQRCDQINAFAGIAPKVKQTGGPESPARIGGKRRNFNRILKDYTLQAGNHLYLHGPEELLHDAARRKLAGKAVDTAMARRFLRIARALAKGHCIYLPSHLRTGQTGTEAEAEARAQYIVKIWPDLLLKWKRIGLHEEAFAPETPLGNWRIIVQEIYDIKLPL

SEQ ID NO: 101778 - protein, 328 aa, unidentified
MFPVGIDVSKNTLDLCMLYDGIKGRIKTRNIQNNRHSVENILRWLRLQHCSPEDVHVVMEATGVYHERLATELHDAGFRVSLANPHRSREFARGMGIMTKTDKVDAYMLACYAFLKKPHRWEPPAPEIRYLGALLRRRDVLLGDALREENRLEKYLSTDTPADIISSCRRMAQLLREEVSNIERQIKAHIKASPALRRDYTLLTSIKSVGPQLGMHMLVVLRSHNFVSAEQAAAFLGVVPIEKRSGTSVRRRPRMSKIGPPQLRAKLYMSALCGKIYNKRMRNIYDEMCLRGKPKMVAIGALMRKLVHWCYGVLKTGTVFNDEDGFVE

SEQ ID NO: 101779 - protein, 377 aa, unidentified
MSKLRFVGLDVHADTIAVAIAEFGGEVRSLGIIPNRLESIRKMVGKLAPIGTLKCCYEAGPTGYVLYWQLTQLGVACEVIAPSLIPTKAGDRVKTDRRDAEKLARCYRAGELTPVWVPDAAHEALRDLVRAREAAKKDQLRHRHRLGKFLLRHGKRPSEAGKAWTQKYMNWIRIHVRFDQPALDATLSHYLEEVDHVAERIAKLEQVIDEAVKQAPAEGRAVIEALQALRGVALTTAATAVCELGSLARFESPRQLMGYSGLVPREYSSGNRVQRGAISKTGNAHLRRVLMEAAWTYRHRPNLQGRLLRRQKSLALSDEVKRISWKAQQRLYKRFTALTARGKNHNQAVTAVARELLGFMWAIAVHTEAQHKQAKAA

SEQ ID NO: 101780 - protein, 342 aa, unidentified
MTITTVGIDLAKAKNVFAVHCVDQNGKTVLVKPKVSRAALPELIASLPPCVIGMEACSGAHYWARVFRQYGHEPRLMAAKFVSPYRMAGKSGKNDAADAQAICEAVRRPHIRFVPVKDESQQAMQCLHRTRQGFIEEKTATYNRLRGLISEFGVIAPQSTDALRHIVSEQKNSLPLQVQQCVDDLLEHINRIEDNIAEYDRILSRMAKTDHRSQRLMELKGIGPTTACALVASIGNAHDFKNGRQLAAWLGLTPSQYSSGGKSKLGRITKAGDSYLRTLLVQGARSVLIGAEKRTDSFSRWVCTLVERRGYWRAVVAIAAKNARLCWASLHYGDDFRLYSAS

SEQ ID NO: 101781 - protein, 411 aa, unidentified
MDKIYDSCCGIDVHKKLIVACLRKGNRQEVREFGATTRELLELADWLKTSDCKMVAMESTASYWKPLYNILESSDLNAMVVNARHMKAVPGRKTDVKDAEWIADLLQHGLLQPSYIPDKDQRELRELVRYRKSLVGERTRELNRLQKMLEGANIKLSGTVSDINGKSARSILEYLLTGECIDGAKYDEMYEQKVIAHNLKATKEQIIDDLNGVMTPLQRRMMKELLSHLDELNTHIKNLDDGIDNFMKPEEKQASQAIQDVTGIGNTSAQAIISVIGTDMERFSTDRHISSWAGLCPGDNESAKKRKSGKTRKGNSLLRTTLITCAHAAVKNKKSYFYAQFMRISAHRGKKRAYVAVAHSMLIAIYHILKDGVIFKDLGADYYNQFNKERKINAYLKKLKALGWEAPVVAA

SEQ ID NO: 101782 - protein, 427 aa, unidentified
MSYRIAAVDVHKKMLAVVVTDVAEAGEYQFERRKFGATPGELHLLAQWLVQQAVEEVVMESTAQYWKPVWGALERYWKPARQQREGASKFCGTLHLCQAKSNHGPRGRKNDFADGERMIKRLVAQELVLSFVPDPEQRLWRTVTRRKHQLTRAKVGFKNQLESLLEQAHIKLSSFVSDLLGVSARRMLKALTEGETDPAALAALADYRLQATPEQLSDALGACAQLNGVYRRLLKMTLAELQLIETHIEQLEREALELLQEHQDVVRRVAEVPGFGVDSSLQMIAEVGPKAAMFRSEKALSSWVGVCPGNEESAGESHSTRSPKGNRQMRRLLNQAAQSAVKVKGSIFEVTFNRLLPRLGYKQAIWAIAHRLCRLLWLMLHEGVAYEERGPAVSAKSKRTRAARMVKELRKLGYRVEGGPLAAVTLA

SEQ ID NO: 101783 - protein, 392 aa, unidentified
MIIVAVDVAKDKHDCFITNTDGEVLFDSFVIRNDQNGFEDLFEKIRSVTDSLQNVKVGLEATGHYHLNLLGYLLDKGLPTCLINPLQTSLFRKSLSFRKTKTDPVDARAIARLLMSDRTLQPYSLTSYQNEELKSLTRYRADKVRERAKLKSSFSRLVVILFPELEKLVPTLHMVTVYDLLHEFPGASHVASAHLTRLSHLILKASKGRYEKEEAVRIREAARHSIGSIFPAKSLELRHTIDHIRFLDDEINEIEAQIFSLLDKDPPKMLDIPGMGPRMAAVIVAEVGDFKRFSSPDKLLAYAGLSPTTCQSGQLTSTYAKMEKRGSRYLRYALFNAAKYICIWDPTFRAYFAKKRAEGKHYNVAISHAAKKLVRLIYHLETTGETYISSAS

SEQ ID NO: 101784 - protein, 343 aa, unidentified
MQTVTTIGFDIAKSVFQVHGVDAAGQVVVRRQLKRRQVMAFFEKLPPCLVGIEACASSHYWSRQLQALGHGVRLMPPAYVRPYVKRQKNDRADAEAICEAVTRANMRFVPTKTPEQQSGLMLHRARHLFIRQQTSVINAIRAHLAEFGITAPVGRRGVEDLLRVVADPSDKRVPEVVRACLAALSNQLLNLKKEILNFDRMIMAWHRSNQTSKRLNCIPGVGPLLATALVASVADPKTFRSGRNFSAWIGLVPKQHSSGGREKLSSISKQGDRYLRSLFVAGAFAVIRYAKIHGTKHRPWLTALLTRRPTKVAAIALANKLARMAWAMMATGARYNYPASLKV

SEQ ID NO: 101785 - protein, 371 aa, unidentified
MTQLHALIGRFLPEDADDAEVVIGIETDRGPWVTALVAAGYVVFPVNPLQASRYRERHGVSGAKSDGGDAHMLADMVRTDSHQLRPAAGDSPEGQGIKVVARAHKTMIWDRTRATQRLRSQLREYFPAALAAFEDLDAPDVLELLGKAPDPDRARRLTRAQVAAALKRARRRDIAGKTDAILAALRGEHLGQPAALTAAYAATARSLIAVITTLNAQVKILEDQVRDHFGRHPDAEIYLSQPGIGAILGARVPGEFGDDPCRYVSAKARKNYGGTSPITRASGKKKVVAARFIHTDRLIDALMFWAFASLNASPAARAFYDGQRAKGLDHNDALRRLANRLVGILHGCLKTRTPYDETTAWSHREKLKPAA

SEQ ID NO: 101786 - protein, 407 aa, unidentified
MDVVHPKCAGLDVHQQTVVACARVGSGKTVTHAVRTFGSTTPELLALSDWLATHGCTHVAMESTGVYWKPVWHVLDGHFELVLANAMHIRNIPGRKSDVNDATWIADLLAHGLIRSSFVPPEPIQELRDLTRTRKQLVREIAQHILRIQKTLETANIKLTAVLADITGVSGRAILQALVAGERDPERLATLANERVKASRADLVAALHGRVTDHHRFMLHLHLTQIAALEAAVREVEARLGDALAPFRAALDRLITMPGVSETVARVIVAEIGFNMTRFPTAGHLVSWAGLCPRLHESAGKRLSNRTRSSNPWLKTTLVQAAWAATRKKDGYFRAQFLRLKSRRGPKKAIIAVTASMLTAAYHMLKHGVDYRDLGADHFDRRDKAKLAKRLIARLQDLGITVEVRAA

SEQ ID NO: 101787 - protein, 353 aa, unidentified
MNNSMGTRKSILRRKNLPTRYLGVDLHRDSFLVCVREQGEAQLQRWSLDQVEEFARTLRPQDELAVEATGNTRWFCQAVADRVRRVVVVNPHQFRVISESVKKTDRHDAALLAEYLEEDLLPEVRRKSAQESELAQLARARDQLVKMRTMLKNQVHGLLSSYGVVLEKKRLASRKQRTALHRRPLPPLADVQRRVLLGQIEALEASIAELERALAEAAPALPGYLNLLSIKGIGSLSAAILLSAIGPIQDFPDPGKLTAYFGLAPRVEQSNQTEHHGRITRRGNQLARTTLVQCALVAKRYSPFLRRFYERIQRRRGTGKAIVATARKLLTIVYYTLKNNWVFSDFAHFALAH

SEQ ID NO: 101788 - protein, 443 aa, unidentified
MSRKKRTHLRGERGQAFADKIRGIPLEQILCVSLDIHKYFHVVIIHNALGEIVTPTFEIDIFQAGFDRLCQAIDEAVARTNAQVVLIGMEPSSHYFENLARHLRERPHPVTLINSYAVKENRNQQMMRYEKDDEIDTAAIGDLLRRGEGTPFQPAAGVYLQLQHLDRVRISKVKMRTMLQNQIIGHLDRIFPGLIIMGDEAKARYTPLFATDFWACKTLQHLIRVCPGPRRLAAMSPQDLVDAFHAQNYSLGRLTAAKIIAYAKQVLLPDADLIAIRCELLPHDLALLEDVERHIAQLEERLVALLAQTPYQVLTKFKGLSDVQVVSLAAAIGDPACYTYARQVFRRSGLVPGRNDSGTRQRKGKGKKVVKVGDVYLRRALLNALATLILHQPVLQQYYNALKQSKPAGVARVATARRTVGILWATLRDQHSTTLILKKGAAM

SEQ ID NO: 101789 - protein, 426 aa, unidentified
MRSVGLDIHKKVIQAVILDDQGHLISRDRFPCDRDALLSFARSRLDKDTRMAMEATTNTWAIVDLLEPFVAEVVVSNPMRTKAIASAKVKTDKVDAMILAQLLRCDFLPRVWQPGPPLRQLRSLTSRRASLTHHQTAIKNRIHSVLHQRLMAGPGRLFDAKGLDWLRKVELDLPGRAAIDSDLRLLEAHEAELEALDKDLAQRGCQDQRVKLLMTLPGVGTAVAQTLLAALGDPSRFPDGDHAASYVGLVPSTRQSADKCYHGPITKHGCAHARWVMVEAAQHLDDHPGPLGGFFRRIAAKKGRNKAVVATARKLVVIAWHMLTANEPYRYAKPVSTRIKLAHLRISGGGDRRRGGVPPGSMKSQPTGLGSTRLIPSLAEVYASEGLPLCTMAPGEQRTIKQAGVEGFMETIQASRRVPKKNPKAS

SEQ ID NO: 101790 - protein, 356 aa, unidentified
MTSTKYVGMDVHKESISIAVMNSAGKIVMECVIETKASVLLQFFNGLRGDVRVTFEEGTWAAWLYDLLKPRVSEVVVCNPRKNALLKDGSKSDRIDARKLAELLRGNHLKPVYHGEHGLRTLKELGRSYLTITKDVTRVMNRLKALYRGWGIACAGHEVYVPRHRSEWLGKISEAGVRRRAEHCYQQLDVLRLLRQQVRRDLLLESRKHPAWRLLGLIPGIGPIRAALLIALIQTPHRFRTKRQLWTYCGLGLETHDSAQYRVVEGQLQRSKKSVTLRGLNQDHNRDLKDIFKGAATKVSSSNSGPFHDFYEHLLAQGRKPTMARLTLARKIATITLIVWKKEVRFDASYLKSQAA

SEQ ID NO: 101791 - protein, 411 aa, unidentified
MRIIGLDIHRAFAEAVAWQEGKLKRIGRIDMRRDRLTAFAATLLSTDVVMVEATGNAAAVAAVISPHVKRVVIANPMQVRVIAHAKIKTDTIDAGVLAQLYASGFLPEVWIADEATQALRRQVTRRNQVVRQRSRLKNIIQSILHAHLIPACPAADLCGPKGRAWLSEQILPADERSAIERHLREFDRLADDLRVIERDLARSALADESVARLMTIPGIDMVVALALAAAIGDVQRFEAPEKLVSYLGLNPSVRQSGPGPAHHGRITKQGRGHARGMLVEAAWAAARAPGPLRAFFLRVSSRRGQHVAAVATARKLAVLIWHLLRKGESYLWARPALHAKKMRELELKAGYPAARGQKGAAHAYNLKSHHDQERRWVEQAEAAYTRFVAGWNPRGPRSGKVRTGALKEERR

SEQ ID NO: 101792 - protein, 436 aa, unidentified
MTLINFVAANQKYYAFNLLSVFIMVFWSVQYLLQHLLVQTQLSDQLLQPLILILQLPQTPQFRHARPGKFFLPVNGMDYLLPLRLTVRNVLTRRITMNIVFLGIDLAKNVFQLCGLNQAGKPVYTKRTGRKELLQTLANIPACLIGIEASTGAFYWQREFEKLGHKVKVISPQYVKPFVRGQKNDGNDAQAIAVALMQPTMQFVPPKSPEQQDIQALHRARQRIVNHRTATVCQIRGLLLDRGIPIGSAVSRARRAIPLILEDAENGLSSRMRKTIAELYDLFNDLERRIHFFDKEIETVFRQSEACQRIAKVKGIGPKTATAVVAAIGKGTEFKNGRHFAAWLGLVPRQHSSGDRQVLMNMTKKGDKHLRTLFIHGARAVVRVATNNNDGHMNQWVNQLKERRGFNKTTVAVANKNARIIWSMLRNDTGYQVVCN

SEQ ID NO: 101793 - protein, 365 aa, unidentified
MEWPAPPSGVVGSPANQEEEGMNISVLGIDLGKNVCSVVGLDASGAVVMRRKMRRDTLIGLAEKLPACVVGMEACCGSHHVGRVFASHGHDVRLMSPEYVRPYVKAQKNDDRDAEGIAEATTRPTMRFVELKSQDQLDMQTLHRSRDRLVGERTALINQLRAILLERGLVAPQGKWKLKEFLNVLMDKQGGASLSPRMILLVEDARAQWAELDRRIAAFDAEFVRWAKENEEARRLTTIPGIGAIVASALVAAVGRAESFNHGRDLAAWLGLVPRQFTTGGKPKLLGISKRGNKYLRKQLIHGARAALPHIAERDTPLGRWAKELMRRAHLNVAVVALANKLARIAWAVLQRRKAFDANAVSVAA

SEQ ID NO: 101794 - protein, 349 aa, unidentified
MVADELDYVVGVDTHRDEHTLALVEATTGAVLAQQTVAASAGGYAQALRFAQQQAEGVRLWAVEGAGHYGAGLARYLSERGETVLEAGRSSRSERRLRGKDDQLDAVRAARAALASEPLARPRSGERREALRLLLVARRSAVEVRREALVQLRSVIVTAPDRLREELRGLPVRRLLERCSNLRRSNSARADQRATRLVLRSLARRIEAATLEAAELEGEILAQVRALAPQLLEEPGVGPIVAAQLLVAWSHPGRVRSEAAFARLAGVAPVPASSGQTRRQRLSRGGDRQLNRALHTVILHRRQHHPQTRDYIARRIAEGKSRREATRLLKRYLARHLYRLLQNQEPLLA

SEQ ID NO: 101795 - protein, 468 aa, unidentified
MRTKSRRTRGIEEAHPFAGMSQVNPNAAGVDIGAVEIVACVAGDETTQIVKAFGNYTVDLQALGKWLKEHQVKTVAMESTGVYWIPLFEELERQGLECLLVSSRSLRRVPGKKSDTLCEDAQWIQTLHSYGLLESSFRPQGDLVALRTLLRHRGQLVDHRSPHVQHMQKALLQMNVQLSQALSDVTGETGMRIIRAIAEGEREPHTLAAYRDRNCKKSEEEIAQALTGTWREEYLFIVKQSLELYDYYTQQIEACDVEIERTYALTRPDWEDGELKPLSKRKRNSHSKNEPPNKEALRAHLKRISGVDLSVVDGFGVAVAQMVITECGTDTPALACGASVSKFPTEKHFCSWLGLAPKHEISGGRVLKNKTLKTKNRAGQAFRMAAQSVKKSNTVFGSFYRRLRTRLDKAQATVATAHMIARVVYRMLKYQAEYESINIEEYEVKYKEQQIKYMKKKAAKLGYQLVPA

SEQ ID NO: 101796 - protein, 409 aa, unidentified
MDLLHPLCAGLDVHKDTVVACLRRVVEGRVKRELRTFGTTTRELLELSDWLASQGCRHVAMEATGVYWKPVWHILSDGDVELVLANARHVKNVPGRKSDVSDAAWQSDLLAHGLIRASFVPDGATQELRGLLRTRKQLVQERTRHIQRLQKTLEDANIKLDSTISDLLGRSGRAMIEALIAGETDPDKLAALADGRIKASQARLREALRGRVTKQHRFLLRLHLRQIDGLSEGIADIDREVETRIEPFRKAVELLSSIPGVSTLSAQVIIAEIGLDMSRFPTVGHLLSWAGLCPKSDESAGKRRSTRMRKGAPWLKTNLIQCAWAAKNAKRTYLQAQFYRVRARRGDKKAAGAVAASILTAAYHMLQRGVFYQDLGPEHFERSKAAQAKRLVKRLKNLGYAAALTPIAA

SEQ ID NO: 101797 - protein, 464 aa, unidentified
MKVAKVNQQTRRVKKTRAPSFPIINPNAAGIDIGSAEHWVAVPEDRDEQPVRKFACFTQDLHAMAAWLKQCEVKTVVMESTGVYWIPVFQILETHGFEVKLVNAKQAKNVPGRKTDVLDCQWLQRLHTYGLLSGSFRPDNAICVLRSYWRHRVTLVSYVSSHVQHMQKALTQMNVQLHKVISDITGVTGMSIMRAILNGERNPLKLAQMKNNRIRSTTETIAKALGGDYRQEHLFSLKQAVELYDFYQQQIQACDREVQAYLSQLDGINIASNPIPPSRRRIRTHKGNQPDFDLRTHLYRISGVDFTQIDGLDVLNVQTILSEVGLNPDAFPTVKNFTSWLAICPNNRITGGRIKSRSTRKAVNRAAEAFRMAAYTLSHSSSALGGFCRRMHARLGAPKAITATAHKIARIFYQMWKYRTPYQDLGADYYEQRYKQRLLSNMKKTAKQIGYFIELTPMPQSAVS

SEQ ID NO: 101798 - protein, 403 aa, unidentified
MNNKNFNVFVGIDISKDSFSACALTNPQNILFEEKFPMSHSGFKDFSKRLSRFPKNSILIAKESSGCYYINLFAYLSQRHFHCIVLNPLLVNKFWTATLRKTKTDRTDAKAIAIMLYHVHKQLPDKSFLPKDFRDIARERERITQQIATVKNDIEKNLVVLFPELERIVNIYNSSILKLLSVFPSAYAIKKASIEQINNALCSETAGRPVNVSAQQIKSLAKKSIAQYWPVRELILVQKIKELFFLEEQLEFFTNMLREFCEEASLCQDIEILKSIKGVGDITALHFLAEVGDIERFDSPKKLIAYCGIDPTVYESGRFKGKSKISKRGNRHLRRIVWLMSIGVVMHNEYFREYYNKKRAEGVVYKKAILAVAHKLLRTVWAMLTKKQPFFVNHALSPCFLRR

SEQ ID NO: 101799 - protein, 345 aa, unidentified
MHIASIGIDLGKTTFHLVALGERSKVLVRKKFSRARLLAYTTNLPVSLIGLEACSGAHFLGAALREQGHEVRLIPAQFVKPYRKSNKNDFLDAEAIAEAVTKQNMRFVPIKTQEQLDVQAMHRVRDRLVQRRTALINEIRGFLLERGITFPVQPIHLRKNLPTVVEDAEQNLTPRLRWLLDRLWQEWKQTEIDIETVTDEIERISNEDERCHRLRQIPGFGPLISTAMVAAIGNGAAFRRGRDLAAWLGVVPRQYSTGGKQKLFGMSKRGNIYLRRMLIHGARAVLFRVKYDTAGLGQWVHRLSQRAPRNKVVVAIANKLARIAWAVLSSGQNYRHQPLQQRAAA

SEQ ID NO: 101800 - protein, 364 aa, unidentified
MYKVKKNRKGMNTAVVGIDVGEEKSEACYLSPVGDTLDQFNFRMTDTGWSEFASKIPKETRIAFEASGLAYNVTKKLAELGYSDVTVAHPKELVWITKSKRKNDRVDSIKIAKLHLVSMIPEAHLLSDEDRISRDLLIQRVRLGQSIANTKNSITGYLKREGLYNSLPENSDNFSEKRRNAIKSICFGNPKDLVISSIMDRLELYESQKIKFESEIKSRVKTNEDVRILMSIPGVDYYLAALISSYIGDVHRFPNADKLAVFFGIVPATKDSSSIKRRGHMSKEGSTEARWALSIAVDTVMLRNKAIKDYYDSVKERKQSGKLAHVSTMRKLTRMIYKMLSERRMWKYDNPGLTEDKLSKLDDE

SEQ ID NO: 101801 - protein, 391 aa, unidentified
MTMYFVGIDISKYKHDCCIISAANQKVVSKFTFKNDKSGFEQLNLILNSLSTPEDIKIGFESTAHYALNLELFLENANHSFMEINPVLIKDFKKSQTLRRTKTDSIDCELIARWLMTVEYKPHSKGFYHAYSLKSLTRLRDRLVRQRSFYLVKITNVLDHTFPEFKPFFHERLSKTALYLLENYGSAEKIARMNSASYEKLRSISRGKFSPQQFIRLKELAANTVGVNNSIFDVELNSLLTLYKSLVDEIKTLESEINRLVDEVHPHYMSIPGIGPISAAIIYAEYGDISNFSSPNQMLAFAGIEPSVHESGTEAYNGKMVKHGSSQLRYVLINCCLPLIRFDVTFATYYARKRPENKPHRVAITHVAKKLVRVIYALESQDIDFDPKKLR

SEQ ID NO: 101802 - protein, 353 aa, unidentified
MKRSSKYVALDVHQATAAATVRERSGRVIHRAILPTEAVALVEFFRGMRGSVHVVFEEGTQAQWLHDLLVPVVDQVVVCGRRGERRGNKSDRVDADRLSQRLLSGELRAVYHGSRDRLTLQELSRAYTNLVEDSTRTMLRLKALYRARAIGASGRSIYNPEHQQEWLDRLPDRGARLRAEALYAQLVVAQELRPRAKVAMMAEARRDPAWNTLCSIPFYGPVRVALILATMKSPWRFRSKRNLWAYAGLAVVTESSSDHEFVAGRAVRRRRRPLTRGLNRNHNRILKNVFKAAAASSLAQPGSFRDLYDGMIARGMRPEMARLTLARKFAALTLRLWKKGERYDPTKLTVRPD

SEQ ID NO: 101803 - protein, 347 aa, unidentified
MNLYNNMHPYYCGIDLHARLLYVCIIDQDGNTCVHKEISADPNKLQQLLEPYIGNIVVGVECMHCWYWVADFCENIGVDFILGHALYMKAIHGGKAKNDRIDSFKIASLIRGGNFPLAYVYPKEMRATRDLLRRRMKIVRHGADLKAHVVNTTSQYNLPPNKINLKNVAAREQLKNTFPEISVQKNIDLDMVILDCYAEQLSKVEWFIETQARQHKPIHLHLLKSISGIGRILSLTIIYEIGNIDRFDSVQNFASYARLVKCKAESASKSYGTQGNKIGNAHLKWAFSEAAVLYLRGNDKAKNYLTQLQKRMSKAKALSALAHKLGRCVYFMLKNETVFNEKQFLKS

SEQ ID NO: 101804 - protein, 412 aa, unidentified
MKVVHKVCCGIDVHAKMLVACLLLENSEKEIRSFSTMTDDLLRLRDWLLAANCTHVAIESTGVYWKPVFNILEDRLELILINPEHARALRGRKTDVKDAEWLADLLRHGLLRPSFIPPLEIRELRELTRYRESLVREQSSVANRIQKVIESGNIKLGQVASDALGASGRVMLWALARGETDPVKLAALAKRQLKEKIPQLRRALQGRLTVNQRFVLGELLQRWEELEAADRRVTQEIDRYLQERPKLARARVILDSIVGVGPRAAEVITAEIGIQMKPVFANDAHLASWAGICPGNKASGGKRLSGRTRKGNTYLRAVLVQAAWGATLKKNCYLSSQYRRLVKRLGAKKALVAVAHSLLVIIYHVLDRDQTYTELGGDYFDRQHVEQQREYFIRRLQMLGLTVNVEDLREVA

SEQ ID NO: 101805 - protein, 457 aa, unidentified
MSRKGQRTKGLEKTHPFQEMSCVNPNAAGVDIGAVEIVACVSGGDANQLVRAFGNYTVDLQALGGWLKSYGIKTVAMESTGVYWIPLFEELEREGFECLLISSRSLRRVAGRKSDITDAQWIQTLHSYGLLESSFRPQAELIALRTLLRHRAQLIEHRAPHIQHMQKSLLQMNIQLSQAVSDITGVSGLRIITAMLNGERSPEKLADLREPGCKKSAEEIGKALTGTWREEHLFVLKQSLEMYAFYSEQLAACDEEIEKTYSGLRMENDPGELQPFSRRKRHSHSKNKPANAEEIRAHLKRIIGVDLSVVDGFGVSLAQTVIAEIGTDMSKFPSEKHFCSWLGLAPKHEISGGKILKNKTLKTKNRAGQAFRMAAHSVKQADCVFGVMYRRMRARLGPAQATVATAHAIARVVYRMLKYKIEYETISIEEYEKKYQEQQLKYMQKKAAKLGYQLTPA

SEQ ID NO: 101806 - protein, 481 aa, unidentified
MKKPNKARRSPIPARGEGPIRPAASLPVVHPHAAGIDVGASELYVCVPEDAVSPGESPVRKFGVYTGELDQLVEWLQSCGVKTVAMESTGVYWIPPYQKLEVGGLEVVLANARHLRQVPGRKTDVKDCQWLQRLHSYGMLQGSFRPTEEYCRLRSLMRHRENLVDGCVQQVQYMQKALDQMNVRLHQVVSDLNGETGLRILDAILAGERDPKKLTSLRDERIKRSTPEEMEAALHGDWREEQLFILQQARETYRFLEAQLSQCDAQIEKVLQQIVVVAARDPALESPPNPTAAPTPRKKKQRRPRKTGHGLKRDLRGELQRICGVDLTQVIGLNVLSVLIIISEIGVNMSRWRSAKAFCSWLGLNPGNKISGGRVLSSRTPHVVNRVSLLLRNLATAVGRSETWLGIFHRRMKARLGPAGANTATARKLACLIYHLLKYQEPYIDVDTLIYAEKIQRIRLNKLRKTAQELGFELLPIKEAA

SEQ ID NO: 101807 - protein, 345 aa, unidentified
MSSIKRLGIDLGKSNFHLVGLDATESTVYRKKLSCPKLIEFITLLEPCTIAFEACGGSHWLARKCIQLGHRVKSIPPQYVKPYVKGNKNDFIDAAAIAEASTRPDMRFVPTKSESAQSIAACHRIREGFVGERTACMSRIGALLLEFGLSFPTGHKTMKELFFWLGKQKGSALPEMFLLELQVAHDHYLYLNERIEQQDRKIKQWVKENDLCQLLKTVPGIGDMTASQLVMEVGNGAEFKNGRHMAAWLGLVPRQYSTGGKATLLGISKRGNKRLRCLFVHGARSVLSRLETYDGPFTDWLKKLRGSKPFNVVCIALANKLVRIAWAVLSSHKEFSGKTLQPGLQ

SEQ ID NO: 101808 - protein, 434 aa, unidentified
MRIVYERCCGLDIHKASIAVCVVITRDGKIEEETRRFGTMTADLLELAAWLKARGIEHVAMESTGVYWKPVWNILEAEGFDLLLANAQEVKIVPGRKTDQKDSQWIADLHQHGLLRKSFVPPRQVRDLRDLTRTRATLAQEHSSTCNRIQKVLEDANIKLGTVASDVFGASGRAMLLAMMKGESDAEALAELSKGRLRSKIPELRRALEGRVTGHHRFLIDRHWRQMESLENQMRQFEEEIAERMKPTAEEIARMRESLPAEAPLPPSPREEAIRLWMELPGVGLTTACSMVAELGVNMEQFPSSAHVASWAALCPGNNESAGKRMSGKTRKGNVWLRRTMCEAAWAAAHSKKTYFAAQFGRIAARRGKKRALLAVAHSLLVAAYKMLKHKEHYREFGADFFEGLNKDQVKRRLVQRLAKLGFQVTVTQTPTAE

SEQ ID NO: 101809 - protein, 367 aa, unidentified
MKKVSTVVAKRSRNISQPTLTIGLDLGDRNSWYCVLDEGGQIQLEQRVRTNARALREVFSAVPRSRIALETGTHSPWISRLLSELGHEVIVANARKVRLIGESRKKDDRLDAQALARLARIDPGLLCPVKHRSAQAQADLTVIRARAGLVRARTSLVNTARSLAKSYGERLRGCNVRNMNPEKAEALSPELQSALEPLLAEIESLSERIAEYNDRIEALAQDSYPQVALLKQIKGVGTLIALTFLLTLEDPHRFRKSRDVGCYLGLQPGRRNSGQREPQMHISKEGDPYLRTLLVQGAQHILGPFGIDCDLRRWGLKLAERGGKSGKKRAIVATARKLAVLLHHLWVSGEVYKPLHNGNRLAVATAA

SEQ ID NO: 101810 - protein, 388 aa, unidentified
MKLIGIDIGKNKHFFCVMDQQTGEIISQPVSFSNDKEGFDFLVQEIKSYPKDSILIGMEDTGHYHFALLKYLLDLQYTVALINPKTTDFNRKMQGGITKNDKLDTINICDVLDTPERKKQYRITKVNSFDLYEQKQLTRHHHNLKEEENVYKNRLQKCIDIVFPEFNKLFNSKYGIVYMNILKMFGSAENIANTDIRTIRKCFEIEGRGNRISLTPERLKECARSSIGISSSAEVIQIKHLTAQIELIEEQLTEIDKKIEEFSIQNNSPILSIPGISHFSGTSILAELGDISNYSKPSQIIKFAGVAPLHYESSQFNAQHTAITKKGSKYLRKTLYQIILPVIRHNPVFNKYYQLKISQGKGHRCAQGHCVRKLLRICLLYTSDAADD

SEQ ID NO: 101811 - protein, 417 aa, unidentified
MNQYPACLGIDWADKKHDLCLLDTATGKKTRQVLPHTPQAINEYFTNLRARYPGQQIAVGLEQSRGPLLFALLQFHFLVIYTINPTTLAKYRQAFSPSRAKDDPTDAEYAAELLMKHSDRLKCWHPDDDQTRTLRYLVEHRRRLIGDRTRISNRLTSLLKCYFPQVLSWFPDLSTVLVCDFLWRWPALERLRGVKRTTLLNFFRAHHSVRSDTLEKRLAAIKESVPLTTDRAVINSSVLMITALAAQMKTTIEAVRQFDREIENLCAAHPDFHLFQSLPGAGDVYASRLLAVMGTQRDRWTTAQELACLSGIAPVMERSGQSTWVRWRYFCPKFMRQSFHEYAGESVKHSFWARAYYEQQIAKGKNRQAAVRALAYKWIRIIWKCWQTRTPYNEVRYLENLRKKGSPLLSYAAKNAA

SEQ ID NO: 101812 - protein, 348 aa, unidentified
MPILAEQVEIVIGVDTHTDTYTAALLTSIGAVRAELTAPADPGGVDALLAWADTHSADTVRAWVVDGARSHGVGLTRRLRAAGERVLEAARVPGARRRRGGKSDPLDAILVARTALAADKPPGTPRADGDREALRLLHVARRHYTDTRTATVNVIKSLILTADDDLREQLRGLSTDRQIRHLTHLTPGTTGPTVDRIRREHLHTLATQVAALDRLITDNLKHLRTVVRALCPALLDQPGVGPVTAAIALTAWSHRGRLRSEAAFAALAGVNPIPASSGRTTRHRLNRGGDRTLNSALHTIARTRSRCHPTTQAYIARRTAQGRTNNEINRCLKRYIARQLFRLLQATP

SEQ ID NO: 101813 - protein, 403 aa, unidentified
MSKNTKPKSAVEPQGKQITSTKSTTKQQKNQPRKGSVIKQCMALDIAKDEIQICFRESLSDGSMRILAQKKVANTKSGWNMIDASIRKKLKSEAPQGFVVVMEATGVYHENVCFFLNNQGYTINVCLPNDTKFYIKSLGQKSKNDKIDAQALAQMGLERQLQVWVAPSANVLNIKQLSRERQLLIEEQTSAKNQLHAFKHKYEASKDGEKRFVARIKLLAKQIKEIDELLKQAIKADNDLKTKVKRICSIKGFGVISAIILLAETNAFTNFDNRAQLTSYAGYDVVENQSGNRVGKTRISKRGNSRIRRCLFFPAFSAICHDPTMKKLYERVFERTKIKMKACVAVQRKMLLLAYAICKNETDFDPQYQAKQAEKKAEKLPNQTDQLATNKNVDPTNGTTHPA

SEQ ID NO: 101814 - protein, 312 aa, unidentified
MAKLVCEITLGADVSKDKLDICHWETQERISLANEAAEIRRWLKTLCGPVRIAIESTSDYHLALVDEAQALGYAVYLVNGYQLSHYRESVNVRNKTDSKDAWLLARYLAHEGSLLRLHPPRCRKSQELWSLLKRRAKVVGVRKEMQQSLANVSLSSKAFFTSLKQLLQRFDGRIKLLIRELGWWADYERCRSIPGIGPLNAAALVSVYHRGAFASANAFVAFIGFDVRLRESGKYKGKRKLTKRGEGEVRRLLYCATKPAQSYAPFDRYLTNHLDRGLSKIAAKVCLARKLARIAFALITKQQSFKKLQIAA

SEQ ID NO: 101815 - protein, 377 aa, unidentified
MQKEHNMESIIYVGMDVHKDNYSICCYNAREDRFYYEKSILAESKRVIKYLESIKKEFGEDTILLCGYEAGPTGFGLYRDLQNAGYSCVVMAPTSLKHPASHKVKNDKVDARFLAKTLFTKDYSSVHVTTEHEESIKEFCRMRLNLKTALKKARQVLAAFLLRQDKKYTDGETWTLRHRAWLKQLHFDEEYLNEVFNEYMISINSYETRLQAIERRLDEISQDKIIKESVDKLVCFCGIDTVSAVTIVSKVGDFKRFSKAYHFSNYLGLTCGENSSGQKEQHLGITKCGDKELRRIITESAKSIKRSNLKGEKSKRLLDRQKNKDPLVIAYADKCRLRLSGKIIHLEMRGKPANVATTAAARELACFIWGMMTNNIA

SEQ ID NO: 101816 - protein, 355 aa, unidentified
MLYSGIDLHKDNCVISTVNQSGKMIKQSKLPNHNISIIRYFSGMGKQHKAVVESTSNWYWLSDLLKENGIEILLAHAKYLKAISYAKVKTDKVDSQTLADLLRMNMIPEAHQISSDKRPLRDLMRTRLRLVTKRTSCFNSIHRLLGKYNIAIPKDRNLHDLSTLELLVNLPLQQDALFQLEILKQQIRLLHKQINTLEKSLHPRLIPNEDIQRLLWIPGIGKVLAFSIYLEVDGIDRFSDVNKFYSYSRLVPGADNSNRKQRHKSANKDGNRYLKIAFIEAGIKGRQYYKEIRQFYQSKASKKHKNIARNLVSLELARITYYVLKNKTDFNNRFKGRILSRQKITQWPRLANPGC

SEQ ID NO: 101817 - protein, 408 aa, unidentified
MEVIHEKCAGLDVHQQTVVACVRLAHGGTVHREVRSFGTATRELLALADWLTAAGCTHVAMESTGVYWKPVWHVLEGSFELVLANAMHIRNIPGRKSDVNDATWIADLLAHGLIRGSFVPPAPIQELRDLTRTRKQLVREIAQHTLRIQKVLEDANVKLTGVVSDILGASGRAILTALVAGETDPERLVALTTGRLKAPRAVLLNALHGRVTAHHRFLLQLHLTQIDALETAVREVEARVGDALAPFRTAVAHLITMPGISHTVARVLLAEIGTDMSRFPTAGHLLSWAGLCPRLHESAGKRLSTRVRPGAPWLKTTLVQAAWAAVRVKDNYLRAQFLRLKTRRGPKKAILAVAASMLTAAYHMLQRGVPYHDLGATHFDRRDKAKLTRRLIRRLHDLGLTVEVRPAA

SEQ ID NO: 101818 - protein, 409 aa, unidentified
MDIVPIYKRVIGLDVHQAQITGCAITEQADGSVTYERREFGGFKRDRQALADWARSVGPDVMVMESTGIYWKSPYAALQAVGIIAWVVNAGHVKAVPGRKTDVADAQWLASLARAGLLRASFIAKADLRSLRHIARQRQKLGGMLASEKNRLHKLLTDAGIRLGVVVSDLHGQSARSMVKALIAGKSVPDVLNLASNRLRARREDIFEALQAQEITSAHRFCLAEIMAHIEDLESRIARFDTELLRSLQEAGYTVPLRLLQTMPGIDLMGAAMLLVEIGSDMGVFGSAQRLASWVGMCPGNNESAGKRKSGHIRKGNAWVRRLLCEFAQAAGRSRCALKDKFQAINLRKGHKRSIVALAHKMLRMIYAMLSKNTHYVDKTVDYEALMVARNAPRWLQMLVKHGFVPAPA

SEQ ID NO: 101819 - protein, 355 aa, unidentified
MNSEKYIGLDVHQATIVVAVTDSTGKLVMESILETEAATILQFFAGLRGNLSVTFEEGTWSAWLYDLLNPHVEKLVVCNPRKNALLKDGNKNDRIDARKLAELLRGNQLKPVYHGENGVRMLRELSRSYLAIVKDLSRVMNRLKAVYRSWAIPCAGRDVYYRRHRAQWLDKIREAGVRRRAERLYEQLDMLQHLRQEARRELLAESRKHAITARLRQIPYLGPIRSALAVALMQTPHRFRTKRQLWAYSGLALETRISAEYRMVEGQVRRSKKLLSIRGLNKDHNHDLKGLFKGAATMASVRPGPLQDFYQAALAKGIKPTMARLTLARKIAAITLTLWKKGESFDAKKLKSQAA

SEQ ID NO: 101820 - protein, 436 aa, unidentified
MFQNVPYLSVGLDVGADFTWMSIMLPNGILIGKPFKILHSDPSSRNLAVAKIKEAQETYSLESRCFLESTGIYHIPLLYFLRDKGFNCSVINPIITKNSTNMNIRKLHNDKFDSIKAAKVGLDASLKTSIVPDDEIIDLRNLARDYYYFKDLQSAIVLKLNAELKVSFPAYLQVFSKITTQTSLKLLQAFPLATDILAAPKEAIIEIIRNTARFGERYALAKYDSIYAAAGDASGFGRALPSNALRIRLYIDSYLEYQKHLDSILEELHKAVDKLQGQPVYDRISLLQSLRGVGFFSAVVLIAEMGSFNLFSSPKKLYAYFGLDPAVKQSGKFNGDNVHMSKRGSSLARRILHMIALNNLKLDKGTKSPVNPVIYDYYLRKCTGKKKKVAVGAVMHKICNIIFAMLRDNKPFEIITPEEHCIRYAAEHPEAVNKAA

SEQ ID NO: 101821 - protein, 362 aa, unidentified
MQVRHIFVGIDLGDKNSVARIAVDREKSERLGFMNTGAGRARLFREVKKRAGQAGGAKILMAYEASACGYILRDEAKAADIECWVLAPTKMEKSVEQRKHKNDDRDADDVLEKLRGHVLAGNRLPTVWVPDQQTRDDRELVRARMELAEKQTGIKSQIQMLLKRYGLEKPSGIGSGWTVGYWRWLEHLCESEAQGWGMRQTLGSLLRQLRFVETEIQQMEKPLEQLANAARNKPIIEELMQESGVGLLTAMAYRTEIGHAGRFRRGRQAGKYVGLTPTSHESGQQNDRKGHISRQGPPRLRKMLCQASWVHIAHDPTARQIYQELVLRNPKKKKIALVAVMRRLAVRLWHRMRNVELQMVGA

SEQ ID NO: 101822 - protein, 466 aa, unidentified
MGKSSTSEDEKTVGGRDRVRKGLEPKHPDAAGIDVGSRVHYVAVPPDRDEQPVRRFGCTTPELHEMAKWLRACDIRTVVVESTGVYWIPVVQVLEEYTLEVLLVDARHVRNVPGRKTDVQDCQWLQELHTYGLLSPAFRPSQEILPLRSYWRHRAELVGYGAQQIQRMHKALEQMNVQVQKIVSDLSGQTGMRIIRAIVQGERNPVRLAQLRHASVKHDEETYVKALTGTYRTEHVFALRHAVELYDTFQEKIAECDREIASYMQSLQGPNEGETIGTKPPKKRGSFRRKNQPHFDLREELYRFTGVDLTQIDGIDAMTAQTVICEQGIDMSRFPTEKHFTSHLGLCPNNRISGGKVLRSRTRKVQSRAAKALRVAAQSLHRSRTAIGAFYRRLRARLGAPKAITATARKIAIQIYRMLKYGKDYIDQGEQAYQEQYKDRLTKNLAKQARKLGLQLLNAQTGQLLS

SEQ ID NO: 101823 - protein, 371 aa, unidentified
MKEFSKFIGLDVHKATIAVSVAEGNGGEVRYVGEFPNTPEAMVKLVKQLRRADVRLSFCYEAGPCGYGIHRQLTDLGWDCMVVAPSLIPKKSGDRVKTDRRDSMSLARLLRAGELTAVWVPDDAQEALRDLTRAREDMKHLEKQVKQRLLAFLLRHGRSFAGKSNWTQAHFRWLEEQKFGQPVQQIVFQEYVDTVKMMGKRVGGLDKQIEATTTESVFWPVIEGLMALRGVSLLAATVVVAEIGDLRRFASAPQLMAYLGLVPSESSSGPTKSRGGITKTGNGHVRRILVEAAWTYRHPARKTAHLQRRAERTSEEVQEIAWKAQKRLCGRYKLMERKGKLKVQACTAVARELAGFIWAIGQTVPQPAAKA

SEQ ID NO: 101824 - protein, 303 aa, unidentified
MEEVSIVGVDLAKQVFQVHGATADGRVLFRKKLSRSQFPKFMAGLRPCVVAMEACGTAHYWGREFASMGHDVRLIPPIYVKAFVKRQKNDVADAEAVAEAAMRPTMRTVAVKTSEQQARAMLFRTRDLLVGQRTQMVNALRGHLAEHGIIVGKGLGNVERLATLIAADDLPELVRTMGRLYLSQITQLHEEIDQIDRRIAAEAKQSDIVRRLQKVPGIGPICAMAITAFAPPMEAFRSGRDFAAWLGLVPRQHSSGGKQKLGRTSKMGQRDIRRFLIIGAMSVVHWMSIGVVTGPLIGSQKGV

SEQ ID NO: 101825 - protein, 345 aa, unidentified
MKITTVGIDLAKNVIQVHGVDERGKAVLKKPLKRAQVLPYFAKLPPCLIGMEACGSAHDWARKLEKLGHTVKLIAPQFVKPYVKTNKHDAADAEAICEAVSRPSMRFVPIKTGEQQAVLALHRARQGFVKARTAQANQIRGLLAEYGIVIPQGLDSIARRLPEILEDGENELPGMFRQLLQRLGEHLKELDRQVDELDAQIQLWHRENAASRKLAKIPGIGPLTASALVTSIGDAKSFENGRQWAAWLGLVPRQHSSGGKPTLLGISKRGDSYLRKLLIHGARAVVRVTERKLEPADSWLKRLVGRRNKNVAAVALANKNARMVWALLAHDRKFQPDYTPASASA

SEQ ID NO: 101826 - protein, 356 aa, unidentified
MSYDVKYIGMDVHKEAIVVAVLSGSGKLVMESVIETKASSILQFIHGLRGELHVTWEEGTWAAWLYDLLQPQVEQVLVCNPRRNALLKEGSKSDKVDARKLAELLRTGMLRPVYHGENGLRTLRELARSYQTISKDLTRVMNRLKAVYRGWGIPCAGTQVYALRYREEWLNKIPQAGVRRRAELLYQQLDGLQALRRNLRPEFLAESRKHKAAKLLRQIPCIGPIRAARLIALMQTPHRFRSKRQLWTYSGLGIETHDSAQFRFVRGQLQRSKKPQQLRGLNQNHNHEMKEIFKSTATTASRGAGPFHDFYQALLVKGMKPEMARLTLARKIAAITLTLWKRGARFDAEQLKAQAA

SEQ ID NO: 101827 - protein, 312 aa, unidentified
MEKLSCGGIDVSKDRLDVVVLPEGWFFSVSNDTAGWAELVARLRPLGVSAIGLEPSGGYERGIIRALLAAGLSVRRINPNKLRQFARARGVLAKNDRLDARLIAEYVAIMPTRVVQRDDAVERLAEIVTMRRQLCDEHVAVENQAAHLEDAMLRRLSKRRLIRLEADIRLLDKRLAEMVATNAAFAQLYELLTSMPGVGPVLAFTLIALLPELGKMSRKQIAALVGLAPYDFDSGKLRGHRSIYGGRMPIRNVLYMAALSASRYNPALKAFSNRLADANKKSKVIIVAVMRKMITTLNAMLRDNTAWQPQSA

SEQ ID NO: 101828 - protein, 343 aa, unidentified
MQITTVGLDLAKHIFQVHAVDGTGQAVVRKRLRRAELLSFFASLPPCLIGMEACATSHHWARELIKLGHTVKLMPPAYVKAYVKRGKTDAADAEAICEAVARPSMRFVPVKSAEQQSVLMLHRVRALLIRQRTMLVNALRGHLAEFGIIVAQGISRIRELIAILTGESPDAPLSPLARRALAPLVDQLLDLQPRIRGLEAELLAWHRQSQESRRLETIPGVGFITATAIAATVPDPSLFRSGREFAAWLGLTPRPNSSGGKERLGRISKMGDGYLRTLLVVGATAVIRYARTKTAAETAWISSLLSKKPVRLVSVALANKTARIAWALLSRGEVYRSATPAGA

SEQ ID NO: 101829 - protein, 453 aa, unidentified
MKKDKNKEQKVVELAAFEQINHNAAGIDVGAKEFYVAVPKGRDTQSVRVFLTFTADIHHLADWLAQCEVKTVALESTGVYWIPLYEILEQRGFEVYLVNARHLKNVTGRKTDVLDCQWLQQLHTYGLLRASFRPSEQICAIRSLVRHRDMLVSYRSAHIQHMQKALTLMNVRLTNVLSDITGVTGMKIIRAILSGERNRKTLASYRDAKCAKTEEEIEKSLEGNYKLEHLFVLKQALELYDFYDQQIKQCDQELETLYNEFEEPAQPGTPAPEKRKRKRRKNQPNFDLSESLYRMTGGIDLTKIEGLDALTVQEILSETGTDVSKWPTVKHFCSWLCLAPNNKITGGKVKSSHTPHTQNRAANAFRIGAQSLMKSKSALGAYCRRIAALHDAPTAITATAHKLATIFYFMLKRREAYRPLAADYYEKEHREKVVRSLQRRAATLGFRLEPTVS

SEQ ID NO: 101830 - protein, 453 aa, unidentified
MCLEERPILEPNAAGIDVGAREMFVAVPPGRDENPVRVFATFTEDLERLTDWLEQCGVTTVALESIGVYWIPLFEILEQRGIRPCLVNARHMKNVPGRRTDWHECQWLQFLHSVGLLRAAFRPGQDICAVRTLVRHRNELVSAASQHVQHMHKALTQMNLQIHHVISDITELTGLAIVDAILAGERDGAELAKLKDPHIKADTETIRKSLEGNWRPEHLFTLGQSRALYRIYQQQIVSCDLEIERMLGEFEPRVDPTQKLLPPDGKRNRAGRKRRRKNGHPHPEFDLRTEVYKLFGVDVTQIPGLEENALPLFSEVGRDMSRWPSAAHFVSWLALCPDNDISGGKLLWRGARRVKNRAGHLFRLAAFSLHHSPTPLGNYLRRMKTKLGPKGATMATAHKIAVIFYVMVKKQVEYDQSIWATRDAQREKRLETKLKRQAKQLGYELVPIQPKAA

SEQ ID NO: 101831 - protein, 299 aa, unidentified
MQVSTIGVDLAKNVFQVHGVDNAGKVVITRQLRRKQVIDFFSKIPACLVGMEACGTAHHWAREISKLGHHVRLMPPSYVKGYVKRSKNDAADAAAICEAVTRPSMRFVPIKSADQQALLMLHRTRDLLIRQRTQLINALRAHLAESGLVAETGREGLAQLAEIITDESNREALPSAMKQALQASVDQLAALELQIGALDRAIYAHHRANDMSCRIETVPGIGVIAATAIASTVTDPSNFKSGRDFAAWIGLVPRQHSTGGKERLGGISKQGDRYLRRLLVIGATSVVQHARRHPQKQEP

SEQ ID NO: 101832 - protein, 339 aa, unidentified
MGLYAGIDLHGKNHVLIIINQMDEWVHKTRLSNNINLTLDVLQRFKNKLKAIAVESTYNWYWLVDGLRKNGYNVKLAHPAAFERYDGIKYTNDYSDAFYLAQLLRKGDLPEGNIMNIKRRQIRDLLRKRVMLVQERTKHKLSLQSLIARNSGRMIPMKKVEKMTKSDIDDLFKNEFLRMNATTNINMINNINKELGPIEKKLFSILKITKDFELIQTVNGIGKILAATIILETGDINRFNQVGNYSSYCRLVKSERRSNGRKKGRNNQKNGNKYLCWAYIEAATSMIQFNEKAKKFYHRKESKTNKIVAKKALANKIARACFYILRDKVEFDDKKLFGA

SEQ ID NO: 101833 - protein, 417 aa, unidentified
MGDEPSASTCRYIALDIHKHYSVIGGVNRDGEEVMEMSRVDHEELEAWLPKHLNSSDRVVIESTTNAWHVYDLLEPLVAEVLVANPIKVGQIASARVKTDKKDTLILARLLAANLVPTVWVPPKHVREMRQLVMHRLRLVGMHTQVVNRMHSVAHRHHLNHPSRKDFQPESTTWQKDERLSRLERFQLELDMATHEHLRQQVERVTREMGRLSHEEPWASEMLYLMQIPGCGVVTGMTILAAIGDIQRFKTPKALASYTGMIPGLEQSGLKLRGKGITKEGRRELRWALVEVAWRAVRADPHWKKYFEELKRRMHPNQAIVAIARHLLTMVWYVLTRHEPYSHYSPERIAYKYLTWAWALDEDQRQGMTRPQFARYYLMRLGIGDDLKRVALNPDFPYRLASVEEVLGIRPELRPPE

SEQ ID NO: 101834 - protein, 410 aa, unidentified
MERVIERCCGLDVHKKTVVAGVRVPGGTGGRDQHVRTFGTTTAELLALRDWLEAYGVTHVAMESTGVYWKPIFYVLEDAFTCVLANAAQIAQVPGRKTDVRDCVWIAQLLEHGLVRGSFVPPVPIRELRDLTRYRKALIHEHTREANRLQKGLEDAGIKLASVASDVLGVSGRAMLDALLRGTTDPDVLADLARGKLRKKLPALRQALAGRFRPHHAFLVSQLLAHLDYLDEVIETLSTHIAEVIAPFAEEVSRLDTIPGVNRRTAEVLIAEIGVDMGVFPTAAHLASWAGLCPGNNESAGKHKSGKTRKGNRWLRGALIQAALAAGSRSTKGAFAARYRRVMRHRGHQKAVVAVAHAMLVTAYHLLARKTTYHDPGADYYEHRHAERVRHRAVQLLERQGYRVILEPAA

SEQ ID NO: 101835 - protein, 358 aa, unidentified
MTTTATPTAGTILALDLGKYKTVACAYDPATAARFETITTGRAELRRLIERHRPARVAIEACALSGWVHDLCAELGVPCQVANTASEAWKFKHAKRKTDRDDALRLAQLAALGQLPEVATPPKPVREWRALIAGRQHLVGRRVAAQNRIRALFAGQGLPAPRGHRAWTESGLAGLAAQARPLADCGPDELWRGLLHLALAEYRQALELVAQAEARLDALAKADEGVKVLESIPGVGTRTAEAVVAHLHDPARFPAGKQVSAYAGLVPRQFQSGESDRRGRITKRGPAVLRKLLVQAAWAMLRYNAWARAVYQRLSRGRARKKQAIVALARRLLVRCWAMLRDGTTWRADPPPEPAATA

SEQ ID NO: 101836 - protein, 338 aa, unidentified
MKVYVGMDLHATNTYVGMVDEENEVLHKQRFRNELPLILAGLDPFRKDIQGVAVESTFNWYWLVDGLMAEGYRVHLANVSAIKQYEGLKQIDDKRSALWLANLLRLGILPTGYIYPKEERPTRDLLRKRLHLVRHRTSHILSVKNILARNLGLRMKSEEVKKLEDPEVKRFFPDKEMQTAVLASVGLIRHLEVEISGIERMITKKLKIRKEFAKLMTIPGIGKILTLTIMLEVGDIRRFPTVGDYSSYCRCVKSIRTSAGKIIGYGNRKNGNKYLSWAYIEAAQAARRFHETVRSYYEKKMAKTNRIVAIKALSHKLTRASYYVMRDQVDYDPARLFR

SEQ ID NO: 101837 - protein, 441 aa, unidentified
MKDLPVLDAHAAFVDVGSERMYVSVAGGKPQVFGTVTTQLHALRDWLLAQGARSVAMEATGVYWLALYGVLEAAGLEVLMVNGRQTKNLPGRKTDMQDCQWGATLHAHGLLRAGFVPPAEIRRLQDYMRLRGEHISLAASHVQHMQKALERMNIKLHDVISDLTGVSGLAMVRAIVAGEREPEKLLALCDVQIQRNKADQVKESLRGTWAREHLFALGQALKSWEHYQEQIAACDREIELLLPVAPDDESGRGTNAKGKAAKRAGGNAPKIANLPGIIRAMCNGCDPTVLPALTEYSVLQLISEVGTDLTKWPTEKHFTAWMGLAPGSHQSGKRRGNAKRNRNRAGRIFCVIARSLARSKDIALGGFYRRMAARRGGLIANMALARKLAALFWRVMVKGMDYVEDGLARYEEKVLAGKQRALKHLAKQLGQKLVPIASTTL

SEQ ID NO: 101838 - protein, 311 aa, unidentified
MASFLGIDVSSLSLDALVRPQGIKISVRNDPAGFEELVKSLRGLSIKRVLLEATGGYERDVMRFLQDANYKVIRVNPKRARWFADSLGIKAKTDAIDAAVLAHFAEVIPDKPTLKTSPERALLRELLQQRDRLVQQRDDDRRRLKQAQSAMVAIFLKTNLQHFASQIKLVERAIKQQATVLNDERIAKLDEVKGIGMVTATKLVALLPELGHVESREIASLVGVAPFNHDSGKSVGKRFISGGRFEVRRALYMACLVAVKHNPTLKARYEALRGRGKLAKVALVACMRIFIVRLNAMLRSGTPWRDDLPQP

SEQ ID NO: 101839 - protein, 407 aa, unidentified
MTEFNAKEVRIETASALASVRQAQREQASRCEARYAAYVGLDVHKDTIAVAVAWSGRDEPEYWGEIKHSRKAVDKLIGRLLAACGGGVLLFCYEAGPCGYGLYRQIVARGCDCEVVAPSRIPQRAGERIKTDRRDALKLAGLLRAGELTGIWIPDEEQEAMRDLCRARGDMKSQEHKARQQLNAFVLRHGHHWPSNKARWTMTHFNWLEGLKFAHDWQQVVLQEYIDAVKAAQARVAAMTAQMMRVLPQWRLAPVVDALTALRGIDKLSAMTLLAELGDISRFQSPRQLMAYLGLVPREHSSGGRRRQGAITRTGNGHARRALVESAWSYRFPARQTPHLKRKAAAAPAQAKAIGWKAQRRLCGRYRTLIQAGKNTKQVCVAIARELVGFIWDIVCQEMAKMKPVTQ

SEQ ID NO: 101840 - protein, 354 aa, unidentified
MMEAFAVSLTHFIMKTTKHCVGVDVSKDSIVCCLGSSQQEITVFSRPKTFTNDLKGFGQLLDWCLQQGDKEVSFVLEATGVYYERLAFWLDDRNQQLSVVLPNKIKHYSKSLNIKTKTDNVDAQILSRFGLERKLDYWKMPTKFMREIKSLTREYQEAKVKIVAAKNQLHAKEHSYNCLVSVSRRLKRQISLLENQLLEIEAELRTTVMSDTLFYDKITKVITIPGVSFITAIIVLAETNGFALVKNAKQLVSYCGLDIQHNQSGGHEGKSKISKKGNSFIRKALYMPALAASRYNKDLKVFYERIIDRKPAKKIGITAVARKLLILIYILWKNDQEYIFEEQINNAVMEVGRY

SEQ ID NO: 101841 - protein, 354 aa, unidentified
MKHLQLKDGDRLRRQCIGIDVSKKKFTFCLCQSTEQDLHFYTKPKEFENSEPGFRHLLAWSGNEVDSSVPYSFLMETTGCYHESLALFLARKGMTVIIVHANKAKNFARLNGQRTKTDPVDSKMLATMGCDTPGLKPWPIPDEKYLQLRDMSRLSEQLEKTRTQVLGRMESVTYSGYVTKSVLKAHKSLLKSIEKVQAANEQDMAELVNGDPVIKAGVDNMESIKCIGKKTAILVTAETLGFHQMTSAKQVASYAGLDVKKEQSGDTDKKGHMTKRGNAHLRAGLYFPAMVASWSNPQLMEDYNRICASHPQSKNIALVALERKLLCLMYSLWKNGRQWDPEYGQNKKQEEAMS

SEQ ID NO: 101842 - protein, 367 aa, unidentified
MLIFAIDLGQDKSVYCKFDAMNGQHAFGRFATTSATLSKLLTKIQPDRVVVEACPLAALAYDTATELGLHVQIADATQDAWQWKNTKRKTDRDDALKLARLSALDQLNLVHLPTPAMRQWRQLLKARAATVAELTRSKVRIRALLRPLEIRLPRGKLGWTERALADVRQHARPLSECRPEELWRGTLQMELERIVLLSQQIARYNDKLEAWAAKDQRVQQVATMPGVGVITAATIVAVVDDPRRFRSRRQVASYAGLTPRLYQSSVPSRPGGRISKRGSALLRHALNQAAWMAVRYNAELREFYLRLSDENRRGKRTRAIVAVMHKLLVIAWALLRDEQPYRPSPPPSAASGSATTCSAATASTVAA

SEQ ID NO: 101843 - protein, 337 aa, unidentified
MKYSGIDLHSNNSVVTVTDEEDRVIAEKRLPNDLTKIVGFLLPWRDELKAVVVESTYNWYWLVDGLQEAGFVVKLANTSAIRKYDGLKHSGDEADARQLAHLLRLGILPTGTILPPEHRAVRDLARKRMQLVHNRTSHILAVENIVARQQGAKIGGRQIKQLTADAVDQMGLAADVALAIKSNLAVIITLNAQIEVLEKRLQEKVGERKEFVLLSSVPGIGRILATIILLETGSIERFAEVGNFASYARCVDSRHVSNGKKKGEGNTRNGNKYLAWAFIEAANFAQRFNAEAKRFYERKKAKTNTTVATKALAHKLARACYHILKEQKPFDVTRCFA

SEQ ID NO: 101844 - protein, 383 aa, unidentified
MIVIGADTHKRSHALAAVDEGTGRVRGQREIKADEPGHLAAVRWARGLDEERVWAIEDCRHVSRRLEQALLAAGERVVRVAPHRMGASRKGERERGKSDQIDALAIARAVVKDGIEKFPLAYLDEAAMEIRLLLDHRNDLVAERTRAVNRLRWHLLQLCPELERSLKAGSLNQSRVLDRVDRRLRKMPAGARVRVAREQVAQIRHLTRRADALKSELAELVEAHRPELLAETGCGPLTAAILIGRTAGAERFRSDASFAMQSGTAPIPCSSGQRQQHRLNRGGDRQLNHALHIIAITRANHDPATKEYLARKEAEGKTTKGALRCLKRALARRFHGLLSLPAQAPQADRVTSKEIPQHPRQRERSDVDGSIVGAAPNPMLCAT

SEQ ID NO: 101845 - protein, 349 aa, unidentified
MSEKYVAMDVHKASVAIGVRDDKGKYMMESIVETKASTLVEVVKGLSGTIHLTFEEGTQSAWLYDLLRPHVAECVVCNPRQNKLLEAGNKGDRVDVQKLSELLYLGGLRPVYHGDHGTRALKELARNYESLVRDRTRVKNRLKAIYRGRGIECPGDEVYNPSKQAPWLKQLAERGVRQRAASLYSQLESLNAMVAEAQRQMLAESRKHKATAILRSLSTLGPISTAMIIATCDTPHRFRTKRQFWTYCGFAVVTRSSSDHYFEKGKLHKRRKPALTRGLNRNYNRRLKQVFKSAATSGSRRGPFKPIYEQLLAKGLKPDLAKLTLARRISAIALAMWKKGERFDPKKLK

SEQ ID NO: 101846 - protein, 344 aa, unidentified
MKITTLGIDLAKNVFQIHGVDELGKVIVKKQLKRDQLAAYLVNLPPCLIGMEACGGAHHWARKLMSFGHTVRLMAPQFVKPYVKSNKNDAADAEAICEAVARPNMRFVPIKDVGQQSVLSLHRVRQGFVSARTAQANQIRGLLAEFGVIVPQGIAHLYTRVPELIEDASNEMTGAFRLLIQRLLDHLKELNKQVDEMEAQIVQWHKHSQASLKLAAVPGIGPITASALVASLGDAKNFENGRQVSAWLGLVPKQHSSGGKEKLLKISKRGDTYLRTLLIHGARSVLYREQSKADTSSWVKGVATRRNHNIAAVALANKNARIAWALLTREKGFDAKHACLKVAA

SEQ ID NO: 101847 - protein, 412 aa, unidentified
MQDILTCAMGLDIHRDVIVACLAKGELGTEPEIEIRSFSTLIPEMRKLRDWVLEAECRHVAMESTGIYWQPIYEMLEPCFDGQINILVVNARHMKNVPGRKTDIRDAQWIATLLRAGLLKGSFIPDKAFRELRHLTRYRKSIVHDITAQKNRIDKFLQSSGFRFTAFLSDAFGASGRNIIRHLMEYGDISREALDKCLKTQTRKRIDEILVALNGSLSEHQRSFLRMIFEHLESLERHRHTVEDAISEEIVKHEAALSLLCSIPGIDVTAAASIIAEIGTDMSAFPDSQHICSWAGLSPGNNESAGKRKSAHINKGDPYLKSMLCEVGWVISGKRTLYLSGWYWRVKQRKGAKRATIALARKLLTLIYTMLKTGTPYNEECFEIRRKQSERKRAGRMVNELQKLGYFVVAPD

SEQ ID NO: 101848 - protein, 333 aa, unidentified
MTETTSIKFAALVGIDWADRKHDICLQVADTGEREFSVLEHGPEAIDEWANALRVRFSNQPVAVCLEQRKGALITALLKYEHLVLFPVNPRLLAGLRRAFSPSGAKDDPTDAEIAVDILLQHRDKLRAWTPGDPRTRQLQAFVEARRRLVEQRVRVTNRLTANLKGYFPQALDCFESLDSVLACDFLTRWPSLGEAKRARAETLRAFFLKHNARSQELIAARIALLKSAMALTSDAGVIVPALLATRTLVAELRTLIAGIEQYDVAIAKVFNAHPDAFIFRSLPGAGPTFAPRLLAALGADRARFESVRAVQEYLGIAPVTERSGRSEWVHWR

SEQ ID NO: 101849 - protein, 355 aa, unidentified
MNSSKFIAMDVHKDSISIAVRNAAGKIVMESLIETKASMILQCIDGLRGDLHVTFEEGTSAAWLYDLLKPLVTRVVVCDPRKNKSMREGNQSDKIDARRLAELLRLNHLNPVYHGEHGLRTLKEFVRSYLTVTKDLGRVMTRVKAIYRSWAIPCTGKQVYAACHRAEWLAKIHEPGVHRRAEFYYQQLDALRVLRLGVRRELLAESKKHKAWKRLCEIPAIGPIRAAVLLGILQTPHRFRTKRQLWNYSGLAIEMHSSADYRSVDGELQRSKKNVLVRGLNRNGNHDLKNLFKGAAVIASSKPGPFEKFYAGLVAKGMKPELARLTLARKIATIVLILWKKGVSFDPQYLKPQTA

SEQ ID NO: 101850 - protein, 382 aa, unidentified
MQPINTVNPTIYLAIELSASTWLIAARLPGSEKPHLHRIEGGDTAALFALISSLRARVARRLDAAIGVVCCFEAGRDGFWLHRLLTAHGVANYVLEPTSILINRRARRAKTDRLDAIGMLRVLAAYLRGDRQSCSMVRVPTPEDEDAKRIHRERENLVQEKLRIENRIEALLFTQGIRKRPSLRSWERDLAVLRTGDGREMPRHLRAELDRLRRRLVTILELIREVEAERDEVVTTNPEHQTSRKIVALCRIRGLGENFAGVLTREVFYRSFDNRRQIASYVGITPMPYQSGSMDRDRRISRAGNPRARTTMIQLAWLWLRYQPGSELAEWFRKRVGTLAGRTRRIAIVAMARKLLIALWRYVETGILPAGAEIRPESVAAA

SEQ ID NO: 101851 - protein, 347 aa, unidentified
MQITTVGIDLAKIVLQVHGVNERGKAVLRKQLRRKEVLPFFAQLPPCLIGLEACGGAHYWARELQALGHTVRLMAPQFVKPYVKTNKNDVADAAAICEAVARPHMRFVPVKDPHRQALLALHRARQGFIKQRTAQSNQIRGLLAEFGLILPQGIGHLFAHLPALLENADNGLPGLLRELLARLRDHLRLLDQQIAALDGQIARWHRDHPASQRLAGIPGIGPLTASALVATVGNAREFNSGRQMAAWLGLVPRQHSTGGKPTLRGISKRGDVYLRTLLIHGARAVLCSVQRKPEQAPPWLTRLLARRHPNIAAVALANKNARIAWALLAHDRRFDTHYRPQPMLAQA

SEQ ID NO: 101852 - protein, 355 aa, unidentified
METTLNFAGQHFHVGIDVHKRQWTTTVRCKKKELKTFVMEPSAKALALFMQRHYPCGEDHFVYEAGFSGFHIHEALTSLGFDNRVVHPADIPTMDKEKRHKDDARDSRKLARELETGSLRGIYVPDRFHQEFRSLCRLRERCVSHQTRLKNRITSYFAFYGIDIPTQAELPHWSARFIAWLKTQTLQYPSGNQALELMIDELTYQRSQLLKIMRSIRSEVRQHPELKRIITLIQTAPGIGFIAAITIYSEIIDMQRFANFDLLKSFVGLAPQTQSSDQTRIEHGLSERHNRHLRYVIVEAAWVAIRKDPALLEAYTQLLRRMKAQQAIIRIAVKLLGRIRHVWLTGEPYALSVIK

SEQ ID NO: 101853 - protein, 422 aa, unidentified
MPTIILLIPSTLVVGIDVAKDKHVARAQDDRGIEFGKRLVFENRIHGFEKLLEWIRHHAKANGKNHIIFGVEPTGHYWLNLAYYLTAKGYDFVLVNPMHVKKSKELDDNSPTKNDTKDAKVIAQLIKDGRYSVPNLLEGIYADLREGAKLRDQLTKQLMIIEGRIQNCIQRYFPEFFDVFGDWEGKAALCTLRMFPFPSQIKQMTPEGVLAKWKPFVQRGVGIKRAIKLVETAKKSIGIQVGLQFAKRELDCLLDQYELYKEQVKQLDEELEALVEMIPGAKEMIAIPGLGSTTVALFFAEVGDIRNYSHPQQLVNLAGLSLREHSSGKFKGQTRISKRGRSRLRRALYLAVRPLVAHNPTFKALHHYYTKRPDRPLKKQQSLIAVCCKLLRVLFSISHKQCKFDGSKLLRGLPQSHTLQAA

SEQ ID NO: 101854 - protein, 359 aa, unidentified
MNEITTVGVDLAKEVIAVCGADRSGKTVFTRVFRREAFAAWAVQLPPCVFGLEAWGAAHHWARWLAGHGHTPRLMAAEFVKPFRKSRAAKNDRNDAEAVLTAVRQPNMRFVAVKSVEQQACLSWHRMRQGFSEERTALINRLRGLLGEFGVWRGRSAEVLTRALPELEHDEALPLMVRRLLTEARPHLARLDAAIAACEVEIKSHVKGDAVAQRLTAITGVGPLTAAATLATVTDARDFKNGRQFAAWQGLVPSQDSSGGHTRLGHITKRGDTYLRGLLTQGARSALQAALTREPLRRTRLQTWIVQLHARVGYHKTLVAIANKHARMIWAILAKGEDYDPDAWRRWRRTAPATSGATP

SEQ ID NO: 101855 - protein, 345 aa, unidentified
MKYGAIDVHSKESHIRIVTATGACVEERRVPTRPDRLVAVFGAYDPMRILIESGTESEWVAECLEALGHAVVVADPNYAPMYGTRRRRIKTNHRDVVALADANRTGTYRCAHRVSPAQRTVRLQLAVRDQLVRMRTQLINLLRSQVRAAGWRVRAGAAETFVRRLADVELPAPVRAALRPLTELLTQLAGPIRESDAWARQAAVADPIGARLMSAPGVGPITALTYRATLDQIARFSEAGQVTAYLGLVPREYSSGEHQHRGSITKAGPGRLRALLIQGSWHIWRTARGPSLPLHRWVHRVASRRGRRIALVALARRLARCLYAMWRDGRDFDATKIRSVVPAAA

SEQ ID NO: 101856 - protein, 306 aa, unidentified
MVNVGVDVGKFYLDVYIYEKGVYFQEENTDKGIKRILKRLSYYQIERIVMEATGRYDFMLAQAAHSKNLPVCIAKPSSVRNYAKAINLTAKTDKLDSELIAEYAAIVQPVITPGKSKNLIAIKDLIARRRQVMGMRTQELNRLKIMGKGLEVSCKRIIKYLDQEIERLEKRLAKHVADQADWTEKKTILKSAPGVGDTLVYTLLADLPEIGSLSNKEISSLVGVAPMNRDSGKLRGKRRIKGGRYAVRTVLYMATLSATQCNPVIKGFYNQLVAQGKHKKVALTACMRKFIIMLNAMVRDRCEWAY

SEQ ID NO: 101857 - protein, 364 aa, unidentified
MQYINDTELSSHEETRCQFNGGTGAIKLGIDVHQDFYVVVEQVGGSNPKPPQRFQKEAFLHWAARLKEKSGAQVHAVYEACGFGFSLQRKLSALSINCYVVCPQKLDEQNRRVKTDGLDAKALCLKLDRFVQGNRDALARVRVPTEKEEQLRALHRQREQLVKVRKQLEAQGRSLMVNHGLEPVKSWWKPRTFAALDAPQWMRELLCNSQPILLALQQKIGALTVQLQSAAAPNQPRGLGLMTSVIIDREIGDWNRFSNRRQIASYTGLCPGEYSSGNTRLQSCVTKHGNPRLRAALVELSWRLVRFQPNYKSIVKWRATLAKGALATGAARKKAIVAVARQLAVDLWRIKTGRLSAEELGLIN

SEQ ID NO: 101858 - protein, 311 aa, unidentified
MAQITIGVDISKDTLDVHRLPDGERRQFGNDAAGHKALIAFTGKEVARVVFEPTGPYHRAFEAALSKRGLPLVKVNPRQARRFAQAAGKLAKTDRIDAANLARMGAVLELEALQPRPENLNELKELYVAREALVKDRTAAKNRQKQIALPLLKRQNAQRLAQIEHQIGAIEAAIQAKLKADPTLARKLEILTSVPGLSTITAFALLIEMPELGSLNGKQAASLAGLAPMTRQSGRWTGRAFMSGGRASVRRALYMPALVAARFNQDLKAKYGQLIEAGKPPKLAIAAIMRKLLVLANALLKGDRYWTEKPA

SEQ ID NO: 101859 - protein, 427 aa, unidentified
MPYKVAGIDVHKRMLHVVVSDVQVDGEYDFTRRVFGSLPEALRSLAAWLVEQQVEEVVMESTAQYWKPVWGTLERYWKPICQTREGALATSGTLHLALALSNRGRRGRKKDFRDAERLVKRLVAHELTLSFVPDVEQRLWRTIVRTKYQLTRNRVQLQNRLEALLEEAHIKLSSLVSDLLGASARRMLEAIAGGEINRETLAALADRGLRATQEQLQDALGVCQELNPVYRRLIKMVLDEVASIDKRIDQLNQEMANLLRPHEDQVKRLAEVPGLGVDSAQQIIAEVGATAATFPSEKHLSSWVGACPGDEESAEVNHSRRSPQGNRHMRRILNQAANAAAKHKGSIFQVLYGRYVPRLGHNQTIGIIAHKLCRLVWKILHRGIRYEERGPEVSKASKQKRTRKMIRQLRRLGYRIEPSPSQSAITA

SEQ ID NO: 101860 - protein, 360 aa, unidentified
MKVMAGIDLHSNNAMIGLVDMEGNRLQHKKVACELEAVLEVLAPYKRRLEKVAVESTYNWYWLVDGLNDHEYPVVLANPARIDQYDGLKHADDKSDAFFLAELLRLGILPTGYIYDRQTRPVRDLLRRRLSLVRQRSSLILSFKSLYARNTGAALSLSRVKALSVEEAKGLYQHPCDRLIAEEQMTVMRQLDASIERIEKTVLKVVKLLPCYKRLQTMPGIGVILGLTITLETGPIGRFASAGDYASYCRCVKAQRLSNQKRKGQNNRKCGNKYLAWAFVEAAHGAKRFDTASQKFYERKKSQTNAIVATKALACKLSKAAWHVMAEEVDYDGRRVFGGQGKINFGRSGREPDSGHGLKA

SEQ ID NO: 101861 - protein, 340 aa, unidentified
MGEVTTIGLDLAKHVFQVHGVDAEGATVLRKQLRRAQVLAFFSRLPPCLVGLEACATAHYWGRELRALGHEVRLMPAQYVKAYIKRNKNDAADAEAICEAVGRPTMRFVPVKTADQQAAVLLHRGRERLVCQRTGLVNALRGHLAEFGVIAPQGLRNVGKLIAIVRDEGDARLPDLARQVLQVLAAQIEQLAAAVAAIEKQLMAWHKSNPVSQRLASVPGIGPIIATALAATVVEPSGFRSGREFAAWLGLVPRQNSTGGKHRLGGISKRGNQYLRRLLINGASANLLRSKATNADPWVIGLRRRRPPLVVAVALANKTARIAWAVMHRHENYQRVAAAA

SEQ ID NO: 101862 - protein, 424 aa, unidentified
MQNTAARKRKQVPEGYLVVGVDPHKKRHAAVAITQDFTTQTKSKFDNTREGLEAMLDRAKVEMVKSGCRGVMFAIETGGHYWRNVAYFLDEHGIPFRFINQFTLKRRREGKDLNRRKNDYRDSEVAAQLLCTGEFTESKLPQGVYAELRTAHNAYRRLVKERTRITNLVKGLLDALFPEFTQVFKDPGGLTALSVLSIRPIPKVIAGMTEDEFEASIEAQHKGRRLMRKKLRALHYLARTSIGIDAGARSLSSEIAFLVDKLELIRQHICIMEGTLIRLVDETEEGKYLLSIRGLNYIAVAGLLAELGCFKAYRSARQMIKMAGTNPTESESAGKKRSRTPMSKQGRPVLRYCAWTSVIPMLRFNPDFRAWAKQRRERPVHANPLCGREVVGAALNRLLRLAFAMVKNQTYYQVSKSELTLVAV

SEQ ID NO: 101863 - protein, 315 aa, unidentified
MTDLTTDAPTCFVGCDVGKKTITIFDSATGRTVDVANTKAALRAFAANLASGCLVICEATGGYEALLLDAVISAGHAVHRADARKVKAFIRSLGTLAKTDAIDARALARYGHERHDRLTRWQPREQDRETLHTLVATRSDLVRDRTACTNRLSAPGASPVAKELRGLVKSYDKAISQLEARIAELIQSSNSLASTSDILKSISGIGDTTAAALIAYMPELGMLGRKQIASLAGLAPHPRQSGSSIGYRHTRGGRPEIKRVLFMAALSAVRHDHNLKAFYIRLKANGKKPIVALVAAMRKLITIANARLRDHLAFN

SEQ ID NO: 101864 - protein, 394 aa, unidentified
MAFKIFRKNCCGLDVHKTWIYACMGITDTNGRTEYKQARFSSFTKGLQKLADWLAKYDCNDVCMESIGKFWIPVFNILEKTCWVTLAYPKYTKPQKGNKTDHKDAKWICDLYMCDMVNPSFIPPPDIRQLRDLMRYRSKLTNIMTSEKNRALNCLTVSNLKLDDVFSDVFGKSSRSVIRYILEHPGETFQVAPFIDRRCKHPVEEIQAVIDGTISHQQAVKLRECLQHLDELEVHKTNVEKEILCLVRQYPYQLELLQTVPGFSGNIMTAIALISEIGADMSVFPSAKHLVSWAGCCPRNDQSSKKVKSTRISRAGVYLKPLLVQVAIQPFTANADKLSAAGALEIRCQICDGRFLSMWAALFIFLGCPLPPCPKNLHVHTGRIVILASVAWIF

SEQ ID NO: 101865 - protein, 340 aa, unidentified
MRQLYVASDLHGNNNLLGIIDGEGKRIFKKKLPNDPLLINDTLKPFKEEIVGIVVESTYNWYWLVDALMEEGYKVHLANPAAIQQYSGLKHADDKHDAFWLAEMLRLGILPEGYIYPKEERPVRDLLRKRGHLVKLRTSLILSLENIISRNFGRKLPANDVKGLRKDHVTPLFEGKEDLGLAGRVSKETIDFLTHQIRQIEGVVEKRVMLKEAYRNLLTLHGVGKILGLTIMLETGPIGRFETVGDYTSYCRKVPSQWISNGKRKGSGNRKNGNKYLSWAYAEASDFARRFHPESRAYYNRKMQQSNPAVAHSALSHKLARAAYYIMRDQVAFRPEKLFG

SEQ ID NO: 101866 - protein, 311 aa, unidentified
MIDKTTVGIDVSKFALDVFIDTSERQIHLENSASGIIQLLKELEGLHISGVIMEATSRYHSLAESMLISADLPVAIINPRQIKNFARAMGKVAKSDSIDARIICEYGRRMKPEFRPARDKELQDLALLLTRRRQLVQNRVMETNRLQEKNGIYIETGIAEHIAWLNSQIDTLDQEIKYQLNQNTALSSKRKMLEKVKGIGPVTQAAILSQLPELGALTRRQISALVGVCPYDRDSGQLRGKRAIWGGRAGLRATLYMAMLSAVRYNPQIKDFYTSLIARGKVKKVAITACIRKFITILNAMFRDQKDWIYS

SEQ ID NO: 101867 - protein, 347 aa, unidentified
MRFYTKQHKYYRGIDLHTKKMYVCILNGIGEIVAHRNLNADSRAFLEFIAPFREDIVVAAECMFTWYWVADLCAREGIPFVLGHALYMKAIHGGNSKNDKIDSHKIAVLLRGGALAQAYVYPAKMRATRDLLRRRNHLVRKRAELFSHIQNTRSQYNLADPLGRIAKPQNRQGLVDRLDQPSVQRSIAVDLEMIEAYDRILVRLEREIIKTANEHDALSYNILKTIPGVGKILAMVMLFEIETIQRFPSVGDFVSYARLVKCAKLSNGKRAGSGGNKIGNAHLKWAFSEAAVLFIKGNEPAKKYLDRLTQKDNKGKALSILAHKLGRAAYFMLKNKVAFDQERFLSH

SEQ ID NO: 101868 - protein, 327 aa, unidentified
MHVAAALDPIGGLLGVQEFPATLAGYTSLLDWMGGFGTVALVGIEGTGSYGAGLARHVTAAGIRVVEVDRSDRQDRRRQGKSDPLDAVSAARAAQSGRARGAPKGRDGAVEAIRALMVAKRSARAERTQTINQARALVLTGPDDLRTRFAGHTAAALVAGIASLRPRPGDVPGYATRIALRELGRRAEFLDGQLERLDELIIPLVAARAPGLLALYGVGPDTAALLLVAAGDHPERLRSESAWAHLCAVAPIPASSGKVTRHRLNPGGDRQANHALWRIVLTRMSAHPPTRVYVGRRTKEGLSKNEIIRCLKRYVAREVYSHLRAAG

SEQ ID NO: 101869 - protein, 452 aa, unidentified
MEIKKQISLEVVHPNACGIDIGSRSHWAAVGQNAEDVKEFGVYSQDQLEMCNWLHSKGVTSIAMESTGTYWQNLFSTLVGQGFEVILVNGRQTKNIKGKKTDIKDCQWIQKLHSLGLLSASFLPDSDTDTVRTYSRHRQNLLKQSASCVRRIQKYLRLMNMRLEVVVRDVVGLTGSSIIEAFLKGEHQGEDLAKLRHYNCRKSEEEIAKALQFNGRKDYLFALQQEWNSYKHLQQQITETDLQIDQLLKELIDKDDHKKQHTIEKKKHKRKNKNAVSQTDMNLIAYQYFEGVDLMAIEGVSEGLIMTLIAEIGLDGIRKFPTAKQFTAWLRLAPNNKISGGKVLSNHIPKGSSRLKIAFRNTANAIGNLKEGWLADFFKRLNYKKGRATAVSALARKLAVIIWNMLVKGQSYQPPSLYLFLDEKRKIAAAKRIQKQITKFGLTDRDIEITKY

SEQ ID NO: 101870 - protein, 400 aa, unidentified
MMTPDDIDVWVGLDVGKSAHHAHALDHDGNTLYDKPLKQDEKAIRTMLGKLSKHGRVLLVVDQPNTIGSLPLTVARNMGIAVAYLPGTAMRRTAQLLPGDAKTDRRDAHVIAWAALKLPETLRDAGPDDETLAALKLLAGHDEDLAHESTRHVNRLRSLLLQTHPAFERALKGERITRDATLALLERYGGPMGVKRAGIEDVKDWAKSNGLRAGRIIDDMFKAIGEQTVTVPGTLMAETIIPSIAHDIKTIRDRRREVGRQVEKLLEDHPLLTVLTSMPGIGVRTASNILLGIGGDIANFKSSAHLAAYAGISPVTGQSGTSIKGERPSRRGNKRLKNALWQTAFVASTKHPPSVAYYKRKREQGKHHNAAIICLARRRCDVIYSMLKNGTLYQEPALAA

SEQ ID NO: 101871 - protein, 333 aa, unidentified
MSKENNNEVVVIGIDVSKKKLNLSKLTKGKFSDSEIGNDHVSINKYLSKKDFIANKDNYFFIMEATGVYHLLFANELHNKGFKVSVQNPLRIKRFSDMKMIRAKTDFVDARTIALYGTEQSPEPYKPRPEKHQFIIKLLKAIDDYNTAITSLKNQLEALETDPVQLKLVIREFKNMIKRFQKSILIFEKEIDDILAEIYPTEVKRLNKIKGVGNRTTAVILGFFGKFENFDNPKQVVSFIGTNPSVERSGTSVKGKGSIDKKGSPYIRKILYMSSLAAAQFNPSCKALYDRLTLKGKEHKQKRIAVLNKLVRQIFAILKFDREWEENYIPKIR

SEQ ID NO: 101872 - protein, 480 aa, unidentified
MNVNARRTKKQVNVENQAINLLSKEELNKKIEVVEKELRSYTWRELETNGKFAKNDKLSFITDDMLIAGCDIGSETHYIRAIDVRGRELSSGAFEFSNTSEGFANAKAWVLALAAKHDKKQIVLGLEPTGHYWFALAAWMISNGISVVQVNPYAVKQSKEIEDNSQLKDDRKDPKLIANLVKDGNYGMPYLPEKVYADMRRLSMFRDQLTEDRIRNINRLHRELKIYFPEYMDAFGKIDGAFTLEVLKVSAIPTDITALGAEGMKNIWHNAKLRGRGYNRANEIVSYAEKSVGLTDGTDAGREAVKWYAEQILRLDEQLAEIESALHEKCREIPYAENILAINGVGENILAGILAEMGDISRFDDVKEIQKLSGMGLVACSSGKHKGQTKISHRGRKRLRYWLFQAAKSAVSHADEFKQLHEYYTTRSNNPLKKMQSLVVIACKILRVIYTILKTGTTYNPQKLLKDIKHPAASQAPMAA

SEQ ID NO: 101873 - protein, 354 aa, unidentified
MLVDVHARSVVAAAIDGDTGEVFRKRLTPGNSDVIGWVRSLPGPSAVVYEAGPTGFGLARAFVSAGIRCEVAAPSKIQRPAGDRVKTDARDAMLLARLLRLDDIVSVTVPSVQREAARDLVRAREDVRGDLMRARHRVSKLLLRQGIVYYGGHAWTGTHLVWLRRQHFDAPGLQLAFDAEHEAVLQAEARRDRLDKAIEAMAADSEYTPVVRRLGCLRGVATLTGFGLAVEIGDWDRLTGSTIGAYLGLVPTESSSGQSRSQGSITKTGNTHARRLLVEAGWQHLKPYRTPGATIRARWELAPAAARARGHAGNQRLHQRWVHFADRKKEPVIANVAIARELAGWCWSLAVMDD

SEQ ID NO: 101874 - protein, 390 aa, unidentified
MNYAGIDISKYKHDLFVMSDFGEVITENLTFTNNSDGFAQLKKELDLCGIGNVRIGFEATGNYGINLKLFLERIGYDYMEINPLLVKEYIKSSSLRRTKTDKLDARAIAGYLFEKEYRPHPGSFYSLFALKQLTRLRSSLVTSRSRYLIQITNVLDCIFPEFKPLFGGKFTETALYILTHYPSPQAIANMNTLSYDILRRKSRGKFSMDKFVKLKALAKTTVGVFDDCYRIELDALLDLYCQIDAKITELETEILQIIEAMNPPTLSIKGVGPMSAAVIVAEFGDFSRFASADKMLSFAGLEPGYFQSETTEYNGHMVKRGSSQLRCALMNCARAIKLHNATFAAYYRKKMDEGKPHRVAVSHVAKKLVRLIFTLETKGEMFDPEKNLVR

SEQ ID NO: 101875 - protein, 416 aa, unidentified
MSTSNSASLERYLGIDLHKHYLGIGGVNAQPKVVLPPRRIELGDWPKWAKTHLTQNEVVVVEATTNAWDFYDVTSPLAQRVVVANAAKIALIAKTRTKTDNKDVMVLARLLAAGLIPEVWVPPMEVRELRSLIAHRRRVVGTRTSLKNRLQSVLHRHHLVLPSGDPFAAIHRAWWDTLPVSPTEGLHLRHDLATIAQLDTQVTEIEDELRRLSCASPWAAPVTYLMQLPSIALITAMTVLSAIGDVTRFAHAKELVGYSGLGAGVHDSGQTHHTGHITKQGRKELRTVLVEAMWRTVECSAHWRVEFERLTRRMPPTQAIVALARKMLVVIWHVLTEQAADKHANADLVAFKFMVWSWKLTDAQRGGLTTRQFVRYQLMHLKLGDHLTHVVRGGARHLIAPADEVLALKPELATAI

SEQ ID NO: 101876 - protein, 395 aa, unidentified
MFIVGIDIAKRSHEAVIITEDGQIVRKAFSFRNNCTGYNLLLEQVRRLTLVKSQIVFAMESTAHYWLALYARLLKDGYAVMVLNPIQSHSLRELYIRKAKTDARDSLIIADLVRFGRCKASNVPQDKILALRELCRSRAYLVDMAADLKRKLIALLDRIFPEYESLFDSVFSKASIAVLSKYSTPQKVKNANLRKLTDLLMESSNGHFGEWKAHQLKEAACSSFGIDDSGGVYSTLLGMFLEQILSLTAQADSLEKQISVFFQEFNNPLTSIPGVGTVLAATILSEIGDITRFSSADKLLAYAGLDPSVKQSGEFKSNQNRMSKRGSPYLRRAIWLASTVAVHRDPMFQTYYEKKISEGLHYMNVIGHVSRKMTAVIFAVLRDGQPYQPILQSAG

SEQ ID NO: 101877 - protein, 342 aa, unidentified
MSVYVGIDVHRKRSQVAVIDQSGEVLTNRNVPNGAEPILKVIGGLPPGTPAAFEACYGTSWLVQLLEDYGFDPHLVHPSRCKAIASARLKNDKVDAAILAQLLRADLLPEAWIAPPAIRQLRALLRHRVALVRLRTRLRNRIHAIVADYGYDRPAGGYWTGPGRAWLAALELAAVSRELVEDYLGLIDALQDRIDRLDWEIRQRARSDPQVKVLTQLPGIGPFTALVIVAEVGDISRFASARKLASWAGLTPTVRGSDRVAHYGHISKEGSAWLRWVLCEAAQTAKRHPQFAASFQRIATRRGRKIATTAVARKLLTRAWHLLASAGHAAAPQPAAPQPAAR

SEQ ID NO: 101878 - protein, 400 aa, unidentified
MSLDRPFAETAAIRSELGAIFISLELSRSTWLMTSLSPGAGEKLSKREIKAGDVSALLARLAELRHKALARTGTSHPIIVIQEAGLDGFWLHRVLQEEGCESHVVDPASIAAPRRRRRAKTDRIDGEALLRALLAYKRGEPRVCSMVRPPTPEAEDERRICRERAELIGERVRHVNRIKGLLFSQGVRDYEPLRRDRRKRLLELRTGDGRPLGPHLKAQIERELDRLELLLEQVKTVEGARDRLLDRLVESRSQDATAPAEAQPSPVALLLSLNGVGPEFAASLWTEGLCRSFANRRQAGAYPGLTPTPWRSGKIEHEQGVSKTGNARLRTKMLQLAWLWLQHQPKSALAQWFHRRLPGMTGKAARKRLIVALARKLFVALWKFTSAGVVIEGAVMKTSA

SEQ ID NO: 101879 - protein, 322 aa, unidentified
MSPDVQGRESAMDVYVGIDVSKRFFDLYNLAEDHGERFDYDASGIDACLRYLTERTPALVVMESTGGYETGLAVALSDAGLPVAVVNPKRIRDFARATGQLAKTDQLDAQMIAGYAATLQPPPQGVWDEQTRGIKALVARRNQLIEMKIAESNRREHVNDPVVARSITAVVRTLVNEITKVEKQLRDQINRTPQLKQKADQLTSVPGIGETTALMLIAEMPELGSLNRRQIAALVGVAPINRDSGTFRGKRMTGGGRRNVRTRLFMPTIVATRFNPAIRQFYQRLLASGKTKMTALVAAMRKLVTMLNAMLAKNQNWEPKHA

SEQ ID NO: 101880 - protein, 368 aa, unidentified
MDTAYCTTIGADVSDRTTKICVVSKASGKPKIVQETTIPTTPDGFRAFLERQDKAAALVFETGTHCRWIDKVASGMGFKTFVANPCRLRMITESATKNDKNDARTLARMALADIELLHPVKLRDDEHQKMVNLHEIRDQLVKERTAEVLQIRAIAKSMGFRIPDCSAECFHNVAKKELPKELSDIVWPLMKELKSKALTIKTVEKQMRRLAKSDTFKAQVERLMEIPNVGFITATCFVAVTGGDMDRFDRPRDIGPWLGVTPKQDQSGDIDRQCHITKAGSKMLRWKLTECAQRVLQKNSADIDLKVKGLRIRARGGKIAKGKSITAVARGLAVLMVAMLKKSDAPYVPLSEDKARELAQIRAAMSAA

SEQ ID NO: 101881 - protein, 352 aa, unidentified
MAKNDFDELMSIGIDIGKDTFHLVGFDQAGQRVLRKQIKRLALVATFERLPRCVVGMEACLSAHFVSRTLRKLGFEPRIIPAIYVKPFNKGQKNDYNDAEAIAEAALRPNLKAVSEKSQDQLDLQALHRVRSRLVSRRTATINQIRAFLIEQGITVRKGLRALKNSFETILEERKDEISPRMRSILIGLYGDWMWMDDRIDKVSQEIEEISRTEENCVNVMTVPGIGPMISTAMVAAIGEGEAFDRGRDFAAWVGLVPRQYSTGGRTVLGRISKRGSRYLRMLFVQAAKIIMMRPHRWPDFSFGEWLARASERMHRNKAAVALANKLARMAWSILRHKTAFDAPRDEVAIGI

SEQ ID NO: 101882 - protein, 350 aa, unidentified
MNVNHYIGFDVHKKSVSYCVKTADGRIVEEGKLPATHQALRQWAQKRKEPWFGAMEATLFSGWIYDTLKPFAVELQMGHPAMMKAIGASKKKNDKLDARKVADLVWCNLLPACYVAPVEIRELRRMLRYRNLVVGQAVRMKNKMSGLLMEVGAKYNKQQLHGKKYFTGLLETVEEVPESVKDMLRLSRGALEMFETVQHQLLMRLQTDSRLARRVTLLKSIRGVGEVTALTWVLEVGDPQRFSSVAHAVSYCGLTSALVSSADKQQRGPISKQRNAHLQTVLVEAAKLAPRWNPQLAAVHARELERGNRNRATLAVARKLVAYLLAVDKSGQPFQLRSRPAATQETVRAA

SEQ ID NO: 101883 - protein, 355 aa, unidentified
MSSEKYIGLDVHQATISVAVVDSQGKVVMESILETKASTILEFFAGLRGSLFVTFEEGTSAAWLYDLLKPHVTEVLVCNPRKIPLLKQGNKSDKIDARKLAERLRLHDLKPVYHGETGVRMLRELARSYLTVVKDLSRVMNRLKALYRSWAIPCAGRDVYYRRHRSEWLEKIPEAGTRRRAEQLYQQLDLLQHLRQQARRELLVESRKHAITAKLRKIPSLGPIRSALAVALIQTPHRFRSKRQLWTYSGLGLETRDSGEYHYVQGQVRRRKKQATIRGLNHDYNHDLKGLFKGAATRASVKPGPFQEFYQRSLAKGIKPTMVRLTLARKIAAITLTLWKKGEDFDINKLNSQAA

SEQ ID NO: 101884 - protein, 359 aa, unidentified
MDVSKERPKTTAGLDLGDKYSYLCLIDQADGEVIEEGRLRTTPDALRRRFASEQQLRIAIEAGTHSPWVSRVLEECGHEVLVANARKLRFIYANKRKTDEVDAENLARLARVDPKLLHPLRHRGEGSQAHLAIIRSREALVSTRTQLVNHVRGAVKSFGARLPKCPARSFHKRAPEHIPEALLPALGPILEQIGSLTERIRQYDRKLEAICQEHYPETDLLRRVEGIGPLTALTFVLTLEDPYRFERSRSVGAYLGLVPATDRSGDRDPQKRISKEGDQMLRRLLVGSSHYILGPFGSDSDLRRHGEKIASRGGKNAKKRAAVAVARKLSVLLHRLWVTGEVYDPLYNTHRRQEREEAA

SEQ ID NO: 101885 - protein, 427 aa, unidentified
MNNHDISRIASFRQLKSEIRGSDRHLIVGIDIAKSKHHAFLGTANGKTILKGLIFENSRHGLEKLLTRVQFYMDRDGFREVVFGVEPTSVYHKPLAEQLIEHGHMVVYVTNEAIKKNRSLLDGRWDKNDTKDAANVADLISQGKCNYYDLPRMPIRELRSLLLLRKRLKKQLHSCRVRIRNNLVAQYFPELDKSWNQAEDENLAIVRWFLSHEKIRSLEFEDFFNRVTKRCRGIGQHRRLRTVWEMAGESIGCRPGAAMQLEAKVLTDSIKNTKEQIEKVDKEIEKISGSCEEYAYLQTIPGFGPYVSAVVLAAIGNPYRFENIQQLKRLAGFDLNASRSGKRSRSAVPVISKKGKGDLRYALYQAALVASSLTRQFRAYYHSILKGREKEKGIRTKMRVKLASKFLVIAWTLMKKKEPFSPSYLKI

SEQ ID NO: 101886 - protein, 452 aa, unidentified
MEEPQEVQDEEYEQVWERVAAVDVAKASGVVCTRVPDEDRPGRRRTRVWTVTATMNGVTELADHLRCQGIQIVTLESTSDYWRVWWVVLEAAGLRVQLVNARSVKNVPGRAKTDKKDAVWLAKLTERGMLRPSFVPPPEIRRLREFTRLRADLVNERTRHWARLEKLLERALIKISAVASSLDTQSARAMIEALIAGQRNPRALAGLAKGRMRVKRAELAEALDGRFEPHHGELARILLDQIDALSAQIDQLTTRVTELIEAIPAAQGVDADGTTGPGAGTGPGAPVLPAVARLDEITGCGIIAAQAVIAEIGLDMTVFGTPGRLVSWAKRCPQTRQSGTKTSSGKAGKGNRYLNGILGEIAASAGRTDTFLGERYRRLARRRGKRKAITAVARSILVIIFHLLADPEARFRDLGPGYYDTHIDRQRKIRNHIRQLEALGLDVTTAPKHDVA

SEQ ID NO: 101887 - protein, 437 aa, unidentified
MKTLAVLDPRAAFVDVGSEHMHVSVAGDEPTVFGTVTSQLHALRDWLRSQGVKSVAMEATGVYWLPLYGVLEAAGFEVRMVNGRQTRNVPGRKTDMKDSQWGATLHMHGLLKAGFVPPADIRRLQDYMRLRADHIASAASHVQHMQKALERMNIKLHGVIASLAGVSGLAVVRAIIAGERSPEALLALCDQQIRRAKAEQVKEALRGTWESEHLFALRQALQSWDHYQEQIAECDRQIQSVLPPHDPDRPALPRPKTSRRGGVNSPDIPLLREILAQMCGGRDLTQLPAHTSYGVLQLVGEVGTDLSKWPSEKHFTAWTGLAPGNHDSGKRKGHAKRGRNRTGRIFCMMAQSLVRSKDIALGGFYRRMAARRGGLIATMALARKLAAWYWRVMVKGDDYVEKGLANYDAQVLRTKQRALQRLAKELGQQLVPILQPA

SEQ ID NO: 101888 - protein, 348 aa, unidentified
MQFYTNLHPFYCGIDLHARMLYVCILDERGEILVHQKIKDSPEELFKLLSPYIGNIVVGAECMHCWYWLSDFCEHHNIDFILGHALYMKAIHGGKTKNDKIDAFKIAKLIRGGNFPLAFIYPKEKRAIRDLLRRRTHAMRHSAELKAYIKNALAQHNLPLPEKSDLSYTTGRDAMRGYFPDPQVQRSIDMNLRLIEVYDHEVSSIECYVEKLTKHDNGRDYYLLRSLPGVGRVLALTILYEIGHIQRFDSVQKFASYSRLVKCKAESAGKTYGTQGNKIGNAHLKWAFSEAAVLFLKGNPPAQAYLAKLQKRMSKAKALSALAHKLGRCMYFMLKNQTVFDSERFLAG

SEQ ID NO: 101889 - protein, 343 aa, unidentified
MQTVTTIGLDIAKSVFQVHGIDAAGQVVIRRQLKRRYVLAFFERLPPCLVGIEACASSHHWSRELHSLGHTVRLMPPAYVKPYVKRQKNDTTDAEAICEAVTRPNMRFVPTKTIEQQSCLMLHRARHLFIRQQTAVINSIRAYLAEFGIVAPVGRRGVEQLLEVVADTADRRLPEVARVCLAALGSQLRRLKAQILEFDRRIMAWHRSNATSKRLDAIPGVGPALATALVASIADPRAFRSGRDFSAWVGLVPKQNSSGGKDKLGSISKQGDRYLRSLFTAGALAVIRYAKIHGTGHRPWLTALLARRPTKVAAIALANKLARMAWAMMARNERYKEPAALTA

SEQ ID NO: 101890 - protein, 387 aa, unidentified
MEKTQRTLRKENSTELEVLYMAFELSQSTWKLAFSNGRKIRTVTIGARDLDQLHKAIDGSKSRFAIGGEVRMCSCYEAGRDGFWLHRYLVSSGIDNVVVDSSSIEVDRRKRRAKTDRIDAKKLLHMLMRYHAGERLLWRVVHVPSVAQEDGRQLHRELDVLKKERTVHRNRIKGLLIHQGIAVNNPSSKRFLADLEVWRSWDGKALPSDLKTRLIREYERLRMVEEQVYGLKKQRQSRLENAESPSVRKVIQLMTLRGIAVNSSWKFVNEFFAWRQFHNRRELGALAGLTPTPYDSGGSQHEQGISKAGNSRIRTLAVEMAWVWLRLQPQSKLSQWYIERFGSGGKRMRRIGIVAVARRLLIDLWRYLEYGLIPEGAVLRTDMIRFY

SEQ ID NO: 101891 - protein, 456 aa, unidentified
MVSAKKNKDKFPISSDFKQINPRAAGIDIGSDVHYVAVSPELTDEPVKNFGCYTPDLHEMARWLKGYNVETVMMESTGVYWIPVFQVLKGHGFDVNLVDARHVSSVPGRDTDVGASQWIQKLHSYGLLRSCYLPEAEMVPLREYWRYRAELVEMASKQILLMQKALEQMNLQLHKALSDITGVTGMSILRAIIAGERNPSILAKMRNNSVKKSEDEIEKALTGDWRDEQLYMLKAAVDLFDFAQAKMAECDQKIEECVRTFEDKFESDKQAPKPNNRKQRKNQPHFDLQSELFRMTGVDLTAIDGISSITALTVISECGIDLNAFATEKHFSSWLGLCPHNMITGGKVRKRKTRKVQSRTAKALRLAAQSLHNSKTALGAFYRRMKYKLGPAKATTATAHKLACLIFRMIRYGMDYVDKGQEIYNQQYQERVLKNLHKQAEAMGFGIVELSTGQVS

SEQ ID NO: 101892 - protein, 592 aa, unidentified
MRAATSTPLDRIGVGIDTARYGHRVWFLRPDRQAAAKALTVLENHDGYQALQQRLEQLHQQHPQAQFHVRIDAAGQYAANLEHFLRGLALPLTISIGEPKRNKDYQKAHFPKRTTDDTESQAMARFAVVELPDATLPVPPQLALLREVCSRLQAQVKQTTQATNRLHNLMARVFPELATLVDDFSARWLLRLLERYPTAERIAAAHLRSIQQIPYLPSEQVEPLHQAARQSVGSLRGDVAETLVRELVTQVGHCLDHEEKLRQLLENAYAALPPSSHVQVRTIPGIGPATAAVLVAKIIDIERFASPEHLVGYFGAFPQEDSSGVDANGHPLPLGTLRMSQKGNDLVRSYLWNAARSGITCNPALRALYRRLRARGKRGDVALGHCMRKLLHLVFAVWKTNRPFDENHFPWEPTEGAPPATPAPDPVVVEATAAESKDKTVGHTQAVPAEEVVTTANARVEETAAPVNPPPPAPTGSASSRPWVDYAFLRQQITIERVLSHLGVFAGFRGRGNQRRGCCPVHDRAGRKQKTFSVHLGKNVCQCFQAESGVQGNVLDLWAAVQELPLYEAALDLAATFGLRRNREEEPVGGTR

SEQ ID NO: 101893 - protein, 350 aa, unidentified
MVTLGGDSHKRTHTLVAVDDNGRQLAQRTLLATRAGHLEALQWAGRWPERRWALEDCRHVSRRFEADLLVAGEVVVRVPSKLTGAARKVARTTGKSDPIDALAVARAALREPDLPVAKLDGPGREVRLLLDHREDLVGERTRTQNRLRWHLHELEPEIEIPARTLTRYHTLAEVEQRLNSHHGVVAAIGHELVIRVRELTRRINELEGEIERRVSGLVPTLLQLNGCGALCAAKVVGEAAGVSRFRSRAAFAMHNGTAPVPVSSGNQQRHRLNRGGNRQLNVAMHRIAVTQLKRPGPAQDYMAKRMAAGNTKTEALRALKRRISDEVYRRMLQDERASLGSKVGACEAAA

SEQ ID NO: 101894 - protein, 449 aa, unidentified
MAKSRKKPGKLDRDLPQLKPNAAGIDMGAREIFVAVPADRDAESVRSFPTFTEDLHRLVDWLQRCRIDTVAMESTGVYWIPLFQILESRGLQVCLVNAQHVRHVPGRKSDVLDCQWLQYLHSVGLLKASFRPEQDVCAVRSLLRHRESLVQMSCVHVQHMHKALDQMNVQIHHVISDITGVTGLAIVDAIVAGKTNPKELAKLRDFRIKASIETVTKSLVGDYRPEHIFTLKQSLISYRHYQQLIDGCDREVQQRLQAFDTKDDGPNAAADSSSSTKPAASGFDLHHHLERIFGTDLTLMPGFESLRVQTIFSELGADLSKFPTEDSFCSWLNLCPKDGTSAGRRIRAPQIKTQNRVTNAFRLAAQCLYRSKSFLGDYFRSQRARFGALKATKNAAHKLARIFYHLVTNRQSYDETIFAKLEIRNQKRRLNRLQSLAHQMGYSLVQANA

SEQ ID NO: 101895 - protein, 374 aa, unidentified
MLSARPAGACRPPPDQQKELAITTIADPERPRVTVGVDTHLDVHVAHAKDQLGRRMETVSIPTTPAGYQDLLAWARGLGEVEAWGVEGTGCYGAALTRFLGDQGQVVLEVNRPDRQARRRRGKSDPVDAEAAARSVQAGEVTTVPKAGNATVEMIRSLRVARQTAIKARTQAINALKALLVTAPAQLREQLRGRSAAMLVRQAAALEPGPLVTPTAAAKLALRCLACRYQALHAEVATLDTELARLVAKAAPGLVARFGVGPDSAGALLVAAGDNPGRLRSDACFSMLCGSSPIEASSGKTRRHRLNRGGDRQANAALYRIVVVRLRWHQPTKDYMARRLKEGKTPKEIIRCLKRYVAREMFTVLNQTVPTPAT

SEQ ID NO: 101896 - protein, 355 aa, unidentified
MQHTILDFINQQFFVGIDVHLKQWKVTVRSAGIELNTFSMHPAPLELITYLHKHYPGGMYHLAYEAGFCGFWIQRTFTDAGIHCIVIHPADVPSSGKEKAVKTDAIDSRKLARQLEQGNLKAIYIPSVASEQLRSLMRLRFKLVQQQTRLKNRIKGFLRVSGVEIPAQYLTNARWSGAFIAWIKSVPVATQAGKFTLENLILQLEQTRGHLATALRELHREAAAPAIAPALDAITSAPGIGFVSAMTLFTEIIDIQRFHEFELCSFVGLVPSLYSSGDTSYTRGMTFRHNQYLRPLLIEAAWIAVRKDPAMTLAFQQLCRSMPKNLAIIRIAKKILRRIFHLWKNQDRYVYALAA

SEQ ID NO: 101897 - protein, 405 aa, unidentified
MEGPARDRHRRHRRLPRPGRRQGHHATAVTPAGKKTFDKRLPNTEPKLRELFAKLQAKHGTVLVVVDQPALISALPLAVARDMGCPVAYLPGLTMRRIADLYPGDAKTDARDAFIIADAARAMPHTLRAIDGEDETIAELEMIVGFDDDLAGEATRVANRLDGLLTQIHPSLERVLGPRLQHPAVLTLLERFGSPAQIRKAGRRRLVTLLRPKALRMAERLVEEIFAALDEQTVTVPGTGATSLIVPSLAVSLTAVLNQPKLLAGRIGELLEDHPLSKVLTSMPGVGVRTGARILIEVGDGSTFPTAGHLTAYAGLSPATRSSGSSIRGEQPSRRGNKQLKRAFFLSAFAALGDPASRAYYDKKIAQGKHHTQALFCLARRRADVLFAMLRDGTFCEPQPWATVT

SEQ ID NO: 101898 - protein, 341 aa, unidentified
MKNLFIGIDFSKEKLDVAVITAVGLSETAQRECYEFKNSVSGFRQLVKWVERNSNGIATSSWLFCGESTGDYSKALCNFLYGKGYDIWLENAKSIKDASGIRRLKSDRADALMIAEYAMRNYDKAFMYEPLSASLSQLRELFLYRQMVIRHRCSFQVRRGEKRLAMEKSPVKTMISQSGRHIVSELNKEIEKIDKRIAELIDSEEELKEIYHIVTSVPGIGCQNAVCLMVYTDNFHRFNYDARKIACYYGIAPFGKNSGASVHTDPHVHYLANRQIKAMLTQAALAAINHNPVLSQYYLRLVERGKKKQVAMNNVKNKLIHLVTAMVRNRQVFSPEYKISA

SEQ ID NO: 101899 - protein, 388 aa, unidentified
MTQIPVALPHPVAPDHDNTLVLAIELSNKSWVLAAQVPGLTRVKAKQTIEPAAEALLAALRGYRQRAKAAGRRVERVIATYEAGWSGFWLARLLATHGVETHVIQASSVPVDRRVRRAKSDGIDAELLLRTLLAWLRGEPRVCSMVPIPAEGDEDARRSIRERTELIAERVALVNRIGAVLATMGCGGYNPLLRNRRQRLGELRTALGTSLPPRAHAKINRMLDRLDLVCAQIAELEHDRDAVLQAETPNKADEMIQQLTKLRGIGVQSATVLVREAFVRSFANGKSLGSYAGLCATPYSSGGTDREQGISKAGSRRLRTVMIELAWLWQRYQPGSAAVNWFRARVSGTGARMRKVMVVALARKLLVALWRFATQGVIPAGAVMKPAS

SEQ ID NO: 101900 - protein, 353 aa, unidentified
METAYDGRQVVGMDLHRRRSVLVRMTEDGRRLGVARITNSPAGLRREIAKAGKSPRVVLEGTYGWYWAADTLAAAGAEVHLAHPLGVKAFTYRRVKNDERDAADLADLLRMGRLPEAWIAPPEVRELRELTRYRCRLVSLRTSCRNQVHGVLGKLGIPPACSDVFGAAGSAWLDQLGLPQPYAGKVTSLRQLAAGLSTEITMLSEVIADLLAGDRGCQVIQQLPGIGPVLAAVIVAEIGDVTRFKNAAQLCSWAGLTPRHRESDTKITRGHITKQGSRLLRWALIEAIQHAPAGSLPGVVKQRIIARRGKQAKHIAKVAAARRLLTLVFYGMRDGQIRCLAQPPAGPPPAQAA

SEQ ID NO: 101901 - protein, 354 aa, unidentified
MQHDAPNREIIIGIDTHKDTHAAVALNALGVRLGATIVPVNRVGYRCIDAWARSFGTVTAFGIEGTGSYGAGLARALREAGHHVLEVNRPDRSARRRNGKTDMLDAEAAARAVLSGQASAEPKTGTSTVEMIRHIKIARDAAVKAKTQAMQTLKSIIVLAPAELREQLEGIRGPITLVRHLASMRPSPLTSPLSSAKTALRATARRWLALHQEIEGHDRDLDALVAATAPHLTTATGIANMTTAELLLLVGDNPERIRSEGAFAKLCGACPIPASSGRTNRHRLNRGGNRQANAALHRIVVTRMRLHQPTIDYVRRRTSEGRTKPEIMRCLKRYVAREVFGSLCRSRPPSPAGP

SEQ ID NO: 101902 - protein, 394 aa, unidentified
MILVGIDIGKNKHTFSIIDKNSGEILLSPSDFSNNLKGFLFLIQKLSSYTKSELLIGMEDTGHYHFALLKYLLDRRYTVALINPTTTDLTRKLQGGITKNDPLDSLTICDVISSNHRNKPYRVTTLNRFDLYEQKQLTRHHHNLKEELNTYKNRLQKCIDIVFPEFNSLFHSKYGIVYMNILKAFSSAKAIANADIRSIRKCFEFKGKGKRIFLSAEQLKLTAKSSIGIPSVAEEIQIRHLVSQIELLEKQLSEIDKRIEEFSLKNNSPILTIPGISHFSGTSIISELGDICNYTKASQIIKFAGVAPYHYESSQFTAQHTAITKKGSKYLRKTLYQIILPVISNNEVFYAYYTKKLNEGKGHRCAQGHCIRKLLRVIYHILSTGQPFNPELLV

SEQ ID NO: 101903 - protein, 351 aa, unidentified
MWIIGVDYHPSVQQIAFVNTDTGECGERRLSHSDREAEKFYRGLKAEGCKVRVGMEATGYARWFERLLAELGFELWIGDPAKIKAKRVRKQKTDRLDAELLLQLLLEDRFPRVWVPSPENRDLRQLLWHRHRLVQMRTRITNQLQAVAMNEGVRRKKALWSKPGRAQLESLPLAPWAARRRQDLLELLDRLNPTIEELSAAVEQQVKHRPEVLRLMTHPGVGPITALAFVLIIDSAERFACGKQIASYVGLIPGEDSSSDRRRLGHITKQGNSLLRFLLVEAAQAVVRRDPDWRRRYTHLAMRRDKRIAKVAMARKLAVRLYWMMRKEWNYEQLKKFGSYAGESEHVNGVQ

SEQ ID NO: 101904 - protein, 450 aa, unidentified
MREPEEIQDEAYERVLDRVCAIDVGKASGKVCTRVPHPSRPGQRRTRVWDVDATTNAILELGEYLASERIEKLTLESTSDYWRIWFYLLEAAGLDVQLVNARDIKNAPGRPKTDKLDSVWQAKMTERGMLRPSFVPPVEIRQLRDYTRLRVDLTRERTRYWQRLEKLLEDSLIKVSAVASTLDTKSVRDMLEALIAGERDPKVLADLARGRMKAKRAALIEALTGRFDDHHAELTRMLLDQIDQLNVQIDRLTTRIEELIAAIPAAQGADADGTTGPGADRGADAAVLPAIDRLDEITGIGREGAQAIIAEIGLDMGRFPTAGHLVSWAKLSPRTIQSGATSRSGRTGKGNPYLKGVLGEAAAAAARTDTFLGERYRRIVKRRGKLKALVAVARSILVIIWQLLADPTARYQDLGSDYYARRTNKDRRARSHIRQLEALGFTVTLTQAAA

SEQ ID NO: 101905 - protein, 351 aa, unidentified
MVIIGLDYHPSFQQIAFVDQETGEFGEKRLVHGNQEAESFYRELKKRGVSVRVGMEATGHARWFEKLMTELGFELWIGDPAQIKAKRVRKQKNDRDDARLLLQLLAENRFPKVWVPSVENRDLRQLLWHRHRLVQMRTRIMNQLQAVAMNEGVRRKKGLWSKSGRAQLEAFLLAPWATRRRKDLLELLDRLNPTIAELSTAIEQEAKKQAAVVRLMTHPGVGPLTGLAFVLIIGPPQRFRCGKQIGSYLGLIPCEDSSAGKQRLGHISKQGNSLMRFLLVEAAQIAVRDDPNWRRKFLHLAMRRGRKIAKVAMARKLAVCLYWMLRKEWNYQQLLKFGSHAGQLETGHGVK

SEQ ID NO: 101906 - protein, 350 aa, unidentified
MEYIALDAHKRYSFVSVESADGGSRKEARVDHGPGAIRQFLQNFERGSPVAVETVGNWYWIVSEIEEAGMVPRLVDALRAKMMLATVNKTDRLDARGMNRLQRSGTLPTVWIPPGDLRDKRELFRTRMAFTQQRTRLKNRLHATLSKYALTIEESSDAFNKKGRQELALCLTKLPPHTRYAAERVLAQLDSVIDQIAALEARMRETFTPTPEIKFLMSLPGVGFILAVVIFSEAGDIRRFQSASHLTSYSGTAPRVHASGGKVRIGKLRSDVNRYLKWAFVEAANVISMRRRCWPRSYAVRLYEQVRNRRGHQTAIGAVARHLAESTYWMLKRGEEYREPKKSAISFTKG

SEQ ID NO: 101907 - protein, 362 aa, unidentified
MPYRIAGIDVHKKKLAVVVADVEVEDEYQFERRWYGSNPDQLRVLSEWLIEQQIEEVVMESTAQYWKPVWGALERYWKPRCQSREGAGRMSGTLHLAQALSNRGRRGRKKDFRDAERLVKRLVSQELVLSFVPDTEQRMWRTLTRTRYQRTRDKVRLQNQLEALLEEAHIKLSSLVSDLLGASAHRMLKALADGETDPAALAALADQRLRATPAQLHDALGACMELNPVYRRLVKMTLEGLQFVEQQIGQLDQEMASLLRQHQDAVERLAVVPGLGVDSAQQIIAEVGAKAATFPSAEKLSSWVGACPGEEESAGVNRSRHSPKGNRQMRRVLNQAANAAVKHKGSIFEIVYRRLACLIHQT

SEQ ID NO: 101908 - protein, 403 aa, unidentified
MSSVFAGLDWASRTHAVCVIDERGTVCTQWEVAHNADGLRDLLRQLRALHVQRIAIERPSGLLVDALMQAGLDVVPIHPNAVKASRPRYRSHGGKSDASDAYLLADLLRTDGHRFRPLAPQSDEIRALRALVRGRDDLVAARVQLGNQLRSLLESYWPGAAEVFAEVDSPIALAFIERYPTPQAAHFLGPKRMAAFCAQHAYCGRRSAVELLQRLRQAPACTAGEMEMDAKGELACCLARALAKLVEQIRLLSSRIEHHVAASDDGRILMSFPRAGRICAAQILAELGSVRERFDSDEHLAAEAGVAPVTYASGKHSAVVFRWACNHRLRFALTTLADNSRHASAWAAAIYAKARARGCDHPHAIRILSRAWLRVIWRAWTDRKPYDPALHGGLQTILKTAGG

SEQ ID NO: 101909 - protein, 347 aa, unidentified
MRFYTTQHPFYCGIDLHARTMYVCILDQAGEILVHRNMTATPEALLKAIAPYREQIVLAAECMFTWYWLADLCAEHGIPFVLGHALYMKAIHGGKAKNDKIDAHKIAVLLRGGMLPQAYVYPAEMRATRDLLRRRMHLARKRGELLAHVQNTNSQYNLPAIGKKIAYKANRDGVAERFADPAVQKSIEIDLALITYYDELLRDVELTIVKTAKHHDAQTLYLLQTVPGIGQILSLVLLYEIHDIARFPRVQDFASYCRLVKCAKESAGKRSGTSGSKIGNAHLKWAFSEAAVLFLRDNPAAQKLLARLEKKHSKGKALTILAHKLARAVYSMLKRQTAFALETFLHA

SEQ ID NO: 101910 - protein, 420 aa, unidentified
MKVVYPVCCGVDVHKSFLVATIIKTEGITPKYSKKRFSTFNNSILQFKQWLLDNHCLDVCMESTGKYWVPIYNLLEDKIRITVASPKWVKAVKGNKDDNKDSKWIGDLFRLGLVPGSYIPEKPIRILREYTRYRSKLVACKSSEKNRFQNSFTVCNVALDSVVSDMFGKSASKITDYLMNTDTENFNPEYCKSLLHGKMKPKEDAVVDSIQGYSITPAQKERMVMVREHLEYVETSIENLDSKLDGLVCSYEPNISLLCTIPGVDRQSAISIISEIGVDMEQFANSKRLCCWAGLTPGNNESAGKKKSVRITRAGVYLKPALVQVAHAAVKSNKSPYYANKYERISKRRGKKRAIIAIARMILTAIYFVFKSGEVWNPSDLFKVDMSVVLQNKQKQKAIQHAYKLLIAEGLLDPAFVPVA

SEQ ID NO: 101911 - protein, 332 aa, unidentified
MRYIGLDIHKKHTQACVRNEHGNILSSERFRTESEDIAEFFARQEVHGPLSVVMEATGFYFWIHDCIAARGHRVMVVHPARIKPLMKAKAKNDRNDASMLAELLRSGCLQGIYVPPPEIREMRDLTRHRESLVRKKGDLKREIVSSLDQHGVKTPSDYRVNFTKKYIEWLRSLNDFVVSEKLDMLEMTVSKIKNVERLIEERWGEDEDVQIIRSVPGVGLVTATVLKAEIGDVARFPSAENLAAYVGVSPTTFQSGEKEWSGPARHGNNRVKHVLIEAALVHTRSCPDSKISRYHLRKRDSIGRKKANVATGRKLVEAIYFMLVRRQTFHAH

SEQ ID NO: 101912 - protein, 419 aa, unidentified
MREIGLDVHRDFCEVAICEAGEVRSAPRIKTTPEELTLFAESLGHDDRVALEVTGNAWSVARIIEPHVAQVLVVSPNDTGIRQARAKTDRLDARALARLLAAGSLEGLWMPDQQTRALRRRLQRRSQLVKARTRAKNEVHAALMRQLIAKPKVSDLFGLEGRRWLVALELPVEERETLDSALRQIDFLDREIAEADRVIARDALGSAEIRRLMSVPGVNVISAATFMAAVGEIGRFPDPRRLVGYLGLDPKVRQSGSELAHHGRISKQGSTSARHALVEAAWSVVLQPGPLRAFYRRLRARRGAQVAIVAVARKLAHLFWCLLTRSEDYAYAQPSLTRKKLRRLELAAGAPKGEVERGLWSTNAAMRTAERELARQGETAYERTVADWKAQQGKRVGAGAAPGRASRAARQGSAPEPAL

SEQ ID NO: 101913 - protein, 365 aa, unidentified
MADRQALGLERPTISMGRHAVDVGGARTPARAKSSHHKVGRSRRPLHESASMITIGIDVSKARLDIAVRPSGERFSISNDATGHAELRDRLHKLHPERIVLEATGGYEALVVQTLSSAKLPVVIANARQVRQFAQAAGRLAKTDQIDADVIAHFGEAIRPEIRAIPVEAHRQLEALVTRRRQLIEMRSGETNRKDTAPPVVHPSIEGVIAFLSEQIDHVDKDLHRLLRSTPAWREEDDLLQSVKGVGPVLSATLTALVPELGKLTRKQIASLIGVAPLNNDSGSRIGKRTTWGGRAPVRAVLYMATVAALRFNQTIAAFFARLVAHGKPKQVALTACMRKLLAILNALMRDRRPWNPQLAGEKCP

SEQ ID NO: 101914 - protein, 345 aa, unidentified
MTMVETRAVTGGVDTHADKHVAAALDPVGGLLGVEEFPVSPAGYARLLGWLGGFGTVALVGIEGTGSYGAGLARYITAAGIRVVEVDRSDRQDRRRQGKSDPLDAVSAARAAQSGRARGAPKGRDGAVEAIRALMVAKRSARSERVQTINQARALVLTGPDDLRTRFAGHTAAGLVSGLASLRPRPGDVVGYATRIALRELGRRAEFLDGQLERLDELIAPLVAARAPGLLALHGVGPDTAALLLAAAGDHPERLRSEAAWAHLCAAAPIPASSGKVIRHRLNPGGDRQANHALWRIVLTRMSAHPPTLTYVERRTKEGLSKKEIIRCLKRYVAREVYRHLRAAG

SEQ ID NO: 101915 - protein, 460 aa, unidentified
MNQYFLGIDASKGYSDFVMLNEKKQPVIENFQLDDTFEGHARLYELLRSFNQDHPEATIYAAVESTGGYENNWFQSLLKFQGSLPIKTAHLNPLGVNYNHKADLKRNVTDKISAQNVAEYMIAHPEKVSYQHQDSLASLRKQWGFITMLTKQSTQLLNQLESLVYNANPEILMYCKDGTPQWVLKLLTLYPTALRLSKAKVKSVARIPYVSKDRARQLVATAKKSVASASDNVTQQLIVATVKQVVDLKKTIKEQTKILTNECAVPEVELLKTFIGISDYSAIGLMLEIQSIQRFLLSKKLASFFGIHPAYKKSGDGTWKYRMSKKGRKEPRRILFMVAMSAIKSNPLIRSIYQQAVQRGMEKKAAVGLCMHKILRIIYGMLKHNKTFDPEIDRKNRQKKPLRQRRVRQDKNRRYQDFDSKAPISSRQKIKRKERKQSQNVSNVECGISEASVPITELAN

SEQ ID NO: 101916 - protein, 432 aa, unidentified
MMVTAEGDGRVLGIGIDWAEEFHDVAVGTPEKGVIEQFRIEHGPDGVAALVERALRLEPDPAEVRVVLETRHGLLVEALLDAGFTVVPVNPDLVARRRGPARKKDDAEDARICCLLALDRHAGLRALVPHGELGGELRAIARDDERAARDQRRLLNRLRADLQTTYPAALTLAGKDLGAPTVLRLLQRWPTQAELAAATREELVTFALASKHGWPERFADRVTAALATPSLPTRDYLVRAKSAGIRLAAVQLLALHETRRGWEQRMAELLLGGRRTGRDHTVKDPDPGKAFPGGAIYLSFPGLGDRLAARVAGEIGEHVTQYESPNALQCYAGRAPVTRRSGKSDFVVARRLAHNRYLGDAVHQWAFCSLTQSGWAREFYDHKIAAGKSHHNALRALGNRWLEVLWHCLSRGVPYDEATHVANRNRALGRAA

SEQ ID NO: 101917 - protein, 339 aa, unidentified
MDTVTGELSRRRVCPTLRGVTEWLAELPAPVAVAYEAGPTGFGLARQLTAAGIRCVVVAPSKLQRPPGDRVKTDARDARHLANLLRMDQFVEVRVPGVKQEAARDLVRAREDVRGDLMRSRHRLSKLLLRHGIVYSGGHPWTGVHEVWLRGQHFDLPGLQLAYDTAFETVLLTTARRDRLDKAIAQMAANSEYTPVVRRLCCLRGVSTLTGFGLAVEIGDWQRFTGSTIGAYLGLVPTESSTGSKRVQGSITKAGNTHARRLLVEAAWHHRKAYRPGLTMQARWNLAPAAARARGHQGNQRLHDRWEVFTERKKRPVIANVAIARELAGWCWSLAVMDG

SEQ ID NO: 101918 - protein, 485 aa, unidentified
MAKRRMSTFERLESGRLNRKQRRELGRQVAVADPGLTIVHANAGGIDVGNESHYVAVPPDRDPNPVREFGCWTAALNQIAEWLQSCRIDTVAMQATGVYWIALYDVLEQYGIQVVLANAQHTKNVPGRKTDVQECQWLMKLHTYGLLRDSFRLAQEMESVRTIWRLRDRHVKEAGRAVQHMQKALTKMNIQLANVISDINGLSGQEIIAAILQGERDPWKLADLKHYRVRASREEVARSLEGNWREDVLFELQQAVDSYHFAHRQMQECDRKLEGYLASLPARMLDIPVQPESRQAATPKKKTKKAKRPRGNQPHLDLKTELKRICGVDLTSIDGIDVMTALTIVSEIGTDVSRFQDETHFASWLGLTPAKDITGGKTIGRGKRKVKNRVAVALRTAATTLLKSDSYLGARYRSLRRKLPSFASAVKAMGRYLAILIHRLLTKGEAWVDRGATQFERRHTEQELASLSFKARAKGFKLIPITEAS

SEQ ID NO: 101919 - protein, 317 aa, unidentified
MSFVGIDVSKLQLDIAVRPDNKKWSVVNSEANIAKIVETFNELSPQVIVIEATGGMEMPLVAALSHARLPVVVVNPRQVRDFAKAIGRLAKTDRIDSEILAHFGEAVKPDVRLLKDKETQMLTALVTRRRQVIEMLTAEKNRLGISPKVVHKDIQKHIDWLQARLEDIDRHLDSAIRKSPVWREKDDVLRSVPGVGPVLSLSMITGLPELGTLSRRQIAALVGVAPLNRDSGLFRGKRIVWGGRANLRAVLYMAALSASRVNPAISTFYRRLIEAGKKPKVALTACMRKLLTILNAMMKNRILWQADYSTCTTQKNA

SEQ ID NO: 101920 - protein, 348 aa, unidentified
MLADQLDYIVGVDPHRDSHALAVVHVVTGAVVFESTVIADSDGYGQALRLVDQHAPGRRAFAVEGTGSFGAGLTRFLTVRGERVLEVGRLRRERRSGGKTDALDAVRAARSVLTQQRPATPRAGGERQALQALVAAREGAVNAKRAGLCQLRDLLITTPEPLRSELRPLTRARLLQRLAATRPHSRHDAELRGSMLALRSIARRVLQLTAEERELAAEIETITRKLAPQLLEQPGVGPHAAAQLVLSWSHQGRISSEAAFARLAGAAPIPASSGQTIRYRLDRSGDRKLNRALHMILVTRKRSHPATIAYIQRRIQEGKTRREANRCLKRYLARSLYRLLEHGPPLAT

SEQ ID NO: 101921 - protein, 361 aa, unidentified
MNVIHYIGLDVHKKTISYCIKTADGRIVREGKLEATRPALRSWAEGLRESWCGAMEATLFSAWIYDTLKPYAAKLVMGHPARMKAITAGKKKSDTIDARTIADLLRCDLLPVCYVLPPEMRDLRRLLRYRNMVVRQSVRMQNKMAGLLMESGTTFVKTKLHGKKYFSELMKSLEEVPESVKDLLRMSRGSMEMFESTQKQIVQRLLSEPALQQRVERLMGIRGVGAITALTWALEVSDPHRFSSIGNAVSYCGLTAAFRSSAGKEQRGPISKQRNAWLQTVLIEAAKLAPRWNPQLAALHSRQLELGHANRATLQVARKLVAYLLAVDKSGQSFQVLTPPPTEKTSTKTKTRKRASMAKAA

SEQ ID NO: 101922 - protein, 428 aa, unidentified
MYYTQNEKILQVGEEKIIVGIDVGSEKHYARAFDWRGMEYSKKAYVFTNDAEGFAGFFEWITGIMEKSGKETVMPAMEPTGHYWFDLAKFIQDNGMQPVLVNPLHVKRSKELDDHLPSKNDRKDPKTIAKLVIEGRYAYPYMPEGIYAELRNATVLRFQAEAELTRIKNRIQRWFAIYFPEYKDVYGSFSAVSSMMILKKAALPCDIIALGEEKINEIWREAKLRAVGKKRAKTLVEAARRSIGHTEGHETARLEIFLLLEDYDRLQNRLEQIMELIETLVSKVPYAKKLMQIKGIGIKTVSGFIAEVGDVSRFNDPKQIQKLAGQAIVANSSGKHKGQSRISKRGRKRLRFLLFEAVLSLTATNPEFKEIHHYYTGRKTNPLKKKQSLMVLSNKLIRVFYAILKSGADYEPEKLLRDIRRPEEPQAA

SEQ ID NO: 101923 - protein, 316 aa, unidentified
MAKEVTESTLGIDVAKDELVICDWDTEEIITLGNKASTIKDWLESLYGPVRMAIEPTSNYHLEFVEQAHALGFAVYLINPRQLANYRKAVDVRNKTDPLDAWLLARFLARESDSLRPFKPQCAKAKQLWSLLKRRATAVRARTQLKQSFADTKLSIKALFSEIQRVLDRIDQSILTLIRQLGWWADYQRCLSMPGIGKLNAAALVTVFHRGAFAGADAFISFIGLDISVRESGKFKGKSKLSKRGEAEIRRLLYCATQGARSYPPFDDYYQKQLDKERSKIGAKCSLARKLARIAFSLMTKQQSFKKQDIAYSISP

SEQ ID NO: 101924 - protein, 382 aa, unidentified
MPTNLRYVGLDVHAETIAVAVAEPDGEVRPLGILPNRPEAVAKLIRKLGPREHLRVCYEAGPCGYVLYWQLTRLGVPCDVVAPTLVPTKPGDRVKTDRRDAEKLARCYRAGDLTPVWVPDAAHEALRDLVRAREAAKQDQLRARHRLGKFLLRHGRRPLEGVKPWTQRHRRWLDALHFELAAQQATLADYLYEVDHAATRLERLEAALDEAVQAAPAPMRAVMAALQTLRGIRQVIAATIVSEVGALSRFPHPRELMGYSGTVPSERQPWSSRGHHHGRHTPSAPRPGRSRVGVPLQSEVREGPPATPTRPTGGDHRPRLESAAAAVYALSSPPRAGQTHAARDHRRGPRARRFHLGDRRRGRTPARCGSVRNTGIGGRRAR

SEQ ID NO: 101925 - protein, 348 aa, unidentified
MRGTLQMQVTTIGLDIAKNVFQVHGIDAKEKVVVRKRLRRSQVIAFFKALPPCLVGMEACATAHYWARELTKLGHEVRLMPAKDVKAYLKRNKNDAADAEAICEAVRRPTMRFVPIKSPEQQGQLMQHRTRDVLIRQRTQIINALRAHLAELGIVAAQGDAGLNELRAIVADDRDERLPIDARASVIVLAAQLEALQTLIAAIEKRIKMQHRSNETSQRVETIPGIGVLGATAIVATATDPKVFRSGRDFAAWIGLVPRQDSTGGKQKLGPISKQGDRYLRRILVVGAIAVLRRAQQNPGKYPWLTQLLARRPFKVVAVALANKMARTAWALMVHGGTYRAPELAASA

SEQ ID NO: 101926 - protein, 429 aa, unidentified
MALIIGADIGKLFTYYSFVDLSGEIIVKSMVKANDSRGLNCVQAKINEIAGSPNDQVIIIMESTGCFSGRIRDFFLSHQNKVMEINPLISHSIRNVTIRKVKNDKADALALAMLYVTSTSTHKIMERLRFYHEENQNILNLRVLTRNLDKVTKARSIIKLRLISDLEQVLPYYSEIFKDCSCNMSLLFLELLVDSDNDFTKLTKSRIIKTLKLSGATRSKEYYDELYKKMKKCFEEARVIGRKVSSYYITIRSGITLLKAHNEEIKKLEQEIEKLAKEVKNIELLKSIPGVGEKLAVSIAVEIGDIGKFNHAKELVAFCGVDPSVRQSGQFTASSTKISKRGSPYLRKSLYLLALASVKKHKNGECTNKVIHEYYENKKKNKAKKVALGAVMNKLVRVIYSVLKNQKPYIMITPEEQKTIYKSMLGKAA

SEQ ID NO: 101927 - protein, 348 aa, unidentified
MTRILAIDLGKFKSVACLYDADSADAVFQAVQTRPDTFYELFLELKPDRVVFEVCGTAGWIHDLAVELGFAVQVANPQHEAWRWKKVKRKTDRGDALKLARLSAMNQLPTVYMPDRRTRQWKSLIAYRHNLVDRRTAIKNTIRALVDTQGLRMPGGKSAWTSESLNALRSLARSVGRCGRDNLWRGQLQSELTALRQVNELLLKVERRLDRLGASDERVQRLQTAPNVGPRLAELVVATIDRADRFRSGREVSAYAGLVPRQFESGTMSRQGRISKQGPGLLRRLLVQIAWGMEKHSAYVAQQFARISGGQKTRRKKAAVAVARKILVWCWAMLRDGTRWRDPSPQAA

SEQ ID NO: 101928 - protein, 390 aa, unidentified
MTKRKTETVNDLSRCLDPLDMDATLIAVIEMSQSSWLVAGIVPGVERQPLKKIAIDEHALLKVLTNWRKEAEKKGHKITRVTVAFEAGHDGFWLARRLAAFGIEVHVIHASSVAVTREHRRAKTDRLDTELLKRGFLGWLRGERGHCKMVLVPTLAEEDAKRPSREREALVGEASRIITRIKAAFVRLGIRSFNPKLKAATARLGALRTPEGEPIPPNTLAALKRDLERHNIIKRQIREIEQTRLDRLAQAPAKGPHPMVLLLARVIGIGVETADMLVHEVLSRNMRDRRAVARYAGLTGSPDESGAKRREKGLARSGNARVRRGMIQLAWRFLWLQKDSALAEWYRQRTQAAPATRKTLIVALARKLLIALWRLAHDGIVPEGVQMRPA

SEQ ID NO: 101929 - protein, 421 aa, unidentified
MHRKNDNRQVEKRQRITDATLVIGMDIGCEFNAMCLMSKEGTILGRYPKIYNSRKGFDYFHGIVESMKEKYGFTDVLIGMEPTGHYWRKIAYFAMDKQYEVRFIRTTALKHQRELDESSSAKNDIRDAYTIANIAREGKYIDTVIEDNIFRQLRTLAHTREKIQRISTGAKHALKGMLEDYFPELKHIFWSMKAKGLWALLEHCPFPEDVLKTDIDTVTELIAKSTRRKIQAHEKALQIYKAAQHSIGLQRVGDADRWRVAAYLSEIRHSETQLKEIETQIEALLKKIPFAEYILSMPGIGTLTCGVFLGELGNPCNFTNPKQIVKYAGYDPKEHDSGQRTGRRIISKKGRWLLRKYRYFMAMRVVHRSPFLKDYYENKQKTMTKKEALCAVVIKLIKVIFALLRDKRTFTEKQSCLKQAA

SEQ ID NO: 101930 - protein, 416 aa, unidentified
MNAAGIDVSSRKSTVAVLRPLGEVVRLPFDVAHNTEGLASLAEQLKALDGETRVVLEHTGRYYEPVAKALHEAGLYVSAVNPLLIKEYGANSLRRVKTDKADALKIARYALDNWTDLRDYTPMDTIRYDLKTLNRQFQLASKQRTACSNNLIALLEQSFPGIRRCFDSPVRSDGTQKWVDFAHTFWHVDCVRKQSYNAFSERYRKWCKRHGYFFKQNNAEEVYALAKNAVVLVPKSKVTKVLVQEAANQLTSTSRSVETYRTEMERLASMLPEYPVVMKMYGVGKSFGPQLMAEIGDVRRFERKQALVAFAGIDPMPNQSGDKNIRSNRSSKRGSPYLRKTLFNVMGIYLKCAPLDEPVFQFLDRKRSEGKPFYVYMTAASNKFLRRYYAQVRDYLAALDDLPPVDMDSTGLKTSD

SEQ ID NO: 101931 - protein, 318 aa, unidentified
MKIKTEQNINVGVDTGKFQLDIYIRPLGIYFTVTNDEKGIKEAIKKIKNYAPMRIVIEATGRLEMAFIIACAEAGLPFVIANPIHIKRFAGAIGQRAKTDKLDAKLIAHYAEAVQPQLSALKPEIIRIMSDLVARRNQLLSMQTMEKNRIQILPKHLTMTIKPFLTLFKQQIAKIEAKILSLIESCPDYQAKNVILQSMPGIGKIAAASIISNLPELGYINSKQASALIGVAPMNRESGCYKGVRKIQGGRPQIRTVLYMAMMSAIQCNPVFKTTYQRLVAAGKPKKVAIIACIRKMIVILNSMLRDGVMWEAPKALN

SEQ ID NO: 101932 - protein, 314 aa, unidentified
MNAMSATYVGVDVAKDSVAVRSVNAAKIVTVPNTSQALEAWLDGLPAGTQLICEATGRHHRLMQALCATRRLALTCANPARVRDFAKSLGRLEKTDAIDAEVLLRYGQERRPPATPVPSPALRCLGDLLMARQAVTGQITAFRLRNDLLSAPARRALNGVIRALRSHRLSLERELESWLDSAAGEPWRDQVQTLCLAPGVGVLSALSLIAYLPELGTLNRRQIAKLAGLAPLPWDSGKMRGLRIIQGGRAPARRVLYQCAMVAARWHEPTRLHYQQLRSRGKSASVAYVAVARKLLTYLNSLLRPAHVADLPVS

SEQ ID NO: 101933 - protein, 367 aa, unidentified
MGKLVVVTSAGQEGVERHGKPTPGTDVWIGLDVSRSKWVYKLRWDGREQRKLSTPGELVHLQRLVEQYRDCKVHVVYEACGFGYEIAWWCQEKGIDVLVVAPSTVEHAPGSRVKTDRLDAGKLARDREQGRLKGVRIPTRTQHAQRQLSRTYAQAVKDKQRTQARVRSLMQEHGRIGPPPQAGWNAYLRWCKKQQPQLPATVWQCIEELFHLREAALVTVKRLRAALHKLSAESQYASLVKGLKAQAGVGTFTAVRLVLELGDIRRFPTAGSFPRYLGLTPSEYSTGASERRGHVMKCGPRFIRAWLIQCAWASIRPGRDPRLRAVFERLSPKLGKKRAIVAVARRLALRLRARWLEALAVDELATA

SEQ ID NO: 101934 - protein, 354 aa, unidentified
MEQHTHFVIGLDLGDRRSELCVLDGPTGEVVERGSVSTSAQAFERRFAALPACRVALEVGTHSPWVSRQLASYGHEAITANARELSFIFKSKRKSDRADAEALARVARLDPRLLKPIAHRSAQAQADLALIRGRGELVECRTKLINSVRGLAKAQGARLPACSTPAFARRVPGAIPEALREALLPMVASIQELTAQIRVLDRKVEQLARERYPQTQALQQVTGVGSLTALTYVLVIEDPKRFEHSREVGPYLGLVPGRDQSGARDKPMGITKAGDAMLRWLLVQSAHYILGPFGPDTDLRRFGEAIASRGAQYDYQRAIVAVGRKLAVLLHALWRTGEVYEPLRGSSNKKGKDI

SEQ ID NO: 101935 - protein, 424 aa, unidentified
MSKKKSSVAGLGALYARVCGLDVHKKVVVAWVRILDAKDGTVQSTLRQFGTMTADLVELRQWLAEARVTHVAMESTGVYWQPVFNLLEGHFKTWVVNAQHIKKVPGRKTDMKDAEWIAQLMQCGLLRPSFIPDRQQRELRDLTRQQTKLVQQRNAVDNRIQKVLETANIKLGSVASDVLGVSGRKMIEALIAGEKDVTVLAELAQRKLRDKIPQLQRALEGELNDHHRFLLRQLLGQYDFLEKEIASVSERLGAIAPPSFRAAVEQLDAIAGVGERGARALLAETGTDMSRFPTHKHFTSWAGQCPGNHESAGKRRSGKTPAANRHLDAVLTEMAHAAVRTKNSYFKSQYHRLAGRRGKKRAIGAVKHSLLVTVYFMLRDHKPYKDLGVDYFDKLNPQQRIRYHVRKLQDLGQQVELSPIADAA

SEQ ID NO: 101936 - protein, 349 aa, unidentified
MTNPIIQTIGCDLGDKWSTIYVLEQEGTGKRERIRTTPDAMGQYFRRPAAHVVLEVGTHSRWVASQLRELGHRVTVANPRRVQLISASNSKSDETDSELLARLGRADEKLLAPIEHRGRQAHADLEQLKARDILVRMRTTLTNHVRAVVKAFGGRLPKTTSEAFVKKTKALLPAELVPSLEAVYEAIKAIDEQVKRLDQGIERTASRYPDFKVVSQPHGVGTLTGLAFLLTVEDKTRFKKSRMVGAFFGLRPRRDQSGEVDKQLHITKAGDPFVRRLLVNCANFILGPFGKDSDLRQWGLAMAKRGGKNARRRAKVAVARKLAVLMHRLWVTGEDYAPLRQATPAAASA

SEQ ID NO: 101937 - protein, 366 aa, unidentified
MQKTSTMRRTANKIFKGRQLTIGMDLGDRWSFYCVLDESGGVLLEDKLATTPEAMKQTFAMIPRSRIALETGTHSPWVSRLLTQLGHEVIVAHAQKVDSITKSTRKDDRNDAKALARLARIDPELLGPVQHRSAKAQMYLTVIRARAELVRVRTALINGARGLTKSYGERLPKRGTQQINGEFGAELSTELREVLEPLFREIESLNERIKEYDRRIEKTARETYPETELLKQVKGVGDLIALTYVLTIDDPHRFRKSRDAGCFVGLQPGRRNSGDSEPQMHISKQGDEYLRTLLVQGAHYILGPFGEDSDLRRWGRKLAERGGKNAKKRAVVAVARKLAVLLHRLWVSGEVYEPLRNSQKVIRAAA

SEQ ID NO: 101938 - protein, 330 aa, unidentified
MTNVSELTTEALFVGIDVSKDTLEVALSENDKTQTFGNDQAGVAALLGQLKPVAHRIAVVLLEATGGLEHAAAAALCAHGFAVIVVNPRQAHAFAKALGHLSKTDSIDAKALAQFARTLHNSDKRERLLYRLPTPAQELLLAMVTRRAQLISMRVAESNRLASAHVSQRKSIERHIKILDKQIGQIDDDAQRHLRSHFQDKLALLKGLKGVGVGTQTMLMAALPELGSLKQREISKLVGVAPLNCDSGKFKGKRITWGGRSHVRAALYMAALTASRHDPVIKAFYERLTLAGKPKKVALVACMHKLLTIMNAVIKSAQPWQASYPQPNNV

SEQ ID NO: 101939 - protein, 424 aa, unidentified
MKVTYQTCCGVDVHKSFLVATIVKTTGGIEPSYQKKRFSTFNNSILEFKQWLLDNHCHDVCMESTGKYWVPVFNLLEDKINVVIANPKWVKAVKGNKDDTKDSKWIGDLFRLGLVKGSYIPCKKVRILREYTRYRYKLVSCRSSEKNRYQNALTVCNVALDSIVSDIFGKSSTSIIDYLLEQSGTSINHEEIASKLLRSLKSKEDAVIESVEGYQMTDAQKYRMRLVRAHMDYITAKINDVDKMIENMISSNPDFENAVQFLCTIPGVKRDSAITIISETGTDMSQFSSSKRLCCWAGLTPGSNESAGKKKSVRITRAGVYLKPALVQCAHAAVKSDKSPYYKKKYESLVKRRGKKRAIIAIARMILTAIYQMLSTGEQWNPSDLYKIDMPVALVEKQKAKAIKQAKKLLQREGLLPPDEPLAS

SEQ ID NO: 101940 - protein, 370 aa, unidentified
MGNRSMFVGLDVHKETIDVSIAEGDRHGEVRHYGVIASDLEPLDKVVRALRAPGRTLHFVYEAGPCGFGICRHLTGRGEDCVVVSPSMIPKRSGDRVKTDRRDSQMLARLHRAGELRAIYVPDDTDEAMRDLVRAREDAVVVGTQAKYRLKAFLLRQGRRYPGREGWTLPYRRWLSDLSFPSAAQHIALQEYRDAIAETEQRIVRLTDQLRQLAPTWRWAPVVAALQALRGVSFITAVALVAELGDLTRFRHPRELMAYLGLVPSEHSSGPNVRRGAITKAGNPHVRRLLAESAWAYQGIPRIGRQHAYRQEALPKVVCDIAWKAQLRLTTRFRRLVARGKAKPKVATAIARELSGFVWAIAREVSPTSR

SEQ ID NO: 101941 - protein, 351 aa, unidentified
MPQEQVHVTGGVDTHGEQHVAAVLDDTGRLVATAAFSADAAGYRQLLAWLTSFGVLDRVGVEGTGCYGAGLARYLARQDVTVTEVNRPDRQARRRRGKSDPADAAAAARAALNGDATAVPKAGTGPAESLRALRAARRSAMKARTQAANQIAALTVTAPDPVRRRLAGLRPAARIAACARLRPAGSIADPAVAARHALRLLARRHQALTAEVTDLDTAITALCAQASPALLATPGVGPDTASALLATAGDNPGRLRTEASFAALCGASPLPASSGKTTRHRLNRGGDRQANNALWRIAIVRLATDPHTRAYAARRTAEGKTSREIIRCLKRYIAREVYQILTQPPPPLDTQ

SEQ ID NO: 101942 - protein, 475 aa, unidentified
MNIKGSKKKNQVLSVNIFEQQRIIAKADAIKAGLKASTWHELETRGKFDKNDKLSFVSDDMLILGCDIGSETHYVRAIDTRGRELSKSAFGFSNTAEGFESMLDWSAKLAAANDKKQIVLGLEPTGHYWFCLTTWLVAKGISVVQVNPYAVKQTKEVEDNSQLKDDIKDPKLIANLVKDGNFGMPYLPEKLYADIRRLSMFRDQLNEDRIRNLNRLHREIKIYFPEYKDAFGKIDGTFSLELLKAAPFPDELAALGTEGMKQIWHEAKLRGRGYANASSILEYARKSVGIKDGADAGRQAVKWFVSRIIELDGQLSDIENKLNERCMEIPHAKNILAISGIGENILSGILAEMGDISRFDDVKEIQKLSGLGLVACSSGKHTGETKISHRGRKRLRYWLFQAAKSAVAHSGEFKELHVYYTTRKQNPLKKMQSLIVIACKILRVIFTILTKGTTYDPKKLLGDIIRPNQAIPQAA

SEQ ID NO: 101943 - protein, 430 aa, unidentified
MNESVSEPPLSPKVAAFVGIDWADQKHDVVLRSAGEPAKPEHQVIKSEINALNDWIAQMHERFGAKGKVLVCLEQSRGALICQLMAYELFELYPINPSQLANYRKTFFSSGAKDDRPDADLLSELLMCHRDRLKVWKPDDQLTRELATLNEDRRNAVDRRTELANEIKSELKLYFPLALQILENDITTALAADLLVQWPTLAELQKVSPGKLRKFFYGHNCRQEKKILERLALIKEAKPLTTDLAILRPTALRVKLLAQQLKSLLPFIAEYERRIAELFGSHPDRFLFDNLPGAGPALAPRLLTAFGTDRDRFEVAGDLLNLSGIAPVRIASGKKTGKNASVHCRRACPKFLRQSFHEFSECSIRYCPWAQACYQAQRDRGKGHHTAVRAVAFKWIRILFACWKQRIPYDPDRYLKALQNRGSEYAQTVA

SEQ ID NO: 101944 - protein, 395 aa, unidentified
MYSLLVGIDVSKDLFSTAGINSGGKETFSRACAMDSSGFEELLKTIRSHCEDFSEVVIAMESTGCYHINLFSFLTSRGIRTMVVNPLLIATFAKLSLRKTKTDKKDAMTIARFLLDHQEEISQLSVSQDLQDLRDLSRERESLSHLISATKVEIKRVLRTIFPELETIGDIYTGVMLRLLQEYPSARLVRAAKLKAIAKLLRQPYVGNKLTFTAEDILRAAKTSIATVSPGKEIILRGKIATLVHLQDRLDEITKLLTDLCKATRVDDLKILRSIKGVGPKTAAPFLAEMGSVDNFLSHKKLIAFAGMDPSVCQSGQFVGMSRLSKRGNRHLRRAIYLMTASVVSKNAWFKAYFQKRKAEGLPPQKALFATVHKLIRVIFAMLSQRTYFNVKEAI

SEQ ID NO: 101945 - protein, 395 aa, unidentified
MFIVGIDIAKRSHEAIIIAEDGQVVRKAFSFRNNCTGYNLLLEQVRKLTLVKSQIVFAMESTAHYWLALYARLLKDGYTVMVLNLIQSHSLRELYIRKAKTDARDSLIIADLVRFGRCKASNVPQDKILALRELCRSRAYLVDMAADLKRKLIALLDRIFPEYESLFDSVFSKASIAVLRKYSTPQKVKNAHLGELTDILMERSNGHFGEWKAHQLKEAACSSFGIDDSGGVYSMLLGMFLEQILSLTAQADSLEKQISVFFQEFNNPLTSIPGVGTVLAATILSEIGDITRFSSAAKLLAYAGLDPSVKQSGEFKSNQNRMSKRGSPYLRRAIWLASTVAVHRDPMFQTYYEKKISEGLHYINVIGHVSRKMTAVIFAVLRDGQPYQPILQSAG

SEQ ID NO: 101946 - protein, 339 aa, unidentified
MFMIGIDPHKGSHTAAAVDRSESVIATLRVEADRDQRQHLLDWAASFEPRTWAVEGATGMGALLAQQLVAAGERVVDVPPKLSARVRLLDNGRIDKTDPNDARSAAVVAWRTPTLNEVIGVDEHRVVLRLLADRDHQTTAQRTRTICRLHALLCLVIEGGATRSLTVDRAEKMLATVIADDPVSRARVVAAGEFLDEINALDAVRKDVRRRTAVAVKASASTVTDVYGIGPMMAAIIIGHTGDVRRFPTAGHYARHNGTAPIEASSGPNKRHRLNPRGDRQLNHAMHMAAVTQVGHDTPGRIYFLRKRAEGKSSKEAMRALKRQISDAAYHRLLTDATR

SEQ ID NO: 101947 - protein, 428 aa, unidentified
MDQVNHNRLEEFRQLRQEVRHSGEYLIVGIDIAKDRHYAFFGTATGKTLLRRLVFSNDHEGFRKLLDQAEALRVQHGLKKVVYGMEPTANYHKPLGEYLIGLGRTVVLVSGVTVKRNRETLDGRWDKHDIKDSANVADLISQGKCLYYEHPSAELRGLRGLLSLKRRLKKQEHGYKVRIRNHLIAQYFPEMDRDYAQLGAEGLSIVRWCFPASQIVQLDVDPFIERVTSRRIRVEKRRRLEVIWEKAGESIGCDGVPGVEHEAKVMVEGLRQIREMIKETEEKILGLCKQFPAYPYILTIPGFGPDVSAKVLGAIGDPDRFQNGKQVLKMGGLDLSADRSGKDSDKATPVISKRGKADLRYALYQAAFIASTKNRDFMLYYTTKLQGREKEKGIHTKMLVKLSAKMLLIAWTLMKKKEAFDPAYLITE

SEQ ID NO: 101948 - protein, 376 aa, unidentified
MPRYFGLDLHKRYVHGCEWLVDQQKGRHFRFPNTKEGWAGLLRQVDGECWVALEVTGNAFEAHDLLLPHVGRVLLANPVELKRLGSGRHTDRVDAERLAKMLALGTLPTVWVPPPAIRDIRRLVQYRDRLVRHRRRCLTQAKAVLRRHGLDGPRGTDPLRHLQPEQVEQLPEVDRVLLLSALRQRLSVEAELQAIEAELVRRVAREPAVQLLLSVTGVGTVAAATLWAYLGDPTRFPTAKQVTRYAGLDASVHQSGEDQRHGRISRNGCSLLRAVLVEAAHSVARHDCGPLGAFYRRKQRQIGPHKAVVALARKLLVVAWRMLLTGEVYRATKPALLEQKRQQLGRRLEAASNWQAVLWELWPSHGARRRRRRCAA

SEQ ID NO: 101949 - protein, 503 aa, unidentified
MGRRAGCALRPTNEDEKSAESLMHLIYWRGLVKIDRTVSKLRSLVCLIWTASLNERVRNAGADATGPAAARKGVEYLPVAVSIPFKEGAMESTYKVAGIDVHKKMLAVVVTDVAQLGQLQFIRRKFGAGAAELRSLADWMVEEKVAEVVMESTAQYWRPVWQELEKGCKLHLAQAQSNRAPKGRKRDFADAERLVRRFIAGELILSFVPDEQQRTWRLMTRTRQQLTRDRVRLQNQLEGFLEDSRIKLSSHLSDLLGLSGRKMLRALADGETDEGQIAALAVQGVRATPEQLCDALRGAGALSAERRQILKLFLERLELIESQREALAKCAGQALREHQESVMRLAEVPGLGADSAQQIIAEVGAHAATFPSPGQMASWVGCCPGREESAEVSKSNRSPNGNRPMRRLLSQSANAAVRAKGSVFQNLYYRLVPRLGHAKAIWAVAHKLCRVIWKILHDGVDYRETGDRPNPKAVQQRTSKLVRQLKRLGYQVQLTPTAGGAAA

SEQ ID NO: 101950 - protein, 317 aa, unidentified
MTQHTSIVAGMDVSKAHLDVYLHPDGSHRRFANDKTGWRALHKWLPATTSLQSIVYEATGPYHKGVERYLAAHGLPIARLDPRRARRFAEALGVNAKTDPVDARVLAQFGALLEPAVRSLPGPALEQLKELVAARRGLVKQRTRIANKSKTATVPLLKRQFRNAREHAARQIEQIDAQCHQIVRTDPALAPRFDILMSIPAIGIITAMTLLADMPELGALNDKQAASLMGVAPIARDSGAFKGKRHIRGGRALVRQAVYMAALVATRFNPDMKRKYKTLIEKGKPPKLALTAIIRKLIILANALIRDNRTWTEIRPC

SEQ ID NO: 101951 - protein, 331 aa, unidentified
MSSVTILGIDIGKNSFHLHGQDAQGHQVLRKKLNRSKLLPLLAQMPPCKVAMESCGGSQFLTREITKLGHQVQLIAPQNVKAYVTGTEGICEAASRPRTRFVQAKSVDQQVLSTVHKLRKSLVSRRTGVINQVHGFLLEFGVIFPAGYAALERVPALMEEHNLPLRLTLAINRMLDDIRQLTSEIKALDTEIKPQVNRSDAGKRLQSIPGIGPLIASALVADVGNASMYKSSRDFSASLGLVLRQYSTGGQTTLQGISKRGDRYLRILLIQGAQTLLYLIDKRNDAPGDWARNLQALKPLNKVACALANKMAKIVWVLLTKGGTYNGHFTV

SEQ ID NO: 101952 - protein, 337 aa, unidentified
MDKMAVCGLEVSARELVVAMVGKPVQRAANSAAGHRRLLAILTRGGKRVRVVMEATGMYGLDVALVLSAAAGVEVMVANPRSVRDFAKAMMQRSKNDPLDAQVLREYGERMPFRAWQRPSKNRLALWSIARRIEALTAQSRAEKNRRHAAGISQVTPACVRRDIARNLEWLQRSLGKLRQEARKCIAAEAELQRKFQLLVSVPGIAENSALQILGELAMLPGDRDIRQWVAYAGLDPTEYRSGESVRRQSRLSRAGNRHLRTALYMPALAALRCEPHLRGFYQQLVGRGKRKMQALLAVTRKLLHAIYGMFRNDRMYQGRLVFQLPSFAPATLAVKN

SEQ ID NO: 101953 - protein, 360 aa, unidentified
MFSERTSVGLDVHARSVAAAAIDSVTGELFQTRLTPAHDHVREWVLSLPGPVAVAYEAGPTGFGLYRSLIESGIRCEVVAPSKLQRPAGDRVKTDAKDAVHLARLLRIEEITPVSVPTLEQEAARDLVRAREDVRRDLMGARHRLSKLLLRHGIVYSGGKAWTGKHDAWLRTQRFAMPSTQMTFDAGYDTVLTTSARRNRLDQAIKAIATDSDFTPVVRRLACLRGISMLTAFALAVEIGDWHRFTGNTIGSFVGLVPSEHSSGASRVQGPITKTGNQHLRRLLIEAAWHHRPRYAPGAVMRARWDLAPAAARARGDLGNRRLHGRWVGFDARSKRSVIANTAIARELAGWCWSLAILED

SEQ ID NO: 101954 - protein, 346 aa, unidentified
MQHTTIAVDLAKSVFEIAVSHRPGAVVERKRLSRTQFARLLSQRAPSTVVMEACGTAHFWGREAEARGHRVVLLPPHAVRPYVLRNKTDGADAKALLEAVRNEAIRSVPIKSVDQHVLGALHRLRSAWLATRTARLNTLRGLLRELGFAIPVGAREVVPFVYALVSEADAKLPEALRAVMTEAAREIAELETRIQAVEHQLQALARESALVFRLRTIPGVGLLTATALVAFVGDVHRFPSGRHFASYLGLTPRESSSGLQRHLGRITKRGDPYLRMLLIHGARSVLLHAKKAKQCDRLRRWALQREQARGHNKAAVALANKLARIAWAVWRRERAYGSPIEGTPTA

SEQ ID NO: 101955 - protein, 377 aa, unidentified
MLYLGIDQHAQQLTIDLGDESGEMMIHRKVSTKPKLLNQFLEDLRTQAGSEGYLAIVEVTGFNDYLLDLLPKYGCCRVVVVQPVEHKRRKTDRRDARQLRDLLWANRHRVLSEQRLPGVRLVTPANAEQADQRQLTSLMRLLRKQRTQVINRLHTILKKHNLQHDMPAKSLNTATSQSWLCSLTLGSIDGLERDVLQSQLRQLDDEIRKVDAQLKAMFRQSQPARIVASTPGISVYGGLAISSRLGDIKRFANGDSMANFVGLTPSCRNSDAAVRHGGVTKLGSSFVRFFLSQGLVHVLRKDGWLRRWYQRIKKRRGGSVARVAVMRRLVTMLYAMLRDQMPYVPGGPQRYSRLLAMREHQQLSYEQVESLAFNPQI

SEQ ID NO: 101956 - protein, 427 aa, unidentified
MRFIGLDVHRDFCEVAISEGGKARRAGRVAARPAELELFARSLAADDRVVLEATGNALAIAKIVAPQVGEVVLAHARKVRAIAEAKVKSDGVDACTLAELLAADLVPRVWIGDERTRLLRRLVSRRRQLVKQSTRAKNEIQSVLMRTLQERPPVSDVFGKGGRVWLSELELAIDERETVDGCLRQLDFLQAELAHVDRMIAEQALAWPEIRRLMTIPGVDVTTAAALMAAIGDIDRFPSPRHLAGYLGLDPKLRQSGMAKPRHGRISKEGSAAARHALVEAAWSAAKAPGPLRAFAERTAARRGRQIAAVAVARKLAVLAWHLLTRNEDYAYQRPSAVRRKLRRLELKTGAPRAKRQAGASPLWGSRAQDDLERELARQAELAYRRLVADWQRSRPKSGAGATPGRASSWPSERQAARQEQAPPPAL

SEQ ID NO: 101957 - protein, 342 aa, unidentified
MSSIRGMVGIDVSKKELTYALGDARTHQIRWERAVPRTVAGVKKLLSQTPPEVPWVIEPTGRYSLMVAKLALEAGQEVLMAPPRKAKAFLASLPQRAKNDRLDGRGLALFGLTRAVSRPLMPYPVKSEKVEQLDQLLSARKGISQALSRLKQQQRELPYAAGALGEAVADLEKRLVALDERIAEQTKAQDGFPVAKELDAVHGIGGITAAAVAARLDAKGFGHPDQFVAYIGLDLVVCDSGEKKGKHRLSKQGDAELRRLLYLCAAASLRAKGSPFAAQYERELAKGLPRTAALCIVARKMAKLCWSLHHHRSTYDPRRVYQQAPAKPRPDATPAAEAASAD

SEQ ID NO: 101958 - protein, 445 aa, unidentified
MSNYYLGCDVSKGYADFIILDSTKKIIEPVFQLDDTFEGHNQFYRFLQDFFKQYPGSTLFSAVESTGGLENNWLSLFKKLSDLMDIRSTRINPVGPNALHKASLERNSNDAISAKLIAEYLVTYPEKVNYNADDPYVSLRKQWNLIEMYKKQKTQLLNQFNILLYTSMPFLMKYTRNGIPNWMLFLVNKYPSSSNLARVKESTLAKIPYISHKRACAIIADAKQSVGSTDDDISGFVIKSAVEQIVHLKNKIEQHKQYMTTRCDLPEVKLLESFQGIGKYSAIGLVLNIVSIDRFPSAKHLASYFGVHPVYKTSGDGTGGFHMSKKGRAAPRQILYMVARSSIIHNPLLKEVYINHLKRGNSKSSALGVCMHKILRIAFGILKHLKEFDPEIDKHNRNKIRIVKKNNTGSDIKRRYQEKSNDAPVSRRQSSKRRKRKQSQNLLEV

SEQ ID NO: 101959 - protein, 481 aa, unidentified
MGRDPVREIIHITLWPDLQPTGEGMDQQLGKSNGLSLERIEPNAAGIDVGATEIFVAVPPDRDRQPVRSFKTFTDDLRQMAAWLVQCGITTVAMESTGVYWIPPHEVLEEAGIRVCLVNSKHVKHVPGRKSDVSDCQWLQYLHSVGLLRASFRPESEIRAIRALSRHRSSLIEIASVHVQHMHKALTQMNLQIHHVLSDITGLSGMAIIEAIVAGERSPVRLAALCNQRVRSDQDTVIKSLVGNYRSEHLFTLKQSLTAYKHYQELIADCDREIERLMRLLNGKIDPPPSSPATPPDPRFQKRSKNQFRFDMGSELNRVFGVDLTTIPGISALTAHILLAEIGPDLRHFANVAAFASWLALCPANTKSGGKVLSSKTRQTNNRASHALRIAAQTLARSKSHLGNFYRRMRARLGGPQAITATAHKLARIIYHLLTTGQHYDETVFVKEDKKQAQRQEKRLRKQAKTLGFQLVPITATVSCS

SEQ ID NO: 101960 - protein, 321 aa, unidentified
MTYVGIDVSKATFVVAYSSAKSSETKTFKNTTKGIREFIRTISPEENHCVLEATGNYSMLLVYLLSKAGFTVCMENPLKIKNFARVMLSVVKTDEIDARLIALYGERMQPAPFKLRSDSLLLLKQKRTVLRQLKKQLTANRNLEGSLKVLPFIDSKCKKVLEKTIKFLEKQIEEMEEELTSLAEIEYKKQMDLLTSIKGIGATLAAALIIATGGFTYFDNAKQLTRYLGLSPTYQQSGTSVNVKGHINRNGDAYLRSQLYIGAMASLRCNTECKACFERLRSNGKPGKVAIVAVANKLIRQAFAVVTQEKIYIDGYKSVKP

SEQ ID NO: 101961 - protein, 337 aa, unidentified
MRISVGTDVAKETHWVVALTETGEVLLDHAVDNDPAAIEALIAELGALPGECTIGLDVLGGIATLLSAMLLAAGQRVVHVPGLAVNRARQGTTGGETKSDPRDARVIAEQVRSRRDLRSIAVEEEPLAELQLLVGRRRDLVAEQTRRLARLHDLLSRIHPGLERALDLTSKSGLCLLTRYVTPAEIRHAGRARLVRHLRASGARHVEAIATAALEAAQRQQIALPGERVAADLVRELAREALAVRERLGEIDAELAQVLAVHPDSTLIRSLPGMGVILTAEFIAEVGIRDRFADADALAAAAGLAPVLRQSGKVRFLRRPLGGDKRIRLPPEAHRGG

SEQ ID NO: 101962 - protein, 430 aa, unidentified
MKSNTQNKKIEAITEKTLVIGIDVGSETHYARAFDYRGIEYSKKPFKFSNTEAGFVTFKEWILDLKEKHEKDKVVPGMEPTGHYWFNLGKYLQDNEMKPVLVNPHHVKKSKELDDNNPTKNDRKDPKVIAGLVREGRYMIPYLPDGVYADLRTASNIRFQLQSELTRIQNRISRWFNIYFPEYKTVYGKPDAKSGMLILKEAPLPEDILTLGIDGVDQIWRDAKMRAVGKARAKTLIEAAEHSVGSKEGAVSARMEIRMLLEDYESRNMRLQEVMVLIEELVKQIPMAEKLLEIKGVGIKTVSGFLAEVGDISRFNSPKELQKLAGLALVENSSGKHKGETTISRRGRKRLRYLLFEVAMSLVAKNPEFRELHNYYTTRRLNPLKKMQSLMAIAAKLIRVFFAMLTKGVDYDPKKMVSDIKRPAVYLQAA

SEQ ID NO: 101963 - protein, 434 aa, unidentified
MLRSKDKACGADIHKKTVVATILSADGTKVEGEFGTTVPELIRFKEWLKENDCNSVAVESTGTFWQPIYSILEGSVEVIVANPYMIKHIPGRKTDKVDSNWIAQLCLKGMIEPSRIFPKVDRELRRLTRARESLGKIRTQLKNSIHKDLDSSHIKLSSVISDIFGRSGMHILRGLLDGQSIDAIIEGIPSGRVKKKADQIKEALHNNLELTQVILIESSLSLIRSVNQQIDMIEAEIASRIVSRKEDLEIVRSIPGVDFISGATLLAEIGDYQDFSSPEKMAAYFGIVPSVSQSAGRLHTGSITKHGSKHMRWILVQIANAASKKIGSKLRRFYLRIKARSGHNLAIIALARKILCILHHLLMNREKYVEDDGGKKPKSKKNYRTSSPRVMDIQEMIDIIRQSGYEVQKGDTSRGDSLKLSQSCGRNIKRGACG

SEQ ID NO: 101964 - protein, 375 aa, unidentified
MKTATVHRNGVAASAAAGHQVKLQTSRIKLGLDIHARLYVVAAQEDHAALKPPRRLAPGEFVPWVEALLRAGHEVHVVYEACGFGFGLYRQLVAAGAQCRVIAPRKLDEARKGVKTDALDATTLCQRLSRYLEGNTKELAVIRVPSEAEERARQRTRQREQLVRHRKRIEAQGRGLLVSHGLAAPAHWWKGQTFTRLEKVLPAWIVPDLERYRPALLALHAQIVALTLELEAAAPEDLPQGFGKLTHEVTTREVCDWSRFKNRRQVSSYTGLCPGEYSSGGKRVPGSVTKHGNPRLRAALVELAWRLVRFQPQYPPVRKRIALLAKGAKATGAARKKAIVAVARQLAVDLWRLHTGRCTAEQLGLRSKEEPALES

SEQ ID NO: 101965 - protein, 312 aa, unidentified
MLPSLVYVGMDIAKATLDLHALSTPPQSRQFANSPTGHRALLRWLQGLGPVHVVCEASGGYERPVGWALQQAALAVSVVNPRQARDFARAQGRLAKTDRLDAQVLAEFGQRLQPAATAAPSAAQRQLAELVSRRQQVQQLRTAEHNRLEHTTHPAVRRQVQRHLRGLERQVEQLDTWITELIQAEPTLAHKVARLCAVVGVGRITAVVLLATMPELGTLNRRQAAALVGVAPFNRDSGPRRGHRLIGGGRPVARRALYMAALVAAFTNPRFIVFYQRLIAAGKAPKVALVAVMRKLIILLNQLLKNPQFQPT

SEQ ID NO: 101966 - protein, 347 aa, unidentified
MRFYQKEHKYYCGIDLHARAMYVCIVNRKGKILYHHNLETSPEILFNIIFPYLEDIVVCVECMFCWYWLADFCREHHIPFVLAHALYLKAIHGGKTKNDKIDSRKIAMLLRGGNIPMAYAYPKERRAIRDLLRRRMHLMRKRAELLSHIVNTNSQYNLPPFPKKIAYKGNRNGIAERFADPHVQKSIELDLCVIDTYDRQLREVEHYIEKHAKTCDPTALYRLKSIPGVGQILSLVLLYEIDDITRFPTVQDFSSYARLIRPQKVSDGKWAGKSNKKIGNAHLKWAISETAIIMLRESERIKNLVARLEKRHGKGKALGIFSHKIGRAIYFMLKNDQAFDMNRFIQA

SEQ ID NO: 101967 - protein, 355 aa, unidentified
MAVMIGIDPHKRSHTAVALDGSEEVLGQLRVTADRRQLDRLLTFARPWPDRVWAVENANGLGHLLSRQLLSAGETVVDVPAKLSARVRALSGAGHKTDAHDARSTAVAGRTGAGVKPMAVDDPLLVLFDVVLERRWQLVSARQKTLCRIHEQLTCLIPGGAAKRLSADKTAAMLRRIRPTDPVGIRRRLIVRELIAELRALDRKIAPLDADIAWMLDEHGTTLCDIVGIGQTGAATILAITGDVTRFRSAAAYASFSGTAPIAASSGDTIRYRLNRGGNRQLNKVLHTAAKTQVRLPGPGRDYYQRRRSEGKTNAEALRALKRHITTAVYRTLQADAKARTARRAKQVSEEDNRS

SEQ ID NO: 101968 - protein, 370 aa, unidentified
MAEDRAFYVGVDVSKAKHAIAIAEGGREGEVRYFGEIEATPAAVERFVRKLEKKHSGLHFCYEAGPTGYGLYRQIVTLGHRCDVVAPSLIPKRAGERVKTNRRDAVTLARLLRAGELNGIWVPDAVDEAVRDLVRVRAAASEDLRKKRQHLLSFLLRHGRVFTGRKNWSAAHARWLAAQKFDHPAQQVVFQDHVDVITDAQSRLERLDAQLAELVPSWSMAPVVAAYQALRGVSFIVAVTFASEVGDVRRFDNPRQLMAFLGLVPSERSTGDTVKRGGLTLAGNRRARRVLVEGAWSYRHPARVPETIRFRLAGLPKGVREIAWKAQTRLCARYRRMTAAGKKAPIVVAAIAREMAAFLWAIGHQVEPVR

SEQ ID NO: 101969 - protein, 410 aa, unidentified
MTDTVIAQGEPILVAIDIAKARHEVLIAVPGKKRRRRLTALNQLADFNRLIATLADYSRPVRVAFEATGNYHRALAYRLGVAGFDVKLVSSVALARTREALNNSWDKNDPKDAQVILHMMQIGNEQFYHDPMLCGTNDLQELSKTHDIVSRSKTELWHRVLTHYLPLYWPEAERFHRSSRSDWFFAFLERYPSPHFISAMEQKAFIADAWEVAGRKVSKERLLTDIYQTAKSSVGLPIAQDSDAARMFRLVLGEGRSLIAQRNEIEDRAVELLKTNDDYQLLTSIPGIGPINALTILAEAGDLRRFRHHRQFLKFCGMDLATIQSGTFRGQTKLSKYGNARLRRTLWMAGQVAIMQKTNSFRDKFERYIAKDRQNTHLRRKAYTAIAAKMARTVHGIIKRGEPYRPFFEG

SEQ ID NO: 101970 - protein, 350 aa, unidentified
MPMVADVADAVIGGDTHKDTHTLEIATPSGVPLASIVVGNDAAGCAVALAWITDHAPGPRVVVGLEGTRSYGIGLARALTRAGLTVVEVERPKRETRRGRGKSDPIDAHLAVLAALRMHTDRLPTPRADGDREALRILLVARAELTDTYTRQINQLRALLLTGNDTDRAISAGRVTRDWLDRLIRRRGPGTETREQATRRAETRRLAQAIRDAHLDLTGNRDQLTAIITDLAPGLLDRPGVGPVSAAQTIVSWSHPGRCRTEAAFAALAGVNPIPASSGKTVRHRLNRGGDRHLNHALHTIALTRMRSCPRTHAYLTRRRSEGKTDRDIRRILKRYIARELYRTLNTNAA

SEQ ID NO: 101971 - protein, 391 aa, unidentified
MSFFIGVDVSKEKFDACGIDEQGGKIFSLVCSMDREGFEKLVLKLPMDKSSFLLGMESTASYHLPLFSYLTAQGYQVVIINPLLISNFAKRSLRKTKTDKKDAFTIAQFLYREKETFAPQTTDHLATELKDLARRREKLVDHVTSLKGNMKRILSVIFPELEHITGIFTKCTLHILVEYPSAHAIREAGYDAIAEIFINRGRGNRPHAGIKTLMETAASSVGVVSSAKELTLKQEASLLLHVQEQIKETTELLMNLLNQRMKHDMELLCSIKGIGENTAMSFLIEMGGDVAMYENDKKLIAASGLDPSTYESGKYAGKSRISKRGNRHLRRVIWLMATRVIISNNLFRGYFYKRRSGGLPYKKAVLATAHKLIRIMFVMLSRKTYFVEGGN

SEQ ID NO: 101972 - protein, 349 aa, unidentified
MTTMTSTASAVIGGVDTHADVHVAAACDQLGAVLGTQAFPTTPAGYRQLLGWLRGFGDLTVVGVEGTGSYGVGLTRFLLEAGVELREVLRPNRQVRRRNGKTDVVDAIAAARAVLSGEASGRPKSHDGAVEALRALKIVHRSANKSRTQALNQMRDLITTAPDELRTELRGLRRRQRLAVCAAFRPGDRDDLVAITKLTLRTLARRIAALDEELDVFNARRRRITHTLAPQLVAAHGIGPDTASGLLLAAGDNPDRLGSERSWAGLLASNPIQASSGKTTRHRLNRGGDRHGNSALWRIVVVRMASDPRTKAYVARRTKEGLTTTEIIRCLKRYVARETFDLLPRELLH

SEQ ID NO: 101973 - protein, 525 aa, unidentified
MAAFNNNKAARKHVRSEGTYSSQELMQLTLDDGTRIVTSPTTDIRRPVCAGIDVHKEVLMAAICRTDPKTLDAVFFVRQFSSSNSDVRRMAQWFKSYGVQDVCMESTGKYWIPVHDILEHSGLKPVLTHPKYVKQAKGQKTDFRDAIHIANLFRMDLVVASFIPPADIRDLRELCRYRLKLTYMRTSEKNRYQNSMTVSRIRLDSVFTDPFGKSASAIMSYLIDTDPGQVSDEEILKLVNHRAKTPGEDILDSIHGYEFIGIQRDKLRIIQLHLDDINKCIALIDEKLGHFQQKYAAVIRHLTTMIGITETSALYILGEIGADMSVWRDSDSLASWAGLSPANNESAHKKKSTKVGNGGHYLKPLLVQCALAAVKSTKKDPYFYYKYQTLKKRRGHKKAIIAIARKMLVAIYHMIRDEADFLPIDHAKTVTCRNHETKGLNLDNILIFLVEHGADEETLRLVKTQCSDTKVNGDPGKKKDTISENEKQPDPSTRPTVVPEQNDGRKRSTSPRTKLPCTSPSIATA

SEQ ID NO: 101974 - protein, 372 aa, unidentified
MPDVISHAPADVRLWVALDVHKLSIVAGVLPPEGGRPEVCRIETTEKAIRRFIAKLGGPDGLAVAYEAGPGGFALWRLLSSIGVACDVIAPSLIPIRAGDRVKTDRRDAKKLVTLFRAGLLRFVQPPTPETEGLRDLLRCRDDLRCARTAARHRVGKQLLRHGLIYREGKKSWTKAHWAWVRSQQLADPLAHLALEQMIVHLDAVESQLAVLDARLEQIATDERWAWQVQKLVAFRGIQTLTALGLIAEVGDFNRFSHPRELASWLGITPSEYSSGESQHRGHITKSGNRHARRLLVEAAWHYRHAPRRPATGPEPSPRAWQAQIRLHHRYRHLTEHGKRSTVVTIAVARELTAFLWAELTNQPAREAALAA

SEQ ID NO: 101975 - protein, 310 aa, unidentified
MAAVVVGIDVSKDSLDVHVRPSGGSFRVSRESEGLEELGSRLQPLQPAVVALEATGGFEAVVAAHLSAAQLPVIVVNPAQVRAFAQALGKRAKTDPIDAAVIAHFAEATNPQVRPLPDEATRLLGELVTRRRQIVQMIVAERQRLRLLTAPRLKKSVARLLKALQRELEALDKELDDSVRGTPLWREKEDLLRSVPGIGPTIARTILAELPELGTLDRREVASLAGLAPFTRQSGRWRGKSFIGGGRARLRAALYMGALVASRHNPVLRRFYERLVAAGKPKMVALVAVARKLLTILNAILRDQKAWVPA

SEQ ID NO: 101976 - protein, 371 aa, unidentified
MKISVGVDLHKTQFTVCILSEDRSVDDSGIYPTSKQGYEAFCRKMTVLMGNGYEVTAAVESTGNTRYFCNQLLRAGIDVKVVNTMKFKVVTESVKKTDKRDARTLAEFLEKDMLPESVLCSQESEEIRRVIKSRSILVKALVSLKNQVHGLLMGYGVESKRGQLQSKKERQRILCGLEDHRSYGNAAQAVKPLLASIDQVASEVKRLEKVLAELVAEDEDVTLLQTIPGVGLITAATIRAYTDDINRYESAKKYASHAGLVPWVQNSNETIRHGHITKRGPVELRTAFVQVVMGMNRYRKVTGSYRIMTRYQDMKKHKGTGKSIIATARKISTIIYAILKSQEPFDPTKMAPTGKKLERVTPVNRPLALAG

SEQ ID NO: 101977 - protein, 345 aa, unidentified
MNTIMIGLDLAKNVFQVHGIDAAGAVTVRRALRRGQVEGFFAKLSPCVVGMEACGGAHHWARLLRRLGHEVRMMPAGYVKPYVKRNKTDGRDAEAICEAMSRPTMRFVAVKSEEAQAVLAQHRTRGLLVRQRTMTANALRAGLAEFGIVAALGNKGLATLMAKLAAGPDDLPEDARAALSVLAVQWENLDGAVHALEVRIVRAARAHEAAHRLMEIPGVGPLGASASIAKVPDAGVFRTARDFAAWVGLTPRQAGSGGKQRSGGISKQGDRMLRQLLILGATARLAHARARGTSDPWLRELLARRPFKVAAVALAAKMARIIWVLLKTGERYRPQAHRAGAAAAA

SEQ ID NO: 101978 - protein, 349 aa, unidentified
MRYIGVDQHKRFSYIAVMDERGRVVKEGKVVNEREALKKFLSSCKDGKAEGVLEAGPNWTYMYDWLEGEIEGVKLAHPLKVKAIADAKIKTDKIDAKVLAHLLRADLIPEAYVPKGETRKVKNILRQRMFFIRMQTMVKNKIQAALDRHPEVSSEFLGTDLFGKQGMEYLAHIKLPYPDRYIISDSIKFLLVLREHIKRTDRIVEKLSKGDRRVKRLETVPGIGKFFSVLIATEIDDIGRFSDARKLCSYAGLVPSTYSSGNKVFHGGITRSGNKFLRWAMIEAVWPAIKKDSSLRYYYHKIKEKKGANVAKVAVARRLLTIIYYVLKEDRDYRINYPAAPYVPIVKAV

SEQ ID NO: 101979 - protein, 337 aa, unidentified
MSKKEYVGIDLHRRRSVIVRVSAKGEKLATYRLENSPELIAGAIKEAGPGPEVVLEATFGYYWLVDLLEEMGASIHLAHPSGLRWENRRVKNDERDALELVKLLRLGELPEAWIPPRHIRELREMVRYRAKLVRLRSGLKAQVHSVMAKNGVLPSRYDMFGPGGNAQLDSLVLPDAYSSRIGSLRDLIDLYDREVMITERDIHILLKDDPGYNTVQQIPGIGRVLGAIFVAEIGDVGRFASAEGLCSWAGLTPKHRESDVKVVRGRITKMGSRLVRWAAIEATAKGRGTEKIRSNYSSIAKRRGGAKAHVAVARQVLTLVYYGLRDGEIRSVSKEAA

SEQ ID NO: 101980 - protein, 349 aa, unidentified
MNFYTNTHPYYCGIDLHTRLLYVCIIDNENNILVHEKIDDSPDKLLALLKPYLGNVVVGVECMHCWYWVSDFCEEHNIDFILGHALYMKAIHAGKTKNDKIDALKIAKLMRGGNFPLAHAYSKEHRSIRDALRRRTHIMRMSAQLKAHVSSTISQYNLPALESRLNLQNSPDREKMHHFFPDEAVQKSMDLNLNIIETMVSELYKIEHYVKTQAQTHCATDLHILKSFPGIGKILALTILYEVGDIKRFPSVQKFASYSRLVKCKAESAGKAHGTQGNKIGNAHLKWAFSEAAVLYLKGNDNAKRYLAKLQKRMSKAKALSALAHKIGRCTYFMLKNQQVFDEKRFLKG

SEQ ID NO: 101981 - protein, 338 aa, unidentified
MAIVHVGIDLAKNIFALHGVSETGAVQLRQPKVTRGKLNEVVAALPPCTIGIEACTGAHHWARQFAAHGHTVKLMAPKLVAPYRMSGKRGKNDAADAAAICEAVQRPNMRFVPVKSEEQQSRLMVHRARQGYVQARTATINRLRGLLAELGIVLPQKAEVVRSQARAHLEDLPGYANLVIGDLLSEVSHLDERIKQYDTHVKGMAKECTAAQQLMQLCGVGETTATAIVAMVGNAREFDSGRQFAAWLGLVPGQYSSGGKTRLGRITKAGDAYLRSLLVLGARAVLNAARSKTDSLSRWAMALRERRGYWKAVVAIAAKNARMAWAVLRKGEQFKLPA

SEQ ID NO: 101982 - protein, 555 aa, unidentified
MKNTYSTQNKVRYRTHIQKPKGSRFTEEAKQIGPEKVGTVPIDVHKDKHCVTICDYYGKILKDEFEIPNILTGFQVLLSCILEIIDKFKLEKVYTVMEYTGNYHKNLANRLREAKIPVTFVFPNSTYHLRQGQLNWSKTDSIDLCAIGQAFVNGWVSSSPPLDNFYENWQTLTRARRNEINLQTQAKNRITNLLDELMPGFQELFGNFWEHNAPPVILQLAHSPKQLTCLNRSSLLQKLTQAKVQKPGDLADKILIWAKTSIGTSQDFPSKIQQLNVEWQRFLTLKENIASYHISIAQYLAQNPALLFLSIPWINVPSASEYASEVGHFDNFISPKQITAFLGIAPKKFKTGKVSFENGHITKKGKNQGRSAVITIANNLVQGNDYYAPLYLSLIARGKAKQQAKVAIANKFIRNSFRMVENSQLFEPPAWTGPTLKNDPISKLKDFLHNNTNDKTLIEQIVAQAQQTLDTILKQNNCPQEKENEVIKQTPQPSKTIYRRLKRESIGSNVVFSRIKPSNYKGPTPIGNVLENMVTSGKLPSWILTGKGPQYAQLD

SEQ ID NO: 101983 - protein, 318 aa, unidentified
MNTFNKVNYKIGVDVSKKKLDIAIDEDTVITIENTESAFQGLLKNLLYPLEEVHFVMEATGGYERKFARYLLSKSVSVSIVNAKRVRDYAKAMGKLAKNDTIDAKVIRAFANAIELVRLEEKSDKDYELEGLVKRQQQLIKLQTIEKQHLETASEKIVIRSINTVIKLLEKQIVSTEKMIVTLMENTEDHQKRKKLLLGVQGIGERTASTLLIQLPELGKLNNKQISALLGVAPFCNDSGPRKGKKQIWGGRKVVRSSFYMPMLNAIQYNPVIKAFYKRLLARGKIRKVAVIACMRKLLTIINSMLRNNTEWNPKYGI

SEQ ID NO: 101984 - protein, 342 aa, unidentified
MEKSLFIGIDFSKKTFDVSVIHQNNLQVVDYQQFENSKEGCMSLLEWIKALTKEPCSSWLFCGEHTGLYSICLSEFLVKKELFIWLENPLQIKQSCGIRRDKNDKADSREIAFYAYRFQDKARAYCLPDKTLKSLELLLSFRERLLSNKQTLLVSSVEIRRVIKQDATARFIYEQSKKDIERINKQIKEVEKRMLKQIESDKSLQENYELVSSIKGVALINTVAILVATQNFTRFENSRQFACYTGMAPFGKQSGSSINTKPRVSRLADKKIKTLLTQAAKCAIRHDVNIRQYYERKLKQGKDKWLITNNIRNKIIHRIFAIVKSKQLYQVNYINFLDKAIA

SEQ ID NO: 101985 - protein, 351 aa, unidentified
MREYIAFDSHKHYTLMERENRQTGRTVQRRVEHRLGAIRSCLRNCEAGTDVAVEATGNWYWIVSEIEQAGLKPQLVHPRKAKLMMGLINKTDKLDVDGLNRLQRNGTLPTVWIPPAGLRDQRELTRTRLVLVAQRTRLKNRLQATLAKYGLLVQECSDAFGALGRRQWPELLGKLPEQTQWVSQQLLQQVDLLDQQIGQCEKRLAGLLKISTEIQRLKSLPGVGLILGASIAFEIGQVSRFASAEHMASYAGTTPRVHSSGDKLRFGRLRPDINRYLRWAFVEAANVVALHHLRRPERHVSRLYARFKQRKGHAKAIGAVARHLAEASFHILSRRQDYRDPALPKGRSKPV

SEQ ID NO: 101986 - protein, 343 aa, unidentified
MQAVTTIGLDIAKSVFQVHGVDAEGMVVFRRQLRRRQVLPFFKKLSPCLVGIEACATSHHWSRELQALGHTVRLMPPAYVKPYLKRQKNDAADAEAICEAVTRPSMRFVETKTKDQQACLMLHRTRHLFIRQQTAVINATRAHLAEFGIVAPVGRNGVEELLDVVADPDDDRVPEVARECLAGLGVQLRMLKAQILEFDRRILAWHRSNETSKRLDEIPGVGPVLATALVASVADPRAFRSGRDFSAWVGLVPKQNSSGGKEKLGSITKRGDRYLRSLFTAGALAVIRYAKIHGTKHRPWLTALLARRPTKVAAIALANKIARMAWAMMAKGERYKEPVALAA

SEQ ID NO: 101987 - protein, 356 aa, unidentified
MVVTPYPIGARTVVRASQARIMQGRAKKEAKMDPAPLYTGIDVSKDRLDIALRPVSDAFSFSNDDPGIAQTVTLLADLSRLVGTLVVLEATGGLDLPLVGALAASDLPVVVVNPRQVRDFARAIGKLAKPVLSAAEGTDAIDAKILAQFAEAVRPQVRPLPDVATQELRGLLMRRQQMVEMVVAEKNRLRSAPRRVRPQIQEHITWLEGHLDGLDRELSDLLRSSPLWREKEDLLRSFKGIGPVSARTLLAELPELGLLNRKQIAALVGVAPIARESGSWRGRRSIWGGRGQVRAILYMATVTAMRANVQIRTFYLRLRQAGKPGKVALVACMRKLLTILNAMVRTHTRWQQPSVA

SEQ ID NO: 101988 - protein, 319 aa, unidentified
MGTPNYVGIDVAKDSMEVTVHEGKESWAFSNDERGLANLMTKMKRLSPRLIVMEATGGYEVTIAAELHSRGFPVVVVNPRHIRDFARSVGILAKTDILDAKVIARYAATVQPAPRALPTEETKRLGAMMMRRRQIVAMRTAEKNRLQQADPAVKDRIKVHINWLEQELNDVNKELKQMIESNPEWKEKSDIIQSVPGVGPNLAITILSDFPELGRLNRKQTAALSGVAPFNRDSGTMRGKRCIWGGRGVVRTAAYMSAVSAIRFNPLIKPFYKRLIDAGKLRKVAMVACMRKLLCILNAMLKNHTTWDCRVHQLIGPCH

SEQ ID NO: 101989 - protein, 449 aa, unidentified
MAKKMELEVINLHCAGIDVGSRSHFVAIGQDLSDVREFGVYADDLTAICLWLKENGITSVAMESTGPYWQNLYVELAKYGFELVLTNGKFTKQAHGKKTDVKDCQWIQKLHTLGLLTSSFLPDETTEKLRTYCRQRTNWLNLSAEASSKMQKYLKLLNLRLDVVVKDICGLTGLAIIADICNGNLNPKKLAEHRHYSCKKSKEEIAKALVGNNRQDYLFGLKQEYESYQFFQSKIADCDKEIEVFMKTEIEFDPGKKKLKTTDKKYKKANKNAPDFDLNQLAFQYFGGVDLMAIEGVSHATILTLISEIGPDGFNKFPTAKHFASWLRLAPNNKISGGRVLSNHTPKGSNRLKIGLRQSANAIGNLKDTQLSDFFRRIAFRKGRPAAISATARKLAIIIWNMQVKKVPYLPSKEYLFLDQKRHLKLVTRIRKQITKFEIKPEQLGFATS

SEQ ID NO: 101990 - protein, 412 aa, unidentified
MRRVIGIDIHRTFGEVVIWDNGELRHAGRVDMTRTALEGLGKRLRATDEVVIEATGNSTAVSRVLLPCVARVVIANPLQVKAIAYSHVKTDKIDAGTLASLHAAGYLPEIWTPDAVTERKRRLVARRYQVVRHRTQIKNEVHSMLYAHLIPKCPHADLFSKRGREWLARQPLPDDERMAADRHVRELDRLAEDLALLDREIAQVAIEDPAVKRLMTITGVNLTVAAGIVAAIGDIGRFKSPQKLVSYFGLNPRVRQSGLGVAHHGRISKVGRSHARAMLVEAAWATAKSPGPLHAFFVRIRARRGHQIAAVAVARKLTVLCWHLLTKGEDYLWARPALVANKTRAMELQAGQPQQKGNRRGAAYAYNINALRDQEMRVAKQAERSYEHFAGHWQPRRPKDQARGRLKSARQE

SEQ ID NO: 101991 - protein, 457 aa, unidentified
MPKTKRSRREREMSPVHAGAAAIDVGATMHVAAVGPGRDPEPVRSFGTFTADLHRLADWFKQCGIKTVAMESTGVYWIPAFEILEQRGFAVVLVNARDAKHVPGRKTDVTDAQWLQRLHEYGLLRASFRPERRIAALRDYLRQRERLLDYAASHIQHMQKALMQMNLQLHHVVSDITGVTGMRIIRAVLAGERDPAVLAALRDQRVKASEETIRQALVGNDREEHVFALSQAVELYDAYQAKVAACDVRIEAALKELEASCPPPAVPLPAPRHRTQQPNALAFPAREALHRILGVDLTQIHGLGPYLALKLVGECGTNLSAWPSAKHFTSWLCLAPSNKISGGKVLSARTRRSSNRAAALLRLAAVTVGRTETALGAFYRRLAGRVGKAKAVTATARKIAVLFYNTLRHGMDYTDPGASYYEDRYRQRVLTNLQRRAKSLGYVLQSAEPAPASTGVS

SEQ ID NO: 101992 - protein, 396 aa, unidentified
MPQIWAGVDIGKEHHHCVVINDIGERLLSRRVQNDETELLALIADVTAIDTDVLWAIDLNSGGAALLIGLLVNHVQELVYITGLKVHRAAGTYRGEGKTDAKDAFVIADQARVRRDLGPLRAGDEIAVDLRTLTNRRTDLVCDRTRAINRIRHQLLEYFPALERSLDLSRKGHLALLTEHQTPDGIRRLGKQRLTRWLRHRKVRKAESVAHAAVEAASAQHATLPGQKLAAAMVERLAKGVIALNTEIDELDAMIEERFRRHRHAEVILTLPGFGPTLAAEFLAATGGEMTAFGSVDRLAGYAGLAPVPRDSGRIRGNLRRPRRYHRGLLRACYLAASASLPSCPISKAYYRRKRAEGKRHEQALLCLARRRLNVLWAMLRDNAGYHASPPIPAAA

SEQ ID NO: 101993 - protein, 323 aa, unidentified
MQGKDMSEPDATTPVYAGVDVCKDWLDVHLHPSGARLRMANDRFGLRRLKRLLAPLPVARVVMEATGKHHRAARRVLHAAGLAVAVVPPLRARLFAEATGQLAKTDAIDARLLALLGAALQPEPTPPPAAALEALQELVNARAAATAEATALANRLASSENAFLKAELRRRRASLERHIERLDAEIERRITADPQLARRFAILRSIPGVGPITASVFLVNLSELGTCSAKQAAMLAGLAPLANDSGARAGSRAIRGGRQSVRNAAYMASLSASRHNPDLARFAKRLRQAGKKPKVVLVAVMRKLVVLANTLIANDRSWTPVAP

SEQ ID NO: 101994 - protein, 341 aa, unidentified
MKNKSFIGIDISKNVIDASIFCEGTPIKDFPHDVFNNSRKGFGEMCTWLKKNHVVLSNCLFGMEFTGSYSMELEKFLNARNYQFCMLSTHVVKHYPMGPKDKSDKIDSAKIADFLYRYNGTECVKPYNMPDKTMQRLKALMNERKFLVEQRTCFMNRRQLCITKEDAQLYDGYIKKFSRDIENIELEEQKLLATDDSLLSTYKNLLTIPGIGFVNAINVIVITRNFTAFETARQYASYVGVAPHFRTSGTSVKWRPRPSARCDGQAKADLSMAATVVVQYDAELQSFYNRKLGGKQDSDTKRKALNAVKFKLVLRMFAIGKQNRKWEPLDSKSSNEKLAIS

SEQ ID NO: 101995 - protein, 412 aa, unidentified
MSSEYGIVAGIDVHKKWLYVVIGPEDTPEGQFRRMRGGTTTRELQRLADDLYLAGVCTVVMESTAKYWRPVWAVLEGAFRLFLAQARSNAAPHGRKTDFGDAIRLIKRLRAGDLRLSFVPDMEQREWRLLTRTRVKYQNDISQLRSELEGLLEECRIKLSGCLSDVFGLSGRRILRKLAEGEADPERLAALADSKVRATPQQLADALNGKLTAAHRLLLNQTLDRLETLKNQSEEINEQLTVAMKPHLGVIRRLCAIPGISVSAAYQVIAELGPSAEKFVSAAHAASWAGVCPGRQQSAGESYSDACAKGNRFLRRLLCQCAWAAVRNKSSYAHSLFKRLVTRLGPQKAIWAVAHYLLRLIWMVLHNGIEYQERAQVANLTERLKRKLDSTARALRRFGLNVQITIPELETA

SEQ ID NO: 101996 - protein, 394 aa, unidentified
MKLVGIDVGKNSHHFCVMDKETGELNVTPSSFSNNKEGFDFLINSLKPYSKKSILLGMEDTGHYHVALLKFLLSNGYTVALINPKTTDLTRKMEGGITKNDKLDTITICDVLDTPERKKQYRITKVDRFDLYEQRQLTRHHHNLKEELNVYCNRLQKSIDLVFPEFNTLFSSKYSIVYMNLLKTFGSAEAIASTDIRTIRKFFEIKGKGNRISLTPEKLKECAKNSIGISSEVETIQIKHLVSQITLIKEQIAEIDKKIEEFSITNNSPILSIPGISHFSGTSILAELGDIGNYSKPSQIIKFAGVAPYHYESSQYNAQHTGITKKGSKYLRKTLYQIILTVINNNPVFKKYYLLKISQGKGHRCAQGHCIRKLLRIIYHLLETGQSFDPALLR

SEQ ID NO: 101997 - protein, 364 aa, unidentified
MSNCITWVGIDDSVKKLNIAALNGGEENPLFESVYTNDNTGLGRLVKKLKTFPGEVRCVYEAGINGYHLHRYLTKHGIFCDIAAPSLTPRQAGKRVKTDKLDAKKLARFYRAGMLTSIVIPETEQESLRDMIRAREDALEDLQRARHRLLRFLTRRGLRFTEGENWGLGHSKWIKGIVFEKPLDQMVLDEYRLTLSEETERLKKFEKMIEELGSQEPYKKRVSYLMALKGIKVLTAMTIISEALDLRRFTDAPAFMAAIGVVPSENSSGDKESKGSITKTGNRHLRRVLIESAWNYQRSAVVGKTIRKRREGLPADILEIAQRCDRRLNYKFKHLINAGKDRRKAAVAVARELAGFIWAIGQVA

SEQ ID NO: 101998 - protein, 542 aa, unidentified
MTEAGVGYDDWFGVLAFNWFTNVFLEHQSLAGREKAGGIRTPPSGCFCRFGLEGLDGIIHQYDIPNYRILFRFPVEEAHYPSLIYASAPWSQRQFEPNPFLSYIQWGLPIWHVDNANSGNGHMIAPRHYSCVVGAAEKIKVCLSPGTRVTPVREPIRMDEEVKPTTKNGDKHMKKTDKYVGLDVHQDTTVIAVADCGRVGEVRIYGTIPSDLQALAKVLGKLGGEGVRLHVVYEAGPTGFVVYRRLKQLGINCIVVAPSKTPQPKGVRLKTDRRDALQLARLHRAGELTGINVPDEVDESVRDLTRARADAVHDLTRAKQRLKAFLLRQGYRYPGKANWSEAHQRYLRKLTLALPALRSVLEEQLLAIDQVTERVKRLDELIEVQVPQWRYYPAVQAVMCLRGFQLNAATVIVAELGDVRRFAHPKNVMAFLGLVPKEETTGNTRRLGSITKAGNAQARWCLIEAVQKALTPPKVSARLSLRQEGQPAAYRELAWKIQVRLHKRGWHLLQRGLMKAKVNVALARELAGFLWDLLRQVPAPEA

SEQ ID NO: 101999 - protein, 342 aa, unidentified
MPKYIGMDVHSKTCMFVVVDEKGKELIAQRVNTSEGEILKFVRSIPRKKALAFEESNLSKWLYPILKDEVDELVICNPAYVIRKPGPKNDYSDTVHLAQQLRGGFLSSVFHADHFFSELRTLVSAYEDVTRQITSEKNRYKALFRAQAQEASGKKIYRDLDRIQSLPNEVHQFVGRTLFDQIRLLEEIRADYVKQFEKYVKKYPEIQALTSLPGISTVRATMIAAIVISPDRFENKHKFWSYSMLVRHDRQSDGRSYGKVTIRANATLKTIFIGAAEKALEGDSSFRKYYDQLREKGLDHKAARKNVARKIAAISLAIMRTKKTYEEDYEVKKLEKSKLKAS

SEQ ID NO: 102000 - protein, 342 aa, unidentified
MKTFYGGIDLHAKNSQACMIDEKGVRIKEKKLKNELPLILEFLEPFGKGTKIAIESTINWYWIVDGLMEAGYEVKLAHPLGLKLITDSKVKTDRRDAYKLANLLRLDALPSAYIYPKETRPLRDLLRRRSDLVAQRSKCYSSLRMQFLQYNANTMSQTALKCFEDENLNVMDLPGVVKMHGSMTLKRIELLTEQIEAIEKFLESVTITDPHFNLLTRITGIGRVLGLTIYYEIGDISRFTNVRHFSSYCRLVPGCHQSSDKVKKGKGSKQGNVYLKWAFTQAAMHMARYDKDIRAFRDRQANKSKGNSKNMKANAILAHKLGMAVFNVLKDGIPFKKELFFA

SEQ ID NO: 102001 - protein, 319 aa, unidentified
MAQDDLVVVGIDVAKNKVDACIRALCVRRTFPSTAQGRRKLVCWLRKHKASAAVMEASGGYEREWAKVLREKAVEVRIVDPKRVRNFARSAGRLAKNDVIDAEMIAWFAGTFAEASSQGHDAAREKLAHIVNARCALIDLQIKLQNREEHPAPEPVQKMQARLLRQLAREIAELEAAIAAMIKATAHFAELAEIIESVPGLGRITSAGLIAAMPELGQVSNQAISALLGVAPYDDDSGKRRGERQIKGGRRKMRNLFYMACLGAATRHNAVLKAFYDRLIAKGKERKVALVACMRKLIVILNTMIARRQKWDASRYAVS

SEQ ID NO: 102002 - protein, 428 aa, unidentified
MKKTESYKLEAITPNTLIVGVDIAKYTQWARFTDYRGIEFGKALKFLNDKNGFDSILASIEGICKLKGLDRVILGLEPTGHYWKPFANYLILNGIKVVMVNPYHTKRAKELDDNSPTKNDKKDSLTIARLVRDGRYYEVYMPRDIFAELRGLSNTRISLLKRQNAIKNTITALLDEYFPEIKKAFKHPLEGKASIQILKSCPFPSLILQLGEEGVLAEINKAVKKTVGRKKTRELVEIARNSIGVDYGLSAAHLRMETMIEELELHNKQLEKIEVKMEEALEETGLKEIILSIHGIGVITAAGFLGEIGDPLRFEHPRQINKMAGYNLIEDSSGKNKSGTVISKRGRKNLRSILHQMAKVMVAVNPEMQELYKYLKTRNCNPLKKKQALVVISKKIVTIIYNLVKKQTKYNANLVLGDYRKNQIKQAA

SEQ ID NO: 102003 - protein, 462 aa, unidentified
MTVPTKKGNRKHATPLPTSLPAIRPRVAGLDVGSSQHWVCGPARDDGQPNVRVFGTTTDQLNELADWLSAQGVESVAMESPHVYWIPIYELLEARGIEVLLVNARQLHNVPGRKTDFSDCQWLQLLHSCGLLRGSFRPGEAITRLRALQRQLANLVAERTRCVQWMQQSLDHMHIQVHRAVTDLTGTTGLAIVRAIVGGERDPAQLVRHRDRRCRKSAAEIARYLTGNWRDEHLFNLASALRLFDALESEIASYEVRLLKEIETLQPPDRQAEPVPPHPNPAKEKAIKARGEQPARATLWRFAGVDLTRLDGISAGAAQVVLTEVGPNLAAFPSEDHFVSWLRLCPRTPISGGKPLKKRRNGLGANRIAGVLRMAATSLQRSKTALGASFRRIARHKGGAVAVFATARHLARLIYRMLRYGHNYVDIGEQAYDHQFQIRRLAALTETAKSLGYTLVPNVATR

SEQ ID NO: 102004 - protein, 408 aa, unidentified
MKLFVGIDVSSEKLDVCFLDSNDTVLKEICLSNDVNGASAIQENVLHFQQLYHYEKIVVGMESTSIYSFHPAMFLTEDKELKNLNVEVVVQNPKAIHRYKRLFEEDKTDRIDAFRIADFLRIGRYNKSLIKEEKYVALQRLTRSRYQLVHQLTECKQHFLENLYYKCNTLSKELNTSVFGATMMEILSDSLSLDEIVEMELESLATLLQKKGKGRFSDPEQLAKTIQKAIRDSYRLGKVVQDSVDVVLATYVRLIQTLKKQIKELEKSIAALFEAIPEAKCLTSVPGIGIVYAAGIIAEIGQIERFENEAQLAKYTGLYWKKSQSGNFESERTPMTRTGNQYLRYYMVEAANSVQLREATYRSYYLKKYDEVPKYKHKRALVLTARKLVRLVDVLLRNHQLYMPERSV

SEQ ID NO: 102005 - protein, 360 aa, unidentified
MLYLAIDQHRKQLTVNLRNEQGDVLVKRQVSTEWPRVRSFLEEVREMSVPEEGFVAILEVCGFNDWLVKLLAEYGCRETILIQPEKRSKKKTDRRDAHALGELLWVNRQRLLAGKKVQGIRRIQLPTDREAEDRQLTAVRQRMGRHRTRTINKIKHLLRKHNLEQQQPAKGLDTQRTRKWLAALPLGPIDRLEMDLLLAQWKLWDEQLAQLELEIEKRQAQSKTAAVLATIPGCAAYGSLALASRIGPIERFPRPASLANYWGLTPGCRNSGEATDRLGSITKQGSAMARFILGHMVLHVLRRDGRMRAWHGRIKRRRGSKIARVAVMRRLATIIWHMVKHNEPYVVGGPPQRKLAAQAA

SEQ ID NO: 102006 - protein, 347 aa, unidentified
MKRIAVDLAKSVYQVAESVRAGVVSQRRRLSREAFGRYIQEQAEAVEWLMEACGTAHYWGRLMQARGHRVMLLHPRYVRSYRRRNKTDRNDCEAMLEAARCAGLHPVPVKSHEQQQLQQLHGLRETWKKSRTQRINLLRGILREAGIEAPASAAAFLRRANELIERPELERLRGLLQIVLGEINLYQQCMADCERQLQQWHAEDEIVRRLDEVSGIGLLTASALKTAVGNPQRFASGRQLSAWLGLTPREFSSGNRRKLGHISCQGNVYVRTLLVHGSRAALLAAQRCQANTPERMTALQRWATQTAARIGHNKAAVALANKLVRICWAVWCHERRFSGDWQSVRPA

SEQ ID NO: 102007 - protein, 350 aa, unidentified
MRTRNKPRPATVFGIDIGKNLFHVVGLDAAGMPIQKATFRRDTLLQFFERAGPALVGMEACSGSQWLARKIAAMGHTVRIIPAQFVKPYVKSNKNDIIDAAAIDEAVTRPTMRFVELRSPEHIDLQALHRVRDRMMSQRTCLINQMRAFCLEYGIAIHQGAGKFKADLPRVLADQSNDLTSAMRRILASTFDELRQLELRIAEVNREIEAIAAQSDTARRLMTIPGIGPLAATALLAAAGSARQFKKARDMAAWLGLVPREYSTGGKTKLLGISKRGNRYLRRMIIHGARSCVTHLDRSRYRLGAWLDGLQARMHTNKVTVALAAKIARIAWVVMTKPGASYERRDPAFS

SEQ ID NO: 102008 - protein, 406 aa, unidentified
MLFVGDDWAEDHHDMEIQDEAGRRLAKARLPEGISGIARLHALVGRFLPEDGDAAGVKIGIETDRGPWVAALVASGYQVYAINPLQSARARQGNGVSGAKSDAGDAHVLADLVRTHCHQLRTVAGDSEQAGAVKVLTRMHQTLIWDRTRQVLRLRSSLREFFPAALEAYKDLASSEVLELLTKAPEPHIAARLTRAQITAALKRAHRRDRDTKTTAIMAALRTEHLTQPPVIAAAYGATVRALAALITTSNEQITALEGPVEACFGQHPDAEIYLSQPGLGPILGARVLAEFGDDPTRYDGARARKNYAGTSPITRASGKKKVVLARYVRNNRLADALHQQAFSALSGSPGARAYYDALRDRDISYNAALRQLGNRLVGILHGCLKTHTPYDEATAWNQHTQQAAA

SEQ ID NO: 102009 - protein, 366 aa, unidentified
MKKISTVAIEGMQVFKPNQLTIGLDLGDRSSRYCILNEAGEVILEQELATTPKGFQQVFSKIPRSRIALETGTHSPWISRQLSERGHEVLVAHARNVQLISQSTRKDDRLDARTLARLARIDPSLLGPVRHRSAKAQIHLTVIRARAVLVSARTALVNAARGLTKSYGARLPKCGTEQMTREITKNLKSELREALDPLLREIESLNERIAEYDKRIEQIAKEVYPAVARLKQVKGVGPLIALTYVLTLDNPHRFRRSRDVGCFVGLRPGRRNSGMSEPQLHISKEGDRYLRTLLVQGAHYILGPFGQDSDLRRWGLKLSERGGRNAKKRAVVAVARKLAVLLHRLWVSKEVYEPLRNNRKQMAQVA

SEQ ID NO: 102010 - protein, 389 aa, unidentified
METRTVNSLPLAAYHDGAVRCLLAIELSKKSWIVAVNAPLSDKVGRHTLRAGDWKGLLDLIARIRTRVVEALNRPVEVISCYEAGYDGFWLHRVLEAHGVRNYVIDPASLQVDRRARRVKTDNIDLGRLLRSLMAYLRGEPKVWSVVRVPSVAEEDDRRLHRERDRLINERVQHVNRIKGLCAVHGIYDYEPLRPNRLARLEQLRAADGCELPPRFKAEIMRELQRLELVLNMIKTLEAERDAIASTGKSLTHANAKKIQDLIRLKSVGPQIGTTLVGEVFYRQFNNRQQLGSYVGLTPSHLQSGSSSRDQGISKAGNPKARTIMIELAWLWLRHQPNSPLSMWFRERVGTGKGRIRRIAIVAVARKLLIALWRYLETGMAPTGAVLKG

SEQ ID NO: 102011 - protein, 344 aa, unidentified
MNSVGIDLHRKRSHVAALDEGGRELFSRRIVNDPDTFVALLSELDGESKIALEATYGWEWLAELLEDHGYELHLAHPLRTKAIASARVKTDAVDARTLAHLLRADLLPEAYVAPRELRDLLRQRVVLTQMRPALKNRVHALLARQGIQRAHADLFGSGGRRFLDDLQLRPDPRARLQTLLRLIADFNREIDALAHEIDRRAKHDPRVDVLCQIYGIGRYLGMLIVAEIGEIERFPSARHLCAWAGLTPTVRSSDAKARLGHISHQGSAALRWALVEVAQKACQGGGPLRQGFERIAKRRGRKIAKVAVARKILTLCYYGLRDGEIRCLKSSGRASAMKVMAPSQ

SEQ ID NO: 102012 - protein, 408 aa, unidentified
MRSNSFTAVGIDVSKCKSTVAARRPGGEVVWLPFDISHDTKGIQRLLEKLNGLDGEIRIVMEHTGMYWRPVALALQQAGFYVSVVNAILIHDFSDNSLRKVKTDRADALKIANYGLTFWMDLREYSVEDETRQMLKIQSRLYERTTTTGIMLRNGLISLLDQTFPRANKLFRDESRNTKGHVKWVDFIIRFWHKECVATLSLNAFADTFQKWCKRTGYRFSTSDAERIHAAAKNAVATLPKNDSTKLLITQAAISLNSVYDTLQALRTEMDRLASLLPEYELVMGMEGVGKITGPQLMAEVGDVRRFSHKGALVAYAGMDAPPFQSGAFDAKKRHVSKRGSPHLRKVLFEIASMMLVHGNMENPVFCFMDKKRAEGKHFYVYTVAGAAKFLRIYYAKVTQFLNAQAVA

SEQ ID NO: 102013 - protein, 418 aa, unidentified
MEIVGIDWAWEKHTCYLLSEKRTLKIEDTVNGYEKLIKLAGDAVFVIEDPNTRIGNYLLGKGKVVYFLSPARSKKAVGYHSNFGKSDKQDARSLALTFKEHSEYCHKLKHDEYGLELKELFNLYGAIGDIIQQSVSRLTDQLHRCWPEYLAIMGGCTSKLNLQFIIALSDKLNSLSEVSVSQVRELMKEIGARPDRKFLKKVARLLDTDYLPISEYRAEHIAKLASDIVELGVRHKKLEKTMKEKLRQSPYKDILSIPGIGTINGMALVVAFTTYSFTSYRELQQYAGTVPVTSQSGSSRYVKLRRNCNHYLRSLLHMAAMSLKRKSFWAKVVYKKKRKQGCSHNLALRELANILVKISFAVMKNLEPYNKEKFLSSHPKINPHQRLQTQTIQREILPDISQPEVIHSTYCQVLESPG

SEQ ID NO: 102014 - protein, 352 aa, unidentified
MMIIGCDFHPRFQQISFLLEETGECGQRRLMHTAEAEQYYRSLRGTAVRIGMEATGNYGWFRRLLSELGHELVVGDATQIRASNPRRQKTDKRDAEHILGLLVANRFPAVWQPPAENEQLRQLLLHRSRLVRLRTRVTNQLDGMAKNEGWVIPGGWSGKRRKAIEALPLPGWYGERRKDLLALLDRVEERVAPLNKAVSQAAANNAEACLLMTHPGVGPVVSLAYVLTIGNWQRFPRGKQVGSYLGLIPSEDSSSDKRRLGHISKQGNTLLRWLLVEAASTAQRYDESWHRQYVRLSMTKHHGVAKVAIAHKLAVRLYWMLRSGQDYGQMMERGSHARQSECPVGRNKRPIE

SEQ ID NO: 102015 - protein, 323 aa, unidentified
MRKHSMVCAGIDTSKSKLDVALNERSPELQVDNTPDGHGTLSAWLRRHGVKRVGIEASGGYEKAVVARLRRDGFVVVVFQPAQVRAYAQFVLQRAKNDKIDARLIAACTAATKKIHAPPDPRLAPWAEHLTLIEQIEEDLARYRTRLESCREPQCAAFWRERIAHLTKLLKSELKTLVSAIRQHQDLAARLDLIESVDGVGLRTAVAILVRMPEIGRLTREQAAALAGFAPYDDDSGDHTGARHIAGGRKRLRRSLYAAALPAAQRWNPQLIALYRRLRAKGKVHKVALVACARKLLIYVNTVVERGTPWVEKPPAPAALRAT

SEQ ID NO: 102016 - protein, 373 aa, unidentified
MPRYSTAFGMDVHLRSTTVCALDAETGEAVTRRFRGNPWGEVAEWMSGFPGPSLAAYESGYLGFAPQRELSGLGVDCVVAAVSKVPRSAADLSSKNDRSDAARMAKAILSHDVTPVWVPSPEIEGLRDLAAAHDAATARLAAAKQRLLAFLARRGYVYGGTTPAGNPRKYWTYGFLRWLDGIHPADDGGIRALAALRSEVEAAAETRDDLLAEYRAAVAAGPLSAEVEALQSIKGCGFALAAAFASEVGDFSRFRSGRQVTAYFGLAPKQRSSADSVRLGGISGAGNALVRKLAVEGSWCYAQAGHQPKLMPKGSGVPLEIRMHGRKGSERLLRRREEMLERGMPQAKANAATAAELVRWLWALGTMCREAGE

SEQ ID NO: 102017 - protein, 329 aa, unidentified
MTILAFDVSKHELVGVRADKNGAVKENFVLPNTPKEINTFLRSAKKLHPKIIMGSEATAEYHREIAKQACDLKIPFRLINPILTKQFTRSTIRKRKTDKTDAAIIAKLIANGEGTLLTKRSLDSLKPLHRTANSINVLKKTLAAMLAHLQQISPEETTIHEEIRTAIDLLEHIVIQIRSHVQKHTDPTLKKLLMTIPGIGETIAATLIAEIETIERFSNANKLVAFAGLDPRVRQSGVSLNRNTKLTKRGSPHLRQSAFIAAYIAARHDPELKKYFEKKMKEGKRYKEATVATARKILYRVFAVWKRGTPYEKRNDISSEKNVSKKLST

SEQ ID NO: 102018 - protein, 341 aa, unidentified
METTRHIGVDLHRNCFTACIRRENGRNYVTEWKLEQLPKFVAKLRPSDEVAVEVTGNTRLFHDAVAPHVKRVVAVNASQFKVITHSVKKTDPNDARNLALYLAKDLLPEVRMKDKTRAQIASLTQTRDTMVKLRTALKNKINNIFSAHGINLSKESLASEKGLKAVLETRFDALVDLELKILVDQIRSLNNSIAALEETIRRESQKLEGHKNLTSIKGIGGLSAGILLSIIGDIRDFADEGKLAAYFGIVPRIHHSNETEHSGRITKRGTKLGRTTLVQCALIAQRFSPYLKQYYERKKSRGTGKAIIALARKFLGIIYRTLKNRWIFEDFPNFVLAEKTA

SEQ ID NO: 102019 - protein, 331 aa, unidentified
MKVSDVIGIDVSKLTIDVRIHIDQRYGQFENSKKGFDKMCNWVFKNNPTPKEEILFVFEHTGLYSYNLAVYLNNKGISFHIAPGLEIKRSLGISRGKDDKIDAAKIARYAYRLRDEIIPYKLPSDELENLKRLFSLRNRLVKQRAGFKASLKEQKRVYRVKDNTILLGTQEKMIKYLAKQINTIQEEMHSIIKSNDKLLKQYNLITSITSVGSQTALSMIVLTAGFTKFKNWRKFASFSGIAPFPNRSGTSIKGKTKVSHLANKNIKGLLNLCSINAIQYNLEIKLYYEKKVAEGKHPYSTINAIRNKLLARIFAVVQREQPYVNFLKFAA

SEQ ID NO: 102020 - protein, 347 aa, unidentified
MRFFTDPHQNYCGIDLHARSMYLCVQNSEGKVVLHKNMQARPEPFLKAIEPFREDLVVGVECIFTWYWLADLCAEHNIPFILGHALYMKAIHGGKAKNDRIDSRKIVALMRGGTFPMAYVYPAKMRATRDLLRRRNYLNRKRADLISHIQNTNSQYNMEPFTANISYKKNRVGVVEQFPDPDVQLSMQANFELIALYDDLKNRLELHITRNAKHHDPQALYRLRSVHGIGRILSLVILYEIGDINRFARVQDFASYARLVKCARESAGKRYGTSGGKIGNAHLKWAFSEAAVLFLKGNPEGMKFKKRLEKRHGKGKALSILAHKLGRAVYYILKQDQAFDMNKFLKN

SEQ ID NO: 102021 - protein, 466 aa, unidentified
MKIFIGADVSKGYADVQFRNEAATFLVEGGVFDDTASGHRLLLDRMTALKQKSPEVDFVVGLEASGGLERNWEKFFRSLKSSFDVELLLLNPLAVKKYLERDLRRNRTDKISARNIADYLACGRRRQDLEYERDLLGARGLYRCITAAMGRRVQAQCELQTLLPQVQPELVQYCRYGLPQWILELLLAYPTADRLAKARVKTLAKINHITPQRAAELIASAKESVASLSDEATSAAIIFLVKEIQHQNQKVDQLQNMLTDSLKNDPDVKIMDSILGIGLWTAIVLRVEYGNIERFHSAAAAVAYAGLDPRIDQSGDMKRNIGISRAGRIHIRSALFMPTLAAIRSNPAIRDFYQRLIAAGKEEKVAIVACMRKLIHIIYACVVTGKAFDRNYHHQKKQAPKTVSGMQSLAQIAASMNLKAALAAPVSKQEAKRRKAAAAPQNGINHLMRGPGAALNNNKSTSGKNA

SEQ ID NO: 102022 - protein, 338 aa, unidentified
MKLYGGIDLHSNNSVIVVLNEKDEAVYKKKHNNDLLEILSCLLPFRDFLQGLVVESTYNWYWLVDGLMSAGFKVHLANPAALQQYSGLKHTDDKSDARWLAHVLRLGLLPEGYICPKEERSIRDLLRKRSQLVRQKTANVLSIINLFTRNTGEAINLKQVRKLTEESLRERFGDESLSLAVHSNLMVFQCLQTQIKLLEKTILDKVKLRKEFIHLKTVDGIGDILALTIMLETGEIGRFPKAGNFASYCRCVGSKRISNGKKKGKGNTKNGNKYLAWAFVEAATFAVHYNEKVKKFYQRKKAKTNGMIAIKAVAHKLARACYYILRDQVEFDAAKAFG

SEQ ID NO: 102023 - protein, 354 aa, unidentified
MDYYAGIDVSLKDSSVCVVDATGRILREAKVASEPGALVAWFRGLGLEVTRIGLEAGPLSQWLHAGLSEAGFEAVLLETRHVKAALSAMVVKTDRKDARGIAQLLRMGWFRPVHRKTVDAQEVRALLVGRKLLQSKLRDVELSIRGILRGFGLKVGEVTKAKFAARVRELAAGQTMLETVTEAMLTAREGLLAEFMALHRRMLALARADEVCRRLMSAPGVGALVAITFRTAVDDPGRFQSSKAVGAHFGLTPKRYQSGETDVAGGISKVGDAMVRTALYGPRHCLGRQCGAEPAGTLLRAQALGPGGGQAARPQASQGGAGPQAGLHSASHVAGRHRVPLGQGDDGGGVALRR

SEQ ID NO: 102024 - protein, 413 aa, unidentified
MRVLLVGDDWAESYHDVELMDQGGATLARARLPQGPAGMARLHAMIGEQLGDDAEDAEVRVGIETDAGLWVTALTAAGYQVYGINPLQVARYRERHSVSGAKSDPADAHTLADVVRTDAHQLRLVAADSEQARAVKVVARAHKTLIWERTRQVQRLRHQLLDYFPAALDAYSDLGLASPDVLELLAKAADPASAAKLTTAQIDAALKRARRRDRAGKTAVIKAALRSPQLAAPPAVTSASAAVTRSLTALITTLAEQIAVLEGQVGEYFHAHPDAEIILSQPGLGPILGARVLAEFGDDPHRYASAKARKNYAATSPITRQSGKKKIVLARYVHNDRLRDALDAQAFAALTASPGARACYDAQRAAGAGHRPALRHLANRLVGILHGCLKTGTLYDEGTAWPGRASKEIKTAA

SEQ ID NO: 102025 - protein, 356 aa, unidentified
MSDRTTKICVVSKASGKPKIVQETTIPTTPDGFRAFLERQDKAAALVFETGTHCRWIDKVASGMGFKTFVANPCRLRMITESATKNDKNDARTLARMALADIELLHPVKLRDDEHQKMVNLHEIRDQLVKERTAEVLQIRAIAKSMGFRIPDCSAECFHNVAKKELPKELSDIVWPLMKELKSKALTIKTVEKQMRRLAKSDTFKAQVERLMEIPNVGFITATCFVAVTGGDMDRFDRPRDIGPWLGVTPKQDQSGDIDRQCHITKAGSKMLRWKLTECAQRVLQKNSADIDLKVKGLRIRARGGKIAKGKSITAVARGLAVLMVAMLKKPDAPYVPLSEDKAKELAQIRAAMSAA

SEQ ID NO: 102026 - protein, 458 aa, unidentified
MAHRKKKIGAQLVEDEEYQLRYERVAGIDVAKGKADVCTRLPPARAGGRRMSRTEEVTATVAAVTALAVRLLADGVELVSMESTSDYWRIWFYVLEAAGLNVQLVNSSHARQLAGRPKTDRLDAQWLARLTEMGLLRPSFVPPAEIRALRDLARGRLQLVHDRTREWQRLEKLLEGALVKLSSALSSLARVKSARVILEALAGGERDPRVLAGLAARQVRAGRAGIEAALEGMLYGDHHGRLTRIHLDHITFLDRSIAAIEDDLAAALDAIPAAQGIDAAGTRSADPGPGAAVLPAAERLAEIPGVSLDLARAIIAETGLDMTRFPTAAHLVSWAGLTPVARQSGPRSRKPGKGHGDSYLRGYCTQAATGAATTDTFLGERLRRLSRRLGGSRARCAVGRSILVIIWHLLASPEARYTELGPGWHARKTDTDRRTRSLLNQLRALHPDSDITITEPAA

SEQ ID NO: 102027 - protein, 410 aa, unidentified
MYKICCGIDVHKTFVVACIASTNDKGITSYESHRFSTYTSGLKTLLQWLIDRNCKDVCMESTGKYWIPVYNILEKGCSIVLAHPKYVKAIRGKKTDKKDAKWIADLFKHDLVAGSFMTPSDIRQLRDLMRYRFKLTCFKSSEKNRLQNCLTVSNIQLGNVVSDTFGKSAQAILDKILENPADTSFDLEPLVFKSLKKKLPELRDAIDGYITPEQAGKLKVIKTHYEDLESRKAELEELILALAAPYQQELAILQTAPGISSDFTAIGIISEIGTNMEAFPSAKHLCSWAGLTPTNNESAGKKKSVRVSKAGCYIKPLLVQCANAVIKSTKHPEMRNRYLRLKKRRGHKKAIIAIARMLLTALYHMLKNGENYNAELYRKSDLPPVDSEITVEQALMIARNQGYKIKSATA

SEQ ID NO: 102028 - protein, 328 aa, unidentified
MIMFFIGIDVSKAKLDCCLSLDVEGTKRRAKSVPNSKPGILGLLAWCAKHQLAAQDLHAIMEGTGVYHEQAALALTDAGVTVSIVNPAQAKDFGRSLGIRTKTDGVDSLVLARFGALLKPRPWTPPAKEARVLQALLSRREAIAQDLRRERNRLEKADATDTPASIRQSIVDAIIFLEKQLAKLQQDIDNHIRKCPKLKADRDLLVSIPAVGPQVGNHLLAVVHNHHFQSAGQLAAYLGLVPIERQSGSSILGRPRLSKAGPARIRAVLYMAAVVATKHNPHIKALYQRLQERGKSKMSALGAAMRKLVHLCFGVLKTRQPYQANYAI

SEQ ID NO: 102029 - protein, 341 aa, unidentified
MENCGIDLHQKSSQVTVVDEEGEVLERASIPTTRAGLERWFGRRERMRILVEASGSSPWVVRVLLELGHDVDVIDPRRVRLIAQSTLKTDRIDADILAELARLRTKLRTLVWQRSETTQRQRGHLRVRRALVGARAAFIVTVRGLLRSFGVRVASCRSDRFAARCQATAIPPELAEVMTPLLDAIHDLDARIATMDAVVEQVGQDYPAVKSLQDIPGVGPVVALAYVLSIEDPGRFRRSRDVPGYLGLRPTLRASAATVRQGHITKQGDADVRRLLVQAAHAHLRSHVDTALKSWAESLIPRIGTRKAIIALARKLAVLMHRLWITGEVYQPFPNDVSKAA

SEQ ID NO: 102030 - protein, 341 aa, unidentified
MKITTIGIDLAKNVFQVHGVDQNGKAVLRKQLKRAQFPLFFSNLPTCLIGMEACGSAHHWARKLQGFGHTVKLIAPHYVKPYVKTNKSDAADAEAICEAVSRPNMRFVAIKTVEQQAVLSEHRVRQAFVQARTAQANQIRGLLAEFGLAIPKGIANLPKQVPLILEDPAYALPAAFRELMARLLAHFHELDRQVDELEAQIQAWHRSTAASRKLAEIPGIGPLGASALVASIGDAKTFKNGRQLAAWLGLVPRQHGTGGKQTLLGISKRGDVYLRTLLIHGARSAILAAQRRSETDSWLAKLMQRRNPNVAAVALANKNARTVWALLAHERQYQSDYAAAA

SEQ ID NO: 102031 - protein, 356 aa, unidentified
MLNDKKYIGMDVHKESISIAVRNDAGKIVMECVIETKASMILQVIDGLRGDLQVTFEEGTWAAWLYDLLKPHVTRLVVCDPRKNASMREGNQSDKIDARRLAELLRLNHLNPVYHGEHGLRSLKELVRSYLTITKDLGRVMSRVKAIYRSWGIPCTGKQVYAPRHRAEWLGKIAEPGVRRRAEFYYQQLDALRTVRQQVRRDLLAESKKHPAWKRLCQIPSIGPIRAAVLLGILQTPHRFRTKRQLWTYSGLGIETQSSADHRRVDGQLERVKKPSSIRGLNRNCNHDLKNLFKGAAIVASSKPGPFQEFYTALLTKGIRPEMARLTLARKIATIVLIVWKRGACFDAQHLKPQTA

SEQ ID NO: 102032 - protein, 450 aa, unidentified
MSKLYVGLDVSQNSVAACFLLEDGTEPIKRFSFDHNLLGVDRLVAKINSTAETLSLTEALIGMETTGMLWWHLSEALRNCDELAHLSPGVYAINAKLVANFKKAYVEAEKTDPGDAFVIADRLRFGRLPKLAEPDERYLAIQKLTRHRFHLANSLAREKNRFLSHLFLKFSGFCQQQPLSDPFGAASGALLTEFLSVDEIAQTSIEDLADFLIDKGRNRFTDPEAVAKAIRQAARNSYRLSKALADPVNLVLAMTLENIRFFERQVAAIDKAIARELAAFPGAQVLLSVPGLGPVFTAGIIAEVQDVNRFDTDAQLARFASIVWKKNQSGEFSADETPMMRSGNQYLRYYLIEAANSLRMHNEEYAAYYQTKYREATTHHHKRACVLTARKLVRLIHTLLRKGQLYQTPDQRKESRAESTLPAGMTPGELARHIVRRRQAKGRTRVRLDH

SEQ ID NO: 102033 - protein, 341 aa, unidentified
MQDINRVSIDLAKSVFQVYALNSRNNVLFNKKLSRKKFTEFMVQLSASTVYMEACYSSHYWGRTLKEMGHSPFLIPAQHVTLFVRGNKNDNNDALAIAEAANRPGIRFVPIKMVQQQEIMAMHRLRTRLVKSRTQVSNQARGLLSDFGITFPLGAKAFLDAMTALQANEQLSLPFRNLMLDMSTEFHEISARITTVENLLKAYIQRTDHCAIVSSVPGIGVINASALVASIDKGQAFNNPREFAVWLGLTPRQFASGEKSRNGGISKRGDRYLRTQLIHAARAAKKWSRKRDDQLSLWIKQLEARVGVHKATVAVAHELARIIWVLLQKQQTFVAQYPQKK

SEQ ID NO: 102034 - protein, 378 aa, unidentified
MDRATNSTAPADRLFCAVELSKNSWLLGIQFPDRQKASVYPIKGGDSEGLMAKLFAACDRWTKVSGKKPSIIVCYEAGYDAFWLARFLKARGIECLVVDSGSMQVNRRSRRAKTDRIDLAKLLRALIAWCGGEQHVWSVVRTPTVDEEDLRRSHRERNRLITERTAHVNRIKGLLFAQGIRGINVKARYKTLRIDKLVTGEGRSLPPRLAREIKREIDRLELVQQQIAAIEEERDESPTTCKETEKKRAQLLLLKGIGPTGSAVMAREVYYRQFSNRRQIAGFLGLATSPYDSGQVERSQGISRAGSGPVRATMIQIAWLWIKYQPKSEISRWFVQRTADQSGRIKRIMIVAVARKLAIALWRYLEQGLVPQGAALTR

SEQ ID NO: 102035 - protein, 323 aa, unidentified
MSTKATKKRRSFIGIDVSKKLLEVGVHQSDYHFRCPNEPKNFPALITELISLRPARILLEATGGLERALLQALHAAGLSVVVVNPRQVRDFAKALGLLAKTDRLDARVLAHFAAATQPAIRPVKAQQETELDALMGRRTQLSDMLVQEKNRRGSAATKDARDDIEAHIEWLEERIQELDEKLKEQLKCSAVWQQKDKILQSVKGIGFVTSMSLLADCPELGQLNRHQIAKLVGVAPLNRDSGQQRGARHIWGGRAQVRGKLYMATLAATRFNPVLKSFYQRLLLKNKLKKVAIVACMRKLLTIINVMVRENKLWNVKAQPVSA

SEQ ID NO: 102036 - protein, 344 aa, unidentified
MEQYAGIDVSLELSSVCIVNAQGKIVKEAKVASEPEALIGFFETLGFAVKRIGLEAGPLSQWLHAGLKRAGFDAVLLETRHVKAALSAMTVKTDRKDARGIAQLIRMGWLRPVHAKSIGAQEIRALLVARKQLLGRLIDVELSIRGILRGFGLKVGPVTRKNFEVRIRELVTGQAMLERIVAAMLSARAALKAEYGKLHKAVLTIVRDDTVCRLLMTVPSVGPLVAITYKSAIDDPHRIVKSKAAGALCGLTPKKYQSGEKDVTGGITLAGDETVRTVLYEAANVLLSRITRFSKLKRWGMDVAKRRGSKRAKVALARKLAVILHRNWVDGTTYRWAEAGSIAA

SEQ ID NO: 102037 - protein, 414 aa, unidentified
MLKIVYRVCCGMDVHKSFVVACIATTNERGVTTYKSKRFSTFTGDLRRCAAWLAENNCKDVCMESTGKYWIPLYNILERTCNIVLAHPKYVKAIRGKKTDKRDAKWIADIFKHDLVTGSFIPPADIRQLRDLVRYRWKLTSFTTGEKNRAQNCLTVSNFKLDDVFSDVFGKAAFAITTRILNNPAEKITDVSNFRTKGMKATDEQVLAAVDGAMCEEQAEKLRIIRSHMDSLHLCKLNLESLILATAEKYLPQLNLVMTAPGIQSFAAIGIISEIGVDMSVFPTSKHLCSWAGLTPQNNESAGKKKTTRISRAGAYIKPLLVQCALCAIRAKQFPEVRNRYLALKKRRGHKKAIIAIARMLLTAIYNMLKKNEPYNPELYRQADRPPTHREVSVEEAIFILQRQGYLVTAPSVT

SEQ ID NO: 102038 - protein, 339 aa, unidentified
MNNASTIGLDLAKKVFQVHGVDQAGEVLVRRTLRRSQVLAYFGKLAPCLVGMEACATAHYWARELSKLGHTVRLIPPAYAKAYVRRNKNDPADAAAICEAVGRPAMRFVTIKTAEQQAAAGVHKVRELLMKQRTMLMNSLRGLMAEFGIVVAEGPRHIGELVAILVDPGDRRIPAPLHGGLVRIAEALRHLERQIEVVDKQILDWGRGNKTCRHLITIPGFGPILSTAMAAIVVNPATFRSGRDFSASLGLVPRQDGTGGKVKLGPISKRGNGYLRRLLVSGAMTVLSGKRAKQDSWLVKLLATKERKVAAVALANKMARIAWAMMMRQEDFRAVAAAA

SEQ ID NO: 102039 - protein, 338 aa, unidentified
MALYGGIDLHSRISWLVILDGALKMVLQVKLRNDLMEFLRLLEPYRAELAGLAVESTPNWYWLVDGLQDAGYRMHLTNTCAAQQYSGLKYTDDRHDARWLAHLLALGILPEGYIYPAHERPLRDLLRRRGFLVEKRTSMLLSLRSAFECHTGHRVSSDTIKKWTAVEIEELLDNATVARGLTCLLEPIKVMSTQIRMLEKEVLAQAKLRDEFALLRTVWGIGPILALTVMLEVGDIKRFEKVGNFASYCRLVKTDRLSVGKRKGSGNAKNGNPYLSWAFSEAAHFAIRYHDVAKRFYQRKLAKTNGIVAIRALAHKLARASYHVMRDKVEFDPDRLFA

SEQ ID NO: 102040 - protein, 411 aa, unidentified
MEKLFERCCGLDVHKASVTACVRVPDRRGRRAELVAEFGTMTADLLALRDWLQGLGVTHVAMEATGVYWKPVWYLLEDEFELLLCNAAHVKHVPGRKTDVSDAQWLSQLLECGLLRGSFVPPRPIRELRDLTRYRKSLIRERQRQANRLHKLLEDANIKLACVASDVLGVSGRAMLAALVAGEGDPTVLAELAKGRLRAKLPALRQALEGRFSAHHALLATHVLSHLDYLDETIAALGAEIETRLAPFADKAELLQTIPGVGQRAAEVILAELGPDMSRFPSDRHAASWAALCPGNDESAGKRRSGRTRKGDTWLKETLLESALAASRTRDTYLKAQYLRLRRRRGEKKALVAVAHSILIIAYHVLHESRPYEELGSDWFLRRESPTHLTRRLTRQLERLGHRVTLEPIAA

SEQ ID NO: 102041 - protein, 409 aa, unidentified
MERLIERVCGLDVHKQTVAACVRVPASKGAREQHVRTFGTTVAELLALRDWLEAHEVTHVAMESTGVYWKPIYYVLEERFTCLLVNAAHVKQVPGRKTDVQDCVWIAQLLEHGLLRGSFVPPAPIRELRDLTRYRKVLIQDRTREANRLHKLLEDAGIKLASVATDILGVSGRAMLEALVRGTTDPEVLAELARGKLRAKLPALRQALRGRFRPHHAFLVSQLLAHLDYVDETITTLSERIEEVISPFADELARLDTIHGVARRTAEVLIAELGVDMSQFPSDRHLASWAGLCPGNNESAGKHKSGKTRRGNRWLRAALTEAALAAIRTSNSAFTARYRRIMRHRGHKKAVLAVAHAMLVTAYHVLARQTTYQELGADYFDRRHGERVTRRAVQLLERQGYRVTLERAA

SEQ ID NO: 102042 - protein, 333 aa, unidentified
MKDLSKVQHFVGCDVSKETLDFAIHERGKDYRQFKHIRVENSIDGFRKMRKWLREAGIKITDVVIAMEHTGIYSAALAEWCFGKKIAFVMLHPRDVKNACSRGRDKTDKVDSQFIADYVYTMREKLSPSNPEPAIIRKLRQLCNERKIAIRTRTAYLNIIKTLTDKASIKRTEDFIKTLNKQIKTIEKAMVSTVESDPEVSKNYNLVCSVPGIGMINAVATIVATSNFTRFQNARQYAKFSCISPMSFTSGTSVKGGDHVSRVGHGELKALLTEAAKSTIVHDSGIKAYYNRKREQGKSFGCVLNAVKFKLICRMFAVVKRQTPYVNTEKFRN

SEQ ID NO: 102043 - protein, 343 aa, unidentified
MKVTTIGLDLAKNVIQVHGTDERGKAVLKKQLKRERVALFFAKLPPCLVGMEACGGAHYWARKLEKLGHQVKLMAPQFVRPYVKTNKHDAADAEAVCEAVSRPNMRFVPIKNGEQQAVLALHRARGGFVKARTAQANQIRGLLGEYGIVLPRGIGHITQRLPAILEDGENELPGVFRQLLARLADHLRHLDRQVDELEQQIQLWHGENDASRRLAQIPGIGALTASALVATIGDAKQFKNARQLAAWLGLVPRQHSSGGKPMLLGISKRGDAYLRTLLIHGARSVVRVTERKSGEAQRWLTQLIDRRPQNVATVALANKNVRIVWALLVKGQDYQFDYTPSAA

SEQ ID NO: 102044 - protein, 369 aa, unidentified
MKKVGMDVGKRQSDCCVFDETGAIVERFKVRTRQEALSAKFANREKCLIGIESGRDAGWLHAHLTGLGHDVMVLDTTRSRAIGIGGGGRKTDRQDAEVIGRALVSGVAKPAHVLSAERRRLRDALWGRDKQVAIRSRLVTMLRGQFQGRGQETPRCEAERFANRLRASGLAGVEDPVVQSLLRTLDAVQGEIVVLEQHLQQLAAQEEAFERLCSVPGVKLITALSFVAAVDDARRFRDAHSVEGYLGFGTREHSTGGKQRTGGITKRGNAMARRMLVQASNVLLRAPSKHSDPLVVWAKQVWERRGRKRAVVGLARRLAGVLWAMTVDGTFYDPHGLARASWAGLSRRVRHAQVEATTMKSASVAAGGA

SEQ ID NO: 102045 - protein, 451 aa, unidentified
MTKSKRRRPERDFTPTHPHAAAIDIGSRMHVAAVPPDRDPEPVRAFGTCTGDLQQLADWFERCGVRTVAMESTGVYWIPAYELLEQRGFEVVLVNARDAKHVPGRKTDVSDAQWLRRLHEYGLLRGSFRPKGELAALRAYLRQRERLLDYSASHIQHMQKALMQMNVQLHHVVTDITGETGMRIIRAVVAGERDPAVLATHRDRRCHASEEEIAAALAGNWREEHVFALGQALELYDAYHAKVVECDLRIEIVLRRLRDAAAKPTGRLPPARHRDKTANAPTFDARAALHAVLGVDLTQIHGLGPSLALKLIGECGTDLSAWPNAKHFTSWLCLAPANKISGGKVLSTRTRRSGSRAAALLRLAAVTVGRTQTALGAFYRRLSARVGKAKAVTATARKIATLFYNALRHGIDYADPGASYYEDRYRARVLANLRRRAKSLGYMLHETPASG

SEQ ID NO: 102046 - protein, 384 aa, unidentified
MKKDNILFIGLDTHKVETQVSYTLDHRTAEINDLGRIPTTKSAITKLARQLQSKYPHATLHFVYEAGPCGYWIYRLLTSLGHFCYLVAPSLIPKKPGDRVKTDKRDAQNLARLLKNNDLDPIYVPEPEDEAVRDLSRAREVAMRDLNDAKHQLKSMFLRNNIRYKGSDNWSLKHLRWLTEIVLPHPCQQIVLQEMIQTISERITRLKRLDNELTHQVKQWRYYPVVKAIQAMRGVRLLIATGMIAELGDLSRFDTPRKLMKYVGLTPSEHSSGEKRRLGAITKCGNGRARRLLIEGAHSYRHAAKISKEMQLRQEGLPKTIIDKAWEAQLRLCRRYQRLIMRGKSRNVVITAIAREMIAFIWSISREVVLPRVDPRTRLSRVPA

SEQ ID NO: 102047 - protein, 445 aa, unidentified
MHTQRSASPTPHTIRSAARFRQTKNNMKNENYTALVALDWGDKTHAFARQSAGAESIEQGSIVATPEALHAWLEQLGQTYGGQPVALAVEAGRNALLHALLEYPWLTIYPVHPATSARFRTAFTPSGAKDDGPDAVVILTLLRMHRAQLPPLILDTPATRELTALVFARRSAVDQRTRTANQLTSVLKGYFPQALGLAGDDLTSPMARAFLRRFPELTAVQKVRPATLRAFYRQHHARSEERIAERLQLAATARPLIKDPAVIAPAKLEVALLVDLLTVHARHIALLEAHIAEAFAAHPRTQLFAALPGAGPVLAPRLLVAFGDLLERYPTAASLQKYSGVAPVREKSGQKSWTHWRWGAPTFLRQSFVEWAGQTVSQCDWAHAYYHQQRRAGKAHHAILRALAFKWIRILWRCWHDQIPYDEQRYLAALRRHGSPLTPALQKTA

SEQ ID NO: 102048 - protein, 412 aa, unidentified
MEVIYPRCAGLDVHKETVVACLRIVERGEVSRSVRTFATTTASLIELGEWLEASGCTHVGMEATGVYWKPVWQVLADGSFELVLANAAQVKNVPGRKTDVNDATWLSELLAHGLVRGSFVPGAEIQELRGLLRTRKQLVREKASHVRRIQRTLEEANIKLESVLSDVMGRSGRAMIEALIDGETDPAKLAALAHPKVRASAATLREALRGRVKRQHRFLLRLHLQQIDALDAGIADIDREADAALACFRDAVKQLSTIPGVSELSAQVILSEIGTDMQRFATAGHLRSWAGLCPRNDESAHKRRSTRLRQGAPWLKDMLVQCAWAAARTKATYLRAQFVRLRARRGPKKAICAVAASILTAAYHMLQDGTLYEDLGPDHFARRRPEAQAHRLLKRLADLGFSVELKPVAAAS

SEQ ID NO: 102049 - protein, 310 aa, unidentified
MIIAPGFIGIDVSKSHLDIFDAVAGRCVRIDNRPAALAGHIHDWAQRDAFVLFEATGRYDLALRQALAEAGIRFARVNPGRARDFARAAGFLAKTDVVDARMLAAMAQCLQPRPDDVKTEPREMLALLNKRRDQLVATRQQERTRQRECSNPILRDSIAAHLVWLDAAIEALQAQIAAAIADNPELEQARRLLASAPGVGPVTAATLLALLPELGNRSSKQLAALAGLAPFNNDSGARRGQRSIRGGRKRVRDALYIAAFTATRHAPRFQTFHRTLTQAGKPPKLVIIAAARKLLTVLNAILRDQKPFRA

SEQ ID NO: 102050 - protein, 314 aa, unidentified
MSDAIFAGIDVAKAHLDRAERPGGTHARYQNDEAGIARIGGQLQAQAPTLVVLEATGGREVPLAAALAAAGLAVAVVNPRQVRDCARAVGQLAKTDALDAHLLARFAEVVRPEPRPLPDADAQNLSALLARRQQVIAMLVAERQRLPTTTAALRPRVEAHIAWLRQERDDLDRELRRQIRASPAWREDDDLLQRVPGIGPVLATTLIAALPERGRLSRKQIAALVGVAPLNCESGILRGRRIIWGGRARVRAALWLGTLVAVQRNPAIRTFYQRLVATGRPKKVALTAAMHKLLVVLNALLRQRTPWHDAIQPV

SEQ ID NO: 102051 - protein, 319 aa, unidentified
MSQPTMTYAGIDTGKRTLEIAVHSTKARNQVDNDDASHAELSAWLDRQHVHRVGIEASGGHEKAVVARLRQDGFEVVVFQPIQVRAYAQYRLQRAKNDRIDAALIAACAADCKDEDIHAPPDPRLAARAEHLTMIEQITEDIARLKTRRASCRDDTVRRHWEAEIRRLKQGLQQELADIVAGLRQHPDLAERLDLIQSVPGIGLRTAVAIIIRLPEIGSISREKAAALAGLAPYDDDSGDHHGQRHIAGGRQRLRNSLFAAALPAAYFWLPQLKALYRRLTAKGKPHKLALIACARKLIAYANAVVARGSPWINETCDP

SEQ ID NO: 102052 - protein, 370 aa, unidentified
MTSIIYVGMDVHTTNYTLCCYSVTTDNVFAMATMDPDYGNILKYLERVGRELGGDCHFQCGYEAGCLGYSLYNQLTAHGVDCVILAPTTMATTKKKGIKTDKRDAKNIATCLAYNTYSPVYVPTAEDNAVKEYIRMRDDAKDILKGIKQQLLSFCTRHGRRFTEGRNYWTQKHIKWLETLDFNDAILNETFQEYLALLHQATDKVERFDKRIAELARTERYEEKVKKLSCFIGVKAHTALATIVETGDFARFPSAQHYASYLGLVPGEDSSGNKTLRTGITKAGNSHVRSLLVESAQCYSRGAVGAKGKALKDRQAGNEPKVIAYADRANERLKRKCYRIMFNSKRNIAVTAVARELACFIWGMMTDNIA

SEQ ID NO: 102053 - protein, 339 aa, unidentified
MAIQSEKVTPVLQLLFAGIDVGAEELIFVIRKNGTPCKAQKFANTPADRARLVKKLIKLPGILVCLEATGIYHFDLSIALHDAGVALMVVNPKSSHNFAKVLMKNSKTDAVDAETLAQYAERMDFVAWTRPSDEKIALRSFARRIDALTRQKAAAKNQLHALGASKENPKAVLRDVNLSISQLEKRIDRLSKDALVLIGKHTDLERVFRLLTSVKGIAQTSAIALMGELLLLPQGLSHREWVKFAGLDPRAFDSGKSVHKQARLSKAGNRHIRSALYMPAMSAKQHDPYVKAYFQHLVDNGKRPLQALCAVMRKLLHAIHGMLKHDKPFDNTRFYAIPA

SEQ ID NO: 102054 - protein, 383 aa, unidentified
MRIVCGLDVHKDSIYLCILSSTGEIIEKVFGVLTCQLQEMRDLMLTHHVEEAGMESTSVYWIPVWRVLEPHFKLKLINPYFIRQLPGHKSDVKDARWIAECMMKELVRGSFVPPERIQQLRQYDRRIYDLDDEIVRKLAKLDAVVQRCNIRLGNYVSNTDSKSYKSVIDRICEGVTDPKVLVEEIHGRIINRHGKDTIISSLTGCVTECDMDILRQLKAEIDMAGQHKQECMDKMQAVCEREYSAALQNLQTIPGIKMRAATSLIAEIGTDMGHFQTANHLTSWSGLRPRNDQSNKTIKSRCITHGNRYLRRTLIQCALGASRTQGCFFNRFSYHQTQVRRKNRMKVQVAIARKMLVCAWHILSRNVQYKDFDNRIGTSDENG

SEQ ID NO: 102055 - protein, 367 aa, unidentified
MIVIGADTHKSTHTLAAVDAATGQVLATKTVSAKVDGMLQAWRWAHGLDAERVWAIEDCRHVSGRLERCLVGQGERVVRVPPKLMGQSRRGERRPGKSDDIDAVAVARAALREGVESLPAAFLDEQAMEIRLLNDHRNDLVCERTRHQNRLRWHLVELDADMEAGLPAGALDRTVWLDRIASRLSKLPQSARVRVARDELRRIRELTRAERALERELRALIAEHAPAVLAEQGCGTIVAATLIGRSAGAERFRTDGHFARQAGAAPIPVSSGRRDRVRLNRGGDRQLNCALHRIAVTRARNCPQTRAYLERKQAEGKTKAEAYRCLKRHLARRIWRVLCAPTDQANENNKIMTNKNGNAPAPALALT

SEQ ID NO: 102056 - protein, 372 aa, unidentified
MKEDSVIFIGLDTSKLKISVAIADGSRNGEVRFFGDISSEPAPVASMVSKLSKRGAKLHFCYEAGPTGYGLYRQIVELGHDCVVVAPSLVPKRAGDRVKTNRRDAMSLARLHRAGELTAVWVPDEGHEAIRDLVRAREAASDALKQARQQLKSFLLRHGRIYAGREPWTRAHRRWLTCQAFDRPAHQILLAEYCQAVADASVRLDRLTKLVVETAASWSMAPVVAAYQAMRGVAFMTAVTFVVEIGDVRRFDNPRQLMAYLGLVPSESSTGERVKRGGITKAGNTRARRVLIEGAWTYRFPARVSPKIQARLDDLPRTVREITWKAQVRLCARNRKLLAAGKPKVVAVTAIAREMAAFLWAIGQEVALTAKG

SEQ ID NO: 102057 - protein, 407 aa, unidentified
MSDHAITYVGMDVHKKSIAIALLPGTGGPPVEWQEPNELRAVQRLARRLKREAGEAVTCCYEAGPTGYALLRQLTALGVRCQVIAPSLIPMKPGTRIKTDKRDARKLAELLRAGMLTEVHPPSESDEALRDLCRCRDDVRDDLLRARHRMSKFLLRRHCVFSGTKHHWGTRHMKWLSELRFDDGASQATFDSYLLALQQNEERLERMDVRLAEFGAQEPYREPVAWLRCFRGIDTVTAVSIVAELHDFRRFRSARSLMAYLGLVPSEHSSGESERRGSITKSGNRHVRRLLVEAAWSQPPPTGHQPALAAKTREPTRSRPGHRRSSASTSLAALRADERARQTESEDGRRHGTRAGRIPVGHVAPCQHRRDLERTIKLEVADEGRHDLEDARLPYATRRHPLPDSRS

SEQ ID NO: 102058 - protein, 394 aa, unidentified
MALYVGIDVSKEKFDACGIGDDGKKAFSICCPMSREGFENLILRLPKEGSLLLGLESTASYHIALFSYLTAKGYRVALINPLLIANFTKLSLRKTKTDKKAASTIAEFLLLKKEALAMETEPPRLSELKDLSRRRERLADQLTALKNDMLRILSVTFPELENIMGVFTKSALRLLTHFPSAQAIREAGYDAVASVVLNRSRGRKSAASIQTLVDAAATSVGVSSPSKDLILKQEAALLLHVQEQAEEITKVMTCLADEKMRRDAEILTSVMGIGDKTAMSFLIELGGDIKAFENDKKLIAAAGLDPSTHESGKYKGQSSISKRGNRHLRRAVWLMASKVIISNQVFRAYYFKRRKDGLVYKMAVLATAHKLIRVLFSMLVNERQFEPRGGKKYS

SEQ ID NO: 102059 - protein, 332 aa, unidentified
MWYLGLDVHRRSITLAGVNSEGTPLASRSFPCEDPTALLAAVQGHRPYHAVIEACGSYHWIYALLQQGGEVTLAHPYKLRALWTARAKTDKLDAIRLAQLLRAGLIPAAYVPPPPYQQLRDWVRSRVRVVRDRAEVYHHLHSILARFNWHSPYAQPFCKRGVAWLRTLDLPSPFDCIRQELLERLTHYDQAIQHMDEQLDRLAADYPQIAALTALYGIGTFSALLIVAELGEVERFNREEEIAAYAGLTPKVHQSGSQDYHGAISKSGSPWLRWILVEASIKVIRKDPALRAFHQRVRRRSGWRRARVAVARKLAVICWKRLRAWERQRPAA

SEQ ID NO: 102060 - protein, 389 aa, unidentified
MKYVGIDLHKKTISGCVVVKERGKKKVAARKRLECRDEAGIKSWFGELGRFEVVVEATASYEWFVKLVEPLARRVVLAHPKKLRIIAESKRKSDKLDAQVLAEFLASDEIPLAYRPCPRVREHRALVRWRGYIQRRLTSVKNKLRHILAAYNADVPNLFTAEGLAHLGTVPLTASDRFVSEQLVTEWEQHQERLRAANRQLREFAATAPLAEREARAILGSIPQVGAITADVILAELGDWRRFGSQAEVASYAGLVPGFRESAGKAKQLGITKEGSSLLRWVMIEFAWRMVGASRKWGGHYHRLEARVGAKKAIVAIARRLLGMVFALLRTGQKYALALETPPPASCRSKSPRDTNPSDPACLRGQPRQASSLGAGVYYGGPLSVPEKE

SEQ ID NO: 102061 - protein, 326 aa, unidentified
MKVVTIGLDLAKNIFQVHGVDREGHPLLRKRLRRLQVAGFFANLPPCMVGMEACCGAHHWSRVIGQFGHTVRLIAPQFVKPYVKSNKNDANDAEAICEAVRRPQMRFVPAKSVEQQDIQSLHRVRSRLVSSRTQLGNQIRGLLSEYGIVLPEHVSQLRRGLPLIIEDAANELTAFSRRLFASLYDELLSLEEKIEAIDEQIRAVYQGNEACQRIAAVEGIGPLIATALVAAMSDGKIFKNGRQFAAWLGLVPRQHSSGGKARLLGISKRGDPYLRTLLIHGARSVVYRASRKPIGAVCGLPTSSAVWDRRKPAWLSRIRMLGSCGR

SEQ ID NO: 102062 - protein, 348 aa, unidentified
MLHVGLDLSRKRIDVCLISDQGELIDRFAATPDRDGLHGLAARVAVYGEPVRGVVESMNGARFVHDELVSHGWDVLVADAQKVKGLAPLACKTDRIDSRVLAELSFRDLVPAIWLPTVELRREREISRWRLHLVKHRSTLKNRVHSTLITFGHQRHMSDLFGVAGRRLLGELEIPEPWRSHVDASLVLIDDLETRITQIAKDLRRSGADHRYIPILMTAPGFGWITSFTVACEIGDINRFSSPVKLTGYTGLCPRVKQSGETDSRGRGPLSKHGPKYLRWGLMEAAIAASSHPLYRERYQRTRRRLGRQRGPKVAQIDLARQLAEAVWYMLTRNQPFAPAGAIFRLAA

SEQ ID NO: 102063 - protein, 356 aa, unidentified
MVIVAIESHQGALHMQISTIGLDIAKNVFQVHGIDAAEKVVVRKRLRRRQVLEFFKALPPCLIGMEACATAHYWARELTKLGHEVRLMPAKDVKAYVKRNKNDAADAEAICEAVRRPTMRFVRIKSAEQQGQLMQHRTRDVLIRQRTQIINALRAHLAELGLVVAQGNAGVNELRAIVTDEQDTRLPIDARASVIVLAAQLEALESVIGAIEKRIKMQHRSSEASQRVEAIPGIGVIGATAIVATVADPTIFRSGRDFAAWIGLVPRQDSTGGKQKLGPISKQGDRYLRRILVVGAIAVLRRAQENPGKYPWLTQLLARRPFKVVAVALANKMARMAWALLAHGGTYRAPELAETA

SEQ ID NO: 102064 - protein, 344 aa, unidentified
MNATTVAVDLAKSVFELAVADAHWKVLERARLTRGQFERWFSNRAVGLVVMEACATAHHWARTLRARGIEVRLLPAQYVRAYVKRNKTDAADALALLEAARSCDITPVAPKSVEQQALQALHRLRSGWMTTRTRRINTLRGFCREFGMEVSVGAVRGLAQIARLLADEHSAIPAMLRVPMRLALEEIRLMEARIDALERELAAMAKQSEACQALASIPGIGLLTSTAMVAAVGDPRTFRSGRHYASFFGLTPREHSSGEHRRLGRISKRGNPYVRTLLTHGARSVLRAATVARRAGREVDRLRTWALEVQARTNHNKATCALANKLARIAWAVWVKHERYQLTA

SEQ ID NO: 102065 - protein, 451 aa, unidentified
MVASKPEKESKQATGATAPVTPLAPRARVDGPTARVRAVRRSAEKLADPSLLSCPSSTPTRSEGANKTGAEERSTMRKVALDLGSKKTTYCEVAKGQVNRRETVTAVESLRPLLGPEQPPATVAIEACREAWYVHDLLSSWGNHVLLVDTTRSRQLGIGQHGRKTDRIDAEVLARAVERGGIPIAHVLSPHRRQLRRQLGVRRALVEARTNLIVTMRGLAKDQGIKLPSCSTANFAGVVRKTVKLELLELLQPLLRTLDTIEPQLSLAEDELGKLCNQEPVIAQLCTAPGVGAIVAASFVSVVDEAKRFRRAHEVESYIGLVPSEDSSGSRRRVGGISKKGNPYLRSLLVQAAWAVLTKSPEDDPLRCWGEAIIKRRGKPIAAIAVARRLVGVLWAMWRKDTVYEPAALGRKAARGLQHAAQSLEFRAGQLARASRKHSYRRITQEVPQPI

SEQ ID NO: 102066 - protein, 316 aa, unidentified
MTTTPVFVGIDVSKDRLDVALRPTSDRWALANDAPGVATLVARLQGLAPTLIVLEATGGLAVPLTGALAAAGLPVVVVNPRQVRDFAKATGQLAKTDALDAAVLAQFAEAVRPALRPLPDAATQALSAVLARRRQLIEMLTAEKNRLGSALPPVHKGIRAHISWLERRLADLDADLAQAIRESPVWREKDDLLQSAPGVGPGLARTLLADLPELGTLNRKQIAALVGVAPLNRDSGTLRGRRSVWGGRAHVRAALYMSALAATRYNPVIRAFYQRLCAAGKAKKVALTACMHKLLGILNSMVKHRTPWRKHFAYTP

SEQ ID NO: 102067 - protein, 398 aa, unidentified
MGVVHPRCAGIDISKKDAKVCVRIQGRGSRRTSATVTTWGAMTNQIVSLREHLVEQQVTCVVMEATGNYWKPYFYLLEDTLEVMLVNAHDARNMPGRKSDVSDAAWLADLGAHGLLRGSLVPPPPIRRLRDLTRARTALTRDRARQVQRIEKVLEETGIKLSSVATDIMGVSGRAMLDALIDGRDDPAVIAELAKGRMRSKIPELAEALTGRFTPHHAFLISMHLTLIDQYGQALGELDTRIAEAMEPFRAARDLLTSIPGFSTTIAEVVLAETGGDMGVFPTAGHLASWAGTAPGSHESAGRVKSTKTRPGNRYLEGALGTAALSVSRSKDTYFSAKYKRIASRRGPMKALVAVQHAMLVAAWNMLTNGDLYRDPGADNFTRRLSTKTRARAIDQIS

SEQ ID NO: 102068 - protein, 337 aa, unidentified
MRFCGIDLHSNNSVVVVTDETDKVLVSRRCPNDLQGILALLAPHRDELAGVVVESTYNWYWLVDGLMAEGYDVRLANTVAMKRYDGLKHSDDETDAAHLAHMLRLGILPTGYIHPPAERALRDLARKRIQLVRSRSQHVLAVENILARSTGSRPSAAAIKRLAPTDIGTLGLATDVALAVQTNLAVIATLNLEIERIEARLLEGVKLRPDYVRLKTIPGIGEVLAIVIMLETGDVSRFAQVGNFASYARCVDSARYSNGKKKGEGNTKNGNAYLVWAFVEAANFARRYSEEARRFFERKKARTNSIVATKALAHKLARASYHILKEKQPFDVKRCFA

SEQ ID NO: 102069 - protein, 331 aa, unidentified
MKKMVLVGIDVSADELVVAVEREGQSLPVATFDSDATGHRKLVRWLTKSGRSARVCLEATGVYGLERSLALSRAKQVEVMVANPRTIKDCARAFLQRSKTDDLDAKAILEFVKRMPFRAWQAQPVEILQLRAVSRRITALTKNMTMKKNRLHASDHCEELTKFTRDDIASHIEYLQESIQRLGAEAVAVIRQSPQLSWEFDHLVSAKGIAEASATQILAELSVLPGDMTARQWVAHAGLDPRHHESGSSIHRPARVTKAGNKYLRSALYMPALVAIQPEPNVRAFYEKLLARGKKPLQAIVAVMRKLLHTIYGMLHHDRDFEKEKFFAIGA

SEQ ID NO: 102070 - protein, 337 aa, unidentified
MKVTLIGIDLAKTIFQVCGVNQAGKNVFNRQVRRNKLMAFLMQHPEATIAMEACSGSNYWGRMLEKNGFTVMLIPPQHVKPFVKGNKNDRNDAFAICETARRPAMRCVQPRSLAQTDTMLIHRILERRVSERSALISQIRGLLNEYGEVVARGKEKLRNELPFILEDAENELTETARYYLHQQLLEWRELDAAIAELDKAIAQQVKSSEQSSRLKKIKGVGNKISSAAEAFMGNGSGYRSGRHFAANLGLVPKEHSSGGKQRLGRITKRGNAYLRRLLIQGAWSVIRYADRSDDRLSRWAKQLIERRGKHKAAIAVANKLARIIWAMSYHQTEYRAN

SEQ ID NO: 102071 - protein, 411 aa, unidentified
MEVIHARCAGLDISKKDAKVCVRVAGAGRRKTVETVTTWGSMTSQILALREHLIAERITCAVMEATGDYWKPFYYLLEGAGFEVLLVNARHVKNLPGRKTDVADATWLAQLGAHGLVRGSLVPPEPIRQLRDLTRARTAITRERSREVQRLEKLLEDAGIKLSAVASDILGVSGRAMLESLIAGNRDPAALADLAKRRLRSKIPALTEALTGRFTDHHAFLARVHLDLIDQHTAAVADITARIEATIKPFHWFRDLICTIPGISTLTADVIIAETGADMTRFPTAGHLASWAGTTPGNNESAGKVKSSRTRPGNPYLQGALGAAAMACAQNPVTYLGARYRRIAARRGPQKANVAIQHSMLIATWHMATNGCLYHDPGADYFNQLHPERAAKRAISQLEAMGYHVTLTRAS

SEQ ID NO: 102072 - protein, 378 aa, unidentified
MLQKDSKCFCGMDLHSNNTVIAVLDETGKKIFNGKLHNKMAAILKALHPFKDSICGIVVESTYNWYWLVDGLMENDYKVHLAHPAANHQYKGLKHTNDTHDAFWLAELLRLGILKEGYIFPKEERHLRDLARKRLKLVNNRTQYILSFKSLVNRNLGVNIDSNNIKKLTEAKVNPMFKNDHLILTGRENIAMMRFLDKRIKQLKKEILKAAALKPEFLKLKTAPGIGDILALTISFETGNINRFEDAGNYVSYSRCVSSKRTSNNKSKGENNRKNGNKYLAWAYVEAAHKMKCFCNAAKRYYTKKSKKTKPVVASKALAAKIARACYFIMKDQVDFDETKIFGKPINSNNKDKGCGSKPERGLDKEPCAPIGNTATAA

SEQ ID NO: 102073 - protein, 319 aa, unidentified
MTKNRNYIGIDISKLSFDAAIKNESNKYSHYKFSNDKEGFAKFKKLLDEDGDVCVMEASGPYYLRLAQYLFDQNISVSVVNPLVIRRFGQMRLSRTKTDKKDAVIIAEYGKTENPDLWHPEADYILEIKQMQAYVEQMNKSRTGFIRQKEAFKQNTVESLILNESIDKMIAGLEIEIAHIENKMTAIIKDHHGELFKQMQSIPGIGKKTAVLLIVISAGFTKFENARQLSSYIGISPRIFESGTSVKGKSKICKMGMSRIRTMLYVCSWSAKKCNNACRELYDRLVEKGKARKVALIAVANKLLKQAFALASKNEYYLQ

SEQ ID NO: 102074 - protein, 446 aa, unidentified
MGKPQVVADEEHERVFERVAAVDVAKASGVVCTRLPDRSGRRLSRYWTVTATAGAVTELAAQLVSLGIEKVTLESTSDYWRIWFYLFEAAGLDVQLVNASQARNLPGRPKTDKLDAIWLARLTETGMLRPSFVPPAGIRALRYYTRTRTRLVQDRTRCWQRIEKLLEDALIKVSAVASKLTTLSARDMLEALIAGERDPQVLAGLARTRMKAKHDALVQALEGRFEDHHGEIIRMLLDQIDFLDRQVTRTGILIAEQLASLPEAWGADPDGVTGPDAGTSPDAPALPAPARLDEIPGISASLAASIIAETGLDMTRFPTPGHLVSWAGLCPRTLQSGTRARHGKKPGNTYLRGYLGQAAAGAAGTATFLGERHHRIARRRGPAKAQVATARTITVIIWHLLADRDARYHDLGPGHYQQRTDKHKKTRNHVRQLEALGYTVTLTQAA

SEQ ID NO: 102075 - protein, 281 aa, unidentified
MEQISRIGMDTSKHVFQLHGVNAAEEPVMRKKLRRTQMVAFFEKLEPTLIAIEACGGSHHWARLLASFGHQVKLIAPQLAKPYVKRGKNDAADAEALCEAMSRPTMRFVPMKTAEQQAALMLVGVRDRLIRNRTQLANAIRGYAAEFGLTAARGMANLVPLLARIQADESLPALAKALFACQAKEYKQLQAQIGEVDAKLMAWHRADRCSRRLAQIPGVGPIGAALLVMKTPAAEMFRSGRDFAAWIGLTPKDHSTAGRVRLGVITRAGDEGLRSVLVVVT

SEQ ID NO: 102076 - protein, 433 aa, unidentified
MQDVEDEPLFCERVAGLDIAKAEVEVTIRVPSDTTAGRRQQESRTFGTTRRELESLGDWLACWGVAKLGMEATGDYWKPVFFLLESRGFDCQLYNAGQVKALPGRPKTDRADSIWLARITERGSVCSSFVPPEPIRRLRTHTRYRRHLTQARTAEKQRVEKLLEDGHLKLSSVIAGIHGVSGRDMLDAIAAGQRDPKALAQLARGRMRGKIRRVEEALDCSFFTEEHAAVLAMMLAAIDHYTTQIQALTEKIEELAAPYLRQVQQLDAVPGIGQVCAQDIIAEIGTGMTVFPTGAHLVSWAKWSPQVKKSAGKRKGSNATGRGNPYLGAALGEATISAGRTQSFLGAKYRRLTRRMPKKKALVATGNSMLASIHALLSDPDASYQDLGADYYEHRMHVRRQARNHVLGLQRLGYQVTIQAVNPDTGELQAATA

SEQ ID NO: 102077 - protein, 385 aa, unidentified
MTIQIQVPRFIPRDYDVFAGLDVDKKSMAVTFADHAGSQRALRMAHQVTPLLNYVRKHFAGQRVAFAYEAGPTGFGLHDELVRRAYTCVVVAPSKVPRAPGERVKTNRLDSRKLAESLRGGQLHSIHVPSAVYRNLRHLVQMRDTHVRQLTSSKLRIKSLLLYEGIAFPEEHEKWTGRAMRELQTLPCSETVRFKLDDLLDTLHFHFQAAARATKQIRQYCLDDPELQQSIDLLLSLPGIGWIVGSHLVARLGNPREIKNGRQIAGFLGIVSSEHSTGDKQNRGEITRSGDSRLRNKLIQSAWTAIKKDPELRDFYRRIYQRHPKKVAARKAIVAVARKLTNRIYVVLKEQRPYVIRPDSSIAPLTAEETVGPRERLDGAQNDQS

SEQ ID NO: 102078 - protein, 406 aa, unidentified
MHVGWDWGNTTHAVSVIGDDGHEVAGWLSPHTEEGFSKTLARLATHGCPSDLPVAIETTRGLAVDRLLAAGHPVVPIHPNAFNAARPRWGAARAKDDPGDAFKLADYLRTDGHRLRTLRPTEQATLDLQALTRARADQVTARVAATNQLAALLAEHWPGAGQVFARLDSDIALAFCERFPAPHTAQGLAPARMRDWLARQQYSGRVEPAVLVARLRATPLPASRLTPEIITVIVRAQVAVIRALKTAITALDTQIAAAVAAHPWAPLIASLPRVGTISLGQIIGEVGPILERVTTADQAAAEVGVVPVTRASGKSHAVVFRYATNTRARQALTFWADNSRRASPWAAAIYDQARATGKRHANAVRILARAWLRVIYACWRDGVCYDATNHATQTQVKTGQTHNLAA

SEQ ID NO: 102079 - protein, 426 aa, unidentified
MFAESTDEEQIIDQVAALDIGKAELVCCVRVPASGGSKRRVQEVTTHTTMTRSLAELANRLVDLRVERVVMEATSDYWKPVFYLLEAHGLDPWLVNARDVRHLPGRPKTDVLDAVWLCKVAERQMLRPSFVPPHPIRVLRDLTRYRIDLVGARTAEKNRVEKLLEGACIKLSVVASDIFGVSGRAMMAALIAGERDPKRLADLARARMRAKFKILEEAFAGLPAGGFDDHHRFLLERMLGRVDAIDADIAVLDAQIEAHLAPFDQAVQRLDEIPGIGPVAAAIIIAEVGVDMTRFPTAGHLCSWAKFSPGIKSSAGKSKGNGSTGHGDRYLARVLGEAAVMAGRSHTFLGERYRRIARRRGKKKAIVAVGRSMLVIIWHLLSDDTTWFHDLGQGYFDSRINPERKKRNHIRELEALGYKVTLEPAA

SEQ ID NO: 102080 - protein, 324 aa, unidentified
MIDGILGIDVCKNTLDVSISSYTKVRTKSFTNSPDGWRHLLDWLIAQKIQRVHACLESTGRYSLGIACALYEADHVVSIINPAQIRDFVRTKLGRNKTDGVDASHIREYCELFKPSPWAPPSEAHRRLGELQTIRSGIIAGLTEWKNRKNSGIVDAEAQALADATISHFTSQLGGVDKAIALTIDNDCDLQSKRDLLLSISGVGETLAGVVLAELPGPDVLRSSAEVVAYAGLNPRRHQSGTCIDRATRISKIGNAVLRAALYMPALSAMRYNSAIVALVTRLKSRGRLKPKQIVVAAMRKLLVLCFGVLKTGRPFDAAIAMGG

SEQ ID NO: 102081 - protein, 344 aa, unidentified
MNHYAAIDVSLELASVCIVDATGKVVKETKVETRPEALVKFFRDFGLPLTRIGLEAGPLSQWLYAGLTDAGFETTLMETRHVKAALSARTVKTDRRDARGMAQLIRVGWFRPVHAKSPGSQEVRALLVARKQLQHKLRDIELSIRGILRGFGLKVGHVTDKSFEARICNLVTGHAMLEQIAKAMLAARATLLKQFSKLHKTVLDIVRHDDVCRRLMTTPSVGVIVAITYKSALDDPGRIKKSRNAGPLFGLTPKRYQSGETDVAGGITRVGGEMVRTALYEAANVLLSRVTRFSALKRWGLEVAKRRGLKRAKVAVARRLAVILHRMWIDGTTFRWGKTEAAQA

SEQ ID NO: 102082 - protein, 440 aa, unidentified
MTTPTLPVLDPTAAAIDVGSETLHTSIAGGPPKIFGTVTGQLHALRDWLKENGVRSVAMEATGIYWLCPYEVLEQAGFEVVVVNGKYVKNLPGRKTDMKDCQWQATLHAHGLLKPGFVPPEHIRRLQDYLRLRADHITMAGSHEQHLQKALERMNLKIHDVISDLTGVSGLKLIAAILKGERDPSVLLGLCDPQIQKKKADRLRAALEGTWKAEHLFALRQAYELWQFYQQKIAECDQQIEAVLKELAGPAGPQAPAPPPASKRGGVNTPQIAGLHGLLWRLCGGKDLTTLPGVADHVWLQLLGEVGTDLGKHWPTEKHFTAWLGLAPGSKQSGKRRGSQRRSRNRAGRLFCVIARSVGRSVDKALGGFYRRIKGRRGGLVANLALARKLAELFWRLMVHGRAYVEEGLKKYEAKVAHTEQRLLQKLAAKYNLVLQPKNA

SEQ ID NO: 102083 - protein, 320 aa, unidentified
MAKAKPVHLSPVVGGVDTHKDLHVAAVVDQNNRVLGSEFFATTRQGYRQMLAWMASFGTVKRIGVECTGSYGAGLLRYLQSTGVEVLEATAPDKMERRKRGKSDTIDAESAAHAAFSRIRTVTPKTRSGMIEALRVLKVCRKTAVAARRIALQMIQMNIVSAPDELRDQIRHLTRMQLIRTLVSWRPDVTAYRNVQDAYRIALKSLARRYLELHDEIADLDIMITSIVDELAPELIKCKAVGYECASQLLITAGDNPQRLNSESVFAALCGVSPVPVSSGKTNRHRLNRGGDRAANSALHIIAIGRLRTDTRTQEYVAKR

SEQ ID NO: 102084 - protein, 351 aa, unidentified
MAEFSKEPVVTLGIDLAKRSFHVYGADVGGKPVFSKKLTRARLIELMVNLPPCTVAMEACGSAHHWARLFRTFGHEIRLIAPQFVKPFVKSNKNDAADAEAICEAAQRPNMRLVAVKTVEQQDVQAIHRMRSLVVERRTAQVNQVRGLLLEYGLEVAQGRATLMRRLPEILEDPDNGLSERFRAELNELTEELRHLDARVTHYDAQIQAIAQSNQTAQRLMTIPGIGATVATALLAAVGEDPSVFGNGRGLAAWLGLVPRQHSTGGRERLLGISKRGDVYVRQLLIHGARSVMRWVERKEDTNSRWAAALKKRRHSNVAIVAMANKIARIAYAVMMTSKSYDPAIGAFVKG

SEQ ID NO: 102085 - protein, 310 aa, unidentified
MDAMAVVGIDVSKDRLDVCVRPTGEAFSVSRDATGIEGLIGHLAGLTLRVIALEATGGFETVVAASLSAASLPVVVVNPAQVRAFAQAMGRRAKTDVIDAAVIAHFAEATRPEPRPLPDADTQMLADLVSRRRQIIQMIVAERQREKRAARRMKKSILRLLKALQGELSEIDQEIDQAVRGSPAWREKEDLLSSVPGVGPTIARTLIAELPELGTLDRRQIAALAGLAPWTRQSGQWRGKSFIGGGRATVRSALFMGALTAARWNPILKAFHQRLINAGKPKMVAIIATARKLLTILNAILRDKSEWQIA

SEQ ID NO: 102086 - protein, 417 aa, unidentified
MSVLFRWVGRAIGLDVHRDFCVIAICEDGVVRSAGRVPSTPEAIKTLAESLLPSDRVALEVTGSAWEVARILEPHVERVIVVSPDDTGIVQARAKTDRLDARALARLLWKGELESVWRPDERCRVLRRRLARREQLVHARTRAKQEVHAVLHRRLQGKPPSSDLFGVKGRQWLASLELPLEESESVDAALRHVNFLDYEIAEVERLIAQQAITWPEIRRLMTVPGVNLICAASFMAAIGDVNRFLTSRKLVAYLGLDPRVRQSGEAPARSGRISKRGSASARWALVEAAWTTVRQPGPLHAFYERTRGRRGHGKAIVASARKLAVLFWCMLTRGEDYAHQQPSLTAKKLRKLELKAGAPKHTKAAAGISSVNRAMRGAERQLAEQAEISYKRLVQDQQAGARARKVGASATPEPRIN

SEQ ID NO: 102087 - protein, 361 aa, unidentified
MEKASSQVGKTNTPVNEVAMTQFLSFVGVDIASASFMGCAGTAPWKVTVKPAKFENVEDGYVSFLGWLKEHNLTPEATVVCMEATGVYSEGLAYFLYASGYTVAVEPPLNIQRKFPMHASKTDELDCQYIAEYACRYADKLSLWKPRTEILEQVKVLLTTRQHFSVQLTGHKNALHAINRKQVSSALAKQVHQNMIEQIAKHIKSIDQEIRRLIESDPTFKQTLLLLLSVPGIGLQLAAHLLIAMQETLDPKVLAAFIGICPIKHESGTSVYSPPTSRHYGPSVLRKLLYLAACSVRTHKKQFQQYFFRKVAEGKHKKLVLNNIQNKILKIACAVVRSQKPFIPNYVSVSPLVFQKTLTPS

SEQ ID NO: 102088 - protein, 362 aa, unidentified
MTKSTTIVAFDQHAATTVAAVLLPGQRTPALHSLTSDSPTIIRFVERLRRERPVQCCYEAGPCGFELQRALTARGIPCDVIAPSLIPRRPGDRIKTDRRDASQLAVLYRAGALTTIHIPSEQEEAARDLLRCREDIQTDLLRARHRLSKFLLRHGRRFTETKRAWNTRHHAWLQAQAWPLPALAQTHRAYVRAVDDALARLQTVDTDLRELLTLEPLRARVARLRCFRGIDDLTALTIAAELGDARRFPSATRVMAFTGLVPAEYSSGAKQARGHITKTGNAHLRRVLVESAWLYRHHPFVGKALRQRQRSAPSDAIDRAWHAQQRLYRRYQRLAARGTTKQHIVTAIARELSGFVWAALTQ

SEQ ID NO: 102089 - protein, 359 aa, unidentified
MNTRLSKKQMFFNKVKLTKDDDLYIGIDVHKESYGVALWLNDTPAIDFIMPADNEKLLKLLEKVRIALKRIVYEAGPTGYTLARTLQKANLPTTVVAPSKTPRQSARDSKTDQLDAKTLARYAAKGLLRPIAIPTMRQEADRQLTRTRDQLVSKQSEVKLQIKSFLLQHGIEQPPAVRAWSANAARALGALKLSKQLRFCLDLLVQELQFLQSQLTTMEEQLKQTFDNDRHARQVALLKTHPGVGPVIARQYTAEIFNPKRFKHTTEVAKYVGLAPTIIQSGQSLRDGPVSKTGRPRFRSNLIQGAWVWVTKDPKAHITFLRILHNTGSKNKAITAMARRLAVHLWKMLCDNKRFTNIA

SEQ ID NO: 102090 - protein, 350 aa, unidentified
MEYVIGIDVHRNFIQVCLLDPQGQELINDRWDLRDPDGIEALFSSVPPETEIALEGSFGWMWLTDRLQQMGFSVHLADCKRVRLIAESRLHTDKVDARTLAQLLRSHFLPEAYLPPRSLQHKRMLLRHREGLLKVRTSVKNRVHALLVRYNLHPAASDIFGRGGMQWLRALELEAPARAMLDDHLEHLEFLNQQIRRVERRLDAALGADERVVWLISLAGVGRLTAYFILAEIGEIGRFSRPAKLVSYCGLCPSTHQSAATVFHGRTAGQGRRLLKWALVEAAHTAVRRDPYFARVFHRLAKRKGTAKAYVAVARKMAIIIWQMLSEERPYRVRGKQTQVGSAVAMTVGA

SEQ ID NO: 102091 - protein, 344 aa, unidentified
MLIIGCDYHPGMQQIAWFDEESGECGEQRLEHTVEAERFYGELKRRGVQVRVGIEASGHTRWFERLLAELKMELWIGNPAKIAAQRVRKQKTDRGDAQQLLQLLREDRFPRVWVPSPDNRDLRQLLWHRHRLVQMRTRIKNQLHAIALNEGVQRRSRLWSKQGRAQLESFALDRWTARRRHDLLELFDQLTPQIAELSQAVEQEAERRPEVQRLRTHPGVGPITALAFVLVLGTPHRFRCGKQVGSYLGLIPCEDSSAGKQRLGHLSKQGNTLLRYLLVEAAQAAVRLRSAVAAAFRASGHAAATEHRHRRHGAQVGRKFVLAVAQRRRSAGRAPVRFARGVAR

SEQ ID NO: 102092 - protein, 319 aa, unidentified
MMKTEPIYAGIDISKDNLDLAVHPRQQIRRFHNTATGINKMVEYIREIGSVLVVMEATGGYEIAVVAALGEAGIPTAVVNPRQVRDYARSTGKLAKTDAIDAQILADFAAVVQPQPRPLADTQTQELKDILARRRQLSEMITAEKNRLHRARGALVDHIRAHIIWMEKELLEMDSELKRFVEESPMWREKDNLLRSVPGIGPVLSSTLVAELPELGTLNRKQIAALVGVAPINRDSGKMRGKRSVWGGRGSVRSALYMGTLVATRFNPVIRRFYERLIASGKAKKAAITACMRKLITILNAMIKHHVTWRYTPDLAVIS

SEQ ID NO: 102093 - protein, 348 aa, unidentified
MISIGIDHHKKYCQVQAVRDNGEIVWEGQVPTRYEGFVRLKEELPVGEPVQSVLESGRGWGAAYDALEDLGLNPLLANPYKTRLIADSYIKTDKIDAAAQALLLRIGMIPTVHVPSRERREQKQLLRHRLWLVNWQTRIKNRIHDLLDRRHVDVPPQSDLFGAMGLAWLKGLVLTGPDQHVLASQVKLFEEIRQQIRQTEKWVDEALKDHPLRPLLDSLPGVGKILGALMALEIDTIDRFPSASRLCSYSGLVCSTYSSGGKTSHGGLIPTANRYLRYAFVEASWTAVKVSPYFRSLYSRLRAHKVPAVAIVAVARRVCEIAYSCLKYQRPYQERPYRFRGRVALSHP

SEQ ID NO: 102094 - protein, 353 aa, unidentified
MVVVGVDAHKRTHTCSAVDGIGRRLGVKTVPATTTGNATMLRWALSTFGPELTWGIEDVRNVSRRLEEELIRSGQRVVRVPTYLMARTRASARTRGKSDAIDATAVARAVLREPDLPVACHDSVSRELELLTERRETLVDQRTATVNRLQWRIHELDPIRSAELKPLIFAKHRAPVAAWLADQPGLVAELARDELDDIARLTQTINAVEKRIVQQVRAHATHLLGIPGCGELTAAKIIAETANVTRFKSEAAFARYIGVAPLPYSSGSTDGHMRFTRSGNRQLNAAVHRIAVTQIRMAGPGRQYYDKRRTKGNSSSAALRLLKRRITRAVFSRLKADEADRRSQATADSPERR

SEQ ID NO: 102095 - protein, 342 aa, unidentified
MDEYDGRQFVGIDLHQRRSVIVRQSESGEQLSAVRIINDPVALGLEIERAGPNPEVVLEATYGWYWAVDTLQAAGARVHLAHPLGVKGFRYRRVKNDVRDAADLADLLRMNRLPEAWIAPPATRELRELVRYRAKIVAVRSGLKAQVHAVLAKAGVLIPVSDLFGVGGRQRLAKVPLGAAYVQRVISLLELIDALDAHETRFSIMVADKLGGHAGYQAIQQLPGVGPILGAVFVAEIGDVHRFADPAHLCSWAGLTPRHHESDTVVRRGHITKQGSKLVRWAAVEAIQRHPATSKIALDRTRIESRRGKNIAKIAAARKLLTLVYYGLRDGHIRALAPRRAA

SEQ ID NO: 102096 - protein, 394 aa, unidentified
MILVGIDIGKNKHTFSIIDKNSGEILLSPSDFSNNLKGFLFLIQKLSSYTKSELLIGIEDTGHYHFALLKYLLDRRYTVALINPTTTDLTRKLQGGITKNDPLDSLTICDVISSNHRNKPYRVTTLNRFDLYEQKQLTRHHHNLKEELNTYKNRLQKCIDIVFPEFNSLFHSKYGIVYMNILKAFSSAKAIANADIRSIRKCFEFKGQGKRISLSAEQLKLTAKSSIGIPSVAEEIQIRHLVSQIELLEKQLSEIDKRIEEFSLKNNSPILTIPGISHFSGTSIISELGDICNYTKASQIIKFAGVAPYHYESSQFTAQHTAITKKGSKYLRKTLYQIILPVISNNEVFYAYYTKKLNEGKGHRCAQGHCIRKLFRVIYHLLSTRQPFNSKLLV

SEQ ID NO: 102097 - protein, 394 aa, unidentified
MATIGIDVGKRQHIAAIHRDGEGEARKAVLRFGADRAGLAELSAWLARQGEISRAVLESSGHYHLNLAAALQRAGVPVAVVNPLESKYFGKRRLQRTKSDPADARTLATLAMVDEPKVRDVLAGAELREAARFAMHLVDELGRVDQRIGRLVEIGFPELEQAYDDPTCISALAVLRSAPTAAAAARTRPATLAQAARPGGGRRIGPKKAEQISALATETIAAPELAEQIGFQMRLLIAQHDLLEAQIREAEAHLGTLLDGELVRRLRTIPGAGPAIVATLIAEIGDINRFSEFDKLVAYIGVHPAEKSSGEKGKDPETSWRMSKAGNAYLRTALYRMAIVGIQHNPVIKGHYARKRAQGKSKMNAVGHCMKKSLAIVWGVWRSGRDFAAPPSLP

SEQ ID NO: 102098 - protein, 343 aa, unidentified
MTRFVGLDVSQKLTAICVVDETGRRLWRGQCATDPEQIERVVKGHAGDNARVGLETGPMTPWLVHELRGRGLDVTCLDARHARAALKMQLNKTDQNDAEGLAQIMRTGWYRSVHVKSLDAHRARALLGARAQLVGMTTRLSNHIRGVLKTFGLLPGAMRGLPFDRRVEELLADRHDIAPIVRPMLAAWRQLREQVAAFDKELRALAKQDPTCRLLMSVPGIGVISVLAYVSTVEDPDRFTRSRSVGAHMGLTPRQYQSGEVDRSGRISRCGDTLARTLMYEAAVVILTRVKRASGLKDWAQAIAKRSGAGKARVALARKLSVILHSIWRSGEPFRWSEQPAGA

SEQ ID NO: 102099 - protein, 351 aa, unidentified
MRKIAYLAMDVHVSNSVLGEMEYEGYFRGNQSFSTSEKNIINALKAVKAKEKYLTIEEGTLTYWAAQVAAPYVTEVIPCDPIENALIYKSPHKRDKVDTKKLCRLLRLGELNRVYHPENDHRALFKAAAKHYIDLRGQLKALKQKIKAIYRHWGIIDVNGISVYTPKGREDFLRLIKHRHIHNQLHRLYCLMDQTESIREKALRAMKQMGKKYPEIKEFMKIPGIGEIGAHIFDALIQTPHRFPDKHKLWRYCRMGVTDRSSDGKPLGFKRLDKSGISELKAIAYQAWMVSMKGNNEVQRFYSESFRRTFSHVHARLNTQRKIIAVMYGLWKRGEPYNPQLFLESSQSGVV

SEQ ID NO: 102100 - protein, 338 aa, unidentified
MNKITTIGLDLAKHVFHVMCCDARGKVVRKKVLRRGQVRAFFVHLEPALIGLEACASAHYWARELGALGHTVKLIPPQHVKPYVRGNKNDYNDALAIAEAVMRPQMRFVEIKTEAQQDIQALHRLRERRVQERTALCNQLRGLLAEYGLILPKGISAMRRRIPALLEDAENGLSDLFRRLLAQGYHQLLELDAHIDGYGEELKRYSAQSEACQRLQTIPGFGPVVASAFAGHVASGESYRRGRDVSASLGLVPRQHSSGGKQVLLGISKRGDRYLRCLLIQGARAVVYRTAGKDDPLSRWIDQIKDRRGINRAIVALANKMARMGWAILRNKTVYQAA

SEQ ID NO: 102101 - protein, 416 aa, unidentified
MFAVGVDVANGRSMVAVLDGMRNMVAKPFEVVHTAQGFAALVEKLRQLDGEVRIVMEHTGRYYESFAMSMHRAGFFVSTVNPLLIKNYQGSINVRKVKTDKADAQKIAQFALDKWTILPHYTPMDTIRYNLKTLHRQFQLASKTKTALSNNLIALLEQSYPGANRYFDSPVRTDGSQKWVDFVDTFWHVDCVAMSSEHAFVERYRKWCKRHGYVFSEQKAIQLHADARQKIPLVPKSDTCKLLVREAVSQLNAVSRTVETYRAEMDRLASQLPEYETVMGMTGVGKSMGPQLMAEIGDLRCFAHQKSLVGFAGTDPIKEESGDKVSQSAPSSKRGSPYLRKTLFVIMTILLQLQPQEDPVYQFLDKKRSEGKPYYVYMTAGGTKFLRVYYGKVRDCLKAKGLWEVPASASQEVNPG

SEQ ID NO: 102102 - protein, 455 aa, unidentified
MAKKGKKNTPSPENMPILHPHAAGSDVGAEEHWGCVPADRDAQPVQTFSAFTCDLHRLADWRTACRITTVVMESTGVYWIPLFQILEVRGFEVALVNARHVKNVPGRPKTERFDCRWLHKLHTYGLLAPSLRPPEDICQLRSLLRHRDNLLRMTVKHIQHMQQSLDQMNLHLHHVMSDVTGVTGMRILRAIVAGERDPQTFAQYRDYRLQSNEDTIAKALEGDYRADHVFTLTQSLALYDFTQQHIAACDQEIERVLATFDSLVAPEEPPFPPPTTPHRRPPRNEPAFDLRPHLYRITGVDLTQVPGWQAPTSHIVLAEVGLNRHKWPTDKPFASWLGLCPDNQIRGGKVLSTGSRRVQNRASRALRMAAQSLRTSPSYLGAFFRRMRSKLGPAKATTATAHKLAKIIYHMLKEKAPYRARSAEDYLHKDHERQLRQLRKQAQYLGFDVVPQTNH

SEQ ID NO: 102103 - protein, 411 aa, unidentified
MSATVRYIGLDVHKDSIVIAVAEDGVQPAEFLTKLPYDIPRLLKQLRKLGSPARLRCCYEAGPTGYGLYRALSAAGLACLVVAPSLIPVKSGNRVKTDRRDARKLAHYLRSGDLTAVWVPDEASEAMRDLERARDDAKRSERVARQQLGKFLLRHDRRFPGKTSWTRRHLAWIVTQKFAHEAQQQVLTDYLHTVEEATTRVQRLSEQIAKLVEGWALAPLVKALMAMRGVQLITAVTVAAEIGDLKRFHKAGQLMSFVGAVPSERSSGDSRRQGRITKTGNAHVRRVLVEAAWTYRHRPRLSQAIRARNAGLPPQVQAIAWKAQVRLNERYRRMLAAGKAHNVTVTAVARELAGFVWAVGQQVESPTAPRSRAALTRDPDACGTCPPKSSFGVPQAKAARSPRRKPRQSAP

SEQ ID NO: 102104 - protein, 342 aa, unidentified
MQIAVLGIDLGKNSCSVVGLDAGGRVVLRRRLHRDGVVKLAEGLPGCVMAMEACCGAHHLGRKLSRQGHQVRLMSPEYVRPYVKAQKNDDRDAEAIAEAATRPTMRFVALKNEDQLDMQSLHRARDRLVGERTALINQMRAILLERGIIVPQGRRKLEVAVETLLAAEQVCLSPRTRLLIEDQRAEWRELDRRIEAFDEEFARQARTDEGARLLTTIPGIGPLNATALVAAIGKAETFERGRDLAAWLGLVPRQMTTGGKPKLLGISKRGNVYLRKMLIHGARAALPTLSKGETPLGGWLRGLAARAHRNTVVVALAAKLARIVCAVLRSGQGFEMQAATAS

SEQ ID NO: 102105 - protein, 373 aa, unidentified
MNDHIEAFVAFDTSKLRNAVAVAEAGRSGEIRFLGEIDNTPKATAKLVKKLAGKYPRLAFCYEAGPTGYGLYRQITSLGHECVVVAPSLIPKKAGDRVKTNRRDALDLAAQLRADQLTAVWVPDPRHEAMRDLTRGRGAAVEDLRSKRQQVSAFLLRLGRPYEGKTNWTKTHMNWLASQKLEQAEQRIALEEMLLAVRQAQERVVRLEEAIRGAVPDWSLAEVVEALMAMRGIDMVSATAFLAEIGDLSRFRTPRELMAYLGLVPSEHSTGDTVKRGPITKTGNRRARRILVECAWSYRHPPRVGKEKQDKVAAAPRAAREIAWKAQNRLYARYRALTRRGKLKTLVITAMARELSGFIWAIARELANTHAAA

SEQ ID NO: 102106 - protein, 386 aa, unidentified
MPVAACRSDALTAIRTDLGAIFVSLELSRSKWLITSLSPGGGKMSKHSVTAGDIASMLARFAEFTRKAEARTGKCFPIIVIQEAGLDGFWIHRVLQAEGIESHVVDPASIATSRRRRRAKTDKIDGEALVRALLAHKRGEPRVCAIVRAPTPEEEDRRRLSRERKALTNERISHVNRVKGLLFSQGVSGYEPLRRDRRKQLEALKTGDGRPLPAHLKAQVARELNRLELVLEQIKTVEAARDAMLAAAEAVSPAPAMLLNLKGIGPEFAAVLWSEGLSRHFDNRRQLAAYAGLAPTPWQSGSIDHDQGVSKSGNPRLRTTLIQLAWLWLRHQSRSALTLWFQDRVRRSGGRLKKTTIVALARKLLVALWKFVNAGVAIEGVIIKAA

SEQ ID NO: 102107 - protein, 332 aa, unidentified
MQMLAIDLGKQSFHIYGITGDGEVVSQKVSRAKLTDAVTKLQPQSVAMEACASSHHWGRVFEGQGYTVHLIHPRFVKPFVKGSKNDAVDAEAIFEAANRPTMRFVPLKSVEQQDLQALHRTRDRLIVQRTALINHTRGLLAEYGVVMPVGASRFRLLIDKMVETAELSELAKNLFLKLAEEYRGLDARVSALDDMLAEICRKDERCKRLTTLPGVGPIVATSLVAAIDDGRHFASGRALSAWIGLVPRQYTTGGKPRLGGIGNRANHYLRRQLIHGARSALLRVAKHDDRRSKWAQELQSRAGHNKTLVAMANKTARIAWAMLRSGENYKMA

SEQ ID NO: 102108 - protein, 368 aa, unidentified
MSDIIRIGMDTSKSVFQLHGVDAAEQPVLRKKLRRRDVLGFFERLAPTTVGMEACGGTYYWARELSALGHQVKLMPAQHVKPYVRRGKNDRNDADAICEAMSRPRMRFVAIKTADQQAAQMLMTMRERLVAYRTQLLNTIRGHAAEFGLTAAKGPAHVEPLLLRVAEDAGVPELARELFAMHGQELSRLKLELREIEAKLKAWHRQNEMSRRLAEIDAIGPIGGCLLAIKAPDPQAFRCGRDFAAWMGLTPKDHSTAGKTRHGVITRAGDEALRRTLVAGATSVIKQVNNGKGNPSPWLRDLVGRKPAKLAAVALANKVARIAWKLMRSGQPYDPARAGIVSPRESMAPGSRPQGRFAPPAAVACGQP

SEQ ID NO: 102109 - protein, 511 aa, unidentified
MPCAPGEGRQGVNGYAGIDIGSSSHFVAVPADRDDTPVREFRSFTVNLQEIADWLTACGVDTVAMESTGVYWIPLFELLESRGFTVFLVNARNVKNVPGRKSDVLDCQWLQQLMSFGLLMGAYRPPDEICALRAISRQREMLLSYQARHIQHMQKALVQMNIQLGNVISDVVGETGQKILRAIINGERDGTVLARFRNSHIRAGEEEIAQSLVGNWREEHLFALKQAMALYDAYGERLEECDQELEMMLARLGWHDGEPGKARRRSHGKNAPHFDARAYLFKMCGVDLTLIDGIDATTALKVIAEVGPDPSRFPTVKHFTSWLGLCPGTKITGGKRLSGKTKRTANHATQALKMAAASLLKSQSALGAYYRRMCARLDKSKAITAAAHKLARLIYAMLTKGSEYVDRGQDYYEEQYRQRVCTTSSARRKPWGSNWNPLRITEITSLIQSLSMCFLRESSMYPAKPTRLPMPWRSLSWRRHATRCYPGTMARATWRGIGRTWPMPHCSQESL

SEQ ID NO: 102110 - protein, 365 aa, unidentified
MVFLGIDLHSNNFSCCFIHEDGAKEKKTFSITPASLNEFYRYLDNNTAVIIEASMNTFKFAERIAAKVHSVHVANTHKLKLISLVKKKTDKVDAEKLAIYLKMQITSHEELMEPVYIPDQTIQDLRSLFTSYRMIRRQIGAHKNRIHALLKQHLLPFTKEYIFGKKNRDIIKNLEMEGIAKFQLLFFFGVLEYLEASISKLEGEIYLIGSKYIKEIDILTSMKGISVITAIAIIADIATIDRFPDSKHFSSYLRSAPGVDSSNETIFIKKTNKYGRKHSITLLSQSLNHFRDSNPKLKSWYEKKELTHKKGKLRMALCRKVFVEIYQMLKKHEYHYYRNKQLHLKKMDDYYKFLDEQGVVFQKIA

SEQ ID NO: 102111 - protein, 307 aa, unidentified
MKEEVVYCGIDVGKSHLDIALLQQRWQVANTQAAINGLVQQLKSESLNLQVICEASGGYEQALVRALHRASVPVTLVQAKRVRQFARAAGILAKTDCIDALVLARFGQAIRPVPTPSQPLHMARLRELDRERCHLSRLLVAEQNRLEQLSSPELRRLARSLIKKVEKQILLIDQAIAQLIGQDQILRTKAKTLTSFCGVGERTAALLLAQMPELGRLNRRQVAALAGVAPFNRDSGSMHGKRCVFGGRRVVRNALYMAALSAARRNHILAPFYQRLLAAGKPPKLALTAVMRKLLIALNSALTHSPA

SEQ ID NO: 102112 - protein, 349 aa, unidentified
MSEQYVGRQFVGMDLHRRRSVLVRMTESGKQLETVRISNDPEYLRQVMARAGEAPEVVLEATYGWYWAADTLAELGARVHLAHPLGVKMFALRRVKNDQRDAADLADLLRMGRLPEAWIAPPATRELRGWVRHRAKLVGLRSGLKCQIHAVLAAAGVQVPMSDLFGPAGRQLLAAAPLAVESRSRVESLLRIITALEFEIDLYTRLVDGRLRADAGYIAIQQIPGIGPVLAAVFVAEIGDITRFRRPEQLASWAGLTPKHHESDTTVHRGRITKQGNRLVRWAAVEAVQRIPTSTRLGRYRDRVGERRGRNIGVVAAARELLTLVFYGLRDHHLRCLPPPTPSPRPRAS

SEQ ID NO: 102113 - protein, 415 aa, unidentified
MNDQQRWYGGVDWASESHYVWLADKDGRRLGERSFRHAGDGLAEMVGWLLKTSGAAEPVQIDLAIEVPHGPVVETLIERGFNVWALNPKQMDRFRDRYSVAGAKDDSRDAQVMASALRTDPHCFRRLTISDPIIVELREWSRIAADLTAERTALVNRLRQQLWRYFPAFLELEADLSAPWTIELWQAVPTPEAARRVRKTSIETILKRHRIRRLSADQVLEILRQRPLTVAPGTIQAARAHSATLIARLKLINRQVADAHHQLDTLTASFGAADQAEPGQNKQRDVVILASLPGIGRINLATLLAEASDALQRRDYHALRTLTGVAPVTIRSGRSCRIVRRHACHSRLANAVYHWARTAVQHDAISRAKYAVLRARGHTHGRALRSVADRLLNVACSMLKAGTTFNSSLPIQNAA

SEQ ID NO: 102114 - protein, 355 aa, unidentified
MSQEKYIGMDVHQATISVAVMDENGKLLMECLLETKAATILEFVQGLRGTLSLTFEEGTSAAWLHDLLKPRVSRLVVCDPRKAALLKEGNKSDRIDARKLAELLRTNQLKAVYHGEHGIRTLKELGRSYLTVSKDVTRTMNRIKSLYRSWAIPCPGTTVYAPSHRREWLAKIVQPGVRVRAQHLYEQLDNLQPIRQQARRELLLESYEHPAVKLLRQIPSIGPIRAALLVALLQTPHRFRTKRQLWAYSGFAVETHDSGEYRYVRGKVQRNRERITVRGLNDNHNRDVKNLFKGAAISASTRPGPLQDFYLARVAQGMRPTMARLTLARKIATITLTMWKKGASFDPQQLSRQAV

SEQ ID NO: 102115 - protein, 359 aa, unidentified
MQKRLTKKDRFFNNINLTVDDEVYVGIDVHKVKCHIAIWLNEAIALTFVTPSDNVAIARMLHNLKPGLKKIVYEAGPTGFSLARALKLALLPVAVIAPSKTLRPAAVNSKSDRLDCRKLAEFAAKDLLTEVAIPTEQEEADRQVVRLRNQLKGKLVRIKQQIKSFLLQHNISYPIGLDRWTLKSVAKLKRLRLCPQKRFALNMLIDQLEYFQKQIKEVEAQLRKIFKEKHHVRQMKILESHPGIGPITARQYRSEVFSPERFKKSTQLTRYLGLCPRVSQSGQKRVEGRLMKAGQIALRANLVESAWAWVRVDPAAKETFKRLLSNTGEPNKAITAMARRLAVHLWKMLCDDKMYQKAA

SEQ ID NO: 102116 - protein, 400 aa, unidentified
MRAVFGIDVSKASSEVVILVNSEKVHDYSMPNDAIGFSRLLKDLNTVSNPEIIFEATGVYSRRLQAFLEENGYAYTRLNPLEAKKQLDSLRVRKTDKIDAEKLAESQFILNRKPTYGQEEVYQNLRDLSRFYQNLTEDMVRTKNRLHKTLQVTFPELEQLLAAPTGEQYWNLVSSFPSKDFVLDLSPSELAEVIRQSTSKRISEKRVTLLSDKLTALAKQSYCAVKKTSPMIEEVKYYAQELLRLTKRRQVILDEMVSLAQPLPEYEILLSIPGIAETTATSIIGELGDVRRFQSANQINAFIGIDLRHYESGNFLAQEHITKRGNPYARKILFKCIHNIAAASHTNPCHIADFYEKRKRQSQTTSTKPHTIAAVHRLVRTMYYLITHNKLYDYNLTQSH

SEQ ID NO: 102117 - protein, 369 aa, unidentified
MGDSTMYVGLDVHKESIEIALASYDGGEARHYGRIAGDLEAVDKVISRLKKTHAKLNFVYEAGPCGYALHRHLTRKGFACSVVAPSMIPKCSGDRIKTDRRDAIMLARLHRAGELTAVFVPRAEDEAVRDLTRSREDAVANHRRSRQQLGALLLRQNIRYTGKSAWTKAHLRWLSEVTMHQPTQQIVFQEYLNATQETDGRVSRIDEQLRIAVEGWRMAPVVSALQALRGVSLNVAATTVAEIGDMTRFDKPRQLMAFLGLVPSQYSSGPRVRMGHITKTGNGHARRVLVEAAWAHRFPAKIARAHQVRQENLPQAVRDIAWKAQLRLCRRYQRLLGKGKTKNVVVTAIARELVGFMWAIAREVKPIAA

SEQ ID NO: 102118 - protein, 347 aa, unidentified
MRTYYVGMDVHQASIVIAVLNGAGKVVMESIIHTGAETVRGFLKQLRGKVYVTFEEGTQATWLYDLVRPLVTEVLVCDPRHNKVVGNKSDRVDARQLAEWLRNGSLRAVYHGDKGVRTLKELVRNYDCLVRDTTRVMNRLKAIFRGRAIDCAGHDVYCHERRGHWLTKLSEPGAQQRATFLYQQLAALKPLRHEAKRLMLKEARRHAAYQLLLSMPLLGPISVAQLIAIVDTPFRFRSKRQFWSYVGLAVVTRTSAEYVLVNGVVRRSSRPVATRGLNRNHNHLLKRVFKSAASSARLSGPFKAAYDARVAQGMDASLARLTIARKLAATTLVIWKRGEKFAAERMK

SEQ ID NO: 102119 - protein, 424 aa, unidentified
MGWERRSHNREQFIMNLDQVSVIIGIDWADRTHLCCLLGKDGVARQTVPVGASAEDFGSWIDTVEQQCPDGKIAAAIERSEGAMVEMLLSRPRWVVVPINPVVLHRFRQAFAPSGAKNDPGDAALLAEIVRTHPERFDPLRPADELLTELSALVKERRHWVNTRTRLVEQLIAVLKKYYPQAMELMGETLGSPMTLAFLQHWPDLASARKAKGSTWDRFYRQHHSGRDDVLQRRRALLRVARPVSDREAYVHPYRLHMLAIVRQIIAAQTSIAQFDAMIAERYARAPGHEVIDSLPGAGPVFAPRLWVACAGEGAQPDATTMQLKSGIAPVQQQSGNSKVVRFRWARPHFVHQTWTEFAYHSLPTCAWAHAYYQARKTKGHGEGAILRALAFKWIRIVARLWRDQVPYDERYYLQHCAARLAAA

SEQ ID NO: 102120 - protein, 404 aa, unidentified
MELTAVYRCVAALDVHQAKLTVCVLSENDLGEVVTEVREFGGFKRDRREMAAWVASFHPELVVMESTGIYWKSPYAALEWYGLNLAVVNARHVKQVPGRKTDINDAQWLAILARSGLLRGGFVPPRQFRDYRLIARQLQKLTGIASGEKNRLHKLLTDAGIRLSVVVSDVYGKSAKAMITGLLDGETPEQLLTHADSRLKATPDELREALEGDLSDSHRFVIRELMIHIDELEARILRFRQTLLKHLSDYQVILQNLQTIPGIDEFSAAMLLVEIGDDMSAFGSADKLASWAGVCPGQNESAGKRQSARARKGNPYVRRILCEAAHAASRTRCSLQEKFKGLLIRRGRKRAIFAIAHKLLKTVFLLIQRGDYYRDADTDYEALTVQRNAPRWIKKLIQYGYIAP

SEQ ID NO: 102121 - protein, 331 aa, unidentified
MSIALVGIDLAKNVFQIHGVDEHGKPVLRRRVSRSKLLETIVRLPACRIVLEACGGAHYWARRFMAMGHQVQMIAPKFVKPFVKSLKNDCNDAEAIVEAASRPTMRYVAINGIEQQDVQCMHRIRSLPMRDRIAQINQIRGLLAEYGIVIAQSSLQIQRHLPEIVADTTTELTELTKGMLCDMYERLKQLDEQIARYDNKIRQIHRTSAQCQRLEKIRGVGPMIATAIIAAAGNARAFKNGRLFAAWLGLTPRQHSSGSRQRLFGITKRGNSYLRMLLVHGARAVVQQAPNRHDALSRWINELRDRRGTNIPVVALANKTARTIWVLLAKE

SEQ ID NO: 102122 - protein, 418 aa, unidentified
MSEEKMARLPRRYVALDIHKHYCVVAGVDREGRVLLPPVRVEHADLEGWLQKHLLPSDRVVIESTTNAWHVYDLLEPLAERVVVANPIKVKQIATARVKTDIRDTLILARLLAANLVPDVWVPPLPIRQMRQLLSQRRQLVETHTQIVNRMHSVAHRHHLTHERGKRFNDKTTGWQKDKRLCAIEQFQLELEMENLAYIEKQIERISKEVRKRCHQKPWADSMTYLMQLPGFGVITAMTVLAAIGDVQRFETPPHLASYSGLTPGLEQSGTKHRGKGITKEGRRELRWALVEAAQMAVKSDPYWKSRFQEMQKRMHRNQAIVAVARRLLELVWYVLTRRQPYRHFSQERIAYKYLTWAWQMDEAARDGLTRQQFARYYLMRLGIGHNLTRIALDPKHPRKIASEAELAALRPELQHIE

SEQ ID NO: 102123 - protein, 368 aa, unidentified
MSLREKSLFMAMELSNKNWKLAFGDGSRERYRSIEARNEEALVREVGKAKEKLGLAADAPVVCCYEAGRDGFWIDRMLKKHGYKNHVMDPASIEVARRSRTRKTDRLDAEKLLDLLMRTELWGQRKAFSAVRVPTEEQESQLRVHRERERLVKERTGHRARLKSLFVLHGFEVGDPARVPVDRVHDWEGKPLPSALVEELKREQERLRLVEAQLKGLEKQQTAALTQAPTLALKKAQKLCRLKAVGPQSGWVLSHECFAWRTFANRKHLGSFVGLTGTPFDSGETLREQGISKAGNRRVRAAMIELAWSWVRWQPQSALTHWFMDRYVRGGTSRSKRKGIVALARKLLVALWKFVEQDLVPEGALLRA

SEQ ID NO: 102124 - protein, 353 aa, unidentified
MEQISRIGMDTSKHIFQLHGVNTAEEPVLRKKLRRKEMFAFLEQLAPTVIAIEACGASHHCARLLQSFGHSVKLIAPQLVKPYLKRGKNDAADAEALCEAMSRPTMRFVPVKTAEQQAALMLVGVRDRLIRNRTQLSNAIRGYAGEFGLTAAKGKAHLDPLLERIQADESLPALARELFAVQGQEYAQLQAQIDQVDARLIAWHRADECSRRLAKIPGVGPIGAVLLTMKTPEPELFRSGRQIAAWIGLTPKDHFDRGQGQARRDHASRRPRIAQRAGGRGYHRDPACSARRKAVALADRTPQTQTAEVGRRGPRQQSLPRRRPGTARVAWKLMVTGENYAAKAAPATLAGAA

SEQ ID NO: 102125 - protein, 392 aa, unidentified
MICLGIDVSKDKHDCCILSQDGELLSKPFSVPNSRQGFEKLFSVVSSFENNPENVKAGLEATGHYSFAILGYLLEKGVTCFVFNPLHTNLYRKAVSLRKTKTDKVDSKTIALMLLSSVGLKPYSKALYHNEQLKSLSRYRFSKVRERAVLKQQLARLVNILFPELEKLVPSLHLSSVYALLEQFPGASYVANAHLTKLTNLLSSSSSGHYKKEKAIQIRDAAISSVGCIMPAKSLELRHTVALIRVLSEEIEEIETEIKKLMDELHSPITSIPGISYRMAAMILSEIGDFSNFDSPDKILAFAGLSPSTYQSGKLDNAYSHMEKRGSKYLRYALFTAATYVCIWDKTFSDYLHKKLAEGKHYYVALSHAIKKLVRVIYALQTTGQTYISAVA

SEQ ID NO: 102126 - protein, 358 aa, unidentified
MKTTKVHELADFNGKNIYVGIDLHKKDWSVTIYFDKIILKRFTQPGSVKSLAAFLKREYPNADYLCGYESGFCGFEVQRRLEELGIKCQVLHAADIPQTNKEKIEKTDRVDSRKIAKALSESSGNSIYIPDRDNERDRNLIRYYLTLKKDTARAKNRIKSLLNSYYIEIPEQIGKNWSKNFIQWLKENEEVKDSARAALNLMISQLEHIRLVYLEATKEVRKLQNDPKHKKLMELLTSITGIGPLIAIILITEIMDMKRFENKRKLNSYVGLMPMEHSSGEQEHKGKITVKRNKFLRAKLIEAAWISIRHDPALSLAYHELTKHMTGKRAITRIARKLLNRIRCVWLNETVYQKNVTK

SEQ ID NO: 102127 - protein, 483 aa, unidentified
MDAENQAVSLVGMDAHSEKIELCVTLWRHGSDPKIVRQITTTLEAMEKTYAKQVPPGSTTVLEASTNSFAIVRRLEAIGQTAVVLPSDVLAGMARKDRINDRIDAANLAAAYARSKPRTVFVPSVEYQHLRDIFFGHRNAKKDSARSGNRLWSFCGNHGLRLPKVSFKRKAETIRANVAEHGWSPQERMHLEIMLKRYAGELETREQYVQLMAQTILRNESMLRLLTIPGIALITAFALAAFVEKIERFESASNLVSYIGLNPNMNRSGTNKGSNKVSRFGRRDLKALLVEGAQSVLRSCKTDTAKWGRRKIAAGKKKNVAICAVARKMTCHAWHALKGHPVPDLEGEKAFRCKLGKIVRAAGKQALADLGYSKPGAYIDAVAARFYTPRTATVAAQTVQPSADTATPPPAAIAVDRPAMTALPATNEPAGTENIGAAPINPRRNRAVKPARPQRPADVLQDSADPASPPALRRTQRGPNKAA

SEQ ID NO: 102128 - protein, 352 aa, unidentified
MNKITTVGVDLAKDVIVVCAADADGHAVFFRQFSFHGFGQWAAKLVPCTFGMEACGSSHYWARRLASYGHTARLMAAEFVVPFRKSKGAKNDRNDAQAILSAVRQPDMRFVSVKSIDDQAVLAWHRMRKGWSDERTALISRIRGLMAEFGVWIGRSPESLMRALPLLVEDERIPARLRPLLIAAHEELHRLKERIEFCELEIRAHAKQNDDAQRIEAIIGIGPITASAMVSTVAHASDFKNGRQMAAWLGLVPKQFSSGGKTVLGRITKRGDTYLRGLLFNGSRSALVSALRKAPEKRTRLQRWMIDLRARLGYIKALVAIANKHARMIWAILAKGEAYDPEAWQRHIPRPI

SEQ ID NO: 102129 - protein, 416 aa, unidentified
MSDEPILIPIVRYIAIDAHKHYVMVGGLNAQQETILPIRRVDMENYPKWAKANLRPGDAVVIEATTNTWTLYDVTLPYVSKVVVAHPLEVKQIANARVKTDKHDVNCLARLLVADLVPEVWVPPLEVRELRTLIAHRRRLVKMRTMTHNRLHSVVHRNNLVPPEGGFFAAKNRSWWEALSLSVVEKLQVRQNLAMLDRLESLIAEVDQELARLSTTTPWREHAPYLLQLPGFGLINAMTVLSAIGDITRFPTSKKLVGYAGLGGSVHDSGQTHFTGPITKQGRKELRWCLVEAAWVAVEHHPFWKQEFQKLNHRMKTNKAIVAIARRLLVAVWHVMTERVADRKANPEMVAFKLMKWSWSLNDLQRGGLTTRQFVRYQLMQLKLGEGLTGIKRAHRMSIASVEEILALKPELREVE

SEQ ID NO: 102130 - protein, 373 aa, unidentified
MADTITYVGLDVHKETISVALADGGKRGDVRAFGQIVNTPTALARMLAKLSQPGRTLKFCYEAGPCGYGIQRQLSAAGHDCVVVAPSLIPRKPGDRIKTDRRDANNLARLHRAGELSAVWIPDPAHEAMRDLVRARLAAVRSLRQARQQLSGFLLRHGCHYGRPAWTQMHRRWLAGLRFAQPAHYIVLEDHIATIEAATDRRDRLTKQIEIMLGDWSLAPVVHALQSLRGMALVTAATMIAELGDLSRFTNPRQLMAYLGLVPSEHSSGATRRQGGITKAGNGTARRMLIEAAWSYRFPARVSREQLLRQEQLPKTIRDTAWKAQVRLCGRYRKLTKAGKPATTVTTAIARELSGFVWSIACQVARPLNTAKV

SEQ ID NO: 102131 - protein, 342 aa, unidentified
MNRIKEIVRLGMDVGKNAFHLVGVDETGFPVVKKKLRRKQVLAWFANLPACLIAMEACGGSHNWAREIAKLGHEVKLISPQFVKPYVKGNKNDYNDAEGICEAAGRANMRFVTVKTVEQQDIQGLHRIRQSVVKQRTALANQIRGLLGEYGIVVGYGISQVRRRIPQILEDGENGLTDRFRGWLAELLETFHVLDERIKQYDEEIQHEYAANEACRRLGAIEGIGPQVATAVIATYGDGRQFGNGRDFAASLGLVPRQHTTGDRPVLLGISKRGDRYLRTLLVHGARSVIRRIEGKDDRRSRWLQALVARRGKNKAAVALANKNARIIWALLSRGVCYQPTV

SEQ ID NO: 102132 - protein, 387 aa, unidentified
MPQCNDLSRSLVAFQQDNTLVAVVELSRSSWLVAGLVPGIGRNPLKKLDPSEEALLALLRRWRDEAARAGRTITRLAVAFEAGRDGFWLARWLQARGVEAHVIHPTSVAVSREHRRAKTDRLDTELLKRAFLGWLRGEPGHCSMAAIPTLEQEDAKRPSREREGLVGERTRIVNRMKGALARLGVRGFKPGLRKAPERLEALRTAEGAPLPPNTLAELRRDMARLRLVREQIAELEAARLQRLEEEPGSRPHAMVRLLARVVGVGLETADMLVREVLSRELRDRKALARYAGLTGSPDESGARRREKGLARVGNARVRRGMLQLAWRFLRFQADSHLARWYRARTADARGGTRKAMVVALARKLLIALWRLVATGEAPEGVALRPAT

SEQ ID NO: 102133 - protein, 384 aa, unidentified
MKYQKVLMMLESIPYLSVGLDVGADFTWMSIMLPNGSLTGKPFKILHSDPASRDLAVTKIKEAQEMYSLESRCFLESTGIYHIPLLYFLRDKGFDCSVINPIITKNSTNMNIRKLHNDKFDSKKAAKVGLDASLKTSIVPDDSVIDLRNLVRDYYYFKDLQSAVVLKLNAELKVSFPAYLKVFSKITTQCSLKLLEAYPLAADMLAAPKDEIVETIKSTARFGEKYALSKYDAIYAAAEDAAVFGRALKSNAVRIRLYISIYKEYQKHLDDLLVALHESVDKLQGTSVYGRIDLLQSLRGVGFLSAVVLIAEMGNFDLFSSPKKLYAYFGLDPAVKQSGKFNGDKVHMSKRGSSLARRILHMVSLNNLKVDKGTKAPVNPVIYD

SEQ ID NO: 102134 - protein, 350 aa, unidentified
MSRDIKYIGMDVHKEAVVIAVLNGSGKQVMESIVETQASSILQFIRGLQGELHVTWEEGTWAAWLYDLLQPHVQQVLVCDPRRNALLKEGNKSDKIDARKLADLLRTGMLRPVYHGEHGLRTLRELGRSYATISQDLNRVMNRIKALYRGWGIACGGTQVYAARYREEWLGKIEHAGVRRRAELLYEQLDGLQELRRTLRPELIAESRKHKASKLLRQIPCIGPIRAARLLALMQTPHRFRSKRQLWTYSGLGIETRDSAQYRFVGGQLQRAKKPQQIRGLNRNHNHEMKEIFKGAATRASCGMGPLRDFYVALLDKGMKPEMARLTLARKIAAIALTLWKRRKVSTPNN

SEQ ID NO: 102135 - protein, 388 aa, unidentified
MSQNPTTAIAIVGIDIGKNSFHVVGLDQRGAIVLRQKWSRGQVEARFANMPPCLIGMEACVGAHHLSRRLKALGHDARLMPARYVRPYSKGQKNDFRDAEAIAEAVQRPTMKFVATKTADQLDLQALHRVRERLVSQRTGIINQIRAFLLERGVAVRQGLRFLRAELPRILATPPDVLSPRMVRVIEGLAGDWRWLDERVESLSGEIEAVARQDAGCERLMSVPGIGPIISSAMVAAIGTGDVFSKGRDFAAWLGLVPTQISTGDRTILGKISKRGNRYLRVLFVQAAWVVLIKPKSWERHGLKPWIEAAKKRLHRNVLAIALANKLARIAWSVLAHGRTFEARKIDEAAAQAVDRHSKPTITGTAKMRSPRWRSQIDTTYPPRSARG

SEQ ID NO: 102136 - protein, 353 aa, unidentified
MEKVSIIGLDLAKNVFQAHGARSDGSVAFRMKISRVKLLAFFASVPKCLVAMEACGAAHHWARQIVALGHEVRLIAPIYVKPFVKRNKNDAADAEAIAEAASRPTMRFVAVKSMEKQASGMAFKTRDLLVRQRTQAINALRGHMAEYGVVAPNGPIHIARLAEAVGGPDGCLPIAVVRLCAMLLSHIASLGEQIGLLEKELRERARRDDTAKRLMTIPGIGVVCATALEALAPAPESFAKGRDFAAWLGLTPKQKSSGGKTRLGATTKMGQRDLRRLLICGAVAVVRWALRKGALEGSWLARMIARKPPLVIAVGLANRTARIAWALMATGGVYRVPGGRRVMRRSGSGTSEM

SEQ ID NO: 102137 - protein, 315 aa, unidentified
MDAVIVGIDVAKDKLDVAVRSSGERFVVSRAEAGLEELKNRLRKLGVAVVGLEATGGYETVVAASLSAAGLPVVVVNPAQVRAFANALGKRAKTDPIDAAVIAHFVEATKPSVRPPPDEATRQLSDLVSRRSQILAMIVAEQQRKKHRPNTRMLASIERLLAALQRELSDLDGQIREAIKASPVWCEKDQLLQSVPSVGPAVTGRLLAEMPELGSLNRRQIAALGGMAPWTRQSGRWKGKSIIGGGRAGVRSALFRGALVAVVKHNRTLKAFYERLSAAGKEKMVALIAVARKLLTILNAILRDGKPWRETEAHA

SEQ ID NO: 102138 - protein, 331 aa, unidentified
MSQIYGIDLSKEKFDVNFVDSLGVMRELEVKNKYDSICKFLSGLPENTIVCIEHTGIYGDLIVFLSNSFNVTICAIPGYDIKHSLGLQKGKSDPLDAARIREYGERFTDKLVPVSYADDDMHELRELHTLRQALVKNRKILLTQQKEKSRLPFKSISAQHIATNAINQLSAQITAVEKEIQTIINSNAEYEKNSELVRSIIGIGPVTANELIIKTHNFKKINTARKAASFAGICPFPNSSGKMVKKSRISSMGDRSLKTLFYLCATSSIQYNKDMKQYYQRKKTEGKPSYLALNNVANKLLRTIYAIIESGEKYDVNYNCLDPRLQEKNVI

SEQ ID NO: 102139 - protein, 402 aa, unidentified
MNCVGIDVSKGKSTIAVMRPFGEVVVSPFEVRHTDSELSELARLLKSLDGETRVVMESTGNYHAPVAWLLHDAGLYVSVVNAMLVHDYGNNSLRRAKTDKKDAVKLANYGLDHWLTLPRYVPEEDTRLMLKTCYRQYQQYSKVQTMLKNNLISMLDIAFPDVNRLFTSPPRADGSEKWVDFVAAFWHCECVCGLSEKAFTAKYYKWCRKHGYNFSEDKALDIYASACGHFGVIPKTDTAKLLVKQAVSQIRATSATLATLKQEMQSMAASLPEYPVVMGMFGVGPTLGPQLMAEIGDVRRFHSKKALVAFAGIDAPPYQSGQMDVRSRSISKRGSTSLRRTLFLVMSVILQRAPMNEPVYQFMNKKRSEGKPYRVYMMASANKFLRIYYASVKAYLDSLEHD

SEQ ID NO: 102140 - protein, 437 aa, unidentified
MRSIGLDIHRDFAEVAIAEGGELRSAGRIEMTPEALELFAESLGRSDQVALEVSGNAWEVARIIRPHVAKLVAVSPADTGIRAARAKTDRLDARALAKLLAAGQLDGVWVPDERTRAMRRRLGRRAQLVRVRTKAKNEIHAALMRRLVPKPKVSDLFGLKGRRWLEAVELPAYERETVDGCLRQLDFCDREIAEIEKVIAKEALASAEVRRLMTIPGMNIITASAFMAAIGEIGRFPDRRKLVGYLGLDPKVRESGTTAASRARISKQGSAAGRYALVEASWSVILAPGPMRAFFERIRARRGHQAAIVAVARKLACLCWCMLTRGEDYAYAQPSLTAKKIRRAEIRAGAPKRKGVKRGTWAANAAIREAERNLALQAEVAYKRTVSDWERTQRKTVSDWERAQSKKAGAGATPGRASGRPSSGQAARQDQAPEPAL

SEQ ID NO: 102141 - protein, 340 aa, unidentified
MNATTYGLDVAKRVFQMYWVDAQTGEIVNRRFGRDELIGFLAQRPAGRVALEACGSAHWWARKIKALGHEVVLLHAKFIRPFVQTNKTDAADARAIWTAMQQPEMRTVAAKTEDQQAMLSLHRMRALLVKFRTMQVNQLRGLLYEFGVTFRAGRLAGLAEIRVRMAELEDTLPGAMICSLQDQLKRIDGLEQDIDQLEKRMGTWQKQEAACRAISEVPGIGKLTATALVAMIGDAKTFKSGREFASFLGLVPRQSGTGGKIRLGSISKRGDPYLRTLLIHGARSVICHARVPTTWQTEIQARRPANVAAVALANKMARTAWAILAHGQAYQKDYVSVKPA

SEQ ID NO: 102142 - protein, 345 aa, unidentified
MRKVVKQVAGIDVAQKELVVTLGRMLDDFSIELFSYKVFKNNDSGVKLLVDWVNKLTDYEVPVRYVMEATGVYHQKLAYYLVDNGCEISIVLPNKISNYIRTLELKTITDKSCSQAIAQFGLERKLDKWAKPKSIYKELQQLTRERNQIVQERSVIKNQIHAEKTESEPNQKSLERMQARIRFLNSQEKEIKADITDIVSKDPDLKQVLNNITTIPGVGELTAVIVLAETNGFELIRNKSQLSSYAGLDVKEKQSGTSVKGKPRISKKGNRNLRKSMHLPSLTAVKWDENFKNIYARLISKNGIKMKALVAVQRKILELIYILFKNETVYDKEYITKNSAQTQMV

SEQ ID NO: 102143 - protein, 370 aa, unidentified
MARKLWAGLDVGVETTSICVISDTGEVLQEATCPTHVKSVHSEIRWLRRRRFARVGLEGSCGLTLARGLRSLGYCVDLYETRQLSKFLRARRNKTDAGDANGIAQAGRIGASLVSRVYLKSLECQSLQSRLVVRRHLVRARAAAVSLLCRQVEAYGGRVRSATHSMQLGLKVNAELSKLFGRSPNPLVSELRTLLVHCEQLISYQRSVDQDLRRVACDNEVCRRFMEIPGVGPLCALTFFAAIGDPKRFRRSVDVGSYLGLTPKIHQSGLSLRRGRISKMGNSEVRGLLVQAATAFMRWEKDGSRLRAWASDIEQRRGRGKSRVALGRKLAVVMLAMWKSGERFEARSSEQDQAPQGPAADSDPVKPQAS

SEQ ID NO: 102144 - protein, 341 aa, unidentified
MNEVTMIGVDLAKSVFQAHGATATGEPVFRKKLSRGQFLKFLSEQPSCVVAMEACASSHYWGREIKKLGHDVRLIPPIYVKPFVKRQKNDANDAEAIAEAAVRPTMRFVPVKSAQQQSRSMIFKTRDLFVRQRNAIINALRGHLMEYGIIAPPGRNFVKKLAEQIEGKECELPPVVIELSRVHLDQLSVLTDKIVAIELRLKEESKSDPETIRLQTAPGIGPISAMAIKAFAPPLEGFKRGRDFAAWLGLVPVQKSTGGRQILGRTSKMGQRDIRRLLIIGAMTRIRWAIKNGPPKGSWLEQMLERKPRMLVAIALANKTARTIWAMMTKHEDYRDPIVAV

SEQ ID NO: 102145 - protein, 334 aa, unidentified
MKHYVGLDVSQRETAVCVVDETGRPIFEGRAKSNPGALAELIRRKAPFAERIGFETGAMSSWLWHELRRIDLPVVCIDARHAKAALSVRMNKSDENDARGLAELVRIGWYREVKVKSAESQQVRSLLVTRSRLIEIRRAIENQIRAMVKEYGLLFDRAIGSMFRRKVAELVDAEHALKDVIAPLLSIHEQVCGEQEKLDKRIAALARADETSRRLMTVPGIGVVTALTFRHTIDDPSRFRSAATVGAYLGLTPRRKQSGESDTNGKTSKWGDRLLRTYLFEAASVLLHRTKKWCTLKAWGLRLAKRIGMKKAKVAVAPKARCHPSLHLGRRHHL

SEQ ID NO: 102146 - protein, 397 aa, unidentified
MYIVGIDIAKRKHEAAVIDGEGAVIIKPFSFTNNCSGYNRLLAMLAKAKLPLDEVSFAMEATGHYWLALFTRLQKEGFRVQVINPVQTNSIRNFYIRQAKTDPRDALLIAEVIRFGHFSESTLHPENIYELRELCRGRHAIVSMQADVKRKVVALLDQVFPEYETAFANMFSDTSMAILQTCPTPKELSEMPLEELCHLIEVSSHKRFRMAKAQELQALARNSFGFAMAGDIFSTMIRLYAKHLDFLKQQVREMDRKIAEIMDTLDTPITTITGIGPTLGAYILSEIGDINRFSSSAKLAAYAGIDPTMRQSGEYNGVRNRMSKRGSPYLRHAIWLAASSAVLHDPALKLYFQKKRDEGKPYMASVGHACRKMVSIIYAVMRDNKAYTPCIPNEISA

SEQ ID NO: 102147 - protein, 307 aa, unidentified
MNIHANTVGIDISKDRLDIYDGSGSACANTRAAIMPLAQAWARAGVLVVYEATGVYDRALRRALDEAGARHARVNPTKARAFAKAAGFLAKTDQVDARMLSVMGQALQPREQAPADPDRERLCALHRRRDQLVLTRQQERTRLKGCDEDEIAEDLQRHLAFLDQAIQALDRRIAALIAEAPALETARRLLVSIPGIGPVTAAALLALVPELGARPGKAIAALAGLAPLNRDSGQMRGQRAIGGGRKRVRDALYMAAVSASRSNSRFAETYRRLREAGKPPKLAFIALARKLLTTANAILRDNQPFAA

SEQ ID NO: 102148 - protein, 351 aa, unidentified
MSRTSTVHAVTTIGIDMGKNTLHMIGLDTRGGIVLREKVSRGRITLRLANLPPCLIGIEAGMATHYVARELAALGHDVKQVPPAYAKPFRQGHKNDFRDAHSVAEAVQRPTTRFVPAKTDEQLDLQALHRVRSRLVSERTAVINQIRGFLLERGIIVRQGLRFLRQALPDILAKRTDVLSPRMVRIVADLASDWRQLDERIEPVTDEIETLAKSDDGCRRVMTVPGIGPIISSAMVAAIGNGAAFARGRDFSAWIGLVPKQMSTGDRTILGRITKRGNRYLRTLFVQAARVILLRPASWPKHSFGVWLARAAQRLHRNVLAAALANKLARIAWTVLAQERSYEARIMKAAA

SEQ ID NO: 102149 - protein, 347 aa, unidentified
MIEVSIVGLDIAKRVFQVHGVDRAGEAVLRRQVRRDDLVKFFGKLSPCVIGLEACATSHYWARQLAALGHQVRLMPPTRVKPYVKWGRKSDKVDAAACCEAVTRPSMQFVPVKTEDQQAALMLHRARQLLVEQRTRLGNALRAHLAEFGIVAAKGAAGLAALLAMLADAQNPHVPAAIRPILAPLAVQWCCTREQIASLERQILAWHKSNADSVRLATIPQIGPIIASALVATAGDAKRFKNGRQFSAWLGIVPSQNGTGGKIQLGPITKTGDRYLRQLLVIAATGMIRRVRAEPDLMPWLAGLLARMPAKQAAVALANKLARIAWALLVKSQVYKPAVPAETAVTA

SEQ ID NO: 102150 - protein, 456 aa, unidentified
MAKQASKKRDRKIKQLNPNAAGIDIGSQKHYVAVPSDRDNEPVRNFGCLTPDLHQMAKWLKSCGIETIAMESTGVYWVPVVAVLESYGFDVKLVDAYKVKNVPGRKTDVKDCQWLAELHRFGLLSGAFRPDKQIQVLRSYWRHRSTLVGACSTQIHLMQKALEQMNLQLHKVITDITGVTGIKIIRAIVAGERDAVKLAGMKHPLIKSSTETIAKALTGEYRQEHLFTLKQALEIYDVYQNKIADCDRQIEEYMKTFEHKADANDMDSKSIKNNRTKRRKNQPNFDLRTRLFEMTGVDLTQIDGIETMTAQTVISECGFDMSVFPTEKHFTSWLGLCPNNQITGGKVRKRSTRKVQNRAARALRLAAQSLHSSKSALGAFYRRMRARLGAPKAITATAHKLAKLVYRMLKYGMDYVDSGQQYYENQYRERVIKNLTKRAREMGYAVVCTNTGELVS

SEQ ID NO: 102151 - protein, 423 aa, unidentified
MPYKIAGIDVHKRMLHVVVSDVQVDEEYDFTRRVFGSLPEALRSLAAWLVEQQVEEVVMESTAQYWKPVWGTLERYWKRICQTREGALATSGTLHLALALSNRGRRGRKKDFRDAERLVKRLVAHELTLSFVPDVEQRLWRTVVRTKYQLTRNRVQLQNRLEALLEEAHIKLSSLVSDLLGASARRMLEAIAGGETNRETLAALADRGLRATQEQLQDALGVCQELNPVYRRLIKMVLDEVASIDKRIEQLNQEMANLLRPHEDQVKRLAEVPGLGVDSAQQVIAEVGATAATFPSEKHLSSWVGACPGDEESAEVNYSRRSPQGNRHMRRILNQAANAAVKYKGSIFEILYRRYVPRLGHNQTIGIIAHKLCRLVWKILHRGIRYEERGPEVSKASKQKRTRKMIRHLRRLGYRIELSPSQS

SEQ ID NO: 102152 - protein, 399 aa, unidentified
MFVGIDWAADAHEVCAVDASGTICHRATIAHSQDGLDRLVGHLGRWAAKGELLVGIERPEGRLVDRILEAGHPIVLIPTFAMKDLRRRYAVGGAKSDRGDGYVLADVTRTDGHRLRRLEPLSEQTRALRAVVRSRDDLVDQRKALANQLRATLEAYWPGAAAIFADVDSAICLAFLERYPTPASAARLTETRLASFLTKAGYSGRRPATQLLARLCAAPAGVLGAEAEARANTVRAMVRVMRALLGSIKDLDRSVVAHLGEHPDAKIFTSLPRSGQINAAQMLAEWGDCRQAYPQADSVAMLGGLCPVTHASGRHRDVSFRWACNKRLRQAMTCFANNSRRASPWAAEVYRQAIARGCDHPHAVRILARAWARVIWRCWQDHRAYDPALHRAARRLKAA

SEQ ID NO: 102153 - protein, 426 aa, unidentified
MKDQEQIVAWIGVDWADEGHHVWEYNVGTGGKESYAVQHSGESLQEWLSQVRSRYAGKRVAVVVEQARGGLIYSLMNTDFVVIYPVNPQSLAKYRKALYPGGAKSDPADAELLGEMVRQNPERFRAWVPGDVQTRTLQLLTEGRRKLVEDMTALTNQLTSVLKTYYPQALEWAGPLGSEQACAFLEKWPTLMELQKSRPFRIREFYQKYGRPSGEVLNERVNQIQRGQPLTLDGAVVTASVMMVQAVVAQIRPLRLAIENYDEEIERVFRQHPDRVVFESFPGAGKVLAPRLLAAFGADRDRFQTALEVQEFSGIAPVTERSGKAIWVHRRLACPKFMRQTFHEFANCAWRFCAWSKLYYQQQRSRGKDHHAAIRALAYKWIRIMFRCWQDRTPYDDSLYVKSLTQRGSHLAKGLNLPRPDSVVEI

SEQ ID NO: 102154 - protein, 523 aa, unidentified
MSAKSKSKRARKSRSHSVHKPQGVIHPRVRAVGPEHFAFICVDCAKRRSKIMIADFYGRVLMEPTIIEHDRFAFEAVLQRVRDTLARHAIKDQIAVIERTGRYHGPVQRAFVNAGIEVRILHPYTTKQYRQPADPGNKTDDTDLSAIFRAAVNGFGLLEHEPDPIYVRLQLLARHRRRLVHKNVMLRQQMLEHLHSYMPGYSSCFKDIFDSELLLWVPKHMGSAAEILQAGVDGLDQELRKANVRSHRPTLQKIVAWARSAPSAEEPVSLHRRFFTEFDADRLAKLQVIRAIESDLMEPLSQTPYVLLLSVPGINVVSAAEFAGEMGPIKHYPKPRAITGRAGLYPSRHQSDEVDHPNGPLVRHANHDLRRAILIIADNLIRCNEHFGVLVAGWRAKNADARDIRVRVGSRFSRIAFHMVSGQMTFRHPCTKHRDYVLKKLLRFAIDHAIAPDQLQRNLDAATVQLPPSDEREEAESLAEELAQVQKKRGSGLKAIGEILPAVLVKLGIKLISSSESGEADLT

SEQ ID NO: 102155 - protein, 390 aa, unidentified
MIYVGIDVAKDKHDCCILNTEAEELLPIFTIQNNHDGYEELFGKIEAVSNDKSQIKIGLEATGHYSYNILGSLLDHGYHTFVINPLHTNLYRKGQSLRKTKTDKVDARSIAGMLMTDKTLRPYTDISYHSEELKSLTRYRFELVKERARLKTSVARLINILFPELEALVPSLHVNTVYYLLQEMPGASFVADANLTHLKALLSDASRGRYGREKAIEIRNAARSSIGAVIPAKSMELRQTIHRIEALSSDIEEVEQSIQKIMDESKSQITTIPEIKYRMGAMILAEIGDFSRFNNADQILAYAGLSPSTYQSGKLTSSYSHMEKRGSKYLRYALFNAAIYVSKWDERFGLYLSKKRAEGKHYYVAISHVIKKLVRTVYRMEITHTAYQPL

SEQ ID NO: 102156 - protein, 416 aa, unidentified
MDKQITSSAAGIDWAKDEHALCVIEQSGRKILLEGRFAHDERGIAKLCRTLEQMGVERVAIERPEGILVERLLEAQITVLVIHPNQLKASRPRFRASGSRSKSDSFDAFCLAELARTDHHRFRVLVADSDESRALKVLTRAREDLVGTRVGLANQLRAELEAFWGGAAVLFSEIDCAISLAFLKRYPSPTDAARLGEKRLESFLSQNRYTGGKSAPELLQRLRKAPQGRTSEAEIEARREAVLALVGTLEVLVERIKHLEDRIARAVRAHPDGELFLSLFRSPNSTLTAASLVAHIGDQRERYPTNEALAAAAGMSPVTVESGKRKVASFRRACDKRLRRAIATLAESTRHHNRWAKDIYRRARERGCDHAHAIRILGRAWVRVIFRMWQEGQPYDPARHRGLRRLRSAEGLPQGV

SEQ ID NO: 102157 - protein, 482 aa, unidentified
MAKRKLSPFERLQPGRLNRQQRRELGRRISAADPGLAVVHPDAAGIDIGNASHFVAIPPDRDPVPIREFGAWTAALQEMARWLTGHGIRTVALQATGVYWIPVQDVLEQAGLEVYLVNARGTKNLPGRKSDVQECEWLRKLHAYGLLRNSFRPPDAIRAVRTLWRQRDRWVQEAGRAVQHMQKALTTMNVQLANTISDLSGVTGQAILRAIVAGVRDPWALAKLRDARIAASEEEIAHSLQGTWREDVLFALRQALEAYDFYQQQLAACERELAKYTAAVPSRERPAPPEGPDGAAPLPPAKPARHRKSRRKDQPGFDLAGELHRTMGVDLTRIDGIDVLTAQVVFSEIGPDFSAFPDENHFASWLTLAPQRDISGGKVIRHVPAAGRNRVANALRMAAQSLCRSDSYLGARYRRLRARLDGPVAVKAMARYLACLIYRLVTKGQAYVDRGAAHYERKRQERERLALERRASHLGLKLVPAT

SEQ ID NO: 102158 - protein, 360 aa, unidentified
MIGGDGHKEMVTVGIDLGDRTSQCCVLGEDGKVREEFSLPTTKQALRRRFSGQEQACIVLEAGMHSPWASRLLAELGHEVIVANPRRLRLIYGNDSKNDKADATYLARVGKLDPSLLSPLVHRSATSQSDSALIRSRDALVRTRATLINHTRGMVKSFGERLPRCSTRAFAKKVDAHLPEPLRPALGPVLGMISALTAEIRGLDQKIQALARDSYPDTSLLTQVQGVGSLTALAYVLRVEDPARFPQARAVGSYFGLRPRQADSGKLKPQLRITKAGDQMLRSLLVGSAQYILGPFGPDTDLRRFGLALAARGGKSAKKRAAVAVARKLSVLLLRLWVTGEIYEPLRNARLRGEMVPAPA

SEQ ID NO: 102159 - protein, 356 aa, unidentified
MTIVAHVHPYVVGVDTHARHHVYSIVQAKTGELLESQKFPATEAGINRAITWVLKRTDSHMQTLWVIEGTASYGAVLTGKVLASGFEVAEAPRVDSQHRYGLGKTDDRDSFQMARTAVGLPVGKLRRPRQGSGVRQAVKILVAARELMARERTSYINALTALVRSNSLGIDARHALSRIHIEQISAWRQREESIELRIARAEAKRLACHVLRLDEQLRSNESELVNLVKMSEAAPLLQEKGFGAVSAAKCLAAWSHYGRVRTEAEFASLAGVNPIPASSGNIVRYRLNRGGDRKLNSAIHMVAIVKMTHDEETRAYVARRREEGKTDREIRRCIKRYIARHVYRTLNAQHRSHTAP

SEQ ID NO: 102160 - protein, 416 aa, unidentified
MLRVYRRCCGMDVHKETVVVCVLPPDGEEGEIVRKVFGGFRNELARMRGWFKQLKITHVAMESTGVYWMPVWNVLDGHGFELKLVNPGQVKALQGRKSDQRDAKRIAEFLQDERLDGSFVPPREIRELRQMLRHRQSILEARNEVHNQIRDLLETANFKLSSVATDLMGLTGRNILRALADGLDSPERLSWKARGSLRHKEAKIKEAMKGQASEFFRWMLKSHLEHYDFLTNLIATLERQIEGYMAPYEEHILRLITMTGVDRLVAWNLIAELGVDMSVFPTAAHCASWAGLAPGTHESAGKQKTGRTKRGNRTLRRILTQSAWANTRCKYGYLKAFFLRIRARCGWSKAIVATAHKILVIAYGILKNHQPYQDLGGDYYDRLNPDKTIRRIQNRLAKLGYQATLTLLPAPTMRST

SEQ ID NO: 102161 - protein, 343 aa, unidentified
MEQYVGLDVSQEQTSVCVVDGGGKVIWEGKCTSTPEAIAATLRTRAPEAVRIGLESGPLSAWHWHELRKLDLPVVCLDARHAKAALALQLNKSDRKDARGLAQIVRTGWYREVAVKSVDNHLVRSLLTTRAQLVRMRVDLANQIRGVLKPFGLIAGKGGGRPFAERVRALVAGGPLQEVAGALLAAWQAIGEQIAVLGRRLVAVARQDEAVRRLMTAPGVGVLVALAYVSVVDAPERFAKSSSVGAYIGLTPRRYQSGEADYTGHISRCGDKLLRTYLYEAAGIILHRVPRWSALKAWGTRLAKRIGTRKATVAVARKLSVILHRMLRDSSEFRWSAKEVQAA

SEQ ID NO: 102162 - protein, 397 aa, unidentified
MLGQSNQRSYCPTEFDIFIGMDVDKKNIDFTCADSKRIIRSVHIPNHVEDLIRYVRKHFPDQKVLFAYEAGPTGYGLYDGLMAVGFACVINPPSMIPTAPGQRVKTNRLDSKKITEALRAGQLKGIHVPSPTYRHLRHLTKVRDLVARQIAGNKCRIKALLLFEGIPFPEAAPKSHHWSRSVIAQLQKLPCSGAVRFRLDRLLEALEFQRQQYLKITRELRNFCRQDPELKRCLSYLVSLPGVGQIVAPHLLARIGSWQNLQEHRVDELAGLLGLVPTEHSTGNRVHRGSITHGGDGRLRSKLIQSAWTAIRQDPELREFYRSVYRRHPQHLAARKAIVAVARKLTTRIFAVLKEQRPFTFRSPVHSRPLLPGEIGPRERLDATQKEEDRNLPSFVP

SEQ ID NO: 102163 - protein, 353 aa, unidentified
MALDHRWCVGVDLHKDTLTACVFCSCCGEVSFQKIACRCRRQIAEYFAALPRPHTVAIESVGFYRWLWEMLEPIVEELMLADATQARALAGRRLKTDREDALNIAELLAAGRLPRSYAPPIEVQWLRDLTRHRNSFSRQHARILHRVKSIMNANNRPGPARMQSDGLIRYLKAQGEKLPARHVEMLWQCVDALTLTERQIAHTERTIGQVVRRESFREVYGILTSFPGVALVTAATVMAEVGDFKRFPDTKAIGRYAGLNPRVYASGGKQRIGHIAKTGSPDLRWILQQAAWTAIRYDEHVKRIFLRIAKRAGRKAAAVAVARKLLTWMQIAVKKGEPYRTPGSRHTVLPGAA

SEQ ID NO: 102164 - protein, 416 aa, unidentified
MNAVGIDVSSRKSTVAVLRPLGEVVCLPFDVTHDIAGLASLAEKLKAIDGETRVVMEHTGRYYEAVAKALHEAGFFVCAVNPLLIKEYGANSLRRVKTDKADAIKIARYALDNWADLRDFTPMDAIRYDLKTLNRQFQLASKQRTASANNLIALLEQSFPGIRKCFDSPVRSDGTQKWVDFAHSFWHVDCVRKQPFAAFCERYRKWCKRHAYLFKLSNAEEVYALAKRAVVLTPKSKVVKVLVQEAANQLSSISRSVEVYRAEMDRLAAMLPEYPVVMAMYGVGKSYGPQLMAEIGDVRRFERKQALVAFAGIDPMPNQSGDKNVRSNKSSKRGSPYLRKTLFNVIRTYLQCAPQDEPVFQFLNRKRAEGKPFYVYMLAAANKFLRRYYAKLRDYFASLDTLQPVAPIPTILKATL

SEQ ID NO: 102165 - protein, 331 aa, unidentified
MKQKYNRVIGIDVASNKIDVNDSAGKIAKQLPNTISAISKKLFKRIQDTENTLVVCEATGGYEYLIVEAAHDAGVPICVANPRQVRDFAKGHGYLEKTDVIDAFMIRRFGEDVEIHLTPPRTAQEKEFLSTVRRRTQVKDLLSQEQNRLSQTRDKFAAQQIKETISHLKKQLKSLDKRIEKMLKDLSKVDPKVEILFSVSGVGPVTAATLLAELPELGQLNRGQIAKLVGVAPLANQTGKSDKKRKVRGGRSQVRSVLYMATLVATKHNPVIKRFYDRLIAKGKIKKLALVASMRKLLTILNNMIHCGESWKNPQVNAKKEQKATTAPSLN

SEQ ID NO: 102166 - protein, 354 aa, unidentified
MATYYIGADVDSKMVELAIEKNAKIIDRYRVPTTIPAIREVLGSIGGTKFLTFEEGPMAGWLYRNLKDNVDDLVVCDPRRNKLITCDGDKDDSIDAGKLASLLRGGYLRAVHQSEDIGRIVLKQWVSLYHDKVCEAVRQINKIRARCRMYGIRIPRRVLRDLVSRHQWITELKEKDLAEQLAVLWIGLDTAVEQVRMAKKQLVRHSKDYKIIKYWSDVPGIALIRATTMLAYLDTPWRFSSEKKLWKYCGVGLQRTASGTGKFGKPNFGKLRLAWAVNHRLKEVVTGAAMSAINHKNNIFAYEYGRMLGNGLTACNARHAVARKQLSVMWAMWKTSSRFDESLVCYSPVTVNTN

SEQ ID NO: 102167 - protein, 340 aa, unidentified
MKMYAGLDVGGKQTAICVMDEVGKIIWRGMADTYPDVIAARLKGFQEKLVKVGIESGPFTPHLHRSLVGLGFPMVCMDARRAADAIKSRRIKSDRADAWALAEMLRTGWFTAVHVKSAESHKIKTLLGARDQLVRVKRSLGNQVRGLLRPFGVRLPSRAGMKKFAEAAHQAVQTDKLLRASISALLEALASIDAQIAKLDDELKALARRSEVAWRLMSAPSIGPITALAFIATIEDPHRFRRTRDIGAYLGLTEKRYQSADTDVGLGISKQGDAMARHYLYEAANVLLTSVKKGSALRSWGLKLLKNIGPKRARVAVARKLAVLLGRMWKDGTHFEAMAA

SEQ ID NO: 102168 - protein, 410 aa, unidentified
MAERFVGIDVALREHRIAVLDRDGEAVGSSFTIAASQDGVATLLRTLAARDATAAQTVIGLEASGHLWENLEAALVGAGYRVLVLNPLQTRRYRDVLRRKAKTDDIDAHVIAGLIRSGAAQASYVPDEPIQSLRELARLRARLMDDWQDYLRQLIAQLDVVLPEHRTALGDLRSARARGILAQFPTAQHLAQASPRAIRRAAHDAGTRGFSLDDAIAVRDAARHSIYSGKAAPARAQVVRTLVSQLDRLTTALDEVDRAATALLPPSEPGTGPSDADLLQTIPGIGPHTAATLLGELGVPMRFTDAQALVAYVGFYPVITESGQRVGTPRLSPVGSRIARRALYLAAVNAVRRSAEWRTIYLRKRAQGKPAKQALIVVAVKLLHTLYAMLKHRRPYNPSRLLVAAATSGT

SEQ ID NO: 102169 - protein, 355 aa, unidentified
MDQKKYIGLDVHQASISVAVRDAAGKLVTESIIETKATTILEFVRGIRGSLWITFEEGTSAAWLYDLLKPHVTRVIVCNPRKNALLNAGSKSDRVDARKLSDLLRAGMLAPVYHGENGVRTLRELGRSYITVTKDLTRVMNRVKAVYRSWAIPCAGAKVYSPRRRHAWLEKLSEPGVRRRAEQLYQQLDALRKIRREVRAELLAESQRHPAHQLLRQIPRLGPVRVALLIGLIQTPHRFRTKRQLWAYCGLALQTRASGEYRFSGGELQAAKKSPALRGLNVNHNHDLKNLFKGAAMHVSISTDPLGDFYRNLLAKGMKPSMARLTLARKMAAIVLTVWKKGARFDPQELKQQAA

SEQ ID NO: 102170 - protein, 475 aa, unidentified
MNIKGKKKKNQVVTANIFEQQEILAKIEEIKSNLNASTWHELETKGKFDKNKKLTFISDDMLILGCDVGSETHYARAIDTRGRELSKSVFSFSNSLEGFQSAKEWAVKIAATYDKKQIVLGLEPTGHYWLCLATWMIQNGISVVQVNPYAVKQTKEVEDNSQLKDDTKDPKLIANLVKDGNYGMPYLPEEIYADLRRLSMFRDQLNEDRTRNINRLHREMKIYFPEYKDAFGKFDGAFCLEVLRKAPFPEDLIAIGKDGIKQIWHDAKLRGRGYNRAGEIMKCAQESVGLKEGIGAGKMAVKWFVERIIELDEQLSEVEKQLNEKCLQIPYAKNLLEISGVGENILSGILAEMGDISRFDDVKEIQKLSGLSLVACSSGKHKGQTKISHRGRKRLRYWLFQAAKSAVAHAEEFKELHAYYTTRGENPLKKMQSLIVIACKLLRVIFTTLKKGIMYDPKKLLADIKRPEQQKRQVA

SEQ ID NO: 102171 - protein, 348 aa, unidentified
MTNQPHIIGIDLGKHWFHLIGLDRDGAIVLRKKMSRAQLSAFAATASRSVVAMEACCGSQYWGRVFAHAGHDVRIVPAQFVKPYVKTNKNDFNDAEAIAEAASRATMRFVPLKTTEQLELQASHRIRRRLVHERTAVVNQLRALLLEYGIVTPIGRETFARRWSPIVGTASEQLSPRLLVLIQRLRAHWATLDGQIAEATQELTAWADGSPLCQRVATVPGVGPMIATALVSAVGDARMFARGRDMAAWLGLVPRQHSTGGKTTLGRISRRGNGYLRQLFLQGAVSAYLWMKRDRSALGAWLQQLDRRRHRPIVITALANKLVRICWKVLTSDTPFRLHPARPVEYAV

SEQ ID NO: 102172 - protein, 434 aa, unidentified
MTATDSTARPRNLVAIDIAKVKHEVLVELPNGKRRKMIVRNQLSDFRQLAGYLKRLEGALEIALEPTADYHRNLAYFLRAQGFAVKLVSSIAVARTREALHNSWDKNDPKDAQVILHLLRNGNTQYFYDPVIEQTNDLQELSKTHFQVSLRKTRVQHSLLNHYLPLYFPEAERFLSNSRSNWFARLLFEFPTPQAITQLTENEFLERASQLLKRKQSKAAILRALYAKAQESVALPVPLESQAIATFRLTLAQHLELCRIRAELEETAHELLQDQLDYQILRSVPGVGPIIALTVLAEAGDLRRFGHERQFLKFCGLDLATSQSGAYRGRTQLSKRGNSRLRSALWMAARRATHMQENTFRQKFSRYLRADPTNTDLRRKAYTACTAKMARTIYGMIKHQQFYRAYREDAIPEPGGRTRSHGPLRQAASGGLTS

SEQ ID NO: 102173 - protein, 375 aa, unidentified
MQVFDAYVGLDVHKETIAVAIADGPRGEQPRFWGNISNSPACLKKLVNKLRDRYQTIEFVYEAGPCGYGIYRWLTKESLKCRVVAPSRIPRCPGDRVKNDHRDSLTLARLARAGELVDVWVPDEIHEAMRDLVRARHAANRDLRVARQRIQSFLLRNNYSYPGKPWTKRHVIWLADRTFPHVAQQIAFQGYLNAMEQSLARRNQLEHQLEELLPDWSLANLVNALQALRGVALIIAVTVVAEIGDLTRFANPKQLMSFLGLVPGEHSSGNKIRPRGITKTGNRTVRSLLCEAAWSYRQKPKIGSYKLRNMPKNLPQEAHEIAWQAQLRLCARYRKLVGRRKKSQVAVTAVARELLGFMWSIAQALGPQELNEKAA

SEQ ID NO: 102174 - protein, 387 aa, unidentified
MPQPNDLSRSLVALDQNSTIIAVVELSQSSWLVAGVLPGVERQPCKKLEPNPEGLLVLLHRWRDEAVRAGRTITRIALAFEAGRDGFWLARWLEARGVEAHVIHSSSVAVSREHRRAKTDRLDTELLKRGFLGWLRGERGHCSMARVPTIAEEDAKRPNRERECLVGERTRVVNRIKSTLARLGIRNFKPTLRKAAERLASVHTPEGIPLPPNTLAELQCDMARLGFVVSQIRQIEDARQKRLEQQPETGSHPMVRLLARIVGVGVETADLLVHEVLSRPMRDRRAVARYAGLTGSPDESGAQRREQGLARAGNARVRRGMIQLAWRFLMFQKDSALALWYRARTADSRRGTRKTMIVALARKLIIALWRFVTTGETLEGVILRPAG

SEQ ID NO: 102175 - protein, 342 aa, unidentified
MDSTIYGLDLAKRVMQLHWVDMGTGEIHRKQLRRRSLLEFFANRGPGIVAMEACGSAHYWARELRKLGHEVRLIAAQFVRPFVKTNKTDAADAAAIWEAVQRPDMRFVAVKSVDQQSVLALHRMREQLVKIRTMQINAIRGLLYEFGADIPQGRQKGEKTIPQVLEQLEDQISKMTLDAMRGQLERLKALDRDIADIEKSLALWKKGQEAVSRLMAIPGVGLLTATAVVATVGDMKAFRSGRELASFLGLVPRQSGTGGRVRLLGISKRGDTYLRSLLTHGARAVVNCQIRSRNPWIDRLLSRRPHNVAVVALANKMARTIWALLAKERTYDPRYQGIVMAA

SEQ ID NO: 102176 - protein, 467 aa, unidentified
MRYIGLDLALTTSHKAVVMDDRGRSLSPVLLVETSAQSLKRLFELARADGAPDEPLVVVMEPTGMVWFPIAVFCQGYGVKVFLVNGQQVADLRRYYRKHAKSDRIDARVLAKLPVVSPEKLHPLHLAAASHLVCQRGCKELDRLMVLATAIQNRMRAIDRFAWPGLEHVLPDLVAPFTRWFREHWYDPRQVVMAGARGLQCAWEETAPKLADFPAVSEWSTALVHLAEEVLALYGADSPFLDYAALQAEVLREQALLAWVEATHHELQLHTVRPLYRQFHPSRNLETLYGVGQDGAAVYVSFIGDPERFPGHTDFRGWTGMIPRSSQTGASEAKGMPISQAGPDLVKKFAFMGAETARLRDPQIAAIYYDQVVRHGKHHTQAVCTCATHLLDRIWTILKEDRPYELRDVDGTPVTADQARDIIAARYTVTAELRQRNNQRTRRERQERLAEKKLKRERAPIKARGES

SEQ ID NO: 102177 - protein, 387 aa, unidentified
MTKVNDLSRSLAALDQDTTLIAVVELSSKSWLVAAAVPGIERHPLKKLDPDASALLKLIERWRGEAERRGRTIKRVVLAYEAGRDGFWLARWLKERDIEAYVIHPASVAVSRERKRAKTDRLDAAMLLRVLLGWLRGERGHCSMVAIPSMDEEDARRPSRERETLVGERARITNRIKGALARFGIRSFNPLLRKAPQSLEKLQTAEGGPLPVNTLEEIKRDLARMAVVREQIAAIEKARVDRLKQAPKTGSNAMVQLLARVIGIGIETADMLVREVLSRTLRDRRAVGRYAGLTGSPDESGSRRREKGLTRAGNARVRRGLIQLAWRFLMFQKQSALTQWYRARTAGATPTQRKSLIVALARKLLIALWRLVTTGEVPHGVVLRPAI

SEQ ID NO: 102178 - protein, 343 aa, unidentified
MYYLGIDCHKYFSYVTALDETGQVKFKGKMGNRKDDFERLLNGLGERCKATVETGYDWGIIYDMLTEMGVEVILAHAKKIKLITMNPQKTDKRDSLILAQLLRTNMIPRVYAPTREMRRNKAVLRERQFYTKIRTMTKNKVHKLLHRNGIKMNGYSDAFGKSGRRYMEEAELPKTEKVLLDNELDMLDVITLKIKTVEKSAVEITKENRYVELIRTIPGLGVVLSRTIALEIADIARFSKAKKLASYSGLVPREHSSSDHIYRGSLIKDCNKHLKEALIEGAWVAIRCSAYFESIYTNVKSRRGGNKAIVAVARQMAEIIYYMLKENRSYVERYTADNKMAAL

SEQ ID NO: 102179 - protein, 357 aa, unidentified
MIIVSYSNNHKAKEADMTIYCGIDLHTKKSQLCIIDADGEKVKEGNLDNDLSVILKFLEPFGNDIHIAIECTINWYWIVDGLKNKGYDVRLAHTLGLYMITGAKVKTDRRDAFKLAKLLRMGELPEAYIYPKEKRPLRDFLRRRAGLVHERAECYSSLRVQFIKYNLNTMSSEGLKKLLTSDIDIMPMPQEVKDYCVMILERIDLLSRQIEEMDTRLKDITLEDPKFKLLLTLPGVMYVLGLTIYYEIGDIGRFRDARQFASYCRLVPGISQSATTVKRGKGKKQGNHYLKLAFTQAANIAVRYYPTLKKFRDKHANRRKGNAATMVANCILAHKIANATFHMLKEGVPFDEAKLFG

SEQ ID NO: 102180 - protein, 344 aa, unidentified
MIWVGLDVHKSYSRMGMFDPATGAVQDLGTVRNEPSALEEKLRELPSPKTVVLEAGRSSYHMAGLAEAMAEQVWIVDPGEVRRLQQRIAKTDRRDAAALAWWAAKGVLTPQWRPDAKLLDLRELTRGKTVLTRLSTEVRARMRMLLARYGYECPHRDLLGERGQLWLDEVELEGYAGRMLAGLREVLVLIQAKADEFECLVEQAGAMHPAAQRLRTIPGIGPFLSLALAVEIGDIHRFPSPVHLRGYSGLVPAVYQSGDKDARGPLTKIGNAWLRYAAVLATQRMAQMRHPDPKLKRIFLSVAFRHGRNPGKVAAARRLLDLIYHLLKEEEDYQAPIPRMACAN

SEQ ID NO: 102181 - protein, 533 aa, unidentified
MVAKRKSRRSRKVTQAALGKPRGIIQNRVQKAGPERFGIVAVDCAKARSKWMFCDFYGKLLVPPTEVEHARAQMQLAIVQFREAYKKHGLKDAIVAVEMTGTYHHPIQRAFREAGCETRLVHPFASKHYRLPAHGDNKTDDNDLEGIFRAAVNGFGLLEPSWNELYRHLQLLCRHRRDLVQKRAKLQCQIREYLHRCLPGYAALFPKDSLWKRPAPLGIAAKAITAKDIVQARIAGVTAWLREENVRFHSSTVEKAVAWAGNAADADPLAPVLAEIWKTLDADRREKTLRITELEQEIAAKLVKTPYLLLLSLPGINVVGAADLAAEMGPIQHYAHDRAVTGRAGLFPSRYQSDQVDRADGPLSRFRNTLLRAAWLRVADNLTKCNAHYRGKYLVWKAAGVDPRDIRCRVANRAARPIFQMLYARQLFKHPSRVERCYVLDKLLKFHQEHKTPPHQIVRDLEDAARQIPPGDRSQEARPLDQRRQRARRSPRAGPKSIGTLLVGVLARLGVNELQSETQASGPDARPTEIDPR

SEQ ID NO: 102182 - protein, 433 aa, unidentified
MSQFLHDFVVGIDVSSEFSIVAMLAPSGELIRKPFRIDHNPAGFHKLLDILKKEEERLERKPIYFVESTGIFHLPLFFFLRSNDLQGFVLNPLSVHSIKNFDLRKVKNDQKDAEAIARLAKYQDVKFSLVPEPQILALRMMTREYYALSDTLTEMKNRLCTDLYLLFPGFLDVFSNIFGKTALTVLKKFPSPRAIQAADTESLTSLISKISRKGTAWAEKKVNLLKDCAQLASSMPHEFSLLDAKIKVHIDGIKSMQASLDGIVKQIHAMIDSELFPADAKRNIELLDGIPGIGFLTAATLIAEMGDFSLFKSAKAFTAFFGIDPSVNQSGKFQGDRNKISKRGTRIGRRILFTIAMASIRTTRKGDEINPVLREFYAAKCVNKKKKVALVAVMHKLLHYIFAVLRDQKPFEIRQPKDHQSWRNTKLSQAPAA

SEQ ID NO: 102183 - protein, 359 aa, unidentified
MKNLKYSIGIDVSMKDFVCCLSVINQEQEVKVKATHKFANTVTGFRLLLEWLKRHQKEEIPIVFVMEATGVYHQQLAWFLHHQGKAISILLPNKAKKYLQADGVRSKNDKIDARGLAKVGAEKKLEQWTPPSKELYTLRDYTRQHQSINEMHTATSNQLHSIEHSQFRNKDIIKQLKSTLRLLERHLKEMETIMGKMIKSDPVLNQHHQNICAIKGMGTLSFAVIAAETDGFALFDNAASLVKYAGYDVVENESGKHTGKTRISKKGNSRIRRILHMPALCAVRDDQPHFQKLFERVYDRTRIKMKAYVAVQRKLLIMMYYLWKKGEKYNPDFKKEVAPALPGATRDEFLNEALIKQQN

SEQ ID NO: 102184 - protein, 357 aa, unidentified
MGEGSWVGLDVHARSTVAGVLDGASGELRTVRVSPRGVETVAWLRTLAGPVRVAYEAGPTGYGLARACAEAGIACLVAAPSKIPRGPGDRVKTDRRDAERLARLLRLGELVAVHVPTPLEEAARDLVRAREDARGDLMRARHRLSKLLLRHGRVYDGSAWTLAHDRWLTQQRFTARPLTLAFEESYAVVAQAKARRDALDQAIIELAAEPPFRDVVARLACLRGVSTLTALALTVELGDWRRFHPAALGPFLGLTPSEDSSGPRRRQGAITKTGNSHARWLLIEAAWHQRRPPRPSATLERRRAGQPALVRLQADHSAHRLHRRWQHLEQRGKPRTVIAVAVARELAAHCWTLATMS

SEQ ID NO: 102185 - protein, 431 aa, unidentified
MSAYPPNLMRGEVYMLKIVHNVCCGIDVHKKFVVATIGKTNEAGTTDYETREFSTFTETLIKLRDWLVSNGCREICMESTGKYWIPVFNILETECNVFVANPKYVKGIRGKKTDRRDSVWLCDLHKHGLVQNSFIPPWQIRQIRDLMRYRFKLTNMKSSEKNRIQNSLTVSNIMLSSVVTDTFGKSAMKIVNHLLQNPEDTSFDVEPLMHKSMKSSAEEVSKSIQGTLSKPQAEKMTVCLTHLDDIDKYKASIESAVLALSEPYWAQINLLLTVPGIKNVFSAIGIIGEIGVDMSVFLSARHLCSWAGLAPQNNESAGKKKSVRVSRAGAYIKPLLVQCAHAAVKSKECPYFRLRFEQISRRRGKKKAIIAIAHMLLNCIYHMLVKNESFNYDLYRIDNAPKQRVVPEMTKEQAIALLESLGVQVILPVAT

SEQ ID NO: 102186 - protein, 434 aa, unidentified
MTATDSSARPRILVAIDIAKAKHEVLVELPTGKRRKMIVHNQLNDFRQLAAYLKRLEGALEIALEPTADYHRNLAYFLKVQGFAVKLVSSIAVARTREALHNSWDKNDPKDAQVILHLLRNGNTQYFYDPVIEQTNDLQELSKTHFQVSLRKTRVQHSLLNHYLPLYFPEAERFLSTSRSSWFARLLFEFPTPQAITQLTENEFLERGSQLLRRKQSKAAVLRALYAKAQESVALPVPLESQAIATFRLTLAQHLELCRIRTELEETAHELLQDQLDYQILRSVPGVGPIIALTVLAEAGDLRRFGHERQFLKFCGLDLATSQSGAYRGRTQLSKRGNSRLRSALWMAARRATHMQENTFRQKFSRYLRADPTNTDLRRKAYTACTAKMARTIYGMIKHQQFYRAYREDAIPEPGGRTRSHGPLRQAASGGLTS

SEQ ID NO: 102187 - protein, 343 aa, unidentified
MGTLYYIGLDIHKRIIAYCIKAIDGRLIEQGKVAADRQSLAAWMEGLPGPWIGAMEATIFTGWVYDFLKPYAVSLKVAHPEMLKAITAAKKKNDRADAEKIADLLRVNLLPECHMLPEEIRDLRRILRYRNHLVRTAVKMQNKMSGLLMEVGAPYSKKRLHGKKYFHELIEGVEEIPSSVKELLQLSRSGYEMFRSFQKRLVDALRKDSLIRDRVERLMTIPGVGELTALTWVLEIGDPGRFPSIRDAVSYCGLCSAQRESAGKEQRGPISKKRNKHLQTMVIEAAKIAPQWNRQLAVIHERELQKGNRNRATLAVARKLVAYMMAVDRNQTFFKLPAETQAA

SEQ ID NO: 102188 - protein, 366 aa, unidentified
MKKTSTVRVNGNMIFKGQKLTIGLDLGDQWSCYCVLDEAGKIILKQKVATTPEAMEKAFAKIPRSLIALETGTHSPWVSRLLTELGYKVIVAHAQKVQLITKSSRKDDRHDARTLARLARIDPELLGPVRHRSAQAQIHLTVIRARAELVRARTALVNAARGLVKSYGQRLPKCGTQQVSRELGAGLPAELREVLEPLLKEIESLNERIQEYEVRVEKIAKESYPHVQLLKQVKGIGTQIALTYVLTLDDPHRFPKSREVGCFLGLRPGRRDSGESQPQMRISKEGDRYLRTMLVQGAHYILGPFGEDSDLRRWGLKLAARGGKSAKKRAVVAVARKLAVLLHRLWVSGEAYEPLRNSQRAMRAAA

SEQ ID NO: 102189 - protein, 453 aa, unidentified
MPKQRKTTIQARPMQRKHAAGIDIGATSIYVAVPVDRDPQPVRSFQTFTEDLHRLGDWLQRCRIKTVAMESTGVFWVPLFQILEQRGFEVCLVNAHHVKNVPGRKTDVSDCQWLQYLHSVGLLQASFRPAQQVCALRSVLRHRDSLVQTASTYAQRMQKALDQMNLQLHHVISDITGVSGIAILEGVLNGERDPRKLAGLRDYRIKASEETVAKSLVGDYRPEHLFTLRQSLEAWRYHRKLIADCDDEVQKHLAQFASKTDPKDKPLPRARKVSSSKVYSSKPDYDLRNEHYRILGVDLTEVPGINTVLVQTLLAEVGPDLSKFRSAAAFASWLGLCPDNRVSGGKILSVRTRHVQNRAALALRLAAHTLHHNQSALGHYYRRMRAKLGAPKAITATAHKLARVLYHLLTAGQSYEESVFAERETQHQQRSLFKLHARARALGYQLIPVAASA

SEQ ID NO: 102190 - protein, 355 aa, unidentified
MLSTKYIGMDVHKETASIAVLNSSGKLVMESILETKANTIIQFVQGLRGHLRVTLEEGTWTAWLYDLLRPHVTEVVVCDPRKNALLKVGNKSDRIDARKLAELLYLNRLKPVYHGEHGVRTLKELSRSYLAISGDQARVMTRLKALYRSWAIPCAGKQVYAGRYRSEWLGKITEAGVRRRAEFYYQQLDALHALRQQVRRELLAESGKHQASKLLCEIPAIGPIRAAQLIAILQTPHRFRTKRQLWAYGGLGIETHSSADHRYVDGQLQPSKRQVSLRGLNRNHNHELKNICKGAAIIAATKPGPLQQFYGALVAKAMRPEMARLTLARKIAAIILIVWKKGVCFDAQYLKPQTA

SEQ ID NO: 102191 - protein, 448 aa, unidentified
MSAKQKQRLDVVNPYACGIDIGSRSHFVAIGQGKEDVYEFGVYTEDHRQLITFLTTHQIKTIAMESTGNYWQTLFTSLQVAGFDVILVCGNQTKNVKGRKTDVQDCQWIQKLHSLGLLSNSFLPSEFVAQLRIYSRQRQKYIRVQSRLINQMQRDLRLMNIRLEIALRDITGKSGTAIIEAILKGERDAKQLASLVDYRVKKSHEEIAKSLEGNWDEGYLFVLSQHYREYAANLLLVQECEVAIEQILKEKMTTNEIDVSEFKGHLKAKKKNKNTPSIDFQKYSYQYFGGIDLFAIEGINQNTVLTLISEVGNDIDKFPTAKSFASWLHLSPNQKVSGGRVLSNKTKRGANPLSQALKSSANVIGNMKSGFLNNFFKRINYKKGRKEAIASTARKLAVIIWNMLRNYQPYKPQNTEVVEEKVRIKKIKEIRKLISKYEIQQNEVVLFN

SEQ ID NO: 102192 - protein, 349 aa, unidentified
MRIIGCHYHPGFQQIAFVETETGECGERRLQHREEAEKFYRDLAVQGVKVRVGMEASGHARWFERLLAELNFELWIGDAAEIRTKRVRKQKTDRQDAQLILRLMLKDDFPQIWVPSWENRDLRQLLWHRHRMVQARPRIMNQLQAVALNEGLRCKKRLWREAGREQLEAFPLAPWASRRRRDLLELLDRLSPTIAELTQTIEQEAEKCPEARRLRTHPGGGSLTALAFVLIIGRAERFQCGKQIASYLGLVPSEDSSGDRRRLGHISKQGNALLRFLLVEAAQVTVRSLPEWRSKYFHLAMRRGRKIAKVAMARKLAIQLFWMMRKGWDYEQVKRFGPHAGQPENRRAV

SEQ ID NO: 102193 - protein, 338 aa, unidentified
MEYGAIDLHTRKTLIRIVDADGTGVLDRTITTTREGLTKVFGERAPMRVLLETGTESEWVAQTIEACGHEVIVADPNYALMYGVQVRAVKTDRRDVAALAEACRLGIYRAAHRVSAAQRKVRRQLRVREQLIRMRTQAINLVRAQLRQEGHRLPSGASVTAASRCRRLPLPVAVAEALAPMVTLLEALAPLIKACDQAAETQAAADPVVRQLMTAPGVGPIVGLTYRAVLDDVTRFRDASSSTAFLGLVPREDSSGTRRRKGAITKRGPTSLRVLLIQAAWTIWRQRQGRAALHAWVERLAARRGRRIAVVALARRLARILYAMWRDGVAYRAVPIAA

SEQ ID NO: 102194 - protein, 349 aa, unidentified
MSAKFNSEIAVIGIDIGKNSFHVVGLDRRGAIVLRQKWSRGQVEVRLSNLPPCLIGMEACVGAHHLSRKLTSLGHDARLMPAKYVRPYSRGQKNDFRDAEAIAEAVQRPTMKFVATKTAEQLDLQALHRVRERLVSQRTAIINQIRAFLLERGVAVRQGLRFLRAELPRILARPCKALSPRMLRVIEDLAGDWRRLDERIDGLSTEIEVLARQDAGCERLMSVPGIGPIISSAIVAAIGGGDAFSKGRDFAAWLGLVPKQISTGDRTILGKISKRGNRYLRVLFVQAAWAVLIKPKSWARHGLKPWLEAAKKRLHHNVLAVALANKLARIAWSVLAHGRVFEATRIRAA

SEQ ID NO: 102195 - protein, 410 aa, unidentified
MKEHKRKVKANTVHVDHRNIVGIDIGKRKHAATAVTPKGVVIASLKSFENNRAGVELLERQVLLPATNRSKPMIAMEATGQYWNALHDELQRRGYSCVVLNPIQTNSRSNKQIRKAKTDPLDSVLIARTILAGDAQATLVPSESIYELRLLVRHRWRLIRVHGVVLRYGIGLLDRVFPECDGVFCKPFLSSMRVLSREIGLTPKTLVSKKAEVRKILEKASKKQLSSETIDDFLKRAESSIGTRQGDSVLNAQFHSIVDYLDFVEGQIQSINKELKDRMAAMDSPLMSLGIGAEIVATILAESGDITRFPGPGEYSAFCGLDPSVRDSGDTVRGISHISKRGSPLLRWALYVSAQTMVNKHRDFAKIYERHVNRHKGHRFALIAVAHKLARVIWRLAKDGRAFTKRPPKR

SEQ ID NO: 102196 - protein, 416 aa, unidentified
MDTKQRKYDLVKGVLVVGVDTGKRRHVAALRAPGRSVEKRVPFDNDRKGFQRLAEEVDQYRERMKLTRVVLGVEPTGHYWLPLAYWWEENQGPVVLVNPMHTKRAKELEDNSPLKNDPKDAAVISWLISDAKYRECHLPRGIFATLQNLVQQRARCGNDEGRLVNQLHQTVEHIFPELEQAFSSFRVKSCREMLLRYADPEVVAQMRAEDLGKQLREWSRGKLGEERAEKIIGLARESVGLREGKAAINSEVQRLVRRLALVGEERKDLEDKIKNCLPEVPGAALLLSVPDFGVWTVAAILAQTGDLRNYEHPDQVIKLAGLNLYEISSGEHKGRVRITKRGQGSLRKILYMAALRACRRRGTLHSYYESLVGRGLAPTSALVAIMRKLLRVTWTLVKKSQRFDRERLIPAPAKAA

SEQ ID NO: 102197 - protein, 401 aa, unidentified
MQDTQQHGAVDVFVGVDVGKGQHHAVALDRNGKRLYNKALPNDEIKLRALIAELKTHGRLLFVVDQPSTIGALPVAVARAEGVLVAYLPGLAMRRIADLHAGEAKTDARDAAIIAEAARSMPHTLRSLRLADEQLAELTMLCGFDDDLAAQVTQTSNRIRGLLTQIHPALERVLGPRLDHPAVLDLLERYPSPAALAGTSEKTLANRLTKLAPRMGKGLAAEIVQALREQAVTVPGTQAATIVMPRLAQQLAALRKQRDEVAAEVERLVLAHPLWPVLTSMPGVGVRTAARLLTEVAHKAFASAAHLAAYAGLAPVTRRSGSSIRGEHPSRRGNKVLKRALFLSAFAALRDPVSRAYYARKIQQGKRHNQALIALARRRCDVLFAMLRDGTIYQPRSAPNA

SEQ ID NO: 102198 - protein, 409 aa, unidentified
MNAVGIDVSKGKSMVAIMRPFGEVVASPYEVTHTDSELSKLANSLKSLNGETKVIMEYTGSYYYPIAYALHEAGLFVSAVHAKLIHDYGNNTIRRVKTDKVDAIKIASYGLSNWRKLPQYLPEEDIRRMLKAFSRQYSKYIKLKIMLKNNFISLTDQTFPGVNELFSSPPRKSDGHEKWMDFAFKFWHCECVCGLTVKAFTDRYRTWCKREGYKFSQDKADDIYASACGHWLALPKNDTTKLLITQAVGQINAVSENLAVIALEMKRLAESLPEYPVVSAFYGLGDILGPQLMAEIGDVYRYRNKGSLVCFAGLEAPPYQSGKFDSQNRTISKKGSPHLRKTLFQVMECYLINKPDDNQVYQFLDRKRAEGKHYYSYMTAGCAKFLRIYYARVKEYFSKLDSEQESSEV

SEQ ID NO: 102199 - protein, 419 aa, unidentified
MSCLTGPAGADPSDRKGTTIMTKEHWRVGGVDSHKDTIHVAVITGVGEPVADHEFATTVAGYRRAVAWLIEHGPLHAVGIEGTSSYGVGIATAVTQTGITVVEVNRTRPAERRKKGKTDRLDAYRAARSVLSGEATTDPKRASIEPLRALNVARRSAVKAQQASWRQIQALLVNAPAHLRDRYRNLAQGRLVATLANTRPDQTRDSGEADTLYALRSLARRHRTLTEEITLLDQRMLARSTAANPTLLALKGIGAVVGAQLLITAGDNPDRLRSSASFAALCGTAPIPVSSGRTDRHRLCRGGDRQANAALHHIVKVRLSYDPATRTYRDQRLAKGWTNAAVFRALKRAIAREVFQALTGHCTVPDYSDLRPARRAKNLTLTAAAEHLAVWPARIGELELGRRPNDDLAERYRRWLKAA

SEQ ID NO: 102200 - protein, 348 aa, unidentified
MRFYTNSHMHYCGIDLHAKTMYLCILDREGQILLHQNVRSRPEAFLAAVAPYREDLVVAVECMFTWYWLADLCRREGIAFVLGHALYMKAIHGAKAKNDKVDAFKIASLLRGGNLPQAYVYPPEMRATRDLLRRRLHLVRRRGNLLAHVQNTHHQYNLPAPTAKVAYRANRAGVAEAFAEPDARKSLEVDLQLIEHYDQILRELELHLVRQAKEHDPQAFHRLRSVPGIGKILALTILYEIHQIERFPRVQDFLSYARLVKCDHTSAGKRLGTGGAKIGNVHLKWAFSEAAALFLRNNPEGQKHLRRLAGRHGKAKALSILAAKLGRAVYFMLSKERVFDRERFLARS

SEQ ID NO: 102201 - protein, 357 aa, unidentified
MTQVKKLDFTGTIIFCGVDVHKKNWRVNIQDSEFELEDFSQNADVVLLHKHLNCKYPGATFKVCYEAGFSGFSAQRWLSNHGINCQVVNAADVATSDKEKRQKSDKIDARKLCEHLQSKKMKGIYVPLLRWEHGRSLVRARAKIVSNQTRCKNRIWQLLHFSGLVLPKDYEAGQYWSSHFIKELQAIDCGTDELKITLSLYIKDYQQTRTLLLEATRAIRKLCKQSGYQKEITLLRSIPGIGEINAAVILFELQDVNRFKSFDNLCSYVGLVPNTSDSGETKKTKGITNRSNHYLRTALVESSWSVVRKDPALLMMYKKYCRRMEKNKAIIRVAKHLLSRINYVLKNKKEYVTGVVG

SEQ ID NO: 102202 - protein, 308 aa, unidentified
MTTIYAGLDIAKLNLQLHLAGRVHDLPNTAAGHRRLRKLLATQPGVHVVCEATGGYERDVVAALHEASVPVSVLNPARVRHFARATGQRAKTDHIDATVLSAYGQALQPKPTAPRTQGEQQLAELVRRRVQVLEILVAQRQQAERLSLPALRRQAQSLVRRLERDLKQIEEKLKELRTQVAALDERVQKLEAITGVGAITALGVLAELPELGTLNRRQAAALAGLAPHPRESGQWHGRRSIGGGRAPVRRALYMAALVAARSNRPLKAFYQRLRAAGKPPKVALTAVMRKLIVLMNHILKNPNFALQN

SEQ ID NO: 102203 - protein, 354 aa, unidentified
MEKITTVGLDLAKQVMVVHGVDAAGRMMMRKALRRDQVLSWAAALPPCVMAMEACGGAHHWARELTRQGHTVRIIAAEFVQAFRKSGKNDANDAEAICTAARQANMRFVAMKTVEQQAALCVHRLRQGVVEERTALINRLRGLLTEFGVVAPLSPEKLRRDLARCLDPDDLRLPALVRELVRDQIVALDQLEARLSAYAEQIAAQAKQSEGAQRLQTIAGVGPTTASAFVATVGAPQEFRNGRQFAAWLGLTPKQHSTGGKTRLGRITKRGDAYLRTLLILGAKSALQAALRKPPERRHRLQQWIVAVLARIGYHKTLVAIANKHARIIWALLVKGEDFDVQRVTPKVLAVAAA

SEQ ID NO: 102204 - protein, 350 aa, unidentified
MAISTIAHCEPVRVIVGVDTHRDAHVAVALDHLGRRLDVLEIPTTAAGYQELVDWADAFGEIDTVGVEGTNSYGAGLTRALLLAGVAVVEVVRPNRQKRRLQGKSDPLDAENAARAVLSGEAVATPRRTNDDAVEMIRVLRVTRNTAMRARTQTINALRSLIVTAPEELRDQLRGRPTPVLIDVASRFHRNSNDLNAATKSAMRSLARRYRSLDEEITELDTTIGECTTQVAPQLVATFGVGTETASILLVTAGTNPNRLKSEAAFAMLCGVAPLPASSGQTNRYRLNRSGDRQANAALHRIALVRMRWHEPTQHYVQRRLTEGKTKREIIRCLKRYIAREIYNLLQPTT

SEQ ID NO: 102205 - protein, 416 aa, unidentified
MQKKDYVEFEQVVERGCGMDVHKETVVVTIRGKGIKTVTKSYSTFTSSLIKLKEWLNKHGITHVAMESTGVYWKPIFNVLGDDFEILLVNARHVKNVPGHKTDKRDSRWLAKLLLSGLLKGSFIPERPFRELRDLTRYKKKLTNQVAADKNRFLKILEDANIKLSMVLSDVFGVSGTKMINHILAFDKFRPEELMQYVHGRVKASREDIKEALTGYVTVHHKFMMRTILGNIAKIESTILEIEEHLDKVLEPYKLEKELLETIPGVGPDVAIGIIAEISTNMEHFPDHKHLASWAGMSPGSNESAGKNKSGRTTFGNRNLRGFLAEGGWAASRTKNTYFSAKYKSLVGRRGKKRAIIALGHKILIAAYFIIKDKVEFKELGEEYLNNFRRDKLIAYYKKQIEKLDPGLESDREVAA

SEQ ID NO: 102206 - protein, 343 aa, unidentified
MQAVTTIGLDIAKSVFQVHGIDAEGKVIIRRQLKRRYVLAFFQKLPPCLVGIEACATSHHWSRQLKALGHTVRLMPPAYVKPYVKRQKNDATDAEAICEAVTRANMRFVETKTPEQQSCLMLHRTRHLFIRQQTSVINAIRAHLAEFGIVAPVGRHGVEALLEVVADVSDNRVPEVARACLAALGAQLRRFKEQILEFDRRIMAWHRSNETSRRLDAIPGIGPVLATALVASVADPKAFRSGRNFSAWIGLVPKQHSSGGQDKLGSISKQGDRYLRSLFTAGALAVIRYAKIHGTQHRPWLTALLARRPTKVAAIALANKIARMAWALMAKGERYKEPVALAA

SEQ ID NO: 102207 - protein, 323 aa, unidentified
MVIVAGIDVSKATLDVSVSEGPVINFENSITGIRRLLKHMERESVTKAVCESTGGYERLVVSKLREATINVQVAHPTRVRAFARACGIEAKTDPLDAQVLSRYGLIFSDSNTARPESEPEREELRQLLSRRRQLMADRVRELNRLDKGLSTSTEKSTRRHLRWLDTEIERVDEEYKKLLKHSASLSDTAELYQTVPGVWPLTAATLIAYLPELGRWDGRVLTSLVGLAPWSRDSGKKRGNRSIRGGRGTVRRALYICAWVVLRIDGDLRDFYQRLRERGKPGKVAVIAVARKLLLQLNAVARRGTPWMKQHRNNCLPYQADPA

SEQ ID NO: 102208 - protein, 399 aa, unidentified
MFCGWDWGSTIHGVCLLDDDGVTIKTWMVKHTDAELAALFAELAQLGDPALVPVAIERGEGLVVGLIARAGHPVLMVEPAAFKASRPRWGAAGAKSDAADAFMLADYARTDGHRLRRVEPLAQATRELAALVRARTSLVEARTAASNQLWAILAEHWPGAALVFQKLTSQIALAFLADYPTPRSAARLGEGRMHQFCRRHSYRGVKSPAELFSRLRAAPVSADPIAEKVLEAIVRSSLAQIGLLNAEITGLERQLADALATHPKTALLKTLPRVATVSLAALIAEIGPLLERCENPEQVAAMCGAAPVTKASGKSRNVGFRYTANKPARVAITSFADNSRHCSAWAGDSYRRARARGARHPHAVRILARGWVRVIWACWTTDTPYDPSRHRGEQRLLAA

SEQ ID NO: 102209 - protein, 476 aa, unidentified
MAVDKMNRKQRKELTRQLQSPNPGLEVVHSRAAGIDVGNGAHYVAVRPDRDPEPVRRFECFTGDLYRLADWLQACEVATIAIQSTGVYWIPLYEILEERGFEVYLVNARHTKNLPGRKSDVQESQWLLKLHTYGLLHNSFQPTVEIRVARTYWRQRAEHVRGASTCVQRMQKVLTQMNVQLANVISDLSGLTGQTIVRAILAGELDPKKLAELSHPLIRASREEIAKSLEGNWRPELLFVLKQEMEMYDTYQRRIAECDKELEKHLKSFADNVPSKPIKEEPPSEPRRTSEKTKRPQRGNKAPGNRPQFDLHGELYRISGVDLTRIDGINVLVAQTMISEVGLDMSRWNTEAHFASWLGLCPDNRISGDKVLTKGTRHVVNRAATALRIAATTLLRSRTYLGAQYRRLRTKLGAPKAITAMAHKLARLVYRMLKYGQEYVDKGMQYYEERNRLQQLEHLKKKAAKLGLQIVEAQPA

SEQ ID NO: 102210 - protein, 338 aa, unidentified
MYYTGIDLHKFTSYLTTVDSSGSIVKQENLKNLAHNFIQYFNSIPGEHKTTVESTMTWYWLNDLLSSINIPLVLAHAKYVKAIAYAKVKTDKVDSHTLAQLLRMNYIPVAYKISNDKRLFRDALRARLKIVQRHTSVTNSMQLLLAKYNFDSPTQLLGIPKFQYDQLSEVEALLDEQMLELEKQLYPFLIPNDDIQRMLWIPGIGKMNAFTILLEVDDISRFADVKNFFSYCRLVPSARNSGGKSKQRSSKDGNKYLKVAFSDAAVHAVHYYPVIRKYHNSLLRKKNKNIAKTIIAKEIAEIVYHVLNNKTDFNNKFKGVELQHKKSLQWLRVVSPDA

SEQ ID NO: 102211 - protein, 482 aa, unidentified
MKSKPQKRTKKATDHPTQRHWHEMNRKQRRETMRKIQSEEISLEVVHPNAAGIDIGNESHYVAVPPSRDSQPVQRFGCTTAELKAMAAWLKQCGIRTVAMQSTGVYWIAVYDILEQAGLEVYLVNARDTKNLPGRKSDVQESQWLMKLHTYGLLRNSFRPAQQIRTMRTYWRQRNDLVQSTGRHIQRMQKALTQMNLQLANVLSDVSGVTGQAIIKAILGGERDPHKLAEFRDPRVKASEEQIAQSLEGNWQEELLFVLKQEQDGYEFCRKQMAECDRQLAQYLQQREDRSQGAPLPEEKRKTRLKKKKGNAPQFDLRQGLFRLSGTDLTRIDCIDVMTAMTVISEAGWDMSKWKTEDHFVSWLRLCPDNRISGDKIIGKGRLPTNNRVNIALKMAASSLRLNNTYLGAQFHRLRTRLGAPIAIKAMAAKLARLVYRMLRYGMKYVDRGAAFYELQNRQLQIKRLKSKAAKLGLQIVQAPAA

SEQ ID NO: 102212 - protein, 412 aa, unidentified
MEAIIERCCGIDVHKKNIVVCLAVGKPDEKPRTMIKTFSTMTCDLLVCRDWLVSEGCTHAAMESTGVYWKPIYNILEGSMEVILAHARDVKNVPGRKTDVKDCEWIADLMRHGLIKGSFIPPKPIRELRDLTRYREKLTQQRSSELNRLQKFLEDANIKLASVVSDINGVSAQDMIKHLIKDDMSSQEMAQLAKGTLRSKTEELEKALEGCLTDHHRIILRLALQMIASYDEAIAKLSGEIDNRMKPFKEESEKLQTIPGVKKKTAEKVIAEIGVDMSRFPSDAHLSSWAGISPGNNESAGKRRSGRAKPGNAWLKKVLAEAAWAASKTKATYLSARYRRLAARRGKKRAAVAVGHTILIMAYHIIKEQCTYKELGADYFDRLNEQFLVKRLTSRINALGYEVDIKKLPMVA

SEQ ID NO: 102213 - protein, 423 aa, unidentified
MTKYLSTATSAVLVAIDMSKHRQEVLIERPEGGRRRRMTVMATKDDYDRLVEELASMARPIVVGFEATGNYHRALAHKLLVAGFQLRLISSVALARTREALHNGWDKNDPKDAQVILHMLRIGATQVYVDPLEAGINDLQELSKTHEVISKAKTQTWHRILNHYLPLYFPEIARFAGNSRSDWFLALIERFPTPTCITSLGREAFVAQAWSLVGRKVSKARLINDIFETASSSMALPIAEDAVAISMFRMIIGQGRSLIRERNRIEQIAQSLLADHQDYQLLCKIPGIGPINALTILAEAGDLRRFRHHRQFLKFCGLDLATSQSGTFRGRTKLSKYGNARLRRTFWMAAQVASRQRDNSFRDKLGRYMAGNANDADRRRKAMTALTAKMARVAHAVIKTQTEYRPFVERPGTRWKDPSLQVP

SEQ ID NO: 102214 - protein, 400 aa, unidentified
MLSIGIDVSKGKSTVCGMKPGGEIGYTPFEVQHTRKGMSELVSLLRSSGEEVRAVLESTGSYHCPVVAALLENGIFVSVVNSLRMKRFCSQSIRKVKTDRIDAMQIALYGLAYWQELQPAKLPEDTYRELQLLARQYYQMTSLLIKAKVDFNAICDQVLPGMQELMNDHAGRRKLSDFVLRYHHTTHILEMGETRFRKDYCKWAEKKGYRNCERMAALIFATAQNGIPVLPNAPSTQIVITEAIRVLHTVEASRDAILTQMQALAKTLPEYSLVREMPCIGDTLAPRLIAEIGDVRRFHSKRALIAYAGIDAPPYQSGKFCANNRHISKRGNRYLRKTGYEVMQSYVMHKPANDPIFTFIEKKRSEGKCGKLAMVAGLNKFLRVYYGKVTELYRSLPAIE

SEQ ID NO: 102215 - protein, 433 aa, unidentified
MPGKTRVVVGGVDTHKDVHVAAVVDPTGKILDTAGFSATAAGYRELIAWMRGFGEVARVGVEGTGAYGAGLTRHLADEGVSVVEVNRPNRQARRRRGKSDTVDAEAAARAALNGEATVAPKTQGGVVESIRVLRVAFTSARSSRTRVALQIRDLIVTAPDELRAVLGPLGTDQRVARCARFHCAGDVGDPAVGTKLALRTLARRYEALSTEMAEMEAVLDELTARANPALRGAKGVGPDVAAILLTAAGDNPERLKSEAAFAAMCGASPVEASSGKTVRHRLNRGGNRQANHALWRIVMVRLTCDPATKAYAERRRAEGKSDREIVRCLKRYVAREVYRHLVAPEAVPASADLRIARVGAGLTLSAVVGELGTAIIRISRLERAVVQRLVRLCDVDALAQPTTTGRGMPNPTRGERGDLNPRPPGPQPGALTS

SEQ ID NO: 102216 - protein, 346 aa, unidentified
MVLIGCDYHPSWQQVCWLDQATGETGDEKLVHASGDAEKFYRRFSSSVRVGLEATGNCQWFLELLRKLGHEVWIGDAAKIRASDSRQQKHDKRDARLLLQLLMENRFPRIWTPTREQRDLRQLLIHRYKLVVLRARVKNELQHLAMNQGITRKRKLWSQAGEKVLRELPLAAWAGRRREDLFRIREMLNGQIDLLDDAVVEAAERNEKARLLMTQPGVGPITSLAFVLTMGDVNRFQRGKQVASYLGLIPREYSSGGRQRLGSISKQGNRFLRMLLVEAAQAAVRYDRGFRDEYLHRCHTKAKGVAKVAAARKLAIRLYWMLRTNIGYPEVVRVESSSRVALVGAS

SEQ ID NO: 102217 - protein, 384 aa, unidentified
MSKHNILFIGLDTHKEFNEVAYIEEQRGAQPIHHGRIPSSKVAIKKLIRQFESKYPNATLHFVYEAGPCGYWIYRLITSLGHCCYVVAPSLIPKKPGERIKTDKRDALKLAKHLKSEDLTPIYVPEPEDEAIRDLSRAREVAMKDLKDAKYQLKALLLRNNINYAGTANWSLKHLRWLTELVLPHPAQQIVLQEFIQTINERTPRLGRLDNELSHHIYQWRYYPVVKAIQAMRGVRLLVAAGVVAELGDLTRFDHPRKLMSYLGLVPSEHSSGGKRHIGAITKCGNGRARRLLVEGAHSYRHAANVSTELQKRQEGLPKQIVDIAWKAQLRLCKRYKKLINKGKHYNLVVTAIAREMIAYIWAIAKEVVLIPVNPRLRLARVSA

SEQ ID NO: 102218 - protein, 418 aa, unidentified
MQTELSGFTAIVGLDWADRKHDVCVQSMESGRRETYQVPHKVDKIDEWARSLYRRYGGPIAVALELSKGPIVSALQKYDFFVIFPIDPTTLANYRKTFTPSGAKDDPTDAQFALKLLLSHAEHFKALKPQSIEMRTLMTLVEHRRRLMNDRVRISNRLRNALKQYYPQALEWFDHIDTLMFCDFIKRWPSLAQAKRARKATLEKFFHEHHMYRKALLERRVTAIKSATPLTTDQAVIVPYRLQVLTLVAQLELALESIRTYDDEIAALAPQHPDYSLFNTLPGAGPSLAPRLLVAFGEQRDRFTSAAELQKYAGIAPVTRRSGQTTWIHWRWQCPTFLRQTFVEWAAQTINKSYWAGLYYYQQRAKGCSYQAAVRALAFKWIRILYRCWITRTPYDEARYLKALKDRGSTLLMTAQTA

SEQ ID NO: 102219 - protein, 398 aa, unidentified
MTRKNTLKSLPTDTEFRVVGLDLAKSDVSVAAIPVDDNTPSLVDRMTYADLLDWAGKISPTLFAMEPCNGYSLLCLQLENLGHEIKVISGSTVSMWINTHLSGQKTDLNDAIALARLAVSDAELTPIRHKSITEIRIQTVQAVRQQLMSQRSKSIVSFKALAQQWGIPCAAGHRNLKKLRESIEAKVDLITRPIANAMLFLLDAVKSLDRQIGQLNQTLQELVMSDERGRLLQSVLGVGTQISARVITVVGNIERFNSPRSLVAYVGVAPRNFITGHKNLTKKKHGNCPDLSHKGQGKISRRGDKLLRSLFIQGAACLYMQFCKDQLPECQLKRWILKQLARQKTYGKLIVSLAAKLIRIVWAVLTYGEKFNIQKAGMTRSMWSEMALETPLNKEVPA

SEQ ID NO: 102220 - protein, 373 aa, unidentified
MKYSTVYVGMDVHKETFSLCCYTNEREQAEYPQKVDGHYSKVINYIEAMRFHYGDDALFICGYEAGCLGFTLYHQLTDHNVKCVILAPTTMLQQKGRKKVKTDKRDAALIARCLAHHDYSPVHIPTEQDEQTKEYIRMRDDHKLALKKVKQQILSFCLRHNYRFDGTTNHWTQAHLKWLRSLKPVDLYAEILKEYLLTYDNLTDKLERLDKRIEELAADEAYQENVQKLSCFIGVKTVTALAVLTEVGDFKRFSSAQHFASYIGLTPGEDSSGGDQNRLGITKAGNRHVRCLLVEAAQSYSRGQIGFKSKALKARQNGNAPEVIAYADKANERLRRKYYRMVLRNNKKANVAKTAVTRELACFMWGMITGNIA

SEQ ID NO: 102221 - protein, 339 aa, unidentified
MEFKRIAIDTSKHVFTLHGVDEQEKPQLRRELKRSQMVPFFSKLSATEVVLEACGGSHHWARVLGALGHRVRLIPAQYVKPFVKRSKNDHNDAEAINEAASRPSMRSVAVKTVDQQAQCIILKHREMLVGQRTQAINALRGHAAEFGMVTAKGTSKVAALLALLIAENGIPAAAIAMFEQMGAHIETLNNRILDLDAQLAALHKENALSQSLSEIPGIGVVGAITATLTVDPANFASGRHFSAWIGLTPKEKSTGGKQRMGGISKAGNERLRQLLVVGAMSVIRFAKPGSKSASPWLLKLLERKPRKLAAVALANKMARIIWAMMAHGEAYRRQPMATA

SEQ ID NO: 102222 - protein, 361 aa, unidentified
MRIIGCDLHARQQTLAMLDTETGEVVNLTLMHEGNEVREFYSRLPRPVLVGIEATGSMHWFLNLMEELRIECRVGHPATIRAAEPRKQKHDRRDADLILKLLAENRFPAIWLPTKELLDLRALVLHRHQWVRIRTRIQNALQAIALANGLRRGPGLWSYDGQAKIAFLPLLPHASYRRSALQALYRKMEEEIENLTQQVAEQAEQRFGARRLMTHPGVGPVTALATDVFLGDPKRFLDGKALGSYVGLIPREYSSGERQRFGGVTKQGSPLLRFLWCEAGAHAVRHDPELKRFYRRKLMQKGLGKARVAVARKLGIRLWIMLRDEINYEEFCRRGQKQQSGVACAGVLEVANGANSHRPID

SEQ ID NO: 102223 - protein, 448 aa, unidentified
MGLIVGIDLGIKSDHDAIILRRETSRQVGRGVRFDNTCQGTDRLFEHIEKVRQPDEAVDFVIDSPGRAWVPLAAMLLSKGFRVYRPTADRFSHMRRAGAGKNKTNRIDALALARCLLSLPEDTEQVFLPAGIQTTLDQLARQRDRLVDYIRRRKQRIQDFTIAINPTLMKAMGDFALTQAGRAFLRAYLDPRKAVRLGCKRLTRFLDKQYSNTLKPEKAEAIFNACKDAAAFYEPVREQALMPVDVACLQEEMNWEIDTLERDETRLLNLEKQIEKINQKLDPSDSFISLPGIRHILAGGIRSCIGDIDRFPSLTKHRGFAGLYPNINGTGDDDPLKKGARMSKMASARYRRYLYLAAENAYKWDVECAAFYHKRRRHGHTHTQAVCAVANAKLLPRIHHMLKQIKQVEGTNQRRPQYVFRDLSGNPISKTEAKAIIQAKWGTVDYNT

SEQ ID NO: 102224 - protein, 413 aa, unidentified
MAREVYFEQVVAKGCGLDVHKETVVATVSGIAINTETRTFSTFTRSLTELREWLLSLGITHVSMESTGVYWKPVFNILEGHGMTILIVNARHIKYVPGHKTDKKDSAWICKLLLAGLLKGSFVPPMEIRNLRDMTRYRRKLEGAVTAEKNRMIRLLEDANIKLSTVISKVHGTSGTKIINAMLAGETDPEVLVKLCSLHIKTDREQIKLALEGKLTDHHKFMLRMIKKDIDQTEALMSDLDKEIEKQLQPYAEELSLIKQIPGVGEQTAGALIAEIGVDMAVFPDDKHLASWAGMSPGNNESAGKKRSGKTTHGNKSVKVVLTESAWAASRTKNTFLSSKYKRLAGRRGKKRAIVAVGHTILTIAYHLIKERKSFQELGATYIDEKKREGQIRYFHKRLQELGAENPEIKKSA

SEQ ID NO: 102225 - protein, 385 aa, unidentified
MTNTQYHSTIVPRDYDIFIGLDVDKKRMAVTCVDHGTLQKSLSLPYSGKQLLNYTAKHFPGQRVAFVYEAGPTGFGLHDELSAAQHPCLVVTPAMVPSAPRKRVKTNRLDSKKLALGLRGGDLQGIHVPAQSYRELRQLVQLRDTQAAQVRATKCRIKSLLLFEGIPFPEPHEKWTVAALQGLATLPCNATVRFKLDQLMEALQFHYQMAAKVQKEVRRFCNQDSELRQSVELLRTIPGVGTITATHAIARLGDWRLIKNERQIAGFLGLVSSEHSTGEKEKRGEITRIGDQRLRNKLIQCAWTAIKKDPELRAFYRRIYARHPPKVAARKAIVAVARKLTTRLYAVLKKQRPYEIRADLATAPLTVEETVGLRERLDMAQNDEL

SEQ ID NO: 102226 - protein, 404 aa, unidentified
MRTIALDVHKEKIVLCEVSKGKVVVRASGRRLDDLKNHIGPDTPGAKIAFEACRSAWFLHDCLEKWGHVPIILDTTRIRMIGVGQHRRKNDEIDAEAMARALEKGYVFAAHVLSPQRREVRRLLAIRFGFVSARTQYINIVRGLATSDGVDIASCDADDFVQHAREATWGSATRRQIDSTIAMIEQLTRSLHESTKMLHAVCSADPVIALLATAPFIGLIGASTIVSVIDDAHRFRDAHAVASYLGLVPSENTSNSSPRLGSITKAGNVWARVALVEAAWGILNKGDPADPLVAWGRMVAGRRNKCIAAVAIARRLAGILWAMWKYDRPYDPKHLATASSRGLCKQAKRVEADAELIAELAANDSHRAKKLKAAQDKLRGAFTARLTTSSPKRAAPAARGDATK

SEQ ID NO: 102227 - protein, 421 aa, unidentified
MTRRIAGIDIHKNVLMVVVATVLEKEIDGGMEQQIEYEGRRFGSGTQERGHLVAWLRERQAQEVVMESTAQYWKPVWMDLELHFPKLHLAQAHSNKAPKGRKNDFADARRLTRRMAAGELILSFVPDAEQRTWRTMTRGKQQLVRDRVRLQNQTEALLEEMRIKLSGVVSDLFGVSGRRILEALAGGETHPEKLADLGDDRLKCGREALVDALTGHSESMHLQILKLSMERLKLLDRQIEALEQMAVGALRKHAAAVTRLAGVPGFGVDSAQQVIAEVGSDAKSFPGAGELASWVGTIPGSDVSAEQNHSSRSPKGNKFLRRIFTQAAQAAVKTKGCHFQNVFRRLVPKLGYKGAIWAIAHRLCRLAWKILHDGVSYIEQAAETTPQAKKRRAQRLTQALRRLGFQVALTPIAPKAEVAQG

SEQ ID NO: 102228 - protein, 358 aa, unidentified
MFVAGIDSHTTYSVIAIVSNSGELVHKPVRVPNTESDRLVGLLEKHRPVEVVVETCPAWPWLFDLLERPGIHLVLAHAKRLRAIAGSNYKRDEVDAEVLARMRLAGLIPQIHPKSNEQREQPALLRNRAGLVRLRTATASRIHAQLHSVGLHMARVHVLTRNGYRWVRSEAWPVLGAERRLFIRMQWHLIAQFTPMIRALDKRIERLGREISAVTLLRTVSGIGPYRALLIATETLPIERFPTPAHLVSYAGLAPRFSQSGLRPIRHGSIPAGANRWLRGAFIRAVVSDIAHAPDSWLSRSYEQTRQRLSWQVARVATARRLARAVHAMLRTGEVWHDDPTYREKGELRRGHVATTTL

SEQ ID NO: 102229 - protein, 343 aa, unidentified
MNIATIGLDLAKHWFQIHGVDPRGQIVVRRRLRRSEVAPYFRSLPPCLVGMEACATAHHWARELAAFGHEVRLMPPGYVKAYVKRNKNDAADAEAICEAVTRPSMRFVPVKSAEQQAVLMLHRARNLLVRQRTMLVNALRAHMAEFGIIAPQGLRHVEDLVGQLAEEQQRLPELARSILRVIAEQLDDTKARVHEIEVRLARWHRDNAVSRLLATIPGIGIMGATAIAATVTDPTLFRSGREFAAWLGMTPRQNSSGGKERLGRTSKRGDKYIRCLLVAGAVAVLRHTRNRTTKDAAWVQGLLARRPAKVAAVALANKAARIAWALMTHGEAYRRKDAIGQAA

SEQ ID NO: 102230 - protein, 337 aa, unidentified
MAKLEVIGFDIGKEHFQVHGVDRVGAIVVRRKLRRSQVAEFFQLTEPCLVGLEAGGTSIYWARLLSSMGHTVKLMPAQYVKAYIKLNKNDANDAEAICEAVQRPSMRFVPIKSEVQQALQILHRARELLMRQRTMLINSLRGHLAEFGVIAPRGAAGAAMTLKSVDEISKASLPETARAALAIMVQQVRALSTAIDDCDERMRHWHENNALSQLLATTPGIGPLAATALFAAVGDGKGFHSGRELAAWIGLVPRQFSTGGKQTLGHITKRGNSYLRRLLYLGAQNVMISSKKGPLVAWIGRLRSRRPFRVAAIALANKLARIAWAVLTSGIAYQRAL

SEQ ID NO: 102231 - protein, 341 aa, unidentified
MRYIGLDVHKDNITACVLTSTGKPKFEKNFIKDSESWNLDELMEYGDKDGFCVLMESGTYAYPPYRFFKDRGVDVDAVHAQGLKVITQSDKKTDKRDAYTIARMLRLYKRGEIELPIAYMPTREQCELKDICRYREEITKKIGDETRRIKSHMTRNLEPLPKSYDNFQTKRARNYVRFNFSSDLTLMYRINELERLFAERDAVQKDVESRLPDSREVEILMTIPGVARQTAVQIMSMIVDIDRFEDAEKLCAYFGLVPRVRDSGGKEHHGRMTKTGDRMMRAIMERVTESHVRNCDSWITQYYKRKCSEMGTKKALITASRKMLSVIFAMLKSGSDFRLAA

SEQ ID NO: 102232 - protein, 320 aa, unidentified
MSQHSLRNEVSVGIDVSKDFLDVDVAPAHQPLRVPNTPEGHAALVKHLRSFKVDIIVVEATGCYELAVTAELLAAGLPVRVMNPRQIRDFARATGRLAKTDRIDAAVLADFGLAVQPEPRPLPDAQTQQMREKLARRRQLVEMITAETNRHHRATAEGVRRSIEVVLNVLKDELRRLDEDLDQAIRQSPAWREKVELLQSVPGIGPQNARTLAVELPELGQCSRQQIAALVGVAPMNRDSGQFRGRRTIRGGRGRVRHCLYMATLTATRWNPKIRHFYQRLLAAGKPKKLALVACMRKFLTILNAMLRERKPWTETAVTT

SEQ ID NO: 102233 - protein, 335 aa, unidentified
MIGLDIAKNVFEVHGRDAAGEVVLRRSLKRGQVEKFFARLPRAVIGLEACGSAHHWARVLGKLGHEVRLMPPVYVKPYVKRNKSDAIDAAACCEAMSRPAMRFVPVKTTQQQAALSLHRSRELLVRQRIQLGNALRALLSEFGIVAGKGRAGITHLIEALRGGTLDLPADAEVAAAALADQHTALEAAADALERRIVTQAKADPRARLLQSAPGVGPLTAHAVLATMPDPSIFVRSRDFAAWLGLTPRLSGTGGKIHTGPITKKGDHTLRRLLVLGATAWLRQVQARPDKASPWLRGLLARRPKKVVATAQAARTARILWAMLIHDQPYRASAAG

SEQ ID NO: 102234 - protein, 343 aa, unidentified
MQHYVGLDVSLKATAICVVDERGNINQEGMVTSDPEAIAKFVWAHAPNVARIGLETGATSTWLFCELQKMGLPVICIDARHAKAALKMQINKSDRNDAVGIARIMQCGWYRQVHVKHLDAHAIKALLVSRALLVRMKRDLENQIRGLLKTHGLVIGRAKRMTFLSRTMELIEGLPVLAETIEPLLKARQTIEQQIADLDRKVLRLARNFEQVRRFMTVPGVGPITALSYLATIDDPTRFKKSRNVGAYLGLTSRHYASGEIDWTGRISKCGDEMMRSYLYEAAGVLLTRVAKWSSIKAWGIRIARRSGMRKAKVAVARKLSVILHRMWIDGTEFNWSAKEAKT

SEQ ID NO: 102235 - protein, 400 aa, unidentified
MRCPCSTYVQREWAGGAWKATRPITRLTRWDEKAGLHGMRYAPNDQRARGAMERRPAVKKISTVAKNGNEIFKEHKLTIGLDLGDRSTHYCILNEAGEVLLEHSLPTTPKGIHQVFNGIPRSRIALETGAHSPWVSRQLTQLGHEVIVAHARNVRLIGESSRKDDQLDARTLARLARIDPSLLGPVQHRSAKAQIHLTVIRARAGLVGARTALVNAARGGLSQELRDALEPLLREVESLNERIREYDRRIEQLAKEVYPEVSLLKQVKGVGTLIALTYVLTVDDPHRFRRSRDLGCFLGLRPGRRNSGMSEPQLHISKEGDRYLRTMLVQGAHYILGPFGQDSDLRRWGLRLAERGGKNAKKRAIVAVARKLAVLLHKLWVSGEVYEPLRNNHKVVSAVA

SEQ ID NO: 102236 - protein, 386 aa, unidentified
MATPEKIRIEQNTLPQPTLFLAFELGQNKWKLGFTIGMAQQPRERTIPAGALEKLQQEIARAKQRFGLPEDARVVSCYEAGRDGFWLHRYLVAHGVQNHVIDSASIEVNRRQRRAKTDRLDVRKLLAMLLRHMAGEKKVWSVVRVPSVDEEDRRQLHRELTTAKQDRTRVINRIKGLLAGHGVQLTLQGDVDAQLDQVHQWDGSPLPSALRTRLKRAWQQVGFLTAHIQTLEAERRALWRRREDPVIAQVRQLFTLRGIGVNSAWLYVMEFFAWRDFQTPKQVGALAGLTPTPYQSGQSRRELGIAKAGNRHIRAMAIEIAWAWRRFQPDSALSQWYERRFGAGGVRLRKLGIVALARKLLIALWRFLKTGVLPEGAVLKTAAPGR

SEQ ID NO: 102237 - protein, 410 aa, unidentified
MDVTVERVAGIDVAKAEVVVALRVPGPNQTRAQEVRTYSAFTSSLASMADWLLSAGVELVVLESTGQYWKPVWNALVERNVDQMLVNARHVKMVPGRKTDVNDAAWLAELAEHGLLRGSFVPPPAIGRLRDLTRYRRRLIQTRTAERQRVEKVLEDAGIKLDVVASDLFGVSGTAMLRALVSGERDASVLADLAKRSMRKKIPLLEQALTGRFGEHHALMIGIALAHLDDLDHAIGRLDTQIAVETAPFAAAVAHLDTIPGVGLRSAEEMVAEIGTDMGVFPTAAHLASWAGMCPGNNASAGKRNSGRTRKANVWLKATLTECAWAAARSRRTYLAAQFWRFARRLGKKRAATAVGHSILIIAWHLLSRDCDYVELGGDYFATRDAEHNRRRALSQLQALGYQVTLEPAA

SEQ ID NO: 102238 - protein, 347 aa, unidentified
MLHVGLDLSRHRLDVHVLSEDGKTVAVDTWPPDADGLAHLARQVASLGGQANAVIESMNGARFVHDTLELHGWNVEIADALRVKGLAPLACKTDKIDAKVLAELSRRDLVPAIWLPSPSVRAERERARFRLHLVHHRVALKNRVHATLLAFGHPCPVSDLFGESGRQLLDRLAIPEPWAGTVNAPLRLIDELGGEIDACEQELRRLGADHPYVSLLQSMPGIAWVLAYTIASEIGDIARFESPKKLIGYTGLCPRVYQSGGTDRRGPIAKNGPTYLRWALIEASIHACRHPLYRPAYDRTKTRLGRSRGGKVARVELGRKLAEAMWHMLTKGERFAPARSQVDALVA

SEQ ID NO: 102239 - protein, 316 aa, unidentified
MAKAVCKITLGIDVSKDELLICAWHSEQITRLVNEVAAIEHYLDGLSGPVQIAIEPTSNYHLALLEHAHARGFAVYLINPRQLVHYRKAVNVRNKTDPADAWLLARYLAHESLALRAFNPPCAKAQRLWALLKRRGVAVRTRQTLKQSFREIRLPAKALFTEIQRVIARIDQQIRALVRELGWWADYQRCQSIPGIGTVNAAALLAVYHRGAFASSDAYVAFIGLDVRVRESGKFKGQRKLTKCGEAEIRRLLFCAAQGARSCRSFDNYLQRQLDKGLSKIAAKVILARKLARIAFALISKQQTFKNQEIIYSQSP

SEQ ID NO: 102240 - protein, 466 aa, unidentified
MRTIGLDLAVQTAHKAVVLDERGHFCTPILTIHTQPRELDQLLTRAREGAPSTEVQLVMEPTGMAWFPIAVYYARQAVPLYLVNSQEVADLRRYYQRHAKSDRIDARVLARLPLVNPDKLHRLVLPSATTFACQRACKQLDHFATQITAVKNRLQAIDRFAWPGLEEQVFADPFAPAARFFREHCYDPRQVLQLGAVAMRQQWEASALDADAGDAWVEPLLTLAQQVLTLYGTDGQYLDFEQLQAEVQRDQAWLMWLEQQHHTLRLRTVRPLYRAVHPSRNLETLKGVGQDSAAVYVSFIGDPRRFSSTRLFRGWIGMVPESEQSAESEAKGLHVSQAGPDLIKKYAYLDAEIARRYDPQIAAIYYDQMMRKGKHHKQAVCACATHLLDRVLAVLRADKPYEVRDGDGKALSGQQARELIVERYTVPEEVRRRTNKRNRRQQADQRAERRVRREPGQQPLLDERLS

SEQ ID NO: 102241 - protein, 329 aa, unidentified
MTTILGIDISKTKFDVVLLHQGKQRHKVFSNTEAGFGKLQAWLVKQQVCELHACMEVTGVYGENLAAYLHTAGYKVSLINPARIKAFGVSQLTRNKTDKVDAQVIAQFCQALVPAAWSPLPTEVRDLQALVRRYDALLQMRQQEVTRVQSGTHPQAVLASMQRVIEQLDQETKTLKAAIEEHVRQHPSLQQQQDLIASIPGIGTLTAAKILAEIPQLKHFSSARQAAAFAGLTPKQRVSGSSVRGRSHLSKMGSARVRKALYMPAVASVKWNPLIQALYERLHQRGKHSMAVLAAVMRKLLHLIYGVLKSGKPFSLDYGKHSAIAAASQ

SEQ ID NO: 102242 - protein, 417 aa, unidentified
MSQEKRYAAWIGVDWADEKHAVCEYAVATASRRGYTIEQRSEALGDWIAQLRSRYGSQPVAVVMEQARGGLIYALMGSDFITIYPVNPQSLAKFRKALYPSGAKSDPPDAELLEEMVRQNPDRFRAWDPGDEQTRSLQLLTEARRKFVDDMTALTNQITSALKTYYPQALDWAGELSSPQACAFLRKWPTLDALQKTRAFRIREFYEKYGRPQRELLNERIRVIEKAIPLTQDSAVVIAGAMAIQTLVGQIESLRVAIANYDAEIARIFQQHPDRAVFESFPGAGKVLAPRLAAAFGADRDRFQAALEIQELSGIAPVTERSGKTIWIHHRWACPKFLLQTFHEFADQARRLCAWSKLYYQQLRRRGKDHHAAVRALAYKWIRIMFRCWKDRKPYDDAVYMTSLRQRGSGLATVENL

SEQ ID NO: 102243 - protein, 386 aa, unidentified
MSRPSNILLPAINYDHTLVLSVELSNKSWVLAAQVPGLPRTKAQRTIEPNKNALLAAIDGYRARAAAVGYTVDRVITTYEAGWSGFWLARWLVAQGVEVHVVQPSSVPVDRRLRRAKSDGIDAELLLRTLLAWLRGEPRVCSMVPIPDEADEDARRCVRERTELLSDRVGLTNRIGAVLATLGVNDYNPLLQSRRRRLAELRTGLDQPIPPNALAKIERLLARLELVLAQIAELERERDEVAAADAPDRAGKMIQQLASLRGIGVQSATVLVREAFVRHFSNGKALGSYAGLTSTPYSSGGINREQGIGKAGNRRLRTVMVELAWLWQRYQPGAAQVAWFRDRVGSIGRRIRKVMVVALARKLLIALWRFVIDGVMPEGAVMKPSI

SEQ ID NO: 102244 - protein, 412 aa, unidentified
MRRVIGMDIHRTFAEVVVWEDGRLRPHGRVDMTRSGLEGFARGLTKEDEVVVEATGNAMAVVRVLSPYVARVIVADPLQVKAIAHARIKTDKIDAGVLAQLRAADFLPEVWVPDPETERRRRLVARRNQVVRHRTRVKNEIHAILAAHLVPPCPHAELFNGPGRAWLAGQVLPDDERATVERHLRELDRLGEDLEVLDRDIGSAVVDDPAVKRLLTIAGVNVTVAAGLAAAIGDVRRFPSPQKLVSYFGLNPRVRQSGLGLAQHGRISKIGRAHARALLVEAAWAAAKAPGPLHAFFVRIRARRGHQVAAVATARKMAVLVWHLLTKEADYLWARPALVAQKVRALELQAGRPAKKGNKRGAAYAYNVKELRDREKAIAEQAERAYEHLVASWRQKPGKRRTGAATAAEPSG

SEQ ID NO: 102245 - protein, 351 aa, unidentified
MMIIGCDYHPSDQQIAFVDQETGECSERRLNHSEGEAEKFYRDLQQRGVSVRVGMEATGHARWFERLMAELGFELWIGDPAEIKTRRVRKQKTDRQDAQLLLKLLLEDRFPRVWVPSPENRDLRQLLWHRHRLVQMRTRIMNQLQAVAMNEGIRRKKALWSKSGRVQLESFSLAPWSGRRRQDLLELLDRLNPTIDQLSAAIAQQAEKRPEVRRLMTHPGVGPLTALAFVLIIGSPERFRCGKQIGSYVGLIPCEDSSAGHQRLGHISKQGNSLLRFLLVEAAQIAVRHDPDWRRRFLHLAVRRERRIAKVAMARKLAVRLYWMWRKGWDYQQVLQFGSHAGQPVKAHGVQ

SEQ ID NO: 102246 - protein, 361 aa, unidentified
MKKPTQHLIAEVPRRSSRVGMTIGIDFGDVWSHYCTLNEDGEVVGRGRFRTSPSGVEKWFTDLPRVRIAMEAGTHSIWISEQLQELGHEVIVANVRELRAISHSDRKSDPVDAEKLARYARLDPKILCPIAHRTVAQQEALTLIRARNLIVRLRTAAVNAVRGLAKPCGYRLPASSTLCFAKRCVAVLPPGLAQALGPVLEQIAEMTKKIKHYDRLIKRLTETEYPETQALIQVYGVGQLTALTYVLTLGNKERFQRSRDVGCYLGLRPKRSQSGDRDPQLGITKAGNIYLRTLLVECANHVLGPHGRDSTLRQWGLHLASRGGKQSRNRAIVAVARKLAVLLHRIWITQEPYIPFYGVAA

SEQ ID NO: 102247 - protein, 417 aa, unidentified
MNTENYGALVTLDWGDTEHAFATEVAESPVETGKMPATPETLHGWLEEIHERTGGRPVAIALEGGKSAVIHALLEHPWLVIFPVHPATSERFRKAFTPSGAKDDIPDALVLLTILKQHRELLRPLKLDSPETRKVEGLVAARRQAVDRRTRIACELGSTLKTYYPQALELCGREPATDLMLDFLTRWPELKSLKAARPATLRTFYAAHNSRHADVVAERLALIAKARALTEDRAVIEPAMLEVKMLVDILRPLQKNIGLIEERIAEAFEAHPEADLFKGLPGAGPATAPRLLSAFGTDRSRYPDACSLQKYAGIAPVTQKSGHSLWIHWRWNAPKFLRQTFVEWAGQSIPKCAWAKAYYRQQRAAGKHHQATLRALAFKWIRILWRCWQDRVPYNEARYLASLQRQKSPLATRLAVT

SEQ ID NO: 102248 - protein, 349 aa, unidentified
MSEKPNNAIAVIGIDIGKNSFHVVGLDARGAIVLRQKWSRSQVEARFANMPPCLIGMEACVGAHHLSRKLQGFGHDARLMPAKYVRPYSKGQKNDFRDAEAIAEAVQRPTMKFVATKTADQLDLQALHRVRERLVSQRTGIINQIRAFLLERGIAVRQGQRFLRAELPRILATPSHVLSPRMVRVIEDLTGDWRRLDERIEGLSNEIEAIARQDIGCERLMSVPGVGPIISSAMVAAIGSGDASSKGRDFAAWLGLVPRQMSTGDRTILGKISKRGNRYLRVLFVQAAWVVLVKPKSWERHGLKPWIEAAKKRLHHNVLAIALANKLARIAWSVLARGRDFEASKLRVA

SEQ ID NO: 102249 - protein, 330 aa, unidentified
MTDVTLETAHAGHPLFVGVDMAKQELVWNIHTERATVSAPNDQAGFEQLVAALQARPVGLIVVEATGGLERALATYLVSRGLPVAVVNPRAARDFARGLGHLAKNDSIDARALAHYAQTLANKADQTGVRFTVPELQQEALQALVVRRAQLLNMRTAEKNRLGGAIRVLQTSIRAVIKTLDAQIDQIDRDIDHHLDTHFKEQARRLETIKGVGVTTCATLLAFMPELGQTAGKRIAKLVGLAPLNRDSGNSRGKREIWGGRSMVRSTLYMAMLSAVRYNPVLKAFHGRLIAAGKPKKVALVACAHKRIRIINAMSRTGQPWNEQLHTPAT

SEQ ID NO: 102250 - protein, 354 aa, unidentified
MEEYRRNGQEGKTVFVGVDLHRFKWHVTVRTEDQELFSGTIPGRWDALRRLLNRHGGDSIQVVYEAGYFGFWLHDRVVAYGADCIVTPPSLLPQEYGNRVKTDRRDSRKLAYLLAKGMLRRVWVPTLEERYHRQVVRRRRQLIGNRVRTQNRIKSELQFYGVELVGPRGPWPRVYVERLWSIRFGNRWMQESFGRLLEEYEFLTGQIAKQTQLVRELSETPCYRERVEILRSIPGIGLIAAMELLVELQDVGRFRRAEQLAAYVGLTPSQYSSAEKIRMGRITGAGKNGLRAILVEASWRLIAKDGVMRDKYERIKARSGAKRAIVAIARTLLLRSRRILLDGCPYGLGVIGSV

SEQ ID NO: 102251 - protein, 361 aa, unidentified
MSLSSWLVAGIVPGVERQPLKKLAVDESTLLKLLYRWREEAEKAGRRIERIAVAFEAGRDGFWLARWLKACGIEAYVIHASSIAVSREHRRAKTDRLDTELLKRSFLGWLRGERDHCKVVAIPTIKDEDAKRPNRERDSLIRERSRIVNRMKAAFVRLGIRGFNPKLKRAAGRLDGLRTPEGEPIPPNTSAELRRDMERRRLVSDQIRQIEEARLERIEQAPSDGPHAMVRLLARVIGVGIETADMLVHEVLSRNMRDRRAVARYAGLTGSPDESGRKRREKGLARSGNARVRRGMIQLAWRFLLHQKDSALTRWFRARTENARGIRKPMIVALARKLLIALWRLVREGVVPDGVVLRPAQ

SEQ ID NO: 102252 - protein, 398 aa, unidentified
MTRKNTLKSLPTDTEFRVVGLDLAKSDVSVAAIPVDDNTPSLVNRMTYADLLDWAGKISPTLFAMEPCNGYSLLCLQLENLGHEIKVISGWTVSMWINTHLSEQKTDLNDAIALARLAVSDAELTPIRHKSITEIRIQTVQAVRQQLMSQRSKSIVSFKALAQQWGIPCAAGHRNLKKLRESIEAKVDLITRPVANAMLFLLDAVKSLDRQIGQLNQTLQELVMSDERGRLLQSVLGVGTQISARVITVVGNIERFNSPRSLVAYVEVAPRNFITGHKNLTKKKHGNCPDLSHKGQGKISRRGDKLLRSLFIQGAACLYMQFCKDQLPECQLKRWILKQLASQKPYGKLIVSLAAKLIRIVWAVLTYGEKFNIQKAGMTRSMWSEMALETPLNKEVPA

SEQ ID NO: 102253 - protein, 401 aa, unidentified
MKRLSGGIDVGSESHHIIILDEEDNFLYNQKVAHKLNEFTESIKLFRKIEKQEGGKISFALEGKNGYSAPFDKILLDQGFTLYNVDNFKLKRFREAFAGEWRDDERDSLMLSKMLKLKEHINSEREKVFIKIEKPSLITESLKLLSRHQQTLISEKVRLISRLGKKLLEVCPQILELGKLKNKKIVTILTKYPDFSKYKRITLCSLLKIKGIGKKGVPFLLKRLNNIEYVPGLTNIYKTIILSYAQRILELQKEIEDIDKKLDEIGNQNREVNHLKTIPGVATKLASRFVGEIGDINRFPSEKQLAIYCGIACIDNNSGKVTKARVVYKANKICKQTLINMAGCSIRFSPQCKTYYLKKRTEGKNHNHALRCLARQLIKVIYRMLTEDREYIVRKELRKAA

SEQ ID NO: 102254 - protein, 607 aa, unidentified
MSTIASLDRIGVGIDTARYGHRVSFLRPDRKPAAKPLTVMENRAGYQALQDRLNQLHEQHPTAYFHVRIDAAGQYAVNLELFLRGLKLPMTISIGEPKRNKDYQKAHFPKRTTDDTESQAMARFAVIELPNATPAPSTPMILLREVAGRLQSKVKQTTQAINRLHNLLARVFPELATLTEDISVGWVLKLLDKYPTAERIAQAQIASLEKIPYLSVEQAHAVHQAAKQSVASLRGELAEALVRDLVNQLRLCQKAEQHLHQLLLEAFADLPASPHVQVLTITGIGEATAAALVAKIVDINRFATPNHLVSYFGVFPEESSSGVDKHGKPLPPGTLIMSPKGNDLVRFYLWNAARTAIQHNPAIRALYRRLRAKGKRGDVAFGHCMRKLLHLVYAVWKTDRPFDKEHFPWEGSSDTQPSATTPPSADAGTTPSANEEAVGHKRDLPAEEVVTTADSTLEPASPAVKPASQSAAHRPKVDFACVREHVTMEQVLQHLGYFASLRGRGRQRRGPCPVHSQPTAPERTFSVHLGKNAFQCFHAECAVKGNVLDLWAAIHRLPLYEAALDLAETFQVPRNREEEPVKGTSSPRTATAKTSAPAAATATDGAK

SEQ ID NO: 102255 - protein, 320 aa, unidentified
MRDGTLGKTVFHLVGVNARGEVVVRKKCSRLQLLRFTSNLVECLIGMEACAGSHFLGRALREQGHDVRLMPAQYVKPYVKTNKNDYIDAEAIAEAVTRPSMRFVPIKTDDQLDLQSLHRVRERWVGRRTAVINQIRGLLLERGITVSKGRRRIEESLPGILEDPDSKLSGALRLLLHELRQEMQYLHRQIEQSDKLIVRIAGELEACKRLLAIPGIGPVIATATIAAIGNGAAFKKGRGFAAWLGVVPGEYSTGGKQNLPETSRRGNKYLRKLFVQGAHAVLQKRGKLAPGLSTWLDRLTSLKRIQVTAVALANKMARMV

SEQ ID NO: 102256 - protein, 356 aa, unidentified
MTQVKSLDFSGQSIFCGIDVHKKSWSICLRNEDRELKTFSQDPDPILLSRHLNKYYPNAEISIVYEAGFCGYWPQQAFSKEGLNCRIIHPSDVPQREKDRRYKTDAVDCRKLATELSKGTLNFIHIPTELTIACRALVRGRQSLVKDQTRYKNRIQSFLDMHGMKVPQGYKNGTHFSNHFLQWLHNLPLDEKRKLALGSQLKVLATVRSEILSINKELRKLTQDPRYSQPIELLRSIPGIGIISAFIIISELEDIRRFRGFDQLASYVGFKPDIYASGEKQVTKGITQSCNHILRETLVECAWMAIGKDPSLTMAYTNYKQRMHYNKAILRIAKKLLNRIRYVLLNNTTYEIGIVE

SEQ ID NO: 102257 - protein, 339 aa, unidentified
MKVTTVGLDLAKNVFQVHGITDEGQVVFNKPLRRAQLLAFFERLDPCLIGMEACSASHHWARELSKFGHEVRLIPPIYVKPYVKRGKSDAVDAEAICEAVTRPTMRFVQVKSVEQQAMLSLHRMRELVVRQRTQLGNMLRGLLAEFGITLPQGLEKATGFARDVLGGSAPDIPEIGQDVIRVLCRQLLSTDYLVRWHDLRLQTVARADHRMKLLQTIPGVGPVTASAIVATIGSGRQFRNGREFAAWLGLTPRNNSSGGKERLGRITKMGDQYLRKLLVVGMTSRATQVKVRPDKGDPWLRQLLERKPFRLATIAMANKTARIIWAVLTREEAWSPRPA

SEQ ID NO: 102258 - protein, 341 aa, unidentified
MTIGIDLGDVWSHYCTLNEDGEVVDRGRFRTSPSGVEKWFTDLPRVRIAMEAGTHSIWISEQLQELGHEVIVANVRELRAISHSDRKSDPVDAEKLARYARLDPKILRPIAHRTVAQQEALTLIRARNLIVRLRTAAVNAVRGLAKPCGYRLPASSTLCFAKRCVAVLPPGLAQALGPVLEQIAEMTKKIKHYDRLIKRLTETEYPETQALIQVYGVGQLTALTYVLTLGNKERFQRSRDVGCYLGLRPKRSQSGDRDPQLGITKAGNIYLRTLLVECANHVLGPHGRDSTLRQWGLHLASRGGKQSRNRAIVAVARKLAVLLHRIWITQEPYIPFYGVAA

SEQ ID NO: 102259 - protein, 294 aa, unidentified
MKLMRVGVDLAKAVFQVHGVDRNEKVTLRRKLTRANWLEVLLDAVEPGCVIGMEACGGAHHWARALQAHGIAVKLIAPQFVKPYVKSNKNDANDAEAICEAMSRPNMRFVAVKTIEQQDIQAVHRVRFELSNQRKAKGNQIRGLVAEYGLVAPKELGHLRAAIPVWLEDAENGLSARFRHLLNGLWQDLLALDQRMTELDREIALIANADPVAKRLQQLRGVGPMIATALVATVGDAKQFANGRQMAASIGLTPRQNSSGGKERLLGISKRGDTYLRTLLIHGARSIVRTAPRP

SEQ ID NO: 102260 - protein, 490 aa, unidentified
MECIAIGIDISKGRCDVAILNQSGTLLAGSGGYDDNRRDHERLRTVLMSVREKWPEARIVAGMESTGGLEHNWMDFFRTEKRWEKFVFAHRLNPLAVKRYLESNLHREVNDASAARGIAQFVMEKYRERTPAPEVFDGKVAYYRVVRGQIQRRSQAIQRLQSLLPAVHPGLVQYCRLGVPDWVLAVIMRYPSVGKLARAKAEKLAELPHVDLKRAQSLIKEAQESVAALNDEGSAWAAASITDEIRDLDHRIAEGKERLKKLIEGDPRVAVLDSIPGIGTWSAMALALEIGDVSRFATVRSLIAFAGLDPRTSTSGDGVVKHGISHRGNANIRATLFMVAMVAKVHNPVIAAFYQRLTSGEKPKPGKVALTACMAKILRIAYALLCSGRTFDAAYEEHHAAQAAVTRQAGRSAEKAEAQLLQPEPAPARETQLDAPITKKEARRRRELAARHAGAPGPGKCEVMPQTGTGASAPVVSRPRAAAKRPLHRT

SEQ ID NO: 102261 - protein, 344 aa, unidentified
MEHYAGIDVSLEQSSVCVVDATGRIVREAKVASEPEALVRFFRQVGVPVTRIGLEAGPLSQWLHAGLSEAGLEAVLLETRHVKAALSAMVVKTDRKDARGIAQLLRMGWYRPVHRKSPDAQEVRALLVGRKLLQAKLRDVELSIRGILRGFGLKVGEISKGKFAARVRELIAGHEMLEAVIGAMLTAREGLQAEFMRLHRQMLGIVRGDEICRRLMTVPGVGALVAVTFKAAVDDPTRFRSSKAVGAHFGLTPKRYQSGETDVTGGISKVGDAMVRTALYEAANVILSRPTRFSGLKRWAMEVAKRRGLKRAKVALARKLASVLHRMWADGTDFRWGEQVQAAA

SEQ ID NO: 102262 - protein, 414 aa, unidentified
MLADQLDYVVGVDPHRDTHALAIVDVRTGAIVLEASVAASSSGYARALELAELHAPARRSFAIEGTGSFGAGLTRFLAGHDERVLEVGHLRRERRSGGKTDALDAIRAARSVLAQRRPAEPRAGGEREALRALMAAREGAVNAKRAGLCQLRDLLVTTPEPLRSELRPLTRAQLLHRLAAVRPTRHRDVELRGALQALRTVARRIQHLTAEERELAREIETLTQTLAPQLLDQAGVGPLAAAQLVISWSHPSRIRSEAAFARLAGCAPIPASSGQTIRYRLDRSGDRQLNRALHMILVTRRRTHPPTIAYINRRIRTAKAAAKQTAASSATSPAASTDCSSIHQRRLDSYRSIAGAADGCLPSVASGRSPKCARPGPGNWQCGSPTVDPSVRSRGQLHAPSVPRTSRRRRPRRA

SEQ ID NO: 102263 - protein, 410 aa, unidentified
MERVIERCCGLDVHKKTVAACIRVPGSHGERVQEVRTFGTTAAELLVLRDWLEAHGVTHVAMESTGVYWKPIFYVLEEAFICVLANAAQIAQVPGRKTDVKDCAWIAQLLEHGLIRGSFVPPAPIRDLRDLTRYRKGIIQERTRQANRLHKVLEDAGIKLASVASDVLGVSGRAMLQALVTGTRDPEMLADLARGNLRKKLPALRQALAGRFRPHHGFLVAQILAHLDYLDEAIDAVSQQLDVVRAPFADEVARLDTIHGVNKRTAEVIIAEIGVDMRVFPTAGHLASWAGLCPGNNESAGKHRSGKTRKGDPWLRAALVEAALAASTRSNRSAFGARYRRIMPHRGHKKAVVAVARAILETAYHLLARQTTYQEPGRDYYERRHAEHVRRRAIQALERQGYRVTLEPAA

SEQ ID NO: 102264 - protein, 341 aa, unidentified
MQITTIGLDIAKNVFQVHGIDAAEKVVVRKQLRRGQVMKFFAALQPCLVGMEACATAHYWARELTKLGHEVRLMPAKDVKAYVKRNKNDAVDAEAGCEAVRRPTMRFVEVKSAEQQGQLMQHRTRDLLLRQRTQVINALRAHLAELGIVAAQGREGLKELLAVIADEKDDRLPVDARASLIVLAAQLQALQTMIGSIEKRIIAQHRASEESKRVATVPGIGTLGASAITATVTDPSAFRSGRDFAAWIGLVPRQDSTGGKPKLGPISKQGDRYLRRILVVGAHSVLRRAKQNPEKYPWLTQLLARRPFKVVAIALANKMARIAWALLAKGGTYRAPLLAAV

SEQ ID NO: 102265 - protein, 397 aa, unidentified
MYIVGIDIAKRKHEAAVIDGEGTVIIKPFSFTNNCSGYNRLLAMLAKAKLPLDEVSFAMEATGHYWLALFTRLQKEGFRVQVINPVQTNSIRSFYIRQAKTDPRDALLIAEVIRFGHFSESTLHPENIYELRELCRGRHAIVSMQADVKRKVVALLDQVFPEYETAFTNMFSDTSMAILQTCPTPKELSEMPLEELCHLIEVSSHKRFRMAKAQELQALARNSFGFAMAGDVFSTMIRLYAKHLDFLKQQVREMDCKIAEIMETLDTPITTITGIGPTLGAYILSEIGDISRFSSAAKLAAYAGIDPTMRQSGEYNGVRNRMSKRGSPYLRHAIWLAASSAVLHDPALKLYFQKKRDEGKPYMASVGHACRKMVSIIYAVMRDNKAYTPCIPNEISA

SEQ ID NO: 102266 - protein, 348 aa, unidentified
MKITTSGIDVAKSVFQVHGVDEHGTVILRRQLRRSQLVLFFSKLESCLIGMEACASSHYWARKLAALGHTVRLMAPQFVKPYRKNDKNDGNDAEAICEAVQRPSMRFVPVKSPEQQAELAVHRIRRRLMGKRTALINQLRGLLAEYGLVLAQGANQVRNKLPALLEEASESLPALALELFGDLYEELVELEQRIAAYDRRIERLYRANPLCQRLGQQEGIGALTATAFVATVAHAAQFKNGRQCAAWLGLVPKQDSSGGKNRLLGISKRGDVYLRTLLVHGARSAMRHTPKRSDPKSRWVEQLRKRRGENIAAVALAAKHARILWALMVRGQSTAQPAELDWLEPPTV

SEQ ID NO: 102267 - protein, 345 aa, unidentified
MTESKIVAFDLAKRIVQACVIDGTGAVIAEERMGPERVLSFTARHPHATVALEACGGAHHWGRALERQGHRVLLLPPQRVKSYGDPACKDDRRDARAIAEAASRSYLRPVPVKSEGQQALQSLDRVAALLARQRTQTVNALHGHLSEFGITLPKGPHLLKRRFTELEASPRWRELPEELRAAMGELFAAFLALEERLGVLKARLAKGAKQSKLGRLLLEIPGIGPMTAVSLEAAIGDDPGRFASGRQFAAWLGLTPRVSASGERRQLARITKRGSARLRSLLVVCAQAMLRQYRQGRHGDPLACWARHLLARKRWNVAVVALANKLARIVWKVASSGAAYQARTA

SEQ ID NO: 102268 - protein, 323 aa, unidentified
MHTTSASLGIDVSKLSLDCTLLLRGKFKHRRFGNSKEGFEQLFTWLKKMGASELHACCEATGVYWEEMALAFHAQDIPISVVNPAQIKAFAESQLSRTKTDRQDAQLIAQFCAQQVPPVWTPPPPEERTLLAMVRDLQVLKELRVAEGNRLQTAHDSVKARIERHLEFLDQEIQALLQAIRDHIDRNDSLKRRRELLETIPGLGEKTIPWLLSFLGDGQRFETSKQTVAFVGLNPQHRQSGTSLHGKSHISKIGHADLRGALYMPAVVAYSKLPFFRPFVDRLRAAGKSAKVIIVALMRKLLVLAHAILKSGQPFNPNHAVNA

SEQ ID NO: 102269 - protein, 327 aa, unidentified
MKEYNKFFGVDVSKGTVDIVFTDKQSTIHERFLNNASGMDKLKDWLVLNKASPDDSLFCMEATGLYCFTLTHFLCSKNIDVWVEHSAAIKKATVMTRGKNDKLDAQRIALYATKNLDRLRLWRPMSNTLEKIKHLATLRERLVDAVKRLKVPIQEFEQVGNLPMAKLIYKSVKKTLSALDKDITSVESQIIQIVNEDENLKRLYRIITSVVGIGFVTAINLMIHTQGFTIMNDSRKLACYCGIAPFEYSSGTSIRGRTKVHHMANKKLKCNLHMASLSAVRLDPGLKIYYERKVAEGKNKLSVLNAVKNKLLARVVSCVNNERTYLR

SEQ ID NO: 102270 - protein, 414 aa, unidentified
MDVVHPRCAGLDVSKKDAKLCVRIQKPGQVRASSTVTTWGAMTAQILSLRDHLIAEEVTLVVMEATSDYWKPFFYVLDDGPFEVMLVNARHVKNLPGRKTDVSDATWLAQLGAHGLVRGSFVPPEPIRQLRDLTRTRTSITRERAREAQRLEKLLEDAGIKLSAVASDITGVSGRLMLEALVAGQRDPHVLADLAKRRMRSKIPELTEALTGRFGDHHAFLVKLHLDLIDQHTRAIDELNTRIEVMIAPFRAARDLMITIPGISALVADVVIAETGADMTRFPTAGHLASWAGTCPGSNESAGQVKSTRTRPGNPYLKGALGVAALSAARSKGTYFSAKYRRIASRRGPVKAVVALEHAMLIAIWNMLQTGALYTDPGDDFYTRRNPDKAKNRAVDQLRKMGYAVTLQPLAVAG

SEQ ID NO: 102271 - protein, 311 aa, unidentified
MEKATIIGVDLAKHVFQIHGAGADGSVAFRKKISRVKLLPFLSSQPRCVVAMEACAGAHGWARDIQAQGHEVRLIAPAYVKPFVKRQKNDMADAEAITEAAGRPTMRFVAVKSAEKQASGMVFKTRDLLVRQRTQTINALRGHLTEHGIIAPRGVFHIGRLATEVENVNSHLPVIVTELCTLLLRHIATLDEQIASLDRRIRDRAREDETARRLMSIPGVGPVCATALEALAPPPETFARGRDFAAWLGLTPRQNSSGGKVRLGSISRMGQRDLRRLLIIGATAVVRWAARRGAPAGSWLAGMMARKPGCL

SEQ ID NO: 102272 - protein, 405 aa, unidentified
MNAVGIDVSKGKSTVTIRRPGDVVIMPPCDIRHTQSSINALIEQIRNLDGETKVCMEHTGRYYEPVATWLSDAGIFVSAVNPILIREFGDDSLRTPKTDKADSKKIARYTLDRWAKLKQYGNMDKTRSQLKTMNRQFGFYMAQKTAMKNNLIALLDQTYPGSNDFFDSPARSDGRQKWVDFVYTYWHVDCVRCKSLSAFTEHYQNWCKRKGYNFSAEKAEKVYQASCDLIAVFPKNDSTKMLIRQAVTMLNTASETVEALRLKMDEAASTLPEYPVVMAMNGVGPTLGPQLIAEIGDVTRFTHRGALTAFAGVDPGKNDSGKHIQKSVPTTKKGSPNLRKTLFQIMDGLIKRSPIDDPVYAFMDKKRAQGKPYYVYMTAGANKFLRIYYGRVREYLTSLSEAEEI

SEQ ID NO: 102273 - protein, 440 aa, unidentified
MTGIDDVRLEQFHQLKKEIRGSEKYLIVGIDAAKEKHKAFFGTARGRTLIKNLAFDSTLEGFQKLLAYVERTKVQYSLTAVVFGIEPTGNYHKPLAEHLVKCGHMVVLEGGVAVKNNRQLLDGRWDKHDDKDAANVADLIAQGKCMFYEYPLMTLRNVRTLVALKRRLKKKEHSISLCIRNNLLAQYFPELDQHYGHSETLFVVRECLDPSEIAGKEYDAFYRTVAPGRTTLAKERRVGAIWRAAVNSIGCTMGEAASFEAQVMVDSLKQLRQTIKLVEDKLEDACLEFPEYTYLLSIPGFGPDVSSKVLGAIGDPYRFSSAKQVLKMSGLDLCANRSGKTSNSATPVISKQGKSDLRYALYQAALIASYMNKDFMAYFTNKLKDRAKEKRHPHKDARQAGCEAIGHRLDADEEERMLRFEIPKAGGPRRAQKSSMIHEI

SEQ ID NO: 102274 - protein, 398 aa, unidentified
MKSIIAVGIDVSKDKLDVSIYDGKNHITKIYTNKEEGIENLIRDSKEASKKIIDSELHFVMEATGTYHTKVLFTLTNNNYPVYVLNPLISKRYSEEQLRRTSTDKIASKLLAEYAYSSISSHLLGIQNERYNILVSSKFDKSNEDRLNLKILLRTLEGLKKTKTRILNQLEALNQYPDQLGIDAIKSLKSILEEIDKEIKNLENKISEIVKKEENRNLYEKLKTIPGIGDRAASAIIAYFGSFSSFDSPKQAPSYAGLTPLIKKSGKSVGAKEIYHISKIGSPYLRQILFMASLSAARYNDQCHILYERLLKEGKAKKLIYVAISCKLLRQTFGIIKNGRVYDPNFGLMDVEKGNNSNNNNDNESIKDNKVNIPFPKNPCLYNPLINKQGTSRCVTGF

SEQ ID NO: 102275 - protein, 398 aa, unidentified
MYAVGIDVSKNKSTVAIIKDGEIFVKPFSINHTDDGINLLVSKLSDIDPNDIRFVMEATGIYHFPLLIKLLDLKYFVSVENAFLLKKFFDVSLRKVKTDKLDAVKIAKYAYSNWFNLKPYCIQDSTYIDLQFLSRQYSQFMALKVKAKVNFNNLLGVIFPGFENRFNDDSNQYDFMLDVFEKFYHPSLITKLTEPEFLEQIIQINLDKKRGLRTTITKIAHELYILANSTLSARPVNESTQLICLTCVNNLRGLELATNDILTQMDSIASTLPEFNTVSAMSGVGKKTRARLIAEIGNIRKYNSASSLVASAGIDTPPYQSGNFSAIQTHITKRGNKHLRKCGYEIMRALKIVKPTNDSAVYEYILKKEAEGKNKNVCKIAGLNKFLRIYYARVSELY

SEQ ID NO: 102276 - protein, 424 aa, unidentified
MTFKTASQGLLKPLIMLLSKSLGAHVLMKQEISMTSHLSKTNYKTFVGIDWANDKHDLCVQDPSTGKREFSIIKHDVNEIDKWVKSIHKRFGSPIAVAVELTKGPIVYALQRYEFVVIVPINPTTLAKYRTAFKPSKAKDDPTDAELALELMLRYPNHFPPLNQQSVNMRKLMFLVEHRRKVVDDKQRVVNQIINAIKQYYPQANEWFCKKDTHIFCDFIARWPTLQQAKKAHKSTLVKFFNDHGIHNDTIVNHRVSLIKKAKPLTNDKAVIDSHTMLVIFYVERIVNSMKCIQEYNKSILKLMDKLPDAPIFTSLPGAGAALSSRLLAAFGEQRDRFKSAQEVQQYAGIAPVTERSGQKSWVHWRWQCSTFLRQTFIEWATHSRLKSYWANLYYLQQREKGSSHQAAIRALAFKWIRIVYKCW

SEQ ID NO: 102277 - protein, 401 aa, unidentified
MNAVGIDVSKGKSMVAIVRPFGEIVSTPFEIKHTTSDIKSLVKLIKSVDGESRIVMEHTGRYYEVLARQLSEANLFVSAINPKLIKDFDNDSLRKVKSDKADAVKIARYALDKWQNLKQYSVMDELRNQLKTMNRQFSFYMKHKTAMKNNLIGILDQTYPGVNAYFDSPARSDGSQKWVDFASTYWHVDCVRKMSQNAFINHYQNWCNRKKYNFSKSKAEEIYGKAKELVPVLPKDDVTKLIIKQAVDQLNIASETVESLRALMNETASKLPEYPIVMAMKGVGPSLGPQLMAEIGDVTRFTHKGAITAFAGVDPGVNESGTYEQKSVPTSKRGSSGLRKTLFQVMDVLIKTKPQDDPVYQFLDKKRAQGKPYYVYMTAGANKFLRIYYGRVKEYLASLPE

SEQ ID NO: 102278 - protein, 353 aa, unidentified
MSARYEERTEKRGKIYVGIDVHLRQWHVTVFEEQEELLSTPTPGSWEALRKLLERWQGQEMVVAYEAGFSGFWLHDALVSWGAECLVVPPTLIPREAGSRVKTDRRDSRKLAFLLSRGFLKRVWVPSQEERFDREVIRQRHRLVQDRRRLQCQLKALLHLYGLTIAVRPGRWSEEYIQRLWQVHLGHERSQESYLRLLERHDFVSRQLRDQTALVRDLATGERYDKSVRLLCAIPGIGVITAMELLTELGDLRRFGRADRLAAYVGLTPSQYSSGEHVRMGHITRSGKGSVRGMLVEAAWILIGKDVRMKQTYERIKQRAGGKRAIVAVARRLLLAVRQVLISGQPYQYQVPA

SEQ ID NO: 102279 - protein, 465 aa, unidentified
MPKNREKNNQADSEMEAEGLPIFRANVAGIDLGSKKHWVCAPKLGGQGREVESFGATTPELERMAAWLKERNVESVAMESTGVYWVAPQEVLERHALEVVLVDTRQLARVPGRKKKTDPVDCQWIQRLHSCGLLTGAFRPVEQVCMLRTLVRDKAILVAETGDWLRRMQKSLDQMNVRVHRAVSDIDGATGMAIVRAIVGGERDARQLAKLRDPHCHQSEEAIAEQLSGHWRADHLFTLEQTLKMYEAIQERIAAYEREIMRKLAEMEREECRGKEAPKLNNPNKAKAIKKRGEEPLRQALYRISGVDLTGIDAIGVETVQLVISEYGTDLSMFPTEKQFVSHITLAPHKPTSGGKPVKKRKKRGSASSRVAAGLRMAALSLRNSKTALGAHYRHMAARKGADVAVFALARKLATLIYRLLRWGQPYLDEGAAAYEKRYQEGRFKRLVASAKDLGYQLTPKAATA

SEQ ID NO: 102280 - protein, 342 aa, unidentified
MRIIRIGLDTSKHVFQVHGVDENETPALRRQLRRSEVAKFFAKLPPTRIGLEACGASHHWARRLRGLGHEVLLMPPQYIKPYVKRGKNDAIDAEAICEAMSRPTMRFVTVKSAENQAALMMLGVRDLLVKQRTMLINAIRGHAAEFGVTAAKGSKQVVELLQRLADDAEVPALAREMIGVMAAQLDAVEAKLKAIEARLMAWHRQNQTSQCLATIPGIGPIGGVSFALRVSDPKAFRSARHFAAWVGITPRENSTGGKQRLGKISREGDEGLRRLLVLGATAVIQQADKGRQGKKGRARPWLSKLLARKPKKVAAVALANKMARIIWAMMVSGETYRQPQEA

SEQ ID NO: 102281 - protein, 461 aa, unidentified
MARRKRKISLPSDALPPPLATANLHAAGIDVGAEEHWAAVPPCDDPQPVRRFGANTADLEAVADWLWDCGVTTVALESTGVYWIPLFELLETRGFQVLLVDPSKMPRNVRPKTDVHDCQWLQRLHTYGLLSACFRPEDQVVVLRSYLRQRATLLADAARDIQHMQKALTQMNIKLQHVVSDITGVTGLAIIRAILAGERDPTQLARLRAPRCKQDEAAIAAALQGTWRAEHLFALQQALERYAFQHRQLAACDARIASHLETFADQSHGAPLPPKRGQRRRHRNRPAFDPRERLHRMTGVDLTRIEGIDETTALIVISEIGLDMSKWPSEKHFTSWLGVSPQRRISGGKVLSSRTRPSTNRAAALRLAAASLHHSKSALGAYFRRMKSRLGTPKAITATAHKLARLIYSMLKHGTAYVTQGLEAYEQQYRARVVKNLSRKARELGYELVKPVEATSETSLA

SEQ ID NO: 102282 - protein, 347 aa, unidentified
MRFYKRQHKYYCGIDLHARKMYVCILDQTGKTKVHQNIKTDPEQFFERIFPYLDDVVVGVECVFCWYWLADFCAEHHIPFVLGHALYMKAIHGGKTKNDKIDSYKIALLLKGGNFPTAYPYPAKWRATRDLLRRRMYIAHRCGELVAHIQNTNTQYNLPAFSKKLSRKYNHEGVAERFEDPQVRKSVAVDLAMIDSLNQILKPLEWHIEKTAREHDYHTLYLLRSIPGVGQILALVILYEIHDVNRFPRVQDFSSYARLIRPVKESDGKWAGHSNKKIGNHHLKWAIKEAAILMLRDSTQAKSYLARYQRKYNKGKALGIFTHKLGRAIYFMLKNKEAFDMKRFFAQ

SEQ ID NO: 102283 - protein, 366 aa, unidentified
METTLEKFMGIDLHTNRFNYFLIDERGNTESKGFEINDHSIEQFFNHIDKNTYVMIESSTNSFKFYDLIKDHVKGAILANPRQLNLISFTDKKTDRIDAEKLARYLKMQLKAGEQLTEPVYVPEQRIRDLRSLLTSHRLLNRQITQVKNRIHALLKQNLIPTKRNFLSSKRCIAEIFLLPLDQPIRFQIQLLLDQLNHLEDVKQKIEVQTKISGSQYFKQIDILTSITGVSVFMAIALISDIADICRFANAKKLTSYLRSAPRVDSSNETVKIKGISKCGRKQSIMLLAQSCHHFSRANPRLNRLYNKYHGKKKASTVRMAILRNVIVEIFHMLNKNEYHWYRNEKTHLYKKNEYIRFLKSHDIFI

SEQ ID NO: 102284 - protein, 383 aa, unidentified
MRHGGILIEANDSEGEAMKKHTTINQSLSADVVACTTVAVDLAKRVFQLAGEDALGRVLLEDRIKSREAFQAFLHKLPASVTVLVETGPGAQAWGRLLQTQGNPVRILPAQLVANHRSGPKNDRNDALAILRAGRDIKISAVPLKSAAALAMQALHRARQGYVRRRTAVGNQMRGLLLEHGVALAQGETAVSQRVPRILEDATQPLPDLLRELIAELLGEWSQLGERVNVLTGRLETAAKEDETARRLMTGRGVGPIIATALLAKQTQPERFANARLFAAYFGLVPSQHSTGEKVRLGKMSKHGDAYLRSLTIQGAHAVLKQLRPDSQQPDDQRLQRWISRLGRKEAAVRLANRNLRILWVLLQNDQTYRRQPGAEPEAAMSH

SEQ ID NO: 102285 - protein, 339 aa, unidentified
MQISTIGVDLAKNVFQIHGVDKDGKVVISRQLRRKQVIEFFSNIPPCLVGMEACGTAHYWARELTRLGHTVRMMPPSYVKGSKSDAADAAAICEAVTRPSMRFVPIKTAEQQAALMLHRTRDLLIRQRTQLINALRAHLAELGLVAEKGREGVVELAAIISDERNSHALPPAMKQALQAILDQLTALQQQVGQLDRCIHAQHRASDVSRRVETVPGIGVIGATAITSTVTDPSVFKTGRDFAAWIGLVPRQYSTGGKEKLGGISKQGDRYLRRLLVIGATAVIQHARRHPEKHPWIMRLLAKKPAKLVAVAVANKMARIAWAIMAKGGTYRAPALAAAA

SEQ ID NO: 102286 - protein, 403 aa, unidentified
MNNVAGIDVSKGKSMVSVLRPFGEVVAKPFSIGHTGSELKELADYLKSLDGETRVVMEHTGRYYEPVARFLHDEGVFVSAVNPKLIKDYGNNTLRKVKTDKADSRKIARYGIDNWAELRQHTPMDTIRMQLKTLNRQQSLYAKTKTMMKNNLIALLDQTYPGVNALFDSPVREDGSQKWVDFATAFWHVDCVRNMSLTAFAERYRKWCKRHGYNFSQSKAVEVHTGAQDLIAMLPKDALTKTMVRQAIDALNAVSASLERLKAEMQALAAQLPEYPVVMAMHGVGDSLGPQLMAELGDVTRFTHRNAITAFAGVDPGADQSGTHEAKSTRVSKSGAPELRRALFLVMDCLLKTQPQDDPVYRFMDKKRAEGKPYLVYMTAGANKFLRIYYGRVKEYLASLEEN

SEQ ID NO: 102287 - protein, 407 aa, unidentified
MPLFVGIDVSSKNLDACLMDGMGETLATQTVTNNLPGASELRDAILQHAEADDTIQIAMEATSVYSWHPAMFFHEDPELKQRRTKVFTLNPKLVRNFKKAYAEMDKTDPKDAWVIADRLRFGRLPKSVIQSEQYLALQRLTRMRYHLIQSLTREQQVFLNHLFFKFSAFNLEVDTPVFGHAITEFLLEAYSLDEIAQIPLEDLAMYLQTKGHGRFSDPEDLAASIQKAARSSYRLSKCVEDSIDLVLGSSIEIIRHLKRQIKDLDKAIARVLDGIPNTLQTIPGIGPVSCAGILAEIGDIERFDDQAAIAKFAGLFWPRHQSGDFEADDKMLARTGNRYLRYYLVEAANLVRRHEPEYRAFYQKKYREVHKHSHKRALVLTARKLVRLIDALLRNDQIYAPKKKVTR

SEQ ID NO: 102288 - protein, 343 aa, unidentified
MTLKASFKWVNPQDINVLGLDVAKAKIDICFLSSNHSWFYQIANNSQAISQFSQELKALGLNATIPFVLESTGSFHLLLATLLKNDGWNVKEINPIITHQYIKHTVRGTKTDTTDAQLLAKIGLIEGDNLKSFDRDLNIIKLRMLISFLAHLETLIQQSKASFNALEKGLATLRLWESQELEKMKEVIKVLEQRAKGLEREILDIQLSPEAQEQVDCLDSIVGISPFTAKVAYALFAHNTFSSKRAMLAYVGLDPRLRQSGTKTWALRMSKRGHPYMRKRLFQSAFCSLQHSSYFKSIYDKHIQRWKHHFIAVLAVAKKMVYIMRALLKNNTQFDHNYYKLTS

SEQ ID NO: 102289 - protein, 345 aa, unidentified
MQSMYYIGLDVHKKSISYCAKDTSGQIHAEGAIPATRFDLDRWMKTLPQPWTAAMEATLFTGWIYDHLKPHAAALKVAHPLMLRAIAAAKKKNDRIDANKIADCLRCDFLPECYMASTEIRERRRTLRYRNLLVHQAVQLKNKISGLLMEAGVSYNKQKLHKVGYFKELLATNPDINEGLRPLLRLCRETLVRLQKTESALVRSLQRDSLLAERVQRLMTIPAVGPITALTWALEVGDVKRFSSIKKAISYCGLCGAEKSSADTVKRTPISKQRNKHLQSVLVEAAKMAPRLSPELALLYDREKQKGNANRATLAVARKLVAYLVAIDRSQRDFLVVEKENCAAA

SEQ ID NO: 102290 - protein, 410 aa, unidentified
MKHSKSKIKANTVCVDERNIVGIDIGKRKHAATAVSPKGATITKLKSFENNRNGVDQLERHVLIPATASHKPMIAMEATGQYWNALHDELQRRGYSCVVLNPIQTNARGRNQIRKTKTDLVDSGLIARTILSGDARWTIVPDEAMFELRLLVRHRWRLIRIHGIILRYAISLLDRVFPEFEGIFCKPFLPSIRQLIRDVGITPLALVGNRKMVQIVLERASRKRFSQEKIDLLLSRAKESIGTQQGDKTVNHQFRMIVDYLDFVEKQVKEINVALRKRMLETPCPITSLGIGPELAATILAESGDVTMFTGPEKYSAFCGLDPSEYKSGDSIQGRTPISKRGSPLLRWAMYTSAVTVCKKHHDFNRIFERHAHRGYRYAMIAVAHKLARVIWRLMKDNRKFSKRPPKRAT

SEQ ID NO: 102291 - protein, 341 aa, unidentified
MSIVGAFDVHRRQLTFEYLDTVTGELKRGRVMPADRPHLRAWLSRFAGQADVQFALEGCTGWRYVVEELHAAGITPHLAEPADTAALRGRKRHAKTDKTDTRHLRVHLMAGDLPECWIPPEHVLEARATARLYKDLVDERGGWHQRVAATLFHQGVPAAVSVAKPDGRAAAEQAFLSPAGRQATETGLRQIDRLTAELEPLRRQLDMLSRRQPGCAALRAAHFGIGAVTSVAIWAELGDVRRFGNSGDVVRHTGLDITVWSSDSKGPPGRLSRQGPPLLRWALYEAAKCAARPAAPDYGYYTAARDDRGGGRATLSVARKLARRCYHTLRELGEDALAPAA

SEQ ID NO: 102292 - protein, 416 aa, unidentified
MKYAQILVLAETPPGGLTAGIDWGSADHAVCVVDTAGQVRARFTVAHDRAGIGKLIAGLRAAGVSEAAIERSDGVLVEALLEAGLAVVVITSRQMKNLRSRYGSAGAKDDRFDAFVLADVLRTDRARLRPLAVDTPATTALRAAVRARRDLVAHRIAACNQLRAHLAVAFPGAVGLFAALDSPISLAFLARFGSQDVADQLSEDDLAAWLQAIPHRGKAAGPGQLRVRLAAAPRGVTGADGAALAPVTGALVATLDTLSAQVQALGAEIAAQLAAHPDAHIFTCLPRAGTVRAARLLAEIGDCRARFPDPESLAGLAGVAPVTRRSGKHISIGFRWAVNRQLRDAVCDFAGDSRHASPWAAALYDDARARGKDHPHAVRILARAWIYVIWRCWQSSTAYDPAKHHALQRVLEQQNA

SEQ ID NO: 102293 - protein, 427 aa, unidentified
MDVVFERCAGIDVHKRTVVVCRMAPDATGQVGAPTQTFGTTTGELLRLSDWLAEVGCTHVGLESTGEYWKPVYNLLEGAFTVWLLNAQYIKAVPGRKTDVKDAQWIAELLRHGLVRPSFIPPQPQRELRDLIRYRTTFVRERATLVNRVQKVLESTNLKLASVVSDVMGVSSRAILTALLAGETDPAILADLAKGQLRKKRPQLEQALRGEVRPHQSFVLTELLAQIDSLEETITRFDTQVREACAAQDDAAQVVALLDTIPGIAEGTAQLLVAEIGTDMSRFPSAAALASWAGLAPGNNESAGRQRTGRTRKGNVWLRTAMVQAAQAAAHVKQTALAARYRRIAARRGAKKAVIALAHTLLVIAYHVILRREPYHELGEDYLQQITPTMRAQRLVRQLSRLGFEVALPAPLSGDATPGEGTLLSGA

SEQ ID NO: 102294 - protein, 379 aa, unidentified
MSSLIKLAEIVDVVIGVDTHVDSHAAAAVDAATGGVLAQITVPATGEGYAELVEFADQVAEQHGALRAWAIEGTGSHGRGLTMHLHRLAERAEAGPEIIVELDRPVRAARRGGAKSDPLDAVRAAREALTRGGVTSPRGGGRDTTTAQVRQALAARLAVRRSAVQAAADAQRQLFSAVLTAPEPVRARLRGLGTNTLLAAAAKLSTTAAWARTDIETATAVATIKTLAKRAQYLHAEAIEHERHLKQLVSSWRPELLDELGVGPVVAAIVLCAWSHPGRIHSEAAFAKLAGTSPVEATSGKIHTRHRLNRYGDRRLNSALHTIAITRQRHHDPDTHAYIARRTTEGKNPREIRRCLKRYIARDLYRLLEHTTPTPLDQT

SEQ ID NO: 102295 - protein, 408 aa, unidentified
MLPEKPPPIRFIGLDIHKHYLIAIGVDADLNPVLGPQRVQLVNLEGWIRKRLTPSDAVVIEMTTNTWQVYDELEPYVHSVTVVHPPHVALITRSQVMTDKIAASHLARLHAKGLLVGVWVPPQEVRERRALTAQRRKMSRLATQAKNRLHSVLHRHHLLPPEGKLFSPDNRGWWLFLPISPLEKALLQTDLDTLDFAQSQIASLEQVLLTLAAQDERIPLLIQMPGISLINAMTILGAIGDITRFPEAKKLVGYAGLGARVHDSGLTTRSGKITKSGRRDLRAAMVEAAQTAANTHPHWKAELARLEPRLGRNKAIVAIARKLLIAVWHVLTFQVADRFAIPEQVANKLKNYSDRLRLERRSPGQSTADYVRTQLDRLGLGVQVTQLYRGKLKSPLRLPASTLRPAGD

SEQ ID NO: 102296 - protein, 418 aa, unidentified
MKKHSKSLQRSEPTLKRTKARGPVQRDAKEVLAEVLGKLTGKLDAPAVSTSAKENRRGNTVGPNRDRLTVGVDLGDRWSQYCILGLEGETLAEGQLRTTQEDVREFFQALTVARVVIEVGTHSAWMQDVITEWGHEVLVANPRLMEGSKRRKRKSDRIDANKLARLGRVDPQSLYPIRHRSREVRQDLVVLRARDALVSVRTELINTARGLVKSMGTRLPRCSSPSFAQKVKDAIPVEVGEALLPLVQLTETVNDCIARYDQKIEELGQKKYGHTTLLRQVKGVGPITSLAYVLTLEDPQRFSSSREVGPYLGLVPKQEDSGDSQPQLGISKAGDRMLRRLLVGSSQYLLGAFGPDTDLRRYGLRLCERGGKNAKKRAVVAVARKLAVLLHHLWVTGDVYEPLHHTGAETRTAQATAA

SEQ ID NO: 102297 - protein, 448 aa, unidentified
MLPLLHPGAAGIDIGAEEIFVAVPADRATDSVRSFGTFTRDLHQLADWLQECRVNTVAMESTGVYWIPLYQILERRGVQVFLVNAQHVKNVPGRKSDVSDCQWIQYLHSVGLLKASFRPADEICVIRSLWRHRESLVQMAAEHIMHMQKALSEMNLQLHHVLSDITGVSGLKILDAILAGDRDPMKLASLCNWRVRSSREVVSKSLEGDYREEHLFALRQSLAGYRFYQSLLAEVDVELEAKTRELPRAVDGSEEMPPRTKECAYHRAGNEPTFDLRSEMFRIAGVDLTNVPGISALTAYTILMEVGPDVSRFRNASAFASWLGLCPEKQVSGGKVLHSRSRKVKNRAAIALRLGAHSLYRAKNYLGQFHRRMKWRLGGPEAVTATAHKLARIVYHMLSTKEPYSEEVLATCDHLANKRAEMGSADKPPTWAISSSLFQKRVSSPLVP

SEQ ID NO: 102298 - protein, 428 aa, unidentified
MKNRNVQKLEAITPGTLVVGVDIAKETQWAQFVDYRGLELREALKFKNHKNGFDSILASIEAICKNRRLDNIIVGMEPTGHYWKPLANYLLKNKVNVVMVNPYHTKRAKELDDNSQTKSDKKDALTIARLVRDGRYYEVYMPQDIFAELRVLSNSRISLMKRSNALKNTITAVMDEYFPEIVTVFKNPLKGKAAMQILKSCPFPSLILELGIDGVLFEIKKAVKKTVGRKKAQQLVETAKNSIGVGYGLVSAKLKLGLMIEELELLTKQLEQLEKAMDKALADTGYGEIILSIPGIGVVTAASLLGEIGDPMRFDHPRQICKMAGYNLIEDSSGKNKSKTKISKRGRKNLRSVLYQMARTMVAVNAEMKELYQYLKTRPNNPLKKKQALVVISKKIVTVIYNLIKKQTGYQAELVFNKFRKNQMKQVA

SEQ ID NO: 102299 - protein, 441 aa, unidentified
MRQRKAVRNKEMKLPKHLEHINRHAAGIDIGSKSHFVAVPLGTDDQPVREFSTFTVDLEKLAEWLISCNVTTVAMESTGVYWIPVFEILESRGIEVKLVNARHVKNVPGRKSDVLDCQWLQQLHTYGLLHGAFRPADEVCTLRAYVRQRSTLVRSAASYIQRMQKALTQMNLQLHNVVTDITGATGMRIIKAILNGERNPDALAAMRDSRCKNTTATIARSLKGNYRPEHLFSLQQAVELYEFHQIKIADCDKQILDQLKNFDDNNEPPVDIEDALIRMSGVDLTSIDGIDTNTALKVLAEIGTDMSRWKSSKHFASWLGLSPGAKISGGKVLGSATKPVANKAAAALRMAAFTLFNSKSALGAYLRRQRARLGAPKAITATAHKMARLVYAMLSKGSAYVDAGQEYYEQRYRSRVIHNLKRKAQELGFELVTMQKAATVQ

SEQ ID NO: 102300 - protein, 390 aa, unidentified
MKKNTTAKSNQRAHVNAGRKRLRQMAAEQRLTIGLDLGDLYSRYCIMGEAGEIVSEGQLPTSKAGLDSLFAKMPSSRVALEVGTHSPWVSRHIAGLGHEVIVANPHKVKLISQSVRKNDRIDAQTLARLARADPQLLFPIRHRGEQAQADLAVIRARAELVETRTSLINCARGMAKPMGERLKKCDAEQVKESLADGLSEALQKVLRPLLKSVEAISQQIAVYDRQIEEISKRYPEIQLLKPVYGVGPVIALAFVLTLEDAQRFGHSRDVGPFLGLQPRQRESGKSQPELGISKAGDGLLRSLLVQGAHCILRKGAPESDLRDWGLEHLGRGGKNAKRRTVVAVARKLAVLLHVLWANGVVYDPLYNRKAAEAAKAKAEAQARAKGKAVA

SEQ ID NO: 102301 - protein, 409 aa, unidentified
MLFLGNDWAEAHHDIELVDESGRRLARRRLPEGVEGLAALHALIADHLDEDAEPDQVVVGIETDRGPWVQALIAAGYTVYAINPRQVARYRERHGTAGAKSDPGDAHVLAELVRLDRAHHRPVAGDSALAEHVKVLTRTHQSLIWSRQRQTNALRSMLREFYPAALAAFGEDLASREAMAILALAPSPEAGRRLSLSKIAAALRRAGRQRGIEASAERIQAALRAPQLQAHPGAISAYAAAVRSLVAVIDALVTQAGVLRAEVEAGFGRHPDAEIYLSQPGLGPILGARVLAEFGDDPTRYADAKGRKNYSGMAPITRASGLRRVVLARPTRNRRLANALYWQAFAALSSSRGARAHYDAQRARGASHHQALRSLSNRLVGILHGCLRHHTGYDEAIAWHTSSSNEAAA

SEQ ID NO: 102302 - protein, 347 aa, unidentified
MRFYNRPHTYYCGIDLHVKTMYVCILDGAGQVLVHRNVPSTPEAFLEIVGPYREGLVVAAECMFTWYWLADLCAAEGITFVLGHALAMKAIHGGKAKNDKIDSHKIAVVLRGGMLPQAYVYPAGMRSTRDLIRRRLHLGRKRGQLLAHIQNTRAQYNLPVFGRKLAYRANRDGVVEHFPDPSVQKSIEVDVALIDQYDALVNDLELTIVREAKRHDADAFHRLRSVPGIGKVLALTILYEIHDITRFDRVQEFASYARLIKWTKESGGKKLGTGGAKMGNVHLKWAFSEAAVTFLRHNRDGQKMRARLEKKHGKGKALSILAHKIGRAVFYMLSRGTVCSMETFLAA

SEQ ID NO: 102303 - protein, 334 aa, unidentified
MLNKSSIVLYKLLIMVKSSNFFGIDISKNVFDVVRNGEKHFQFSNNITGFKQFIKLLNRDSHCIMEATGVYHYALVMYLYQNEIAVSVVNPLVIKRFMQMHLRTVKTDKADAKQISLYGMQNELILWEPPASYILDSKDIFELTSLYIKQRTMLKNRLHSFGSKSTQRMIINELKKAIRHLDKAIKKLETELEKIIKTYHQKMYTNLKSIPGLGSKTVLYMILITDGFQKFESAKQLCCYAGLSPTQRISGTSIRGKSRISKQGNSKLRNLLFMCSFNACKSNRACKSLYERLVNKGKSKKLALIAVENKLIKQAFSIAKSGIPYDENYVLKLT

SEQ ID NO: 102304 - protein, 438 aa, unidentified
MSESIAAAALQAVAAYIGIDWADQKHDVVLRSASQPNKVEHRIIEHKLEALMEWVGQLQQRFGGQGKILVCLEQSRGALIYHLMGYEFFELYPVNPLQLARYRETFSPGGAKDDRADAELLCELLYCHRDRLRAWKADSELTRKLVFFTEGRREAVDQRARLSQAIKSQLKVYFPLALELLNNDTTTALAADLLLRWSSLEALQKQSAHTLRKFFYGHNCRGEAKMLERLQLVQEAQPLTQDAAVIEPAALRVQMLACQLKHLLPDIARYDKKIAELFAVHPDRFLFENLPGAGLALAPRLAVAFGSDPNRWESAQEIATLLGIAPTRRASGKKTGKKASVHFRQACPKFHRQSFHEFAGCSIRYCPWADAHYQTQRARGKGHHTAVRSVAFKWIRICFACWKQRIPYDPQRYLQALQRKRLTNPTYQFAVDFAEVGG

SEQ ID NO: 102305 - protein, 410 aa, unidentified
MDSAYNVAGIDVHKKMVAVVVADAHARELTFTCRRFGTTVGELRQLRAWLQEQGVQEATMESTAQYWKPVWMALEGACRLHLAQARSNRGPRGRKTDSRDAKRLVSRLLSGDLVLSFVPDAEQRGWRTLTRTKHQLTRDRVRLQSQLESLLEECQIKLSSLVSDLLGVSGRRILRALADGETDPARLAALGDRRLHASPAALQDALSGSMPPLHRQLLTLALARLELIETQMDTMDQLIATALTAHQAAITHLAELPGIGVEAAQQIIAEIGPTAAAFPSAGQLASWGGVCPGRQESAGESHSNRSAKGNRTLRWLLTQLARAAVRKEGTHLQRVFRRLSARMNHNKAIWAIAHRLCRLIWKVLHEEVRYVEHGAAPTPLLLKRRRQRLVSQLRHLGYQVTLTPVASTVA

SEQ ID NO: 102306 - protein, 336 aa, unidentified
MKKSYFLGIDVAKNSCNFALLKANRSCLWSGQFDNNSSSIQRWLALLEARKLDWRKILFGFEATGVYSQTLLLCLQQLDLAACQLNPAQVRYFGVSVNRRTKNDPADARLIARFLLERQPVATRSLNPTEHQLKALVHEREALSIDLARERNRAEKHALSPFQAHPRLVEQRAERLLQLKAWIKDLDAALQELIDSDPALCAKAGLLCSIPGIAFWTAAKILSQLAGKEFQSAHQLALYSGLTPKENQSGLLKGKTTLCKIGNAFLRKALFMPASVAARCREPIKRWAQQIQSRRPELSKLAIRCALMHKLIRIIFGVLKNQTPFNPNLACFSNAA

SEQ ID NO: 102307 - protein, 445 aa, unidentified
MGQRTVGIDLAIRGDHVARIFDDGRPHAKPIRFRLTSDSLSGLVARLRDDLPADSTITAVMEPTGMSWFPVARWLEQAGIKAIRVKGQRVRALRRYLREHTKTDAADAYVLGAIPLFGGAPVDPVYVPNADRHALQRLTRQRERLEEELTTIKRRLIDLVRWACPSIQAVLPDFRTNLALAVLHDLFNPAMVIKARRTTLLGFIAKHASGNHPHSGPFADKLVDGLKAAAVETRRLHGTAVNFEHLQLEVAIEIDRMRLLESQLGRLVLEIEELYSKLHPSDALRTIPGIGDALAPLVLGVLHEARRFAGLHQLRGFCGLFPRTNSSGGADQPGQSITQSGNNRIKRALYLAADAARRIDPGLAEVYWRLMVRKGHHHKQALCAVATRLVNRIGKVLRTGEPYELRDGAGKSISIAEGRTIVAEQFSIPAEIRNARRRHRTESIA

SEQ ID NO: 102308 - protein, 367 aa, unidentified
MKKGSTVAAKQSKNFSEQKLTIGLDLGDRSSWYCMLNEAGEVLLEQRLGTTPKAMREAFGTMPRCRIALETGMHSPWVSRLLSNCGHEVIVAHARSVRLIGESRKKDDRLDARTLARLARIDPELLCPVKHRSAQAQADLTVIRARAGLVRARTALVNTARGLAKSYGERLRGCNVRNMNPEKAEGLSPELQAALEPLLAAIEALSERIHEYNQQIEKVAKEGYPQVARLEQVKGVGTLIALTYLLTLEDPHRFRKSRDVGCYLGLQPGRRNSGQSEPQLHISKEGDPYLRTLLVQGAHHILGPFGVDSDLRRWGLELAERGGKNGKKRAVIATARKLAVLLHRLWVSGEVYEPLRNSQQRPLAVAA

SEQ ID NO: 102309 - protein, 387 aa, unidentified
MIYYIGIDISKYKHDFCIISNTGEVIVENSSFQNNKKGFQDLLEILKPYDKSHVRIAFEATGHYSMNLELFLIDKEYSFMKVNPILIKEFLKTRSLRRTKTDKADALNIAQYLMSVPYKPNSSLLYHTYSLKSLCRTREQLIKERSKFAVLLTNELDKSFPELKPFFNNMISSTLLFILDKYKNASHIALMKDYDSIRCISHGRFTYAKFIKLKELAKNTVGYHDNNTDLLISTYVSLYNYFNDKIIPIDKQISTIIKELNPSILSIPGIGEITAASIIAEYGDISCFSSSAKMLAFAGLEPSIIESGTLESNGKMVKHGSGHLRYVLMNASLTLLKFNSTFYDFYYKKRSEGKCHRIALSHVCKKLVRLIYTLETKHVDFNPSLLK

SEQ ID NO: 102310 - protein, 316 aa, unidentified
MPALCYLGIDISKASLEWATTLDPARSRSVPNDEAGWAELAAQCKNLAPALIVVEATGGYEIGIATALTVAGWPVAVANPRQVRDFAKAAGLLAKTDALDAHVLALFAARMQPTPRPLLDDLQADLSALVTRRRQLLEMLMAERNRLGLARTSVHVGLKRHIRWLEARLRETERDITTRIELSPIWRVRDRVLRSVPGIGPNTSARLLASLPELGRLTHRQIAKLVGVAPLNADSGNRHGHRVIWGGRAPVRQTLYMATLVAIRHNTVLAAFYQRLRRAGKAPKVALIAAMHKLLTIINAMVKTETIWTPPPCLDH

SEQ ID NO: 102311 - protein, 344 aa, unidentified
MEHFAGIDVSLKDSSICVVDAAGRIVREAKVASEPEALVAWFRGLGFAVTRIGLEAGPLSQWLHAGLSGAGFEAVLLETRHVKAALSAMVVKTDRKDARGIAQLLRMGWFRPVHRKSADAQEVRALLVGRKLLQGKLRDVELSIRGILRGFGLKVGEISKGRFAARIRELVAGHEMLETVTGAMLAAREALLAEFMRLHRRMLVTVRADAVCRRLMTVPGVGALVAVTFKTAVDDPGRFSSSKAVGAHFGLTPKKYQSGETDVTGGVSKVGDAMVRTALYEAANVLLSRTTRFCVLKAWALAVARRRGAKRAKVALARKLGTVLHRMWVDGSTFRWSKEAPAAA

SEQ ID NO: 102312 - protein, 338 aa, unidentified
MSYYVGIDLHSDNNFIGIIDKKDCRILSKKLPNDLDMVLNTLKPFKRKIKGVVIESTYNWYWLVDGLMDKKYNVHLANPSQMQQYSGMKYTDDKWDSFWLAHMLRLGILPEGYIYPKDIRPIRDLLRKRMMLVQHRTAYILSLQSMVNRNTGRKLKASETKKLGEEELNIMFSDKHLVMSAQSNCNVMEFLNGQINAIEKAVIKEVKLRYPFEKLLTVPGIGDILGITIMLESGDMNRFQAVSNYSSYCRCVSSKKVSNGKKKGENNKKNGNKYLAWAYVETANFMRRYSPEARSWHQRKVSKTNQIVATKALSNKIARACYFIIKDQTDFDSKMLFK

SEQ ID NO: 102313 - protein, 322 aa, unidentified
MGRTIVGVDVAKAKFDAARLDDKGHFRHKGFDNNTAGFIAFLAWLAGFGDEKPWICMEATGAYSIPLAEFLAGQGYRVSVVNPAKIHAFAKSELSRAKTDKADAKLIARWAARMGADLPVWNPPPRTVRELQALLRRVEDLLEIRQMERNRLDTADPAIAGSLQAVLDALEKELDTVRERIKSLIGSDPGLKQRRDLLQSIPGIGPAVSAYLLVALSPHYGFANAKQAVAHAGLAPKIQQSGKWVGKTRIAKTGDPALRKVLYMPALTAWQHNPVIRDFCERLKANGKNGKAIVCAAMRKLIHIAFAILQSGKPFDPKFALA

SEQ ID NO: 102314 - protein, 357 aa, unidentified
MSRICAASLRWKPEQSQGPVLSRARIYKEGNPTVQTNSNAKSWVGIDVSKDWVDIVVLLEERRVMQRRCQRSPQELEQLAQELLPYAPQGVVLEATGGLETAVITSLAAAGLAVMRINPKRVRDFARAHGLLAKTDALDAYALALFGARMQPAVRAFPEAERQQLAAWLMRQQQLILQRAGERTRLHQVSEPKLRKSLERVIDFLGKELARLEQQLQGWIQKSATWKQQETLLRTAPGVGPKTALVLLAQLPELGQLNRHQIASLAGLAPFACDSGHWRGRRRIRAGRSGVRAALYMASWTVVRTPGSLKLFYHRLVATGKPKQLALIAVARKLLLALNEMVRSNTPWRSAAEPISA

SEQ ID NO: 102315 - protein, 338 aa, unidentified
MIYVGIDLHRKWSQLAALDAAGEPQLSRRIPSRPEDFFRVFGELGPEPMEVAFEATFGCSWLIDLLADAGIPAHMAHPLATKAIAAGRVKNDTVDARTLAYLLRANLLPEAWIAPVEAREARRLVRMRASLVRLNSRLKCQVHALLADYGVNPELTDVFGLQCRRIMAELRLPEVSQHRLEVNLRLIDGLAQEVKAADQMLKQRFGRDARALRLLPIPGVGLFTSATVVAEVWDVSRFPSPRRLGSWAGLTPREHSSGEHTRRGHISKQGSRWLRWVLVEAATHALPDPQLREVYLRVRRGSKDRDQIARVAVAHRLLTLCYYALRDEAGCRAYPVSA

SEQ ID NO: 102316 - protein, 462 aa, unidentified
MKHKAKSQAMHSGLAVVNPNAAAIDIGATMHVAAVGADRASDPVRSFGTFTADLHRLADWFAECGVKTVVMESTSVYWIPIFELLDERGFEVILVNARDAKHVPGRKTDVSDAQWLQRLHSYGLLRASFRPKGEIVELRAYLRQRERLLDTAASHIQHMQKAMTEMNLQLHHVVSDITGATGMRIIRAIIAGERDPAVLASMRDTRCHSSAEVIEKALTGHYRGEHLFVLEQALALYDVYQQKVAACDIRIESVLKELSSIRGRKEDARADGSGSPRRRSRQSNGPDFDVGKALHSLLGKDLTRIHGMGPYLALKLVSECGDDLSAWPSAKHFTSWLCLAPSNKISGGKVLSSRTRRSGSRAASLLRLAAVTIGRTDTALGAFYRRLSARAGKSKAVTATARKIATLFYNALRHGMDYVDPGASYYETRYRERVVKNLHRRAKAFGFILQAAEMPAAEQAVS

SEQ ID NO: 102317 - protein, 414 aa, unidentified
MQQIEQSTEQVIIGVDPHKLSATIEVVDEREKLLGSGRFSTDRAGYTAMLTYAKAWPERVWGVEGANGAGRPLAQRLLEAGENVVDVPAKLAARVRLFDTGHNRKTDALDAHSIASVAVRTTTLRVLQLDGELEALRMLTDRREALTRRRVQTVNRLQALLAELLPGQAKKDITPLQAKAMLASVRPRDLAGKTRRRIAAEELAELVAVDAKIKKATAELKVIVVARGSRLMDLRGVGPVVAARVLADVGDVTRFADRNRFASWTGTAPLDASSGEQNRHRLSRAGNRRVNHMIHIAAISQIRLDTDGRAYYRRKRAEGKKPLEAIRSLKRRISDAVYRQLVADAERAALTNAPAPDGTGPGGHCGASQESSAVDLPPHIDASDQPLPGPAKPTLQPSQPTRKTSRPRSPQTTG

SEQ ID NO: 102318 - protein, 398 aa, unidentified
MTESSDYESVQVFIGVDVGKDTHHAVAINRSGKRLFDKALPNDENKLRSLISDLKQHGQILLVVDQPATIGALPVAVARSEGVLVGYLPGLAMRRIADLHAGEAKTDARDAAIIAEAARTLPHALRTLKLADEQIAELSMLCGFDDDLAAQTTQASNRIRGLLTQIHPALERVLGPRLDHPAVLDLLQRYPSPEKLASLGEKKLAAQLCKLAPRLGKRLAADIAQALAEQTVVVPGTNAAAVVLPRLALQLITLRKQRDEVALAVEQRVLAHPLYPVLTSMPGVGVRAAARLLTEVACRAFASVAHLAAYAGLAPVTRRSGSSIRGEHPSRRGNKALKRALFLSAFAALRDPLSRAYYTRKMSQGKRHNQALIALARRRCDVLFAMMRDGTFYTPQAS

SEQ ID NO: 102319 - protein, 355 aa, unidentified
MNQEKYIGMDVHAATISAAVKNAEGKLLMECVLETKAATILEFIQGLRGTLALTFEEGTLAAWLHDLLKPHVSRLVVCDPRKNALMRDGNQNDRVDARNLAELLRTNQVKAVYHGKHGTRALKELGRSYLTLTKDSTRVMNRIKSVYRSWAIPCAGTSVYSRRHRAEWLAKLVEPGVRIRAEHLYQQLDSLEPVRQAARGELLRESRKHAAVKLLRQIPAIGPIRSALLVALLQTPHRFRTKRQLWAYSGFAVQTYDSGEYRFVRGKLQRNRERITVRGLNHNHNHDLKNLLKGAAISAIERPGPLQDFYAALVEKGMRPSMARLTLARKIAAITLTMWKKGVSFDPQQLQRQAA

SEQ ID NO: 102320 - protein, 370 aa, unidentified
MLDTTTFVGLDVHARSIKAVSLDVMTGEVRSATFGYDAGAVAEWVRSVDPKARCVYESGVTGFDLQKRLSGLGVGCAVGAVSKMIKPSADRRRKNDRNDAEFLARMLSVGNVVEVWVPDDECEAARDLTRALEDARDDLSRSKQRLSKFLLRHGLVFDERTPTGRRKGNWTRAHWSWIESIRFAEGADNDVLAYYVDAVRRAAEEKARLEGLVEAEARKPRWRRRVDSLRCLKGVDTATAADLVFEAGEFSRFRNARSFAAWVGLTPSEHSSGESDRRGAITKAGNKHLRKALVEAAWHYLTCSARPKDLARGQDPDRVARRHAAKGVRRLVERREALLARGVHNNKANVATARELACWVWAVGLMAEEA

SEQ ID NO: 102321 - protein, 385 aa, unidentified
MDEEANPTTKNGDKHMKTTDKYVGLDVHKDTTLVATADGGRVGEVRSYGTIPSDLQALGKVLGKLSAEGARLHVVYEAGPTGFVVYRRLQQMGIDCIVVAPSKTPQPKGVRMKTDRRDALQLARLHRAGELTGINVPDEVDESVRDLTRARADAVHDLTRAKQRLKAFLLRQGYRYPGNANWSEAHQRYLRKLTLPLPALRSVLEEQLLAIDQVTERVKRLNELIEVQVPQWRYYPAVQAVMCLRGFQLNAATVIVAELGDVRRFAHPKNLMAFLGLVPKENSTGDTRRLGSITKAGNAQARWCLIEAIQKALTPPKVSARLSLRQEGQPAAYKELSWKIQVRLHKRGWHLLHRGVMKAKVNVALARELAGFLWDLLRQVPAPEA

SEQ ID NO: 102322 - protein, 426 aa, unidentified
MNCKQNQRINQVEEISLVVGIDIGSTNHYARAFDWRGIELARIFKFSNSGEGFERLSHWMQGICERHDKTKIIVGIEPTGHYWFTLGRYLREQGIKLVMVNPYAVKQTKELDDNDPSKNDGKDPKVIAKLVLDGRYSIPYVPTGAYADLRILSADRQRIVKEIAQIKNRFARWFAIYFPEYSEVFGSYESKSSMLLLRVASTPESIVALGVEGICRIWREAKIRSVGVKRAATLYETARRSIGHDQGMSAAKLEMALLLEDYEAKAKQLAFVMAALKSTLQEIPEAEKLLAIKGIGIISVAGFLAEVGDLRRFESPKQIQKLAGLSLRENSSGKHKGQTTISRRGRSKLRQILFNTMIPLLATNEEFRSLHRYFTTRTVNPLKKKQSAVALCGKLIRVFYAIMVHGVEYDGKKMLSDIHRNETVVA

SEQ ID NO: 102323 - protein, 353 aa, unidentified
MSARYEERSEKRSKIYVGIDVHLRQWHVTVCLDQEELLSIPTPGSWEALRKLLERWQGQEMVVAYEAGFSGFWLHDALVSWGAECLVVPPTLIPRESGSRVKTDRRDSRKLAFLLSRGFLKRVWVPSPEERFDREVIRQRHRLVQDRRRLQCQLKALLHLYGLTIEVRPGRWSDEYIQRLWQVRLGHERSQESYRRLLERHDFVSRQLHDQTVLVRELATGEHYDKSVRLLCAIPGIGVITAMELLTELGDLRRFGRADRLAAYVGLTPSQYSSGEHVRMGHITRSGKGSVRGMLVEAAWILIGKDVRMKQTYERIKQRAGGKRAIVAVARRLLLAVRQVLISGQPYQYQVPA

SEQ ID NO: 102324 - protein, 337 aa, unidentified
MTIIRIGLDTAKHVFQVHGVDENEQTVVRRQLRRGEMEKFFGKLAPTRIGLEACGASHYWARLLRGLGHEVVLLPPQYIKPYVKRGKNDANDAEAICEAMSRPGMRFVPIKSAESQAELMLLGVRNLLIKQRTTVINAIRGHAAEFGVIAAKGPVKVAELLQQAHTAEASVPELALNMLRLLAAQLDALDVKLKLIETRLMASHRENPLSQCLASQPGIGPIGALSFALRVTDPKSYRSGRHFAAWLGLTPKDHSSGGRHRQGRISRQGNEALRKLVVLGATAVIRFARPGHASPWLLNLLARKPKKLAAIALANKMARTLWAMMVSGEVYRRPLPA

SEQ ID NO: 102325 - protein, 318 aa, unidentified
MEQSRQPPIVGLDVSKAWLDGYLPATGKRLRVSNDPGGIDRLLRSLAHPGGSLVVMEASGGYERAAHQALVARGVPAAIVNPKRVRDFARGMGLEAKTDRVDARLIARYGAVMRPAATPVPDPARAELREILACRRQLIDEITVRKQQLEHLQSPSLRARTTKVLALLRQEERELSKLLRQQIQADAALAADFALLTSMPGCGPILAATLLAEMPELGVLDRRKIAALAGLAPVAKDSGLRGNRRVIKGGRGQVRRALYMAAVASLRIRASPLKQRYAQLVAKGKAPKLALTALMRKMLVTLNAMLKTRQAWKDQRET

SEQ ID NO: 102326 - protein, 403 aa, unidentified
MNSVGIDISKGRSTIAVMRPFGEVVISPFEVRHTGSELSKLARQLKSLDGETRVVMEATGNYHAPVAKLLHDAGLYVSVVNAKLVHDYGNNELRRVKTDRKDAVKLANYGLDRWLTLPRYIPEEDTRLLLKNCYRQYRQYSKVQTVLKNNLISLLDTVFPNVNRLFSRPAREDGSEKWVDFVAEFWHCRCVSEKSEKAFANKYQRWCRKYGYNFNEAKAHTIHAEASGHIGVMPMSETTKLLVEQAVAQLRATSTALAALKHEMQSLASQLPEYPVVMDLFGVGPTLGPQLIAEIGDVRRFYSKKALVAYAGLDAPPNDSGDVTGRHKSMSKIGASSLRRTLFLVMSVYLQTAPLDEPVYQFMDRKRAEGKPYRVYMMASANKFLRIYYATIKAYLESLEHTA

SEQ ID NO: 102327 - protein, 349 aa, unidentified
MKLIGIDIGKNKHFFCVMDQQTGEIISQPVSFSNDKEGFDFLVQKIKSYPKDSILIGMEDTGHYHFALLKYLLDLQYTVALINPKTTDFNRKMQGGITKNDKLDTINICDVLDTPERKKQYRITKVNSFDLYEQKQLTRHHHNLKEEENVYKNRLQKCIDIVFPEFNKLFNSKYGIVYMNILKMFGSAENIANTDIRTIRKCFEIEGRGNRISLTPERLKECARSSIGISSSAEVIQIKHLTAQIELIEERLTEIDKKIEEFSIQNNSPILSIPGISHFSGTSILAELGDISNYSKPSQIIKFAGVAPLHYESSQFNAQHTSITKKGSKYLRKTLYQIILPVIKHNPFK

SEQ ID NO: 102328 - protein, 426 aa, unidentified
MKEHIDYLSTLFVGIDIASRIHVISALDFNQDFFIKMKPFENTKEGAGIVEKMIADVLADNHQFKYVVIGMESTGFYGVHLANYLSTSELLAPFSVRVYCLNPKEVKNYKKSFNDIGKNDGIDSFVIADFARVGRIAIKPWRGSQYLALQRLTRHRMHITECITREKTYMLNNIYLKFSEYALLRNGEHPFSNKYGATAEAILTEFTTNEDIVNSSIEELVEFINSKSKGRIAYPEETAKIVQAAARNSYRLDKCLYEPLTISIASSFNCISSFEKELKAIDKAILQTVQGLNPEEYTVLNSIPGIGKVYSAGILAEIGSIKAFQNANQLAKYCGIVWNDNDSGDFESEDSRMSKAGNRYLRYYIIEATGSVINHCPEYKAFYQKKYAETRNHQHKRALALTSRKFIRLLFGLLDKGQLYSPEKGR

SEQ ID NO: 102329 - protein, 341 aa, unidentified
MARYIGIDLHRNRFTVCTLAENGRAYPRTVAIRHLASFAKTLRSDDEVAVEMTTNTRLFKSTVEPYVAKVVVVDPWKFKVISESVKKTDKHDAEQLAFFLSKGMLPELRMKDRDREKLHSLCQTRDKLVKQRTQLKNKINNVLASYAILLKREELSSDKALRRVLAMDIDPVVNLELKVLVDQIRSLNQSIRELEDAIKKEGAKYEEHKILKSIKGIGDKGASVLLSIIGDVNDFGSSKKLASYFGIVPRVSNSNETSHSGRITKRGTKLGRTTLVQCGLIAKRYNPYLLAYHERVKRRRGGGKANIALARKLLEIVYQALKNRWVFTDFPSFSYVELKAT

SEQ ID NO: 102330 - protein, 372 aa, unidentified
MKQNIIHIGLDVDDTQYHGAAFNKETGEVLDFKSRPTLKGLLQQLDRMAQHFKGHKIKLCYEASYIGYCLQRDLMSNDIHCDIVSPSSIPSPRGKAIKTDRIDAGYLAQFYANDLLTIVQPPDEEQERDRDLLRSRQKVMQQRTQLRKHLQSVLRRNGLHYKAETQYKTHWTKHHYFWLARTIDGLSGSLRVNLKLLLRQLKGLNEILAEYGQQIEVLANTPRYQDAVQSLTCYKGIKNIFALTMITEIGDIKRFSHPRKLVSWIGMDIREYSSGGKHNRFGITKHGNRYLRTAFVEANQRGYRTARIGKDVKARRKDIAPEWINIADRCLRRLNKKGNRLLLAGKHPNKVKVACAREMVGFVWESLNKVAA

SEQ ID NO: 102331 - protein, 404 aa, unidentified
MKHVIAFDVSMGKSYMVIYNAQKQCVFESEIKHSKPDFKKLQEKIHKLTDETGESPEIVFEATGIYSRQLEQFMQNNRYTYCLLNPLEAKMQCDSLRIHKTDRSDAHRLALTHFTVTRRVSTETDNLCYQLKSLSRLYSELDDELSIIRGRMHKVIQLTFPELERIFTSKSDLFLNFVQLFPHPDCVLGLSKTIIKNRIRANTNKKISNITAEKKAIQILEIAKICYPAVSQNDVLCDQLKLYARRYQELLHQKESCISKKVVYVAEQREEYDVIRSLPGIGPNTAVRLMAEIGDITCFNNNKQLNAFAGIDIRRFQSGKTFFKDKINKRGNKHLRKLLFLIIQNMIKQRRYGQNHIVEYYDKLKTQPYNKCHKVASIACVNKLLKLLFYLITHNMHYDYRLTA

SEQ ID NO: 102332 - protein, 349 aa, unidentified
MTMLAERIDAVIGVDTHKASHTAAVVTPTGGVTAHLAVPSDAFGAKRVLAFARRRAPDRRVWAIEGTGSFGAGLTTYLLEQGEWVVEIDRPRRPARRNGAKSDELDAIRAAREALSREHLAQPRRRGGREALRVLLVTREAAVVERTRAVSALQALVVNAPEALRGRLRHLGTHALVLRCARLRIGPTQSLEQRATIAALRSTARRALACEAEAADLESALEVIVQQERPELLAEPGVGVITAAAILNAWSHAGRIRSEAAFAMLAGVAPIPASSGQTVRHRLNRAGDRQLNRALHTIVLSRLTHDPETRAYAARRRAEGRSDREIKRCLKRFVARRLFRLLEDCAQAA

SEQ ID NO: 102333 - protein, 392 aa, unidentified
MLFVGIDVASKKHDAAITSLHDEVITEPFTINNDLEGFKKLRKEILSHTESLDEVHIGIEETGIYSKNICEFLALCGFVVHMINPILTCNSRKSQSLRITKTDPIDALAICRYVEYNLKRLNSYTPTLYIYDEIKSLSRARIDIQMRLNKAKTEWTRLLDISFPEFRKAYNQQSKWVYNLFSNYPTTQAISKMHLNTLVDLVGTKGDRIIVANHIKTIAKNTVGNSSKTNKFLTNNVLSDIMHYSHQMDELKHEITNLINDHFANILTIPGIGPITAGLIIGEIGDINRFTSPSALVAFAGLDPTVYESGEYKGKKASISKRGSRYLRTAIYTSTKVACINPYIRENKFQQKYLKKIIQGKHHGSAICNVCKNMINVIYSLLISGEEYNFTI

SEQ ID NO: 102334 - protein, 346 aa, unidentified
MKHYAGLDVAVKETAICIVDETGAICREGKVPSHPEDLVRVLTDPAWTLERIGLEAGPLSQWLFSGLAEAGLPVTCIETRHTKAFLKAQPNKSDRIDARGIAQMMRVNLFRPVHVKTLTSQKRRALLTARKLLQEKAIAIDNDIRGLLRNFGLKVGMVGAVKFAHRIPELTEDMPELAEIPEPLLDARDKLRQHFGALHRKVLMLVGKDETCRRLMSIPGVGPVTSMAYTATIDIPQRFRNSKAVGPILGLTPVLHESGESRRIGRITLCGDGLLRSLLYESAQVLLTRATKWSWLKAWAMNVAKRRGARNAIVALARRLAVIMHRIWVDGTQFRSTRQDLVPVAG

SEQ ID NO: 102335 - protein, 456 aa, unidentified
MSSKLKVKPRLSGRMLPIMHPDAAGIDIGAEEIFVSVPPDRDIDSVRRFDTFTRDLFALTDWLRQCNIRSVAMESTGVYWIPLYQILETHGFEVFLVNAHHVKNVPGRKSDVSDCQWIQYLHSVGLLKASFRPPDEICVLRSLWRHREGLVQMAAEHIQHMQKALSQMNLQLHHVLSDIVGVSGIAILDAILAGERDPVKLASLCNRRIRSSRQTVAKSLEGDYRPEHLFALRQSLSAYRFYKQLMAELDFELEQNMRKLPGAAHALHKRPVGTKKRIYQHAGNEPSFDLKEELFRIAGVDLTDVPGISTLTAHTILMEVGADVSRFRHASAFASWLGLCPEKQVSGGKVLYTRTRKVKNRAAIALRLGAHCLYHAQNYLGDFYRKMKWRLGAPAAVTATAHKLARIVYHLLSTRQPYSDEVFSRCDQQASVRAEKRLRKQAAELGFQLAPINETT

SEQ ID NO: 102336 - protein, 339 aa, unidentified
MNSSVAGLDIAKNIFHLYSIGVDNQVFKKKLKRAELLAFFANYPASLIGIEACGGAHHWARELIKLGHEVILLNARYVKSFVVGNKNDFNDAQAIFDAVTRPNKRVVAIKTVEQQDIQLVHTVRQSLVDQRTALVNQIRGLLSERGIVIHEGIHQFRKQLPLILEDADNNLTPLSRELLNERYEQLVLLDDAIKQQDRRMHRLCTDNELSKRFLEVPGVGPMTATIIASDIGDGKRYASSRDYAASLGIVPRQHSSGDKLIYLGISKRGNRYIRTLLIHGARAVLKHCSDKTDKLNLWLQALIERRGFNKAAVALANKNARILWAMAAKDQVYQRLPAQ

SEQ ID NO: 102337 - protein, 343 aa, unidentified
MVYIGMDVSSKDFVVHVIDQRKQKVFEGRIPPSRAGLRNLIEDLGAGPKLFVFEAGNQTKWIALMLMRQAGVRIHVVHPNEVKWISQSSGKTDKVDARKLAHLARGSLLPRPVHMVEGKTRQLRELVSAREQLQSKRVALINALRGYIRQEGVRFPAKFFQRPGWKAPLEKLSVGPTQRLIFGSFMEAIDALKRSEEELTAKMLEIEDSRCDLLETIPAIGKIASRVIVGALDDAGRFDNKKCVANYGALTPTIYQSGGTTHLGRINRDGRQEVRKVLLQCAHTIERMSSHHAAPVREFFERIEKRRGKKRAVVATARKLLTIAYGVLKSGMPYDPERLRAFA

SEQ ID NO: 102338 - protein, 348 aa, unidentified
MKILAIDLGKFNCVSCLLDTESNATEFDTFKTYRREFKEILHCTQPHLVVMETCSITGWVHDLCVDQDYPVLVADPSQEAWRWKNVKRKTDKDDALKLAKLAALEQINPVYVPAPETRQYRHLVKYRKVVVGRINRVQTAIRALFDQQGVKMPSGQRAWTVQGIDELGQHRRVLTECDENTLWRGELDLELTMLDQLWEHLATIERKLEILAKQEARIQLLQTIPGVGRKTAEVIVTCLDDPKRFENSRQVSAYAGLIPQQHQSGQTNRLGKITKRGSRLLRTALVEVAWIMLRYNDWAAATYARISGGQKTRKKTAIVAVARKLLVRCWAMLLHNQPWNPELSQATT

SEQ ID NO: 102339 - protein, 270 aa, unidentified
MEIIRIGLDLAKSVFEVCGVDMRDHVVLRKSLRREAVPQFFAELPPCLIGMEACSSSHYWAKVLTDLGHQVCLIAPQFVTPYVKSNKNDRNDAEAICEAISRPSMRFVPPKSSEQLEIQAVHRIRQRLVSSRTRLVNQIRGLLAEHGVVIGRDISRLRRALSQIVEGADRNLGDLIQELASDIHHELAALDERISSYDRRIRNLFRTNEMCQRIGKIEGIGPITATALVAAVGDQSCFENGRQFAAWLGLVPKQRSSGGEVSIVWDQQAR

SEQ ID NO: 102340 - protein, 343 aa, unidentified
MEIETIGIDLGKTVFHVVGVDALGKVVVRKRCSRSQLLTYLANVRVERIGMEACSGSHFWARALREQGHDVRLMPAQYVKPYVKTNKSDYIDAEAIAEAVQRPTMRFVPIKTEEQLDLQAVHRVRERWVMRRTAVVNQIRGLLLERGLPIPKGRSHVAEALLEIQRDASVKLSDAFLILLGQLKVELDQLTARIEQMDEVLWQTVGQIEACQRLTSIPGIGPVTATALVAAIGNGSGFRRGRDLAAWVGMVPREYSTGGKPKLLGISKRGNNYLRRLFVQGARTVMQHRLKQTPALSCWLAQLLSRTHQHVAVVALANKLLRIAWAVLSKNEVYRSSVPVTSS

SEQ ID NO: 102341 - protein, 396 aa, unidentified
MTEPKTAQEWADPVANLFRERTKTTSPGSAREVWIGVDTHKDVNVAAAVDEAGRTIGGAAPASITVTTTPAGNAELLAWARGLGETVVAFAVEGTGSYGASLTRFLQAQGHYVVEATRPRREDAAVRRSRGKSDAIDALLAAQRLHRLELKISPKSRVGDIECLRMLRVARKTAVKARTQALNSMKALIVTAPDDLREQLRGLTKDTLPDKCASLRPKGTAPVAAAKIALRSLARRIHTLETEIEELDAEIATIIQRAAPRLRTHVGVGTDVAAALLVAAGDNPDRLKNESSFAAMAGVSPLPDGSGKTDGRHRLNTGGNRDANNALWRIVLTRMNHDARTKAYVARRTLEGKDKKFIMRALKRYVAREIYTAVLLDQPALATTSSLIARPVPGAA

SEQ ID NO: 102342 - protein, 418 aa, unidentified
MADEIMAEETIRWFAGLDWGSATHQACLLDEAGTVVGERAFAHGGAGLAALCDWLVSLAGDPGSVAVAIEVPHGPVVDALLDRGFAVYAINPKQLDRLRDRISVAGAKDDRRDARVAAAGLRTDPHLFRRVLAGDPSVIELREWSRLAEELQQERVRLGHRIRQQLWRYYPQLLELSDDMTAEWVLALWNMAPTPAQAARLREATLARLLRQHRIRKLDAPAVLDILRQPAITVAPGVTEAAVLHLRSLVARLRLANQEFRQAERKLEELCTALSETQPTAQDSGPGDATILRSLPGVGPVTLATLLTEATGPLARRDYPALRALSGVAPVTKRSGKSCIVVMRYAAQVRLRNAVFHWARVAVLNDRRCRGRYEALRARGHSYGRALRGVGDRLLGVACVLLRRGTLFDPDYGSSASA

SEQ ID NO: 102343 - protein, 473 aa, unidentified
MPRRKSASSRPDPATAALLQTLNPHAAGLDIGATELWVCVPPGASASLPPAVPSVPAVLPPTVRCFGSFTADLYAIAAWVRQCQVTTVAMESTGVYWIPLYDLLENEGFQVLLVDPRQVQRAPNRPKTDVHDCQWMQRLQSLGLLTAAFRPDEPIRVWRSYQRHRATFIEDAGRHLQRIEKALEHMHVKLPAVVSDITGVTGMSIIRAIVGGERDPKALARLRDHRCKESAETIARALQGTWQPEHLCAVQQSLALYDYDHQQIRGCDRVIETHLQGMALPEVPPLAPTRRVRRRKDNEGTFDARQRLHHVAGVDLTAIEGIEESTALVVLSEIGTDMSRWPSEKHCGSWLGLAPNPRKSGGKGKSSATRPGVNRAAQALRLAAKNVQRSHSALGAFFRRIAARRGLAQAITATAYKLARLVYALLKHGTAYVAQGLEVYETAYRERVVRQGKRKAAALGLMVVEREAVAQPS

SEQ ID NO: 102344 - protein, 329 aa, unidentified
MDNQTGEYQEKRWGHREEAERFYGSLSGPVRVGMEACGHYPWFERLLEKLGHELWLGDAAEIGSSVVRKQKTDRRDAAHVLRLLLDERFPRLWVPSLEERDVRQLLVHRHKQVQARTRSKNQLQAMALGQGVQKQRKLWSAAGRAELEKLELLPYAGERRQQLLRALDQLELEIEGLNRRVEEEVKQRPAAVRLLSHPGVGPVTALAVVLTLGPAERFASGKPVASYVGLVPSEHSSGGRQQLGRISKQGSSFLRFLLVEAGQSAARYDAELGRFYRRLAARKHRALAKVAVARKLAMRLYLMLREDWNYAQLCRAVVQASPSHSVVKV

SEQ ID NO: 102345 - protein, 369 aa, unidentified
MDKHTLYVGLDTDKKHIDIAVAESQPPFEVRYVGKIANEPQSLHRALKRLVKDGRALVVCYEAGPCGYGIYRRLSALPGVICRVVAPSLIPRRPGDRVKTNRRDAVSLARLLRADELTAVWVPDATHEAVRDLVRAREAAVGALTRSRQHITSFLLRQEIGYTGKPWTKKHRVWLGRLEFAEPAHRLLLAELLVALDQAQARRDRLTDHIAELVAAWSLNWLVEALQVLRGYRLINAATLVAEVGDPRRFDSPRQLMAFLGLVSSEHSTGERQRRGAITKTGNRRARKAQIEAAWTYARPAKAVADAGHPPALQAIADKARHRLSARYRRLTARGKTPQIAAVAVARELVGFVWALAHAAAPDNPTTRR

SEQ ID NO: 102346 - protein, 406 aa, unidentified
MAAVMIGVDPHKASHTAAAIGPAEEPLGGIQVRAVASQAAQLLAWAAAWPERTWAVEGATGLGNLLAQQLVTAGEVVLDVQPKMAARVRLLASGNTNKNDPGDAGSVAVAALRSRAPRRVTAEDHTAVLKVWSKRYRDLGRARTQVACRLHAVLADLVPGGFSREITAGQGASMLKRIRPSGPAARARRELAAEFLADLRRLDAQIRGTRNTLAAAVQASGTTLTGIFGVGPVIAAAILGEAGDTTRFGDRDRFAACNGTAPIEVSSGGRKIHRLSLRGNRRPGHAIHMAAVTQIRYAHSPGRAYFDRKLAEGKTGKEALRCLKRQISDAIYARLVADAAPRSTPAQAEGPGGQPGNGSVSSAAGSHPGRRLFGKATPGPHPSLRPAATARRAVQATALKTSHRSP

SEQ ID NO: 102347 - protein, 369 aa, unidentified
MNDYRTIVGLDVHKKTIVAAVLPDAARDVTEKVTLENESKVIKKFVNRITTNGSGVFVYEAGPCGYEVHRQITQMGHRCVVIAPSLTPVRPGDRVKTDSRDAAKLARLYRAGELTEIRVPSREEEAARDLVRAREDVLSDRLRARHRLSTFLLRQGRVFREGKSWGVAHGGWAKAQRFEWVPLQQSFESAVRAVEEADARMAVLDQQVLDTAQKEPYATTVRHLRALKGIDTLSAFTLVVEAQDFTRFATAPHFMGYTGTVCSEFSSGDRIRRGGITKAGNAHIRRILVEAAWSYRLPNRTSLALALRRKECPIDVVQIAKRAQDRLHRKFGRLVSKGKANPVAVVAVARELAGFVWAIARKTPMAVCA

SEQ ID NO: 102348 - protein, 343 aa, unidentified
MQTVTTIGLDIAKSLFQVHGVDAEGNVLIRRQLKRRYVLAFFQKLPPCLVGIEACATSHHWSRQLKALGHTVRLMPPAYVKPYVKRQKNDATDAEAICEAVTRANMRFVETKTPEQQSCLMLHRTRQLFIRQQTSVINAIRAHMAEFGIVAPVGRKGVEQLLAIVTDASDPCVPEVARACLAALGAQLRMLKAQILEFDRRIMAWHRSNEISRRLDAIPGVGPALATALVASVANPKAFRSGRNFSAWIGLVPKQHSSGGKDKLGSISKQGDRYLRSLFTAGALAVIRYAKINGTQHRPWLTALLARKPTKVAAIALANKIARMAWAMMAKGERYKEPAALAA

SEQ ID NO: 102349 - protein, 437 aa, unidentified
MPKKSIVKIRDHAAGIDIGSERIFVGISGQEVKSFPTFTQSYHEAIVYLREHGITTVAMEATGIYWLSFYDMLEASGIEAYVINAADVKSLSRRKTDVADCQWLQELHAHGLLRSSFIPPDAIRRLRSYVRLRGEHVAMGAQHIQHMQKALERMNVKLHNVISKLNGVSGMRILKAIIAGEHNPDTLVTLLDCQIAAKKHAEVLASLHGNYREEHLFALRQAVECWEFYQQQILACDKAIEKLLSLITQPLPTPSLQSPAKPHQKLAVDHLHEMLMKMTGGKNPVAMAGLTDLSLLQLTAEIGTDLTAWPSEKHFVAWAGLAPNMQQSGKSTRRRNRKTVTRVGQIFRVAAQSVAKSKHLALGAFYRRVKARRGPYVAMKAVARKLAVIFYNIMTKGIHFVETGLQRYQERYQQHLLHNLEKQARKLGMTIQPAVVH

SEQ ID NO: 102350 - protein, 350 aa, unidentified
MLIIGCDYHPAFQQIAFVDTATGDCGERRLEHREEGEKFYRELAGRGMKVRAGMEASGQARWFERLLAELNFEVWIGDATVIHAKRVRKQKTDRQDAQLILGLLLEDRFPQIWVPSWENRDLRQLLWHRHRMVQARTRIMNQLQAVAINEGLRCKKRLWGESGREQLEAFRLAPWASRRREDLLKLLDGLNPTIAELTQAIEQEVEKCPEAQRLRTHPGVGPLTALAFLLIIGRADRFQCGKQIASYLGLVPLEDSSGNRRRLGHITKQGNALLRFLLVEAAQVTVRSLPKWRSQYLHLTMRRGRKIAKVAMARKLAVRLYWMMRQEWNFGKLTKFGSHAGKPGTGDGVK

SEQ ID NO: 102351 - protein, 345 aa, unidentified
MENMYYIGLDVHKKTISYCVKDGSGRIHAEAAIPATRLDLDIWMKTLPQPWTAAMEATIFTAWIYDHLLPHAAAVKVAHPLMLRAIAAAKKKNDRIDANKIADCLRCDFLPECYMASTEIRERRRTLRYRNLLVRQAVQMKNKIAVLLMEAGVSYNKQKLHKVGYFRELLATNQDIDEGLKPLLRLCRETVVRLGKTESALVRSLQRDSLLMERVERLMTIPAVGPITALTWALEVGDVRRFSSIKKAISYCGLCGAEKSSANIIKRTPLSKQRNKHLQTILIEAAKMAPRNSVDLAMIYDREKQKDNANRATLAVARKLVAYLVAVDRRQKDFLVVERENRTAA

SEQ ID NO: 102352 - protein, 422 aa, unidentified
MSYCPVAGIDVSKRFSDMCILSPDNKIFAQEKIYHDETSINRANALLQKAERLFFSKPVIVMESTSHYHLILFQFFSEHGYDVIVVNPLQSNSMKDFSIRKRKTDRVDAFKLAMMYRTKTLRPSQIPQTATRALRQLCRHRAELLNDVSSYKNRLTALLDQTFPGYDKVFSDVGGVTSCAVLVRFPTPTILLVEEESELVEVIASASKSGYSFAKKKAGLLISAAQKAQAWGIHSCADETLIVCTIQMLRTLSESVLQIETAIDNLLAQIKEMRNNVSLLQSIPGIGSHSAALLLGEIGDISLFKKPKQLAAYFGLDPTERQSGSFRGTKNKLSKRGSPYARAALHMGVVNSICKRGKDSAANPVLLSYYEKKCKNKPAKVAQAASMHKLVFIVFAVLRDQKPFELKTPEQHAVEQGFVKAA

SEQ ID NO: 102353 - protein, 387 aa, unidentified
MLEDFEIDHSALGWKKFRERMKPYGSIPFAIETSQGAAVEQLLEAGMQVYPLNPKSAQAYRQRKAPSGVKDDQLDAWSFADALRVDGQNWKPLRPEDFLIKELRLLCRDEVGLIEQRTAFINQLRHALAEYYPTALEAFEDLGAMSAWMFLQRFPTPQLLEKAGKRQWEKFLHSRHLWRNESGPRRMELFAKATEFCGSEPTANAKSMLALSLVKMLFALDNQLAEYRKRIEELFESHPDHDLFGSLPGAGPKLAPRLLGEIGDDRERFEGDAQNLQCLAGTAPVTKRSGKHRECHQRWACNKYLRHAVHLFSEHTIIRCAWAEIYYKAHRAKDHSHARALRCLGQRWLKIIHKMWMDRTPYNAELHHFNQVKHGSWVFQLKTVNCK

SEQ ID NO: 102354 - protein, 407 aa, unidentified
MDVVHLKCAGLDVHQQTVVACARAGSGKTVAYDVRTFGTSTPELLALSDWLTARGCTHVAMESSGVYWKPVWHLLDGDFELVLANAMHIRNIPGRKSDVNDATWIADLLAHGLIRSSFVPPASVQELRDLTRTRKQLVRELAQHTLRIQKTLETANVKLTTVLADIMGVSGRAILAALVAGETRPERLALLANDKVKASRAEITAALRGRVTAHHRFMLKLHLTQIETLEAAVREVEARLGEALAPFRAAVDHLITMPGVSETVARVIVAEIGFDMTRFPSAAHLVSWAGLCPRLHESAGKRLANRTRASNPWLKTTLVQAAWAAARKKDSYFRAQFLRIKSRRGPKKAVLAVAASMLTAAYHMLRDDADYRDLGAAHFDRRDKAKLAKRLIARLHDLGLVVDVRAA

SEQ ID NO: 102355 - protein, 348 aa, unidentified
MKNLFIGIDFSKEKIDVTMISAIGLTEQSARVSSEFKATPCGYRQFLKWVEEHSCGIDVSSWLFCGENTGDYSKPLCNYLYGKGYDMWLENAKCIKDASGLRRLKTDRADSAMIAEYAMRNHDRALYYRPLSNSLSQLRELFLYRHMIVRHKCSFQVRKEEKRMTMEKSPSRTLISNTGKHFITEFDKAIAKLDKKIKEIIESDEELKHTYTIVTSVPGIGTQNAVCLMVYTNNFDKFDFDARKIACYYGVAPFGKESGTSVHSTPRNHYMANRMIKSMLTQSALIAIRFCPHLKQYFTRLISKGKKMQVALNNVKNKLLHMVTAMVKNDMLYSPDYINACQRIANTL

SEQ ID NO: 102356 - protein, 338 aa, unidentified
MMCYAGIDLHATNSVVVVLDAEDRVLYQKRLRNELPLILTALEPYRATLQGVAVESTYNWYWLVDGLMDTGYRVHLAHAPALPQYSGLKHSDDLHDARWLAHLLRLGLLPTGYIYPKAERAVRDLLRKRSQLVRHKTMVVLSLQSLLTRLTGTRLSLPRLRALPPERIQSLVPFPEHRQSVESSLTVLRCLEQEIRTIEERVREAGRTQARYALLQTVPGIGPILAGTILLEAGDINRFTTVGHFASYCRCVGSEHVSNGKRKGTGNTKNGNKYLSWAFIEAAHFAIRYEAVIRTYYQRKQARTHPLVALKAVAHKLARACYHVLREQVPFDLSRAFG

SEQ ID NO: 102357 - protein, 347 aa, unidentified
MKRYVGIDVAQEQCALCIVDDAGAILFEGTCATDPDEIVRTIATIADDVEKIVHETGPLSIWLTRELVKRGAPVVCIDARAAHKVLSARMNKSDKSDAVGLAQLARTGWYGAVHIKSESSDQLRLLLAARERLIRIRMDIEGQVRGLLKAYGIRLGPVNAGYSRKSFRDQLGLAIKGDQSLQMIFASLIAVHETVCIEATAIDAKVQQLAKDNTLARRLTSIPGVGPIVSLNFIATIDDVTRFRKATDVGAYLGLTPRRYQSGETDWSGRISKRGDGGMRKLLYEAANILIQRVARFSPLKAWAMRLVARRGLKKAIVATARKLAVIMTRIWRDRTTFAWTKEELPA

SEQ ID NO: 102358 - protein, 323 aa, unidentified
MSKIIGIDISKSTFDVSYLKKDKWEHKVFKNQSTGFEQFKKIIKSADWIVMEASGPYYVQLATFLNLGNYKVCVLNPLIIRRYSQTRLYRAKTDKKDAKTIAEYGAQYELKRWYPESNHCIEIKQLYTALELLKKQKHQTKRQLESFEVTGVLSNSLKKELKQLLLLLTRRIIKFEKQIEKLGELAYKDTIQRLRTIPGVGIKTAIMISVVTDNFTKFENYKQLTAFVGFSPRLYQSGTSVKGKGHICKMGKPQIRKLLYLCSWSAKRVNKTCIEMYNRLKEKGKPERVIKIAIANKLLKQIFAVAKNKQYYNENYQSLCGAK

SEQ ID NO: 102359 - protein, 338 aa, unidentified
MKLYAGVDLHSNNNYLGIMDKKEKKVYKKKLPNDLSEVLKALNPYRKDLEGIVVESTFNWYWLVDGLMENGYRVHLANPSAIKQYEGLKHSDDARDAFHLAHLLKLGILPEGYIYPKEGRPVRDLLRKRLQLVHHKTAHILSFKNLVSRNLGFQMPSNDIKKLSEEDVEGMFKEEHLVMAGQANIATMHFLKERITEVEKAVLKRAKLKEEYHNLLTVPGIGKILALTIMLETGEITRFPEVGNYVSYCRCVGSTRISNGKSKGEGNRKNGNKYLSWAYVEAANYAIRLYPYVRRYYQKKTAKTNNIVAIKAISHKLARASYYVVKDQEVFNPKKAFG

SEQ ID NO: 102360 - protein, 468 aa, unidentified
MGLRNAIGIDPDSKGFVCATVKLSGAQVSTKGYLTTDCDLKAFVRWVKGQGETIVAIEGSNGLSRPLEKALREAELIFYSFKPADTDTFRKAVLGQNKDNRKDAESVARYAMALEAQGKLERYRRVWFAQAELQLLTRGYERKSQGMTAEVNRLWKLLRLACPDLYLALGGGHPEVELTEKVLKSQGILTLLCQKPDFGQWKHLSAEQLLEAMGGGKYKGREKLIEQLRTLAGSFPAVSAAMALLIRSSAQQIERFKAEQAEIVRMLEVLTADNAAVQVLKQMRGIATRTAATLIAEIIDIRRFAKEDSLACYCGLGMKEHSTGNSLRMVPTRLFNHRLKDAFMTAARNFALYNPGSHLAGYHRNLVKQGMSPTEATKRVARALVRVIYRELCAVVAQDTGRPAADQKKEGEGDMASGLTRSDQSHPSNISPSSLRSSKARATKGVKELAAPTARAGSRRKTISKKTA

SEQ ID NO: 102361 - protein, 334 aa, unidentified
MENIALIGIDLGKNSFHIHCQDRRGKAVYRKKFTRPKLIEFLATCPATTIAMEACGGSHFMARKLEELGHSPKLISPQFVRPFVKSNKNDFVDAEAICEAASRPSMRFVQPRTESQQAMRALHRVRESLVQDKVKTTNQMHAFLLEFGISVPRGAAVISRLSTLLEDNSLPLYLSQLLLKLQQHYHYLVEQIKDLESQLKRKLDEDEVRQRLLSIPCVGTLTASTISTEIGDGKQYASSRDFAAATGLVPRQYSTGGRTTLLGISKRGNKKIRTLLVQCARVFIQKLEHQSGKLADWVRDLLCRKSNFVVTCALANKLARIAWALTARQQTYVA

SEQ ID NO: 102362 - protein, 388 aa, unidentified
MNSTRNKKIEQVKETTMIVGIDIGSEKHYFRAFNWRGIELTRKPVAFSNSMEGFNSFYNTIVELIQKSELEEALVGIEPTGHYWFDLGQFMGEKNIKFVMVNPHHVHKSKELDDNSPSKNDRKDPRVIAGLVRDGRYFYSYMPTGVYAELRNASNRRFVLVEEQTRAKNRLQKWIAVYFPEYKGIYTRIDAKGGLLVLKQAPTPEEIVRLGVEGIIKIWKDAKLRGNGYKKAMLILNAAMKSIGLKAGLTEARMEIQDLIEDYELQTKRLERVNDLIKELCQQIRYADKLLEIKGIGITTIAGFIAEVGDITRFDSAKELQKLAGLELVADSSGKHNGKTKISKRGRKRLRYLLFEAAISVVGKNKEFKEIHRYYTTREKNPLKRCSR

SEQ ID NO: 102363 - protein, 342 aa, unidentified
MRIVVLGIDLGKNVCSLAGLDETGAVVLRRRMKRASVLPFTAQLETCTVAMEACCGAHHLGRQLVAQGHVVRLMSPAYVQPYVKAQKNDERDAEAIAEAATRPTMRYVEIKSEAQLEVQSLHRVRARLVAERTALINQLRALMLERGIAVPQGRCKLARYLPAILADARNGLGPRLRRLIEDMREEWRSIDRRIKGFNDELAERVRNEDTAKRLIRIPGIGVLTATALVAAVGNAQTFTSGRDLAAWLGLVPRQATTGGKPRLLHISKRGNGYLRMLLIHGARTALPGLAKKDTPLGRWVKALLARAHRNVVTVALANKLARIAWAVLARDRQYLTVQAIGK

SEQ ID NO: 102364 - protein, 397 aa, unidentified
MRLAAQNDAGGKPASRQARPRRRPNTESRQAELLELLTDVLALAEDSPVTWAVDLNAGGGALLIALLVGHGQRLLYIPGRTVHHASRGYRGDGKTDAKDAYVIADQARMRRDLQPLQEWDEIAVDLKILTARRYDLAADRTRAINRLRAQLLEYFPALERAFDYAASKAALILLTGYQTPAGLRRVGASRLATWLKNRKVRCAQAMADAAVAAAQAQHTAVAGEATAAAVVNTLARAVLALALDKEIAGIDAQIAARFREHRDAEVVLSMPGMGPLLGAEFIACTGGDMDAFGSSGRLAGVAGLAPVPRDSGRISGNMRRPHRYHRRLLRVFYLSAQIAARFCPTSKAFHDRKRAEGKSHKRAILALARRRLDVLWALLRDQRHWTVQPPPPEPVGA

SEQ ID NO: 102365 - protein, 336 aa, unidentified
MSHYCGIDLHSNNHVVVVIDEEDKRVFEKRISNDLSLTLKALSPYRDSLQGIAVESTFNWYWLVDGLQEQGYDLSLVNTAAVKQYDGLKYSDDHHDAFHLAHLLRLGILPTGYIYPKAQRAIRDLLRRRLSLVRAASTRLISVQSQIWRSTGLRINSADLRKADFISPRVDDYTLQAVTAGLAVYQCIQQQIDGLEQTAHQAVKLTDAFQILQTVTGIGKILGLTIMLETGTIERFAGPGNFASYCRCVDSTRMSNGKKKGVGNAKAGNKYLSWAFSEAAHFAVRFEPLAQRFYDRKKAKTNGIIAIRAVARKLARATWMMLKHQVPYDARLMFPG

SEQ ID NO: 102366 - protein, 489 aa, unidentified
MVTPAAERRARDPDWESLYAHDSDPGPRKTIDEERKMPRKKPGKKKVALPILHPDAAGIDIGATEIYVAVPPDRDPESIRTFATFTQDLNHLADWLQQCGVRTIAMESTGVYWVPLMQILEARGLEVYLVNAKHVKNVPGRRTDVCDCQWLQYLHSVGLLRASFRPGSEICALRSLLRHRDSLVEMATSHVQHMQKALDQMNLQIHHVISDITGTTGLAIIDAILAGNRDTQSLAELRDPRIRASKDTIAKSLVGDYRREHLFTLQQSVDLYREYQRRIATCEEEMQRLMKGLETKADPAVSLPAAKDSVKKCKVMLPAKALALRDEAYRILGVDLTSVPGISVLRVQTILAELGGDVSKFRCAGAFSSWMGLCPDNDITGGKVVWSGTRKVKNRVALTLRMAAQSLQNSASALGAFYRRMRTRLGAPKAITAAAHKLARIIYHMLKTREPYDESVFAEAEIKHRQRRENRLRAMAQAIGYTLAPVQAL

SEQ ID NO: 102367 - protein, 427 aa, unidentified
MPYRIAGIDVHKRMLAVVIADVAVEGEYTFERRRVGTSPSELRGLADWLVAEEVEEVVMESTAQYWRPVWETLEVSWQPERRARRGAGTQSGSLHLAQAKSNRGPRGRKRDFPDAERLVKRLVAQELTLSFVPEPEQRLWRTVTRRKYQLTRNRVQVHNRLESLLEEAHLKLSSLVSDLLGLSARRMLQAIADGETQPARLAALADRRLRATPEQLCDALGACADLNSVYRKLIQMALEELRLLDEQSAQLDREMAHLLRAQQSSVERVAEVPGLGVDSAQQIIAEVGASAESFPSPKHLASWVGACPGEHESAGVSYSHRSPRGNRAMRRLLNQAANAAVKTKGSLFQLVYRRLVPRLGHAQAIGAIAHRLCRLIWKILHQGVRYEERGPQVSRARSKRRAAKMIRELRSLGYRVELIPSLQGDSA

SEQ ID NO: 102368 - protein, 309 aa, unidentified
MSQEKYIGMDVHQATISVAVMDGRGKLIMECVLETKASTVVEFIRGLQGTLAVTLEEGTSAAWLHDLLKPGVSRLVVCDPRKNALLKDGNKSDRMDARKLAELLRTHQLHSVYHGEHGVRTLKELGRSYLSITQDVTRVMNRIKALYRSWAIPCSGSAVYAPRHRAEWLAKIVEPGVRMRAQRLYQQLDGLQPVRLEAGRELLGESPKHPAVKLLRQIPSIGPIRSALLVGLLQTPHRFRTKRQLWAYSGFAVETQDSGEYRCVRGKLQRNRERITVRGLSNNHNNDLKNLFKGAAISASTRPGPFRDF

SEQ ID NO: 102369 - protein, 358 aa, unidentified
MMKSFNKSLNFFGQIFYIGIDVHKRKWVITIRCNKMELKTFSMNPYPELLHQYMQKNYPGGVYVSAYEAGYFGFWIHRKLKKYGFDNIVINAADIPTSDKEKQNKTDKIDSRKIARELENDSLRGIHIPDEFHQQLRSLCRLRHRYVQNQTRIKNRIKGHLSSYGISVPSTIELNHWSGNFIKWLEGVDFNHKSARDYLDFCIDDLLQQRRKLADVTNLLRQYIRENGKRELIHNLTSIPGIAFITAVTFYTEIMDINRFPSIDHFCSYVGLVPSVNSSGEKEREKGLTNRRNNFLRHVIVESAWVAIRKDPALLQCYNDYCRRMKKQEAIIRIAKKLLNRMRHVWKNDEAYVLSVVA

SEQ ID NO: 102370 - protein, 460 aa, unidentified
MCRLPFQAQISVTQEHADLSLFKHYSFIARQSVNAAYPFNSLKGVFPMALKIVYQICCGIDVHKTFVVACIASTNKGVTTYKRHRFSTYTKGLKELSQWLCEHNCKDVCMESTGKYWIPVFNILEDSCNITLAHPKYVKAIRGKKTDKKDAKWIADLFKHDLVAGSFMPPLAIRQLRDLMRYRFKLTNFMSSEKNRLQNSLTVSNIQLGNVVSDTFGKSSMNIINKLLVNPLDNSFDIEPLIHGSMKDKLPELELAIDGFITPEQAEKLKIIKHHYEDLKSRKADLEKIILSLSVPYAEEINLILTVPSFKNIFSAIAVVSEIGANMDVFPTAKHLCSWAGLTPTNNESAGKKKSVRISRAGCYIKPLLVQCATSVVKSEKHPEIRNRYLKLKKRRGHKRAIIAIARMLLTAIYNILKKKEPYNPELYRKSDVLPVNREITVEQAILLAKTQGYRIRVAS

SEQ ID NO: 102371 - protein, 422 aa, unidentified
MLEETHDRDQIIQRVAALDVGKAELTCCVRVPGQGSSGRRLQEVTTYQTMTRWLLVMADRLAELGVTRVVMESTSDYWKGVFYLLEVHGFEVWLVNARDVKHLPGRPKTDTLDAVWLCKLAERQMLRPSFVPPRPIRQLRDVARYRADLVAARTAEKQRVEKLLEDAQIKLSVVASDIFGVSGRAMLAALIAGERDPKVLAQLARARLRAKLGPLAEAFTGFFTDQHAFLLAKMLARVDALDADLAELDAKLAELIAPFALAVDRLDEIPGIGQTAAYLLIAELGADMTRFPTAGHLVSWAKFAPGVKESAGKRKGRGSTGRGNPYLARVLGEAAVAASKTDTFLGERYRRIARRRGKQRAIVAVGRSILVIIWHLLSDPTLRFHDLGAGFYDTRIGSERAKRNHVRQLEALGYRVTLEPAA

SEQ ID NO: 102372 - protein, 321 aa, unidentified
MNTFYLGIDVAKAKLDCALRLANGKYKNKVIDNNLPGFKLLSEWLVKQQVTTLQVCMEATGVYWEAVAEYLADQGVLVSVVNPAQIKAFGKSHGVRSKTDQIDAQSIALFCSEHHPKAWQAPTPGERALRAMVLRLEALQVMRTQESNRLLVARDAVKPGIASHIEWLDKEIKALAKKISEHLDSDPGLKDKQALLDSIPGLGERTIATYLAFYANPADFGNARRAAAFAGLEPRHHESGSSVKHPPRMSKIGHAFLRKAFYMPAMVTLYKTAWGKRFRERLAAAGKPPKLIIGAMMRKLIHVAFGVLKSGKMFDPALHGC

SEQ ID NO: 102373 - protein, 366 aa, unidentified
MASLPAGPEVVHVGMDTSMREIVCGVLQPGREVPAVERIPNDEESVRRLIGKLGDRRLLSVCYEAGPSGYELHRLITSMGVACQVIAPSLVPKGASDRVKTDRRDAVRLALALRAGMLTAVRVPSPAEEAVRDMVRARGDLLDDRKRVQQRLNALLLRHGRAWGGGAKWTLAHRAWVDRQRFGEAALQEALDAYRGSLEAREAELRAAEARLSAWAGREPLAPAVARLSAYRGIAELTALTLAAEVVDWHRFPTARAFMGFTGLIPGEYSSGARTRRGSITKAGPEGVRTALVEAAWAYRCRPAIGAALARRQAGLPAGTLARSWKAQQRLHATYKKAAARGKPHGVVVTAVARELAGFAWAEMTS

SEQ ID NO: 102374 - protein, 345 aa, unidentified
MPIVGGLDIHRKQITFDYLDTVTGEVKRGQIAPADRGHLRAWLARFAGRGDVAFAVEGCTGWRYVTGELAAAGIAAHVAEPADTAAARGRKRHAKTDKTDSAHLRRLLAEGRLPECWIPPAQILEYRALLETYHDLRREHTAWVQRIHAVFFHQGAPALGEEALRTEPGLARLRAAAAAHLSPAGQQQVATALDMLAATEAQLGPLRHQLRDAAWHLTGARVLAERLYGVGPVTGLALTCWLAGQDRFSSSRKAVRFTGLDITVHSSDRKGPPGRLSRQGPPMLRWAVYEAGKTHARAAAPDHGYYAAVKDRSNGKLAALSEARKIVRQACHIRAELGDDALTTA

SEQ ID NO: 102375 - protein, 430 aa, unidentified
MGLIVPTTIHPEREDQPLPYEWFVGIDWGSQQHQVYVLDRDRRRVGERVVDHDGASLARLADWLWTLSAGQPQRVAVAIEVPRGAIVDGLLERGFHLFALHPKQLDRFRDRHSVAGAKDDRRDAFVLADSVRTDQPSFRRLQLDAPQLLLLRELSRAEETLLEEFRRSANRLRDQLHRLYPQMLQLCSAADAPWLWDLLDLAPTPAHAALLSAEQVQRVLKAHRLRRITAPEVLACLQAPALPVAPGAAEAAQAHCGFLLPCLRVLAEQLRACGQQVDAMLRPMADEPGAGERPSDVAIVLSLPGVGRKMTAWLFAEAAQPLAERDYQVLRTHSGIAPVTKQSGKRRLVVMRRGCNPRLRHALYHMARVAMQRDAHFSSVYTALRAKGQRHGQALRTMSDRLLRILVAMLRNGTCYDASRIRRESVVQMG

SEQ ID NO: 102376 - protein, 335 aa, unidentified
MLHIGLDVHERLTSVHILDANGKKCKAYTLKGHWTELPAQLKKLSEPFQVCFEASTGYGHLYDALRPIAQRVAVAHPGKARMIFRSKRKNDRIDAEKLAKLCFLGEVPEVYVPNQRLRQWRRLITFRGVLVAERVRTKNRLRGLLRRNGIQSPVKLWTRNGIAWLNALELPGEDGLERELLLDDLGRQSDKIRRVEGHLADLAKNDPRVSILRTIPGVGIRTAEALAAWIDNPARFTKNKTIGAYFGLVPSEDSSAGKQHLGHITRQGPALIRKLIVEATWQAVRRSPEVRAYYARMLHDDPQRKKIALVATAHYLVRCALAMLQHNESWKVKAA

SEQ ID NO: 102377 - protein, 418 aa, unidentified
MQVESDEPELIERVAALDVGKAEVVCCVRIPGPGGQRMQEVRTVSTMTAALLALGDWMAGLGVTRVVMEATSDYWRPPFYLLEDRFETWLVNAKDVKHLPGRPKTDRLDAVWLCKVAERQMLRPSFVPPPAIRELRDLTRYRVDLLAERTAEKQRVEKLLEDALVKLSAVVSDLFGVSGRAMMAALITGERDPAVLAQLARGTLRNKTGRLTEALTGRFTGHHAFLLTQMLRRVDAISADVATVQERIDAQIAPFARAVARLDEIPGVGATAAQAILAEVGLDMTRFPTPAHLTSWARFAPGVSESAGRKKGNAGTGHGNRYLARVLGEAAIGAARTDTFLGERYRRIARRRGKNRAIVAVGRSILVIVWALLSDDDAQFVDLGPDYYATRTNPERKVRQHIRELQALGYSVTLNPAA

SEQ ID NO: 102378 - protein, 340 aa, unidentified
MQKRRFYIGIDIADKTFYASIFSTPQKPHISKEFTNSMDGFQQFVAWLKQQKVSPGNSIICMEATGVYCDNLCYYVSSQNYPLVLEAPHKVKKAFTHLDKNDRVDSQQISEYAYRFKDKLTLWEPKSYILEQIQVLLTTREQLLKQRSANKNSLKAVKRKYVRTPLAEKTFQQSIDHLSKQVETIEKEIEKLIKKDTDFHQMKTLITSIPAVGNLLYYNLLVTTKGFTENINSKNLASYFGIAPHEHSSGSSIFKKAKSQRRGPKRPRKFIYLASLSLRTHNKCIKMYFMRKVAEGKSGRLVLNNIANKLIKIICAIARDRKPYIEGYLSINPQILLNNT

SEQ ID NO: 102379 - protein, 356 aa, unidentified
MQTQVTKKIDFSGKDFFIGLDVHKKSWSVTIVVDGIEHRTFTQPPDPNALFNYLQRMFPGGIYNSAYEAGFCGYGIHRELNSLGIKNIVINAADIPTTQKDKLQKRDPVDSRKIARSLEKGSLHGIHIFNRELEELRSLNRTRFYLMRDLRRSKNRIKSFLQYYSEPIPPEFDNNQWTLKFVSWLKQVKMQTTSGQDSFSHLIKSYEHHRKQLLELSRLVRQRIRDHDNELYSLLRSISGIGPLTSSALITELGDINRFNNIDQLSSYVGFIPKIRESGETTHTGGITFRCNTFLRTLLIEASWQAVRRDPAIMQYYHKHLVNNKGHKVIIKVARKLLNRIRYVMKNRQPYITGVA

SEQ ID NO: 102380 - protein, 408 aa, unidentified
MLFVGDDWAEEHHDVELQNEAGRVLGRAKLPEGVAGIARLHAMIGEHLGDDPDDPTVVVGIETERGPWVQALIAAGYQIYAINPLRVARYRERHSVSGAKSDTADAHVLADIVRTDRHQLRPIAGDSVQAEAIKVLTRAHKTMIWERTRHLLRLRHALREFFPAALVAFDDLTATDTLELLSAAPDPASAAALTIEQITAALTRARRRNRAAKAEAIAAALRGEYLGQPRVVTAAYAATVRAQAAILTVLNTEIKTMEAQVEAHFGQHPDAEVYLSQPGMGVVLGARVLAEFGDDKDRYADAKARKNYAGTSPITRQSGKRKIVLARYVHNDRLVDALGLQAFAALRGSPGARAYYDQLRGRGVGHRAALRQLGNRLVGILHGCLKTGTKYDENTAWPALQENLQTAA

SEQ ID NO: 102381 - protein, 353 aa, unidentified
MTNNTIETIGCDLGDKRSEICVVGVDGEVLERRTVQTTRKAMAAFFERAASHVVIETGTHSRWVSELVEELGHRVTVANPRRVKLISANDNKTDRHDAELLARLGRVDVKLLSPVVHRGTEVQADLAVAKARDHLVAIRTKLVNHVRGTVKSFGERLPMCSARSFARQTHALVPVALKAALDPVYRALESIEEQIKAHDTMVERIAKKYPDVEVVSQIAGVGVLTALVFVLTIEDKERFSKSRMVGAFLGLRARKSASGNNDPQLRITKAGDAFLRRLLVNGANYILGPFGKDSDLRRWGLALASRGGKNAKKRAKVAVARKLAVLMHRLWVTGEVYEPLGYHQRQLEQKRAA

SEQ ID NO: 102382 - protein, 325 aa, unidentified
MSIVVGVDIAKRTFDIAVLQTNGKYRTKGNLSNDPSGFKVFDQWLQLHAEPGAWVVMEATNIYHEALGDYLLSQGYRVCVMNPARIASYAQSQMQRVKTDKVDAKLIALYGERHVGDLQLWQPEPLNVRQLQALVRRYEELKELFQMESNRLETAKADPVKESILSVSAHLERQIEQTLKTIREHIDDDPDLRGKRDLLKSIDGISDQTAALLLAELGTISRFESARAVVAFAGLNPRLRESGQHKGQVSISKMGSRRLRAGLYMPAISAMRHNEPIQALRMRLQKNGKTGKQIVCAAMRKLLQIAYGVLKSGQPFNPALALARG

SEQ ID NO: 102383 - protein, 300 aa, unidentified
MKILKQNVGVDMAKNDFVSTIVVLLEGQTVSIIRTRKFKNSKLGIIEFFEWINKYRDQTLPMHITMEATGVYYEELAYALFDTPDVIIHVLLPNTAKKYFESLNVKTKTDKVDSRVLGQMGVERTLNPWTLTSKIYRVLRTLTREKEQLIDERTKVKNQLHAETHSAQPYKPSVTRFKNRIKYLNNQIDSVKKEVEKIVSKDEYLSNKIKKIETVPGLGFMTIVGVIAETSGFTNTNSIKQLTSYCGYDVAIKESGNWNGKAKISKKGNSHIRRLMHMASLSSIKLNYSPFLRPLFCILN

SEQ ID NO: 102384 - protein, 349 aa, unidentified
MRFYQQQHRFYCGVDLHARCMYLCILDSAGQAVLHQNYPADASAFLDAVAPYRDGLVVAVECMFAWYWLADLCAEQGIPFVLGHALYMKAIHQGKSKNDRLDAAKIAGLLRGGLLPQAYVYPKAMRATRDLLRRRSFLVRRRADLLAHLVNTNSQYNLPPLNKKLVYPANRGELNLAERFSEPSAKKLVECDLALVDALDLQIHELERHLVRTAKVHDAQAYARLQSIPGVGKVLGLVLLYEIHDIGRFPAAGNFLSYARLVRPGHESAGKAQGFGNKKIGNAHLRWALGEAACLYLRASERAKRWQTRMQKKHAPGKVLGILAAKLGRTVYHLWRTKQVFDESRFFAS

SEQ ID NO: 102385 - protein, 430 aa, unidentified
MKSNTQNAKIEAITEKTLVLGIDVGSEMHYARAFDYRGIEYSKKPFKFSNTEAGFVTFKEWILDLKERHEKDKVIPGMEPTGHYWFNLGKFLQDNEMKPVLVNPHHVKKSKELDDNNPTKNDRKDPKVIAGLVREGRYMIPYLPDGVYADLRTASNIRFQLQAELTRIQNRISRWFNIYFPEYKTVYGKPDAKSGMLILKAAPLPEDILTLGIDGVNQIWRDAKLRAVGKARAKTLIEAAEHSVGSKEGAVSARMEIRMLLEDYESRNTRLQEVMVLIEELVRKIPMAEKLLEIKGVGIRTVSGFLAEVGDIIRFNNPKELQKLAGLALVENSSGKHKGETTISRRGRKRLRYLLFEVAMSLVSKNQEFRELHNYYITRRLNPLKKMQSLMAIAAKLIRVFYAMLTKGVDYDPKKMVSDIKRPAVYLQAA

SEQ ID NO: 102386 - protein, 388 aa, unidentified
MQTTAHQPQAPTAIRTDLGAIFVSMELSRTSWLLTSVSPGDGERMSKHAVRSGDVAGLRARFSLLKEKVRTRTGLAVSIIVIQEAGLDGFWIHRLLLCDGIESYVVDPASIATSRRRRRAKTDKIDGEALVRALLAYKRGEPRVCAMVRAPTPQEEDRRRICRERKTLTAERVEHVNRIKGLLFAQGIADYEPLLRKRRERLDELRTGDGRLLPQHLKAQVGRELDRLELVLQQMKSVEAERDASPKASDKETPTPAAMLKRLKGIGPEFANVLWSEGLFRSFANRRQVAAYARLAPTPWQSGSVAHEQGVSKAGNPRLRTTMIQLAWLWVRHQPNSILTQWFHQRVQFNGGRVRKVLIVALARKLLIAFWKYVTAGVVLEGAETTAA

SEQ ID NO: 102387 - protein, 409 aa, unidentified
MTAVMIGVDPHKGSHTAVVIGGAEQSLGRLRVDASAGQASELVAWAAEWPERTWAVEGAAGLGRLLAQQLVAAGERVLDVPPKLASRVRLLEAGDTNKNDPNDARSVAVAALRSRAVRPVAAEDHGAVLKIWARRHRDLARARNQVACRLHAVICDLVPGGVRKEIFAGHAAKVLDMITPAGPVETARRDLAAQFLEDLRRLDTQLAETKKRLAAAVRASGTTVTEVFGVGPVNAGTVVGDAGDISRFPSRDHFAAYNGTAPVEVSSGNRKIYRLSLRGNRRMNHAIHMAAITQIRHAHSEGRAYYDRKIAAGKTHKDALRCLKRKISDAIYARLRADAAITNPPTGKGPGGQKGNGSDSSAAGSHPERRLFGQATPGPATTLRPPARTPHQQPRTRRPEDLERSRNAT

SEQ ID NO: 102388 - protein, 394 aa, unidentified
MKLIGIDIGKNKHFFCVMDQQTGEIISQPVSFSNDKEGFDFLVQKIKSYPKDSILIGMEDTGHYHFALLKYLLDLQYTVALINPKTTDFNRKMQGGITKNDKLDTINICDVLDTPERKKQYRITKVNSFDLYEQKQLTRHHHNLKEEENVYKNRLQKCIDIVFPEFNKLFNSKYGIVYMNILKMFGSAENIANTDIRTIRKCFEIEGRGNRISLTPERLKECAISSIGISSSAEVIQIKHLTAQIELIEEQLTEIDKKIEEFSIQNNSPILSIPGISHFSGTSILAELGDISNYSKPSQIIKFAGVAPLHYESSQFNAQHTAITKKGSKYLRKTLYQIILPVIRHNPVFNKYYQLKISQGKGHRCAQGHCVRKLLRIIYHLLKTNQQFDPQLLR

SEQ ID NO: 102389 - protein, 343 aa, unidentified
MKVTTVGIDLAKQVFQIHGVDDHGKAVIKRQLKRAQVTEFFVNLSPCLVGMEACGSAHHWARKLQGMGHTVRLMAPQYVKPYVKTNKNDAADAEAICEAVARPNMRFVPIKNIEQQSILAVHRVRQGFVQARTAQANQIRGLLGEFGLVLPQGIHHIYRKTPELLEDASNELTGSFRLLILRLLDHLKELDKQVQEMEREIVQWHRQHEDSKRLEQIPGIGPITASALVASLGDAKSFQNGRQLAAWLGLVPRQHSSGGKQNLLGISKRGDTYLRTLLIHGARAVVQVADLKPDHSPTCRWASKILLRRNKNITAVALANKNARIVWAMLVHNRTYQIDYVPA

SEQ ID NO: 102390 - protein, 374 aa, unidentified
MGQNSEAFIGIDTSKLRNAVAVAEGGRAGEVRYQGEIDTTDAATRKLVAKLAAKYSKLTFCYEAGPTGYGLYRLIESLGHACVVVAPSLVPKKAGDRIKTNRRDAEGLARLLRAGELTSVWVPDERHEAMRDLSRAREAAVDDLKSKRQQISSLLLRLGLHYPGKKTWGKAHRNWLRSQKIAQREQRIVFEELLGAEGQAQARIDRLDVAIRAAVPEWSLAAIVTALQAMRGIDVVAAVTVLAEIGDLSRFASPRELMGYLGLVPSERSTGDSVKRGGITKAGNRRARRILIEAAWSYRHPPRIGREKQAKVDAAPKAVAEIAWKAQTRLSARFRTLAKKGKRPTIVVTAIAREMCGFIWAIHRAMTAAATATR

SEQ ID NO: 102391 - protein, 526 aa, unidentified
MNPKRSKPKNDRTMPMIHPNAAAIDIGATMHMAAVRADRTPEPIRSFGTFTTDLHRLVDWFTECGVETVVMESTSVYWIPIFELLDARGFAVFVVNARDAKHVPGRKTDVSDAQWLQRLHSYGLLRASFRPKGQIAQLRAYVRQRERLLEYAASHIQHMQKALTEMNLQLHHVVADVTGATGLRIIRAILAGERDSKVLACLRDYRCHSSAEAIEKALTGNYRAEHLFALEQALALYNVYQDKASACDARIEAVLKELSISRGRDAGLLPSPRRRLHGKANGPDFDVRAALFKLLGKDITQIDGLGSYLSLRLIAECGDDLSAWPSAKHFTSWLCLAPSNKISGGKVLSSRTRRSGSRASALLRLAAVTVGRTDTALGAFYRRLSARIGKAKAITATARKIAVLFYNAVRHGMEYVDPGSSYYETRYRTRVVENLHRRQSIRFCSAARGVESWCRFLGIVLQRQLPDLGVQRFHVHRGLARSVATARTKYLGRRFLKLGLPLRDLVRVHVEMLSQLGQRHLALNRG

SEQ ID NO: 102392 - protein, 329 aa, unidentified
MKLQHIIGADLSKKSIDLVCHLLKSHIHIENSVAGFKNLIQWLRQQKINPSKIMIVMEHTGLYSYCFESFLHQHQIPFCKVNALAIKRSIGLVRGKTDKLDAARIAAYGYEKKDKLTVDVPASDALKRLQMLHSTRDRLVKQRASLTCAIKEYKHIGISEKDIIMQTQLQLIKNFDKQIEKLMTEIETIIEEQESLKQNFRLLQSIKGVGKILALTTIIKTHNFTRFDNARKFACFCGTAPFDHSSGTSIKRKARVSHLADKQMKSLLDLSAKSAIQYDKELREYYLKRTRDGKSKMSTINVVRNKILYRMFAVIKRQTPFLENYLQAA

SEQ ID NO: 102393 - protein, 328 aa, unidentified
MKDLLEISCGLDVHKEKIVACILTGPLGKPTRSEIREFSTLIPDMIALRNWIVSKNCHHVAMESTGIYWMPIYEILEDAFSGDITLLVVNARHMKNVPGKKTDMRDSEWISTLLRAGLLNGSFIPEKRIREFRDLNRYRKSVIRDITSQKNRIEKFLQSSGFRLSSFISDIFGASGRNIILHLVEHGQIDKTALDSCLKTKTRNRIDEILMSVNGTLSEHQKAFLRILMTHYDSLKKHLAEIETSLEEDMAPFALQVEQLNSIYGISTTASCAIIAEIGIDMKPFKTAEHICSWAGLCPGNNESAGKRKSTSVTKGNPYIKSMLCEIA

SEQ ID NO: 102394 - protein, 335 aa, unidentified
MLYAAIDIHKRSFQAAVLDSESGEICEQRFGASREELSHWAMSLQGGVAAVAIEATTGWRWVWRELVALGFDVRLADPSEVKALRGTGKRAKTDRLDARWLVLLLAKELLPLSWLPPAEIQQLRDKTRLRKALAEDRTRWAQRLQAFLQHEGWPCARGRLLTAQGRRWVSGLALAPVARAHVETLLRLIDLVEDEQRALESELRRFARSDRRCQALETIYGIGPILACHILAELGEAKRFRRARSAVRAAGLDPVVADSGETTRRGHLAKHGSPELRWALVQAAHQARYRRSPDRALYGSIKARRKAAQPAVLTVARKLARRSYHVLHELEREAA

SEQ ID NO: 102395 - protein, 412 aa, unidentified
MEVMYPRCAGLDVHKETVVACVRIVAGGEVSRSVRTFATTTASLIELGEWLEVNGCTHVAMEATGVYWKPVWQVLADGAFELILANAAQVKSVPGRKTDVNDATWLSELLAHGLVRASFVPEPAIQELRGLLRTRKQLVREKASHVQRLQKTLEEANIKIESVLSDVMGRSGRAMIQALIDGETDPAKLAALAHWKVRASAATLREALHGRIKRHHRFLLRLHLQQVDALDAAIAEIDREADAGLACFRDAVNQLSTIPGVSELSAQVILSEIGTDMGRFATAAHLRSWAGLCPRNDESAGKRRSTRLRRGAPWLKAMLVQCAWAAARTKATYLHAQFVRLRGRRGPKKAICAVAASILTAVYHMLKDGTFYEDLGAAHFDRRRPEMQARRLVKRLSELGFSVELKPVAAIT

SEQ ID NO: 102396 - protein, 387 aa, unidentified
MIAVGIDIAKRTHEACFMGQDGRQIGKSRRFRNTRPGVGALLDDLRQLREPVTIGLEATGHYWLALHDELVRAGHSVQVLNPLQTHAYRKTTIRKLKTDRKDAWLIADVVRIGRGRAAYVPDETILQLRELTRFRWGLVDQIGDAKRRILTILDRVFPEYETLFSDVFIKSSRALLQQATSAAEFVDADLDELSAMLKKHSRGRFGAEKAEALQTAARDSLGITRLGGVASFELRALLEQIAFLEHQVAAVEQQIEAHLGQIEQHITDIKGISPVMAASLLAEIGEVHRFQRFESLVAYSGIDPSVFASGEFKATETHMSKRGSPHLRRALWLAAINASQSNPDLAEYLQRRLEEGKPWGTAIGAVARKLLSRIYVVLKHNRPYEVR

SEQ ID NO: 102397 - protein, 317 aa, unidentified
MEQRQSNTKIAGIDVGKKHLDVAVHGLEDELRVTNDVAGIAELIAWLRAREVGRVGLEATGGYERGVRLALDEAGFEVVVHQPIEVRLFARLKRRLAKNDRLDAALIAAATAQVDAVRAAQDPRLLELAERLTAYEQVTDLAAQLKAALEHVTLKDLIRDIRAQIGSLTRLKAKLLRQVLTAIKVQADLSARFRLLISLPGVGPVVAATLVVRMPELGVLRKGQAAALVGVAPFDRDSGQWKGLRFIAGGRTRPRRMLYLAALAAMRCNPALKAFAQGLIQRGKPAKVAIVAVMRKLIEAANLVLSRAQPWTPNPAT

SEQ ID NO: 102398 - protein, 356 aa, unidentified
MTSSSKYIGMDVHKESISIAVRNSAGKIVIESIIQTKASMILQFIDGLRGEVHVTFEEGTWSAWLYDLLKPHVSKLIVCDPRRNALLKEGNQNDRVDARKLAELLQNNQLRPVYHGDHGLRAVKELVRSYLTITKDVSRVMTRVKAIYRSWGIPCSGTQVYSARHRAAWLEKIRETGVRRRAEHYYQELDGLRSLRRVVRKELLVESKKHQVWKRLCGIPAIGPIRAAVLLGIVQTAHRFRTKRQLWTYSGFGVEGHSSADHQVVNGQLQRKKKPIEIRGLNKNCNHHLKNMFKSAAINASTKPGPFQDFYAALVAKGMRPEMARLTLARKIATIVLIVWKRGVCFDANHLKPQTA

SEQ ID NO: 102399 - protein, 426 aa, unidentified
MKQSTNTKLAANSVLIGLDWAKQKHDICLLAEDGTLEYGSIEQNAIKLKHWLDDLCKRFKGRRIAICMEAGRDPLLWRLEGHQQVDLFVVNTTTAARYRKTFAPSGDKNDQRDAASLLDLIRRHPEKVKPHTCVCAEDRAMDQLTKARRQAVNRLTSVISSLREVLELYYPLASRLFDTLDTQLAIDFLRKWPDPKELCKAEEATLVEFFHQHNSRSQKRIDERLKLIKECLPLTEEPMLLELSHMRIEEHLSQIESLNNSIKKYEDALERAFEQHEKKHLFECLPGAAKALAPRLLAAFSIHNPKNANQMQLICGIAPIRVQSGQSMCTFMRQQCPKFLRQSFHEFAGCSVKSSIWAKAFYEDQTKTKKSGSNAAKRALAYKWLRVLTACWLSNTPYNEMKYIAQLQKRNSPLAELISKNKTCTD

SEQ ID NO: 102400 - protein, 341 aa, unidentified
MEYCGIDLHAEQSQICILDEDGEVMETSRVKTSRKALERFFTRDRMRVVMEAGGSSPWVSRLLDSLGHEVVVCSPRRVRLIAESKLKNDKVDAEVLARLVRLDPEFLKPIQHRSEEAQLLRANLKVRSAMVEARTKWINSIRGLLRSFGYKVSGKAPHTFVDRVDQMELPSELKAVIEPLLEQLDLLSGEITRRNEHLEEMVKELPEVAHLREIPGIGPVVATYFVLTIDDPHRFRNSRDVGSFFGLRPSMRESASVTHFGRITKEGDPEMRRLLVQAAHACLLTKADSDLKSWALAIAERKGKGKAVVALARKLAVLMHHLWVTGEVYQALPNKETTQAA

SEQ ID NO: 102401 - protein, 356 aa, unidentified
MSRDLKYIGMDVHKEAVVIAVLSSSGKLVMESIVETKASSILQFIHGLRGELHVTWEEGTWAAWLYDLLQPQVARVLVCNPRRNALLKEGNKSDKIDARKLADLLRTGMLRPVYHGEHGLRTLRELGRSYQTISQDLNRVMNRIKALYRGWSIPCAGTQVYAPRYREEWLHKIEHAGVRRRAELLYQQLDGLQALRRTLRPELLAESRKHKASKLLRQIPCIGPIRAARLLALMQTPHRFRSKRQLWTYSGLGIETRDSAQYRYVHGELQRAKKPQQIRGLNRNHNHEMKEIFKGAATRASCGVGPLRDFYVALLAKGMKPEMARLTLARKIAAIALTLWKKEERFDAEQLKPQAA

SEQ ID NO: 102402 - protein, 373 aa, unidentified
MDKGISYVAMDTGKRSFRVAAGYAGRGERVEWEVVNEPAAVKRMVRKAQREGGGEVIFCYEAGPCGYALKRQIEALGVRCVVVAPSLIPVKPGQRVKTDRRDARKLVELFRAGLLTEVWPPTVEEESVRDLVRCREDVLEDLARCRHRLGKMLLRRGYLFGAGRSPWTQSHRRWMVAIGWEREADRMVFSDYLLAVDAAQSRLENLTAQLEAFALQEPYKMAVAALGCFRGVSTVTAMTIVTELHGIERFTSPRQLMAYLGMVPSEYSSSEKVRRGSITKAGNAHVRRVLVEAAHQYRHSPSVGRILRKRREGKPASIIAIADKAQLRLHRRYRRLLFRGKPYGTMIVAVARELVGFLWAALQENAAIKRQAA

SEQ ID NO: 102403 - protein, 348 aa, unidentified
MMIIGCDYHPSWQQICWLDTATGETGEKKLEHASGEAQKFYRGLPGPALIGMESTGNCQWFVEMATTAGHDVWIGDAAKIRAADVRQQKHDRRDAALILKLLLEGRFPRIWTPSREEKDLRQLLIHRYKLVRIRAQVKTELQHLAMNQGVTKKRKLWSKAGEKALRELPLKPWASRRREDLFRIREMLNGQIGLLDQAVVEAAEKNEKARLLMTQPGVGPVTAMAFVLTMGDVSRFQRGKQVASYLGLIPREYSSGGHRRYGSISKQGNRFMRMLLVEAAQGAVRCDPGMRSEYLHRCHRKAKGVAKVAAARKLAIRLYWMLRTNTGYPEIVRVESSSRVALVVRHGG

SEQ ID NO: 102404 - protein, 342 aa, unidentified
MNDRVLYIGVDAHEKESQVAVYEKGGELLQEKRLPTKRLPRFISSLDGRQKHVGMESVGFIYPIYDALVNVCCDVAVANPNNIQLIARTRIKHDKVDARVLGELLRTNFFPRSHIPDAETREKRLLTRDRVRYAVKRAELKNSIKWFLKRRGITIKKPLSMEGKAEIKSLALPELDYRLKELELVESIVDALDRRISITAAKDRGARLIDTIPGVGAYTALFLSSALDDVNRFQDSKHACAYLGLVPSLHQSGDLSYSGHITRQGNKWLRRNLIECARWSVRKDSHMQQFYLRVAHKRGKKKARVAVARRIVSYAYWMLKRNLTYEELAPWKTDRGLSPKFE

SEQ ID NO: 102405 - protein, 316 aa, unidentified
MKPQVFIGLDVSKQQLDVAVRPQGRHFVTPNDDRGVKQLVKRLAALKPQLIVLEASGGYEFLATAALAEAQLPVALINPLTVRKFAGATGKLAKTDKIDAQVLAHFAEALRPEPRPLPDQDQQVLKAALQRRLQVVKMIGQEKNRLEKTFIPTLRQDIQAHLTWLSQRLEQLDRDLSNQIRQSPLWRDRDRLLRTIPGIGPVVSRAVIAQLPEAGTLPGKKAVALVGVAPYNRDSGRFRGKRMIRGGRSYLRRMLYMAAVVASRWNPVIRAFYQRLLAAGKPKKLALTACMRKLVLIINAMMKNNQPWNQFINQVP

SEQ ID NO: 102406 - protein, 386 aa, unidentified
MCHGQWIKKEIRTFSAMTGDLLRMKGWLTDLGITHVAMESTGPYWKPVFNILEDSFEVILANARHIKNVPGRKTDVKDSEWICKLLRSGLLTASFVPPQAIRDLRDLTRYRQKLIQAASAEKNRIQKVLEDANVKLSSVVSDTFGVSASRMIKAIMSGNFDTDSLAELAVGRLKGKKEKLKEALQGHFRDHHGFMIQASLDHIASLEKIIADLDRQINEKLKDYHRERELLASIPGVKEQGSSSILAEIGAAMNVFPSEGHLSAWAGMSPGNNESAGKKKSGKTTHGNKNLRSILTQCAWVATKMKNTYLSAKYYSLVGRRGKKRALIAVGHKILIMAYQILKTGIPYKELGHDYLSRRKEDKIVKGHIKRLKDLGYQVELKKATA

SEQ ID NO: 102407 - protein, 415 aa, unidentified
MKLFVGIDSSKKTNQCCIVDDSGHRLKEICVTNNLSGANKLEYIIAEQARNLSVKSIKVGTEATDFYDFHILEFLASSETLEEYQTIFYRFNPRVIKAFKPSLRIREKTDPDDAYATAEYLRFQAEHAEQYRAKMAHLPLQRLTRFRCHLVEQLVREKNYFLNQLFLKFSAFEKKEPFSNTFGATAVAVISEFMTPEAIANASTEELVDFVIKHGKNRFSNPEEIVKKLQYVARESYRLKPALAESVHHILCLSLANIRALTANLKKLDATIDKQLNTFTQTLTSIKGIGNVYAAGIFSEIGDITRFPGEEQIARFAGLAWLRHQSGNFEAQTTRLDRQSNEYLRYYLVEAADSLRRHNTDFGAYYQKKYAEVTRHQHKRALVLTARKLVRLVDALLRTNELYQPAKQTKHQETV

SEQ ID NO: 102408 - protein, 356 aa, unidentified
MKILALDIGKYKSVGCDYEAETGRHSFATVATTPQALHDLLVEREPDRVVIEICSIAGWICDLVRTLGIEIQVANTSDERWSWRKVKQKNDRRDALKAAQLSAVNQLRPVHVPRLEIRQWRALIAYRQQLVRRRTKIKNHTRDLLQREGVILLRGRKAWTQMGMAALQELVKPLSESSLNELWRGELGVELAQLKELQQQIEVVEAKLDELGAADARVRLLRTIPGVGPRLAEAIVTMFDDPRRFGSGREVSAYVGMVPKQFDSGETERSGRITRQGNRLVRSLLVEVAWASLRHNAWARQCYQRIHGGKKSRKKTAIVAVGRKLLVRCWGMLRHQTPWHWEMKTAIPVSSELRVG

SEQ ID NO: 102409 - protein, 374 aa, unidentified
MQTTRSFVGMDVHKATISISIAEDGRNGPVRFLGVIPNTPEEIAKIATRLSRYGELDFCYEAGGCGYGIYRQLTTLGHRCMVVATSMIPRKPGERIKTDRRDSQKLAILHRSGDLTPVWVPDATHEALRDLVRARVDATMHLMRARQQLLAFLLRHGRSYTIGKNWTQRHRSWLAGQTFELPVHRIVFQDYVEAVWAAQERRDTLIDRIAEMVSSWSLGPLVEALRGLRGIDMISAATFIATTGDLSRFDSPRLLMGYLGLVPSEHSSGGNIHRGGITKTGNREARRMLIEAAWSYRYPARVAKEKAEILVRLPKIIRDIAWKAQTRLCARYRSLIAKGKKPTVVVAALARELAGFVWAIGQEMRLNMFASQQS

SEQ ID NO: 102410 - protein, 361 aa, unidentified
MNEGKDIIVVADYHAENVEFRWFNGTTGEERTGRYPTTRAGILRQVEQAAGELERGGRIVWIMESTTGWSRVKDLLGERATFVLANVLQMPLPPKAKRRKTDKIDTARMLREYLHGDLPQSFQPSAWWREVRRVVDCRQDLVERQTAIKNWIGSLLHHETWEDRKNLWSDKGLRRLRAMKLSPSDTALVELKVQQLEQLAKQLEQVEARMRTIYAGWEEAQWVDQVRGIGMVTAVSVLAHIGPIERFATAEDLISYAGLAPGMRQSDGTCRHGRIGGGGTDSHLRYLLIEATTWLCQIPRYRPTYDRVMKKRGKKIARIVVARLLLRSVHKMLTDKVRFNPTPRLAPRTTTKTTATTGCSR

SEQ ID NO: 102411 - protein, 315 aa, unidentified
MAKQLPLVNVGVDVSKDQLDVYLLERDLLFSIPNDEQPIAALIKRLARYRLERIVIEATGRLEHAFVSAAIAKGLPIVVVAPLKVRRFAQAAGQLAKTDAIDARLIARFAAALKPTTRPPIDANSQIIKDLVVRRRQLTSLRTTEKNRRSVMPEALTPSIDRIIESLDREIASLEQLIQNAVEQHVAWRHKRDLLTSMPGIGPSVASSLIGDLPELGSLSRRQIASLTGVAPFNRDSGNFHGKRRIRGGRAHSRTALFLSAMVAIRYNPDIKRFYQRLLQTGKHKKVALTACIRKIVTALNAMLRDNKPWQSSFA

SEQ ID NO: 102412 - protein, 337 aa, unidentified
MEQQRQYVGIDLHRRRSVIVRVNEDGQVLGVDQVMNDPVEFAVAVAKAGPDPEVALEATYGWYWAADLLEANGAHVHLVHPLGLHWDTRRVKNDVRDSTELAKRLRRGDLPEAFIAPAEQRELRELVRYRAKLTSLRTSAKAQIHAVMAKEGILPTLDDMFGPGGRALIAQMPFEGAYRLRVDSLLKLLDHYAGELVVVEAELAARLAGHKGYEAIQAIKGVGPIMAAIFVAEIGDAFRFPTARHLCSWAGLTPSHRQSDTKVQRGHITKQGNHLVRWAAIEAVARYHGGDPIAPTYQRVARRRGRNIGRVAAARKLLTLVYYGLRDGNIRCLAVTT

SEQ ID NO: 102413 - protein, 347 aa, unidentified
MQILALDLGKFKSVSCCFDTEAQTTEYGTLRTDRPYLTAVLRKQQPELVVIEACSISAWVHDLCVELGYRILVCNPNQEAWRWKNVKRKTDRDDALKLAKLAALGQLTPVHIPARATREHRWLVKYRKTIVGRTNRVQNIIRALFQQHGLSLPVGARCWTHASLEAIAAQSKPLADCGPEELWRGQLAQELAAYHRLHNELAGLEKKLTALAEQDPRIGLLETIPGVGRVTAEIIATHLDRPERFTNARQVSSYAGLTPRQYQSGLMDRQGGITRRGSRLLRSALVECAWAMLRYNPWARQHYLRLVRGQKNRKKKAIIAVARKLLVRCWAMLRDQQPWTAPAPAAA

SEQ ID NO: 102414 - protein, 355 aa, unidentified
MNDAKYIGLDVHQATISAAVLDSAGNLVMEAILETKAEAILQFIHGLRGSLHVTFEEGTCAAWLHDLLKPHVAQVLVCDPRKNALIKAGNKSDRTDARKLADLLYLNKLNPVYHGEAGIRTLKELSRSYLTLTRDATRVMNRLKALYRSWAIPCAGQKVYAPRYRSEWLAKISESGMHRRAEIYYQQLDALRSLREQVRRDLMAEGRKHSVMKLLRQIPSIGPIRAVLLIALMQTPHRFRTKRQLWAYCGLALKTSTSGEYRIVEGQLKRSKKFLAIRGLNANHHHDLKNIFKGAATRAAAVPGPFQKFHAGLVARGMKPTMARLTLARKIAAITLIVWKKGVRFDAEYLKQQAA

SEQ ID NO: 102415 - protein, 364 aa, unidentified
MKRKVYVGMDVHKETIQIAYFTSNSKEILKEQQIKHNEVQIKKFIKKLKTEWNEIHCCYEAGVTGYPLYRYLKSLGVNCILVAPGKIPRQNTDKIKTDKRDAIKLARLMRSGELESIHVPSEEDEAVRDYLRSRDSLRLDLGRNRQRLMKFLLRKDIKYSTTKYWTVSHYKWLNNLHFNNEILQETFNDYYSRVRVQEENLNSMDKKIQEIAESEPYREKVGILRCFRGVDYLTAMFLLCEVNDFKRFKTAGSFMSFLGLVPGEYSSGSKRKQTGITKTGSPRLRRILTEAAWQHRFPGTGSKIITARRSGQPALVVALAEKASLRLHKKFRNLQLRGKTPQVMITAVSRELSGFLWAAMNLVA

SEQ ID NO: 102416 - protein, 310 aa, unidentified
MRSCVGVDVSKQHLDWVLGGEGTVARINNTAAGVRSLVKKLRKHTVALVVVESTGGYERPLVEALAKARQPVVLVNPWRVRRFGEGLGVLAKTDPLDARILALYGERARPPRRPLPGPAQRQMADLIRRRRQLIAMVTAEKNRLDTATAVIRQDIQTLVKILERRVAKIDERIDAAIQADPDKAKNWKRLQSVPSVGPGVARALLIDLPELGTLGRRQITSLVGLAPFARDSGRKTGQRRIRAGRAAPRTALYLAAMNAARFNPTLKPVYQRMVQAGKPPKVAFIALARKLLTILNAMVRDQTMWQDANA

SEQ ID NO: 102417 - protein, 370 aa, unidentified
MSSVARPAGPVHVGMDTSKNTIMAAVLWPGEESPVTERILSEEPSVRRLLDRLAGKAGGREWLRCCYEAGPGGYDLYRLLDSMGIACDVVAPSLIPKGSGDRVKTDKRDSRRLARLHRAGELTAVRVPSRDEEAVRDLARARTALLEDRKTAQKRLTAILMRHGRTWRGPTYWTRAHRDWIAAQKFAEPALATAVSCYRAALQTRETELAAIEAELLPWVSREPLAGPAARLMCYRGIAELTALTLAAEVVDWRRFPAARAFMGFTGLCPAEASSGDTARRGHITKAGPQTVRTALVESALAYRHPAAIGAVLRRRQRGASPDTLARSWKAQRRLHDRYVHLVSHGKTPPEAVTAVARELAGFTWAEMTS

SEQ ID NO: 102418 - protein, 335 aa, unidentified
MLIIGCDLHTRFQQIAYLDMTTGEIVTRPLEHENCEARKFYAGLPEKARVGIEATGCTQWFERLLAELGHELWVGDAAKIRAGVVRRQKTDTRDAEHLLDLLLTHRFPRLWVPTPEERDVRQLLQHRSKLVSMRTSVKNQLHYLAMNQGVCRKRQLWTKRGRAELLALNLGPWASRRRQELLELLDRLDPRIEELDEVVKAEAERRPEVVNLMQQKGVGPVVGLAFALTLGPVERFANSRKVVSYLGLNPREYSSGGHQRLGPISKQGNEMLRWLLVEAGQSAAQYDPELRRKYQRLKFRRGANVAKVAMARQLAVRLYWRLRSAGCGTAGSHAK

SEQ ID NO: 102419 - protein, 355 aa, unidentified
MNRIKYIGMDVHLATISIAVLDAAGKLLMEVTIVTQAAALLDFIRGLRGTLYVALEEGTCAEWLYTVLAPQVAKVVVCDPRQNPRRLGEKKSDRLDARKLAEWLCLGTLKPVYHGNPLGPALRESARSYRTLVSDTARVMNRLKALYRGRGIRCAGTRVYSPRWRGEWLEQWLEPGVRRRAERLYQQWDLLLPLRQEARAALLAQSRQHAAQKILRSIPALGPVRVALLIALLQTPHRFRGKRQLWAYAGLALVTRSSADYRVVDGQVARSRQPALVLGLNANHNHALKGLFKDAAVTALAHPGPLKDFYTTRIAPGMKPELARLTLARKIAAITLTLWKKGERFNAEHLKAQAA

SEQ ID NO: 102420 - protein, 347 aa, unidentified
MRGAIHMQITTIGLDIAKNVFQVHGIGAAQKVIVRKQLRRGQVMAFFEALAPCLIGMEACATSHHWARELTKLGHMVRLMPAKDVRAYVKRNKNDAADAEAICEAVRRPTMRFVRIKSAEQQGQLMLHRARDLLMRQRTQVINALRAHLAEFGITAAQGREGIKELLAVVVQDEGSRLPVDAHASLTVLAAQLQSVQTMIGTLEKRIIAQHRSNEASKRLETIPGIGVIGATTIAAVVPDPRVFRSGRDFAAWIGIVPRQDSTGGKQKLGPISKQGDQYLRRILIVGAHAVLRRARQQPDKYPWLTQLLARRPFKVVAVALANKMARIAWALLAKGGTYRAPQLVAA

SEQ ID NO: 102421 - protein, 358 aa, unidentified
MVQSKGINFEGQNIYIGIDVHLHSWHVTVLTSGGYRRKHSQEASSSALFEHLKRHYPGGRYLAIYESGFSGFSTYYALTSLGIECVIAHAADIPTGQYENVMKTDAVDSEKLARALRDGSLKHTVYVPDREILDDRGMVRFRKLLQNQLAGYKSRVKHLLYCNGVSLPACFANSNTHWSRHFMRWLHEDVRLLSSTRHTLDLLLEQVERLRVDILGVTRRMRLLSRTERYAARMSLLLSIPGIGLINAITLLTELESPDRFHSQRSFAGYLGLVPTCHDSGEKKQHGELTFRGNKRLRVLMVEGAWVAIRHDAALAAAYGNYRKRMEPQEAIIRIARKLSNRVFRVLKTGKKYEYERY

SEQ ID NO: 102422 - protein, 418 aa, unidentified
MEGLQPIHRRVAGIDVHRMLHVVTVLIEQPDGSIERHSREFGGFKRDCRALAAWLSDLGVQLAVLESTGIYWKSLYAHLERAGIPAWVVNAHAIKHVPGRKTDVADSEWLAVLARFGLVRGSFIPPQDLRELRLVSRYRRKLSAMLAAETNRLHKILDDGGIKLGAVVSDIKGVSARAMVAGLIAGHDEAALLAQARGALKRKSEALAASLDGDLSARHLFVLKHLQAHIDLLERELSELDAYLIAAMRPYAWAHGLLQTIPGIDEVAACLILIEIGDDMTRFGSPERLACWAALSPGNNESAGKRKSGRTRHGNNIIRFILCECANAARMTKSSLAAKYRSLMVRKSHKKAIVAVAHKMIRLIFLLLQRRQPYIDPGINYAEMSARKNAPRWIKQLKAIGKWPSTAATSRTAAAAAA

SEQ ID NO: 102423 - protein, 338 aa, unidentified
MRLYAGIDLHSSNNYLGIIDEEDKRIYKQKLSNDLREVLSALEPFKEEIEGVVVESTFNWYWLVDGLMEDGYRAHLANPSAIKQYEGLKHVDDVHESFFLARLLRLGILPEGYIYPKEERPVRDLLRKRLQLVRHRTSHILSIQNIITRNTGKRIGGNDIKKVDEEWVSDLFKEEHLLLSINSSVGVIRCLTDKIKRIEKVVKGEVKLRKEFKGLLTVPGVGDILALTIMLEVGDMGRFKEVGNYSSYCRCVRSIRISNEKKKGEGNRKNGNKYLSWAYVEAANAAIRSYPRINRYYQRKKAKTNGIVAVKAISNKLARASYYIMRDQVAYVAKKLFN

SEQ ID NO: 102424 - protein, 403 aa, unidentified
MTVFVGVDWGGEKHAVCVLNDKAKVLAHFEVTHDAEGLSSLLKRLATIGAPADLAVAIEPPSGLLVDTLVAAGHPIVPIHPNAVKACRPRYRAAGGKNDLGDAYLLADVLRTDGHRFSRLAPQSDAIKALRALVRTRDDLVAERVSVTNRLRALLESYWAGATCIFSAIDSPIAIAFITRFPTPKSAASLNEKRLAAFLEQQRYSGRRTAAEVLARLRAAAPSVCSEIEAAAKAEAAKSLIRVLCTLQEQLASLSSRIEADVAQLPVGKIVMSFPRAGKINAAQIVAELGDVHARFQTEAQLAAEAGVCPVTHASGKSHGVRFRWACNHRLRVAITTWADNSRHASLWAADIYAKARGRGCDHPHAVRILARAWIRILWRAWTDRQHYAVEKHSRAAAFDKVA

SEQ ID NO: 102425 - protein, 338 aa, unidentified
MAIVTVGIDLAKNVFAVHGVDATGRVVLQRPSVTRGKLLELIASLPPCLIGMEACSGAHHWARLFAAHGHTVRLMAPKFVVPYRLSGKRGKNDAADAAAICEAVTRPNMRFVPVKSISQQSELLVHRARQGFVQQRTATINRIRGLLSELGIVLPLKAATVRREALLQLEDLPGWANTVVGDLLSEVTHLDERIAQYDRHIHCIAQQNTPATQLMQLGGVGPTTATALVATIGSGRDFKSGRQLAAWLGLVPGQYSSGGKQRLGRITKAGDPYLRMLLILGARAVLQSAKNRADPVSKWAVQLAARRGYWKAIVAIAAKNARMCWAVLNRGDQFRLPA

SEQ ID NO: 102426 - protein, 352 aa, unidentified
MIVLGADMHKRSHTIAAVAAGTGELAGELTVDVGKRGFAVALEWGRGLGGERVWALEDCGHVSGAFERFLLVHGERVVRVAARLTAGERRSGRDRGKSDRIDAIAVARAALREGLERLPVAELAGVELDIRLLVDHRERLVRMRVALYNDLLWHLHDLWPELAIPGCSLLYKKWAIRIARRLARAEQTARIRIARDELRHLRELSHTIDALEAEISQLVTQAAPQLLAEPGFGALTAGKLIGEIAGAHRFASDAKLARAAGLAPIPVSSGNTNRHRLDRGGNRQINTAVHRVAVTRARCHPETRAYLDRKRAEGKTTKEAIRCLKRHLARRIWHLLTDAAPPGPEHPHPSTS

SEQ ID NO: 102427 - protein, 346 aa, unidentified
MHYIGMDCHISTLDFAVVNEAGRLVKADRVTTSVNSFIGFVKTVPRARTIYMEKGTLAAWALETCVRFGEKLVITDPKQNHWIGSSGQKDDPLDALKLAQLARGGYIKEIHHPVGQRRRFRELMIAYHDTVRSTTRIKNKIKAKFRQNGILCTGATVYSETYREEWRRKLPRETTLLLILEGLWRQMEQSEQTEKELLAAARAQAKRYPEIKHFEALPGIGFIHAATVSAMLETPYRFADKRKVWMYAGLGIMRRSSGGKVYSEKLSTDYNRLLKYTMKQAAEAAIQAKDSPFRRKYLDMTLLHGIAPHRAKLTIARDMLATMWAMWRKGENYSPEIREKAAYKQG

SEQ ID NO: 102428 - protein, 364 aa, unidentified
MLIIGCDYHPSFQQIACVDTDTGELNERRLAHREEAEQFYRELKQRNLAVRVGMESSGHSRWFERLLHELGFELWIGDPAEIRTKRVRKQKTDRQDAQLLLRLMMENRFPRIWVPDAENRDLRQLLWHRHRLVQMRTRVMNQLHVVPLNEGLRRKKALWRPAGRKELESIALAPWASRRRQDLLDLLDQLTPKIQELTRALEEEVEKRPVTRRLMTHPGVGPLTALAYELVIGTPERFHCGKQLASYIGLVPTEESSGDRRRQGHISKQGNVLLRFLLVEAAQVTVRSQPEWRNKFFHLAMRRGRKIAKVAMARKLAVHLYWMWRQGCDYSQTHKLGSHAGKPGNPDGGQSITDVMIGHPAPSK

SEQ ID NO: 102429 - protein, 343 aa, unidentified
MKEVSTIGLDLAKNVFQVHGVDGSGKTVIRRQLRRGQVLPFFRRLPPCLVGIEACATSHYWAREITALDHEVRMMPARYVKPYVKRNKNDLADAEAICEAVTRPTMRFVPIKTPVQQSILMLHRTRELFVRQRIMLVNALRAHLAEFGIVAGAGRNGLEKLLEVIADDQDGGVPPEARDCLLALRDQLALVRQEILEADRRILAWHRASELSRRLDDIPGVGPLIATALAASIPDPQAFRSGRDLSAWIGLVPKQSSTGGKERLGHISKAGNRYLRKLLVVGALSVIRRAKQTGASRHPWLVALMTRRSTKVAAIALANKIARIAWALMVRGTRYQEPLPQAA

SEQ ID NO: 102430 - protein, 414 aa, unidentified
MSLKIVYQICCGIDVHKTFVVACIAATNSKGVTTYKSHRFSTYTKGLKELLQWLIDNNCTDVCMESTGKYWIPVFNILEKSCTIVLAHPKYVKAIRGKKTDKKDAKWIADLFKHDLVAGSFMPPSDIRQLRDLMRYRFKLTCFMSSEKNRLQNCLTVSNIQLGNVVSDTFGKSSQNILDKILENPLDTSFDIEPLIHGSMKAKLPELELAIDGYITPEQAGKLKVIKHHTEDLESRKAELETLILALANPYQQELDLILTAPSFKNIFSAIGIISEIGVNMEAFPSAKHLCSWAGLTPTNNESAGKKKSVRVSKAGCFIKPLLVQCATAVVKSAKHPEIRNRYLQLKKRRGHKKAIIAIARMLLSALYNMLKKKEPYNAELYRKSDALPIDREISIEQAILFAKSQGYRVKPVH

SEQ ID NO: 102431 - protein, 377 aa, unidentified
MYSENIAAYVGLDVHKETLAVAIAAPERLGEVRYYGTINNEAQAVRRLFQKLQGLYGNILSCYEAGPCGFRLYHQLTAMNIKCQVIAPSRIPKSPTDRIKNDHRDAISLARLLRAGELTPVWIPDLTHEAMRDLIRARAAAKRDSRVARQRILSMLLRTDKHYAGKHWTGKHRTWLANQSFSQPSQQIAFQHYCQSLEQIEDRILQLDQEISRLLPEWSLCNLVCQLQALKGVGQLIAITLVAELGDFSRFSNPKQLMAFLGLVPGEYSSGNSIRPRGITKVGNSELRRLLYEAAWSYRTPAKVGAWLIYYRPDSVTQYSKDIAWKAQQRLCSRYRSLTAKGKKSQVAITAVARELTGFMWDIALAAQSSFSQQKQN

SEQ ID NO: 102432 - protein, 349 aa, unidentified
MRFYNQPHRFYCGIDLHARTLAVCVLDCDGTAVSHGTIAASPAAFLKAVEPFRDGLAVACECMFAWYWLADLCHEEGIPFVLGHALYMKAIHGGKAKTDKIDARKIAVLLRGGMLPQAYVYPRGMRETRDLLRRRTFLVRRRAEALTHLVNTNSQYNRPPLAKKLAFAANRAELDLPARFTDPSVRRNVELDLALIDAYDEQIRAVELYLTRAAKVDDPQAYARLRSVPGVGAVLGLVMLYEIHDVRRFPEEGQFLSYARLVRCAHESAGKKKGTGGNKIGNAHLKWAFSEATCLLLRSSERAKAWLARRERKHGKRRALGALAARLGRAVYHLLRKGEAFDEQRFFAS

SEQ ID NO: 102433 - protein, 342 aa, unidentified
MYYIGLDVHKKTISYCIKDASGQVHQEGKIGATRYELDSWMKTLPRPRSIAMEATIFTGWIYDHLLPHAEQVKVAHPLMLRAIAAAKKKNDRIDAGKIADCLRCDFLPECHMASTEIRDRRRTLRYRHLLVRQMVQMKNRISGLLMETGVSYNKQRLHKVGYFRELLSSNEEINGSIRPLLRLSRETIVRLQKTEYALVSSLQRDPVLADRIERLRTVPGVGPITALTWALEMGDVSRFRSIRQAISYCGLCGDEKSSADKVMRTPLSKQRNKYIQRVLVEAAKLAPRQDHELARVYETEKQKGNSNRATLAVARKMVAYLLAVDRQAREFVPAEEYKTAVA

SEQ ID NO: 102434 - protein, 354 aa, unidentified
MDGTLVKNEVILGVDTHLDTHVGVVINDQGKVIGILTSIPTNRAGYLKLLTWARSLGNVRRAGVEGTGTYGAGLARLLREQDIEVWEVNRPDRAKRRLQGKSDPTDAESAARTVLSGNATATPKSQSGVAEALRMLSVARRSAVKARTQTINQLRSLLISAPDDLRERLWKTKPEECVAGCARLRKAKGSVLHQTLAATLRLLAKRWLMLSAELKEIDVTLDRLTSQSAKRLRNQFGVGPQTAATLIAVAGDNPERLRNEAALAALCGVSPLQASSGKTIRHRLNRGGNRSANNALWTIAMVRMRSEPRTQSYVARRAAQGMSNKEIQRCLKRYIVRELYPLILADLSDAAAIT

SEQ ID NO: 102435 - protein, 444 aa, unidentified
MSPKRKRTHLRGERGQAFADKIRGIPMDRILCVSLDVHKYFHVVMMHNALGEIVTPTFEIGIYQAGFEQLCQAIDAAVAQIQAQVVLLGMEPSSHYFENLARHLQARSQPVTLINSYAVKKNRDQQLMQREKDDEIDTAAIGDLLRRGEGTPYKPASGVYLEMQHLDRVRLSKVKIRTMLQNQIIGHLDRIFPGLLIIGNAAQERYTPLFATDFWDCKTLQHLIRVCPNPHHLVALAVPDLIAAFHAQGYAMGRKTAAKIIAYAQKILLPDAELAAIRCELLQHDLALLEAVEFHIAQLEERLAALLTTTPYFILTKLKGLSTIQVASLAAATGDPANYKYAAQVFRRAGLVCGRDDSGIRQHRGKGKHITKVGDVYLRRALLAIVATLIMHQPELRTYYHKLKRSKPAGVARVATARRALGILWAVVRDQHSAALIFKRGETM

SEQ ID NO: 102436 - protein, 407 aa, unidentified
MRILYQRCCGLDVHKKSVVACVITPEARETRTFGTMTADLLELADWLLGKAVTHVAMESTGVYWKPIYNLLEGTGLELLVVNAQHIKAVPGRKTDVKDAAWIAELLQHGLIRGSFIPDRAGRELREIVRYRTQLLRERARAVQRIQKLLEGANIKLSSVATDILGVSGRAMLTALAAGEADPVALAEMAKGRMRSKRTELAAALRGLVGEHQRTLLRSGLRHLDFVDEEVVRLDAEVAERMLPFQRELAALDAIPGCARRSAESFLAEVGADMSRFATHRHLASWARLCPGSDESAGKRRSGATGRGNPWLRGTLVEMAHATARSRSYLGAQYHRIAARRGNKRAAVAVGHSILVIAYHVLRDGTPYRELGGNYFDEREREAVAHRSVKRLERLGFKVTIEEATEVA

SEQ ID NO: 102437 - protein, 437 aa, unidentified
MNDEPAFAAFIAIDWAEQRHYWHMWIAAEQRHEKAWLNHTPEAIDRWAAGLEQRFASAPVAVCLEQSRGPLVFQLAKYAHLVLYPVHPTTLARYRAAFSPAGAKGDPGDAGLLLEILRHHREHLRRLDPDTPETRLLAMLTEQRRRLVDERTRHSNRLTACLKLYYPQPLDWIDNIDAPLGCDLLQRWPTLQQLQRARPDTLRRFFLAHNCRSAQRVEQRIEAIRQSTAAVHDPALLQAGATATASLVALLQTLNHQIAGLDQRLAELTPKHPEAYLFAGLPGAGPVLLPRLIVAFGTQRARFSSAAELAAYCGIAPVSRQSGLTKMVVFRHACPAFLRQTFHEFAACSKLKSVWARAFYQLQIDRGKKHHAAVRALAFRWIRILFRCWKDRIPYDESRYLRCLEQRHSPLLASATAPECSDGVEDPLLGSETNEAE

SEQ ID NO: 102438 - protein, 388 aa, unidentified
MPNTNVVKKFNFNGQKFYIGLDVHKKSWTVTIRSQGLRIAHFTQPPNPEALVNYLSKNFPGGVYFSAYEAGFSGTHAHEKLCLLGIQNIIFHAADLPSTDKQKKNKNDLHDSRYIAEQLEHQKLKPIHILSAEKQQLRALFRFRESKVRDVTRANNRLKSFIMLFGITLPENLNGDRLSIKALKWLSNLNLQSEAGSLTIKQHVNEVMHQRKQVFELTKQLRHQINSTNLSAYQSLLSVPGIGAITAMGLIAEIVDFSRFKNTSDFCSYLGLCPWEDSSGDKMKTKGMQPRCNKHLRPLIIEASWTAIRNSPQLFYYYSKHAKKGPTKAIVKVARKIALMAKALVLKNELYDVKYYSFGETINEKKKPDERFSSGIAEKHQKEKSGVA

SEQ ID NO: 102439 - protein, 390 aa, unidentified
MQVIGHRREAPSAIRNDLGAIFVSLELSRSTWLITSLSPSGGEKMSKHSVPAGDICGLLARFSELRRKTFARTGKSFPIIVIQEAGLDGFWVHRVLQNEGIESHVVDPASIATSRRRRRAKTDRIDGEALLRTLLAYKRGEPRVCAMIKAPSPEEEDRRRLCRERKVLTNERVLHVNRIKGLLFSQGVSGFEPLRRDRRQRLDELRTGDGRPLPKHLKAQISRELDRLELLLVQIKAVEVERDALLAAQQVAALAPAAMLLDIKGIGPEFAAVLWSEGLFRHFDNRRQVASYAGLAPTPWQSGSVAREQGVSKAGNPRLRTTLIQLAWLWLRHQPQSALALWFEERVRRNGGRLKKTTIVALARKLLVALWKYVTAGVVIEGAVMKTVGR

SEQ ID NO: 102440 - protein, 434 aa, unidentified
MAAVMIGVDPHKGSHTAVAIGADEVPVGLVRVRACAAQAERLLTWAKSWPERIWAVEGAAGLGHLLAQQLVAAGERVLDVQPKLAARVRLLATGAVNKNDPGDARSVAVAALRSAACLPVRPDDHAAVLKIWARRHRDLSRARTQVACRLHAVLCELVPGGLSKEICAAQAAAILDQAEPGGAVRQARLELAAEFTADLRRIDVQLRETRKKLAVAVRASGSTVTEVFGVGPFIAATMIGDVRDVSRFASRDRFAACDGTAPIEVSSGNRKVHRLSLRGNRRLNHAIHMAAITQIRYQHSDGRACYDKKIAEGKTPKEALRALKRQISDAIYQHLKADAARAAAAGAQGPGGQPGNDSVASAASSHPERQLFGQATPGPVTTLRHPADQQERASSHARKRPHEPLDTKRHRYAVCPERGVRRCRRSPARTVLCQ

SEQ ID NO: 102441 - protein, 389 aa, unidentified
MFYVGIDVAKDKHDCCILSSDGEILFSPFTIPNTLYGFDELYEKIGSLTDDVSEIKVGLEATGHYHLNLLRSLLDNGLPSFVINPLHTNLFRKGQSLRKTKTDKVDAASIAMMLLTDKTLKPYSETSYHNEELKSLTRYRFDKVQERSQLKVSVSRLVSILFPELEKMVPTLHMNSVYTLLSEFPGASYIAGVHLTRLKHLLYEASKGHYGRDMAVSIRSAAESSIGTVMASKSMELKHTISLIQVISAEIEEIEAAINDIMNSMAPPITTIPGLKNRMGAMIIAEIGDFTRFDSADQILAYAGLSPSTYQSGQMTSSYSRMEKRGSRYLRYALFNATKYVCIWDPSFKAYLTKKCGEGKHYYVGISHACKKLVRLIYRMQITGESYRG

SEQ ID NO: 102442 - protein, 384 aa, unidentified
MSRVVIGVDPHKASNTLVVIDAQERVLAQQRFANDRAGYRSMKAFARGHRDRVWAVEGARGVGAGLAQRLVAEGEPVLDVPARLSARVRALGGGSGRKTDDADAFAVAVAGLRARDLQVVRPDDTVEILRLLSTRRQEVVALRIATVNRLHDVLCQLIPGGAKRHLSATKARALLSAVRPRDPVGKARKQLALDYLGELERLDARLKELKKSLVEMLDEHPTTLREINGVGPINAAKILAETGDVRRFPSRHHFASYTGTAPVDVSSGDNNRHRLNRGGNRRLNHALHIAAVVQYRMPGPGQDYYRRKRDQGKTHLEAMRCLKRRLSDVVYRHLVHDLTAGSPGGQVGASLQSNAADLIPMASTSEQSLPGLAHDPTPDLAVVS

SEQ ID NO: 102443 - protein, 411 aa, unidentified
MDRIYDNCCGIDVHKKLIVACFRKGNKQEIREFGATTRELLEMADWLKDGGCEMAAMESTASYWKPLYNILESSGLNAMVVNARHMKAVPGRKTDVRDAEWIADLLQHGLLQPSYIPDKEQRELRELVRYRKSLVGERTRELNRLQKMLEGANIKLSGTVSDINGKSARNILEYLLTGASVDGPKYDEMYEQKIIAHNLKATKEQIIDDLNGVMSPLQRRMMKELLAHMDELNIHIKNLDDEIDSFMKPEEKQASHAIQDVTGIGNTSAQAIISVIGTDMERFPTDRHISSWAGLCPGDNESARKRKSGKTRKGNSLLRTTLITCAHSAVKNKKSYFHAQFMRISSHRGKKRAYVAVAHSMLIAIYHILKDGVVFKDLGADYYNQFNKERKINAYLKKLKALGWEAPVVAA

SEQ ID NO: 102444 - protein, 343 aa, unidentified
MKYFAGLDVSLEETAICVVDESGRIVKETRAASEPQALSDALRKVDLPLERIGLEACSLTAWLHDGLRGEGWPAICIETRAANAAMKTMPNKTDRNDARALAQIMRTGWYRQVHVKSRQCRLWRSLLVARRTVLNEMRSIENVVRALLREAGVKLGTPSRTAFAGRVRDLAGAEVMAMVEPLLSILSVMLKEFARLTKQVLDIVRKEEVCRRLMSAPGVGPITALAFRATIDRPERFGSSRAVGPHLGLTPARYQSGETDIQGKVSRCGDELARTALYEAAHSLLVRSKKWSSLRVWGMNIARRRGMARARVAVARKLAVILHRMWADATEFRFGKEPAALAA

SEQ ID NO: 102445 - protein, 346 aa, unidentified
MEQYVGLDVSLEFTSICVVDAAGAVVWRGTVVSTPEVIAAAVRARAPHVVRIGLETGQLCTWHWHSLRELGLPVVCLDARHAQAALSMQVNKTDPNDAHGLAQLVRVGWYKEVAVKSLGSHRLRTLLTSRAQLVNMRRDLATKIRGLLKTFGLVVGKVGERAYAHRVRELVAGEPGLEAAVHALLAVRDLTDRQIAALETRILAFAKSSDPCRRLMSIPGVGALTAVAFVATIDRPQRFARSSGVGAYLGLTPRRYQSGEVDHAGRISKCGDGLTRTYLFEAAGTLLTRVSKWSTLKAWGTRLAKRVGINKARVAVARKLAVIMHRIWLDGTSFRWSDRQKAAAVA

SEQ ID NO: 102446 - protein, 391 aa, unidentified
MIYVGIDVAKDKHDCFITNSDGEVLFKAFTITNNLDGFNDLYQKIETVMKDITKIKVGLEATGHYSYNLLGYLIDKGLPTYVINPLHTNLYRKSLSLRQTKTDKVDARTIASILMSDVNLKSYSDISYHNEELKSLTRYRFDKVKERAKLKSSVSRLICILFPELEKLVPTLHMASVYALLSEFPGAKQVANAHLTRLTNLLSEASKGRYSKDTAITFRDAARTSIGSNMPAKSLELKHTIKLIKELDSEIDEIENEIKIIMDEINSPILSIPGINYRMGAMIIAEIGDFSRFDSPDKILAYAGFSPSTYQSGHLYGAYAHMEKRGSRYLRYALYNAAKYVCHWDPTFTAYLAKKRAEGKHYNVAISHAVKKLIRVIYHLEKTNQQYIKAS

SEQ ID NO: 102447 - protein, 427 aa, unidentified
MNISECSLLELKCQDRHTKILHQRALSHKLCLFLGRFKPQICKPMKAVCGLDVHKDSVYLCILSEFGELIEKVFGVLTYQLEEMRDLMLHHHVVEVSMESTSVYWIPIWRVLSPHFKLNLANPYFIKQLPGRKSDVKDAQWIAECTMKELIRGSFVPPETIQQLRQYDRRIFDLNEEIVRKLSKLDAVLQRCNIRLSNYVSNVDSKSYKAVVRAISQGITAPEELVKLIHGRIINHHGIDVITASLKGVVSLAEIDMISQLRDELDMAEAHKEKCQARMLEICEREFPEELKRLQTIPGIKERAATSLIAEIGTDMNKFETANHLASWSGLKPRNDESNKKIKSRSITHGNVYLRKTIIECAWAASRTKDCFFSRFSFHQTQVRKKNKMKVLVAVARKMLIAVWHVLHDNTIYIDFTTDRKTSRIKG

SEQ ID NO: 102448 - protein, 410 aa, unidentified
MQVLYERCAGLDVHKKTIVACLMITLLSGQVHKEVRTFATTTAGLLALADWLESQQVTHVSIESTGVYWRPVFNILEAICTVILVNAQHIKAVPGRKTDVRDSEWLAELLRHGLLKASFIPPQPIRDLRDLVRYRKTLVYERSQEINRLHKLLETANVKLTSVVSDVMGKSGHAMIEALLAGQSDPEALAQLARGSLRGKLPQLREALEGRVDAHHRVLLQHLLSHIAFLEQSLHQLTGEIEQRLQPYEQAIERMVQIPGLQRLTASSILAEIGDDMSRFPSQRHISSWAGVAPGNKQSGGKRLHAPTTKGNTRLRAALAEAVWAISHTKGNSLSAQYHRLARRLGKKKAIVAVSHSLLIIIYHLLRDHTDYRDLGSTYFETLDKERLRTAALRRLESLGYTVTLEEVPA

SEQ ID NO: 102449 - protein, 411 aa, unidentified
MRLFVGDDWAEDHHDVELMDEAGRVLARKRLPEGVAGMARLHALIGQQLGEDAEDAEVVIGTETDRGPWVAALVAAGYTVYGVNPLQASRYRERHGVSGAKSDTGDAHMLTDMVRTDSHQLRAVAGDSPDAGAVKVVARTHKTLIWERTRQVQRLRHQLLGYFPGALEAFEDLDAPDALELLGKAPDPARAARLTRAQVSAALKRARRRDIPGKATAILAALRSAQLGQPPAVTAAYAVTARALIALITVLNEQVKVLEEQVGTHFGRHPDAEIYLSQPGLGPILGARVLGEFGDDPGRYASGKARKNYAATSPITRASGKKKVVAARFIRNQRLTDALMAQALSALTASPGARALYDAERDRGTEHNPALRKLANRLVGILHGCLKTRTPYNEATAWPQQENIHQSDLAA

SEQ ID NO: 102450 - protein, 347 aa, unidentified
MVYVGIDLHRNRSQIAVLDWDGEQLLSRRIVNDPDVFRELLHGLGDDAQIALEATYGWEWLADLLEEAGYELHLAHPLRTKAIAAARVKTDAVDARTLAHLLRADLLPEAYIAPRELRDLRDLLRHRVALTRMRSALKQRVGAILAKHGIARPYSNLFGPGGSRFLAELELREGPRRRLDSLLALIAAFDREINTTTEEIEQRASEDPYVDVLCQIRGVGRYIAMLVIAEVGDITRFPSARHLCAWAGLTPTVRSSDGKARLGHISGQGSPALRWALVEAAQHAPTGGGPLRQSYERIAKRRGKQVAKVAVARKILTLCYYGLRDGEIRCLAPRAKARTLRTTAVTP

SEQ ID NO: 102451 - protein, 415 aa, unidentified
MNSFCGIDWAEGHHDIAIVDGEGKLFAKKRISDDSAGFTVLTEMLAAAGDSFDDAIPIAIETPRGLLVAALRATGRPVFAINPLAVARYRERHSVAGAKSDHADAMTLANILRVDSHLHRRMPADSELAQAIAVLARAQQDAVWRRSKASNELRSMLREYYPAFLDTFAGKSATNLAKPEARAVLAIAPTPAHAAKLIKTRVAAALRRAGRKRGIDGLAVNILEHLQAPQLRQPELVEKAMGRQALALLAMLDAACTGADELAQTAAEEFRKHPDYAVITSFPGLADLTGARVLAEIGDDRDRFADDRALKAYAGSAPITRASGKVTSITHRRIKNDRLAAVGWVWATYAYINPGPAQDHYRRRRDHGDRHAAALRHLFNKMLGQLHHCLQTRQTFDPIKAFGQPRTAPREPAAA

SEQ ID NO: 102452 - protein, 400 aa, unidentified
MSERKSQVWAGVDAGKGHHWAAVVDQTGATLWSKKVDNDESAILTALGEILDLAERVHWAVDISGTSSALLLALLAAHGQQAVYVPGRTVNRMSGAYRGEAKTDARDAYVIAETARHRSDFAVIDVPAQLAADLALLTSHRSDLVADRVRMINRLRDVLTGVFPALERAFDYSSHKGALVLLTGYQTPAAIRRRGRARLTAWLANRSVRGADAVAATALEAAQAQQTALPGEDVAAQIVADLAAQILALDDRLKRIDKQIRETFRTHPQAEIIESMPGMGPILGAEFVVAAGDLTAYVDAGHLASAAGLVPVPRDSGRRTGNLHRPKRYSRRLRRVFYMSAQTSIIREGPNRDFYLKKRGEGCKHVQAVIALARRRASVLWALLRDDRVFTSAPPATQAA

SEQ ID NO: 102453 - protein, 362 aa, unidentified
MRIIGCDLHARQQAVAMVDAETGEVVNMTLKHEGNNVREFYSSLPRPVRVGIEATGSMQWFVNLMEELGIECLVGHPAEIRAAEPRKQKHDRRDADLILKLLAENRFPAIWLPSKELQDLRALLRHRHQWVRMRTRIQNALQSIALANGLRRGTALWSHDGQNTIASLPLAPHTAYRRNELQALYAKFEAEIEKLNQRVEEQACGRAGARLLMTHPGVGPVTALATDVFLGDPARFADSKALASYVGLIPREYSSGGRQRLGGLTKQGNPLLRFLWGEAGAHAVRRDPELQRFYRRKVIQKGFGKASVAVARKLGIRLWIMLRDQIEYNEFCRRGQKQQKSSEACAGMPETRYGANSHRPID

SEQ ID NO: 102454 - protein, 309 aa, unidentified
MKEPSVYVGVDVAKEWLDVAWGTEHQRVTNCRRGWKQLGDWLGESEVPVHVICEASGGYERGLVKALQGYGIKVSIAQATRVRQFARAVGIAAKTDEIDAQVLCAYGYALRPCVSATLGPEQEKLRELERQRRHLTRLLVAEQTRGLQLCEAVTRTSNRSLIRQLTKQIDSIDLLIEKVIDQSEELTAKAKKLTAISGVGRRTAALLLAQMPELGLLNRGQAAALAGLAPLNRDSGKWRGKRTIFGGRRAVRSGLYMAALVATRHNPILAAFYQRLRAAGKPPKLALTATMRKLLLILHSSLKPQSMYA

SEQ ID NO: 102455 - protein, 338 aa, unidentified
MKLYCGIDLHSTNNYLGIYDQDDRVVYSKRLPNELGVVLQSLEPYKAELAGIAVESTYNWYWLVDGLMDQGYRVSLANPAANAQYSGLKYTDDRYDSRWLARMLGLGILKTGYIYPKEERPVRDLLRKRMRLVQHRTAHIVSVLNTITRNTGSSLSWSKIEAMTDDQVSHLLGDGLIGMAPRASLEVIKSLNQEISKIEKTAKAQAKLRSEFELLKTVWGVGTILGLTIMYETGEISRFSQVGDYCSYARCVGSVRISNGKKKGENNTKNGNRYLSWAYVEAANFASRFYPQAHRFIQRKRAKGNHTLAVKALGHKLARASYYVMRDQVEFDPARLFG

SEQ ID NO: 102456 - protein, 345 aa, unidentified
MKCDKYMGMDVHQAMTVVVVLDADGKVILETMVPTEAAAIIRLVQSLSGPLRVTFEETTQAAWLYEVIRAYVTEVIVCDPRRNKLLEDGSKADKVDARKLAELLRAGLLRSVYHGHEATRNLKELVRAYETLSIDTQRTMARIKAIYRARGIQTPGRGVYQPKQRERWLELLTDAGIRQRATWLYEQLDQLQPLRRKAKQAMLAESRRHRAVSLLRTIPQMGPIRCAFIVATVDTPHRFRTKRQFWSYVGLAVVTHMSSEYEMTAGRVVRRRKPVATRGLNHNCNRRLKEVFISAATGGSLHEPYKPFLERLKQNGMRAEMARLTLARKIAAVALIVWKKLNWTT

SEQ ID NO: 102457 - protein, 523 aa, unidentified
MSTHRKSAKAKGSRKRFIGKPGGQIQARVRAAGPERFGIVAVDCAKRRSKWMLCDFYGRVIVEPNEVEHTKGSLQTMIEQIRQAAKSDGLADFIVAVEMTGIYHKPVQRACRKARFDTRIVHPFASKHYRQPLHPDIKTDDRDLEAIFHAAAKGYGLTTLPVDDVYLSLQAASRHRHNLVKQRARLMVQIRRLMHQTMPGFADLFDEDKLFHNSIALPIALQFSSADAITKAGVDGIARHLRNAKVRFQVRTIEKVVAWAATAAEPSELASLYSRQWKELNDVRQLLSEQIFATEREMAGFLGKTPYILLLSVTGINVVSAARLAGEAGPIEHYASAMAINGRAGLYPSRYQSDEVDRADGALVRQCNRKLRGAAMLVAENLMKCHPYYRGLSALWKQRKVDPRDRRCRVANRAMRMVYQLVAGRQVWRGQGVDREYLLAKLQEFHQVHKTPLEQAIRDLNAAFQWLPESAYAEEAQPLEALVTKKHRGPKPIGELMIPLLIRLGIQVSQEVQSETSEARSSD

SEQ ID NO: 102458 - protein, 342 aa, unidentified
MNGYYCGLDVSNKSTAVCVVNASGRVVKQLQTSTTERGLREGLKEYKGLRCVVEAGPLAESICNFVEKVGHKIEILDPRRAKAVTSGKRKTDKLDAEKLAQVCRTGWYTRVHRKSGKARGLRSYLTARMQMVKTAGALASTIRGIFRAHGIIIAVGKDGKFEANVLQALKKAEPMLHAAITPLLKAWKGANLCEKQMYRTLNRQVARQSQEIRNLMTVPGVGPATAAAFVATIDTPKRFASSEQVGDYFGLVPSLYQSGEVEIRGRITKHGDELMRFLLVEAATTILSRCKKNFALRQWGLKLQEKKDFGKARVAVARKLACLLHHLWITGKPFDASRAVAA

SEQ ID NO: 102459 - protein, 455 aa, unidentified
MPDAITGDRPELKPVNIGAAAIDIGSKMHVAAVNPTCTDMPVRAFGTFTQDLHDLADWFKACGVNSVAMESTGVYWIPAYEILEQHGFEVILVNARYAKNVPGRKTDVSDAAWLRQLHSYGLLRGSFRPDAEIATLRAYLRQRERLVEYAAAHIQHMQKALMEMNLQLHHVVSDITGATGMRIIRAIVAGERNPAVLATYRDVRCHSSIETIRAALVGNDRDEHLFALTQSLELYDTYQAKMLDCDRKLEALMAALSDKGTKPIGKLSRPRVKTKQVNTPSFDVRAALYSVLGVDLTEIHGLGPSLALKLIGECGTDLRAWPSAKHFTSWLCLAPGNKISGGKVLSSRTRRSSSRAAALLRLAATTIGRSDTALGAFYRRLSSRAGKAKAVTATARKIAVLFYNTLRHGMTYRDPGANHYEEQYRSRVLANLKRRAKSLGFVLQSVPGDAEAAFS

SEQ ID NO: 102460 - protein, 439 aa, unidentified
MPRYVGLDVHKQFIEACFIDEQGKQLHRCRVAVTRESIQTFVAKCLQPSDHVVMETTTNTWEVADLILPQVAKVAIANPLKVKAIAESKIKTDKVDAGVLAQLLRCDFLPEVWIPDKTTRLLRQMCAYRAGLAADQTRIKNRIQSLLAQRLIPVPVPVLFNGCGRNWLSNLELNPQDRVLVDGCLRVLDQLELEKSGLQKALAQLSYDNDQIRLLMTLPGVGAAGAQALYAALGDWKRFKDGAHVASYLGLSPSTRQSANHCYHGSITKAGNSLARWLLTQAARQVAQHPGPLGVFFRRIHKRKNFNIAVVATARKLVTIGFLMLKNAEPYRYSLPGPTQRKLSVFRVEATGSRRSKSKLRLPMQRREPGTRVQSIPSLDEVYFSENLPPVTKADALASGERRMLQQMGIANLPERLQVVQTRTYQFRKQHPEPKKNPS

SEQ ID NO: 102461 - protein, 349 aa, unidentified
MYYIGLDVHQRRCVLCILDQNGCVVKEIRVNGHWREILELLGNLGHPFAICYEASCGYGPLYDALKPLAARVVVAHPGHLRLIFRSKRKNDRVDARKLAMLMLLNEVPQVHVPRAEVRNWRGLIEFRGRLIAKRVRVKNCLRALVRGQGLQLASGKGLWSRKGLAHLAGLELPSVVAVQRDLLLEEKKELDGKIARVTRELDKIAKQQPAVWLLRTIPGVGPRTAEAVVAYIDDPKRFARNRQIGVYFGLVPCQDQSADKNRLGHITREGPATVRKLLTQAAWQGILRSAQIKAYFERVQHGDPKRKKIALIATAHYLARVMQSMLRTGEVWRHDVQSEASARKKEQAA

SEQ ID NO: 102462 - protein, 356 aa, unidentified
MVNISKLDFSGQHLYVGMDVHKKSWSVCILTHQFEHKTFTQPPDPSVLANYLNRNFPGATYHAVYEAGYCGFWIHDRLREKGIDCIVVNPADVPTKDKERAGKTNKVDCRKLARSLRNGELVGIYVPTRPNIEDRSLLRTRRNMVKKQTRCKNQIKSMLAFYGTHLPTDIVHRNWSSKFIKWLEAIRMEKASGNVSFKVHLQELQHIRGIIVELNRNIRALSRTDEYRAKAQFLRSVIGISTLTAMTFLTELCNIDRFGSLDKLASYVGLIPNTDSSGEEDTTTGITDRRNRILRHLIIESSWIAVRKDPALMMAFERLSKKMKPTRAIIPIARKLLNRIRYVLKNQKEYVPAVIQ

SEQ ID NO: 102463 - protein, 344 aa, unidentified
MGEVSTIGLDIAKSVFQVYGVDVAGAVVIRKRVSRAKVLEYFRDLPPCLVGIEACPSAHHWGRELRMLGHTVKLIPPSYVKAYLKRSKNDANDAAAICEAVTRPSMRFVPIKTKEQQTALMLHRTRQLLVRQRTMLSNALRGHLAELGIVSAKGRNGTGELLRIIADGADSRVPQAVRGILDVLARQYSAIGAEIGSIDKSILALHRSCEASRRLAEIPGIGPIVATALVAEIGDWKAFSSGRSLAAWIGLVPKQHTSGGKERLGGIAKQGNRYLRWLLVVGAMAVIRYAKMHDTKNRPWLARLMERRPTKVAAVALANKIARMAWAIMVRGERYKEPKLLLAA

SEQ ID NO: 102464 - protein, 448 aa, unidentified
MVQRSGGLTRGDRRRNERVEALRAVVRTDRAILGIDLGEDKQVAALLDHDGRVLGRKVVKAKAYALDGLLGWAAELAAKRGLAGVVVGCEPTGHRWRSVMELADQAGMGFVGVQPLQVHLSREADDYTRDKTDHKDAVLIGKLVARLDCYLPERADARWAQLRHLGQRRARLVTEMVACGQQINDLLACCWPAALECAAQPLESTTWLACLAVTMDRCDGDPGKLRKLGRDGFQTAVRRELPRFGAKRLYGPIAEALFTALGDQRGVPAQRRGGLQRVGLLLGDWRSALARLDQVEDRMIEVLDQLGLTELVSSIPGVSTIGAALILAETGDLTRFATARSVVKHAGLNPTEHTSATIRGRTRISHRGRPALRTAAWRAVWGAQRYNPALRAKYTHLTTRQANRLTPGQARTACAAALLRWLYAIVTTATAYNPTLATSTHTHHATAA

SEQ ID NO: 102465 - protein, 420 aa, unidentified
MTKTNAIPAGALLVAIDVAKHRNAVLIEPAGAKRRRSLVFLNTREEHDRLVTVLSAYGCEVVCALEATGHYHRPIAWRLAETGFEVRLISSLAMARTREALHNSWDKNDPKDAQVILHMLKIGAVQPFHDPLRAGINDIQELSKTHEAVSRAKTEIQHRILTHYLPLYFPEVERFRGNTRSDWFFAFLDAFPTPAVITALGKDGFITAAWNVVGRKVSKERLLSDIYETARTSIGLPLPLDAAAITMFRMVIAEARSLIRQRDEIEAMADSLLKDNPDYQSLRSIPGIGPIIALTIIAEAGDLRRFHHCRQFLKFCGLDLSTQQSGLYRGQTRLSKFGNARLRRSFWQAAQVAVKYKENGFRDKFERYIAKDRDNPDLRRKAMTAITAKMARVAHAVIKSGSDYRPFFEGRVPGGRTSSA

SEQ ID NO: 102466 - protein, 462 aa, unidentified
MKNKPSSGRARKRLNKHLEQINLYAAGIDIGSESHYVAVPEGLDDEPVRRFCCFTGDLERMADWLVRIGIQTVAMESTGIYWIPCFEILEERGLEVLLVNARHVKNVSGRKSDVSDCQWLQQLHTYGLLSGAFRPEEQVTALRAYMRQRETLVRYASSHIQHMQKALRQMNLLLDNVVTDITGKTGMSIIRAIVEGERDPDKLAAYRDPRCRKSVQEIARSLKGHYREEHLFALRQSVELYDSYLAQIRACDEAIERQLSLFDAQGDPDQLPVNKKKSALNAPAFDVRSELYRMCGVDLTAIDGVSDITALKVIAETGTDMSRWKNEKHFASWLGLSPGNKISGGKILSSKTKPTANRAAAALRMAAFALSNSQSALGAYYRRMRSRHGAPKAITATAHKLARLIYSMLKHGTEYVDQGQDYYEQQYKERLMKNLKRKAAQLGFVLVPSSEDDGVVTEISMA

SEQ ID NO: 102467 - protein, 406 aa, unidentified
MRVVQERCAGLDVHKSSVVACAMLPEGKQVRSFGTMTWQLEQLAQWLQGLAVAVVAMESSGVYWKPVFNILEAAGFELLVVNARHIKAVPGRKTDVKDAEWIADLLRHGLLKPSFIPNRAERELRELTRYRRTLIEERAHEVQRLQKVLEGANIKLEDVISNVVGLNGRRFLSALIEGDYDPEAVAATANYGLQRKRELLAQALRGTLGAHQRFLLDQLLSHIDFLEQRIASLDQEVQSRTRPFEPLIARLDQIPGLGTRAAEEILAEIGTDMSRFPSHRHLASWAKVCPGNNRSAGRQRSGYAGMGNRWLRSILVQCAWCAARKKDSYFKAQYHRLAARRGKKRALLAVSHALLTVIFHLLRDGVVYQDLGGNYFDQRDRSQIARQAVRRLERLGFHVSLTEGAA

SEQ ID NO: 102468 - protein, 339 aa, unidentified
MKTTKKTYYNHYLAIDWSIDNVQIARMRAQSEKIITKGFAPEIEQIKDYLASIKGKKIMTIEETTSSHWLYVELLDYVDRIIICDPYRNSLLSEGPKNDKIDARKLCLLLRSGLLKEVYHSVNDDYKIRKLVSSYEALVKAAVRVKNQKSAIYRAEGLKYKKDKIKKQDEILSFIDERQNALIKLYTEEKEKYKKKFREIKSRNKTIKMLCGISGIGPIFAIKIYAKVIDANRFENKYKYWGMCGLVKHNRESGGRSYGKKRPRYSRTLKSIYKSAAMAAIGGKNDIRDYYDLLLKQGYSIPEAKNQIARYIAKVSYAVMKNKIPYKAYQWRELKKVAA

SEQ ID NO: 102469 - protein, 388 aa, unidentified
MSKPIDLSKSLTALDQDSTLIVVIELSQSSWLVAARAPGLARDPLKKLPPDPEQLFKLIERWREESRRAGRVVRRVCVAFEAGRDGFWLARLLRQHDIEAYVIHPTSIPVKRDHRRAKTDRLDTELLMRAFLGWLRGEADHCSMAAIPTLAEEDAKRPSRERESRVNARSRLVNRMKGALARLGIRGFNPKLRKAAEQLEELRTGAGEPLPPNTLAELRRDMAQLRFVADQIKQIEKAREARLEKAPREGAHPMVLMLASIKGVGLETAEMLVAEVLSRKLRDRRAVARYGGLTGSPDESGSRSREKGLARSGKARVRRGMIQLAWRFLMFQKESALAKWFEARTANGPRGVRKTMIVALARKLLIDLWRFVEDGTVPVGVELFDSRA

SEQ ID NO: 102470 - protein, 345 aa, unidentified
MEHTTIAVDVAKSVFEIGISHRPGHVDKHHRLSRNQLAIFFAAQPPATVIMEACSSSHHWARQFMRFGHDVKLLPPFYVRPYVHRSKTDRTDVKGMLEAWRNSEIRPVPIKTEAQQQLIAFHRVRSTWIATRTARINTARGILREFGIVVADGASRVPTRVTALIEDADTELPMGVRDLLNELVVEIRQLTSRIESVERQLAAMAGETPVVERLRSIPGIGLLTATAFIAFVGNIERFPSSRHFACYLGLTPREHSSGLRRQLGHISKRGDAYIRMLLTHGARSVLLAAKSKSKSDKFSTWAVDIDRRRGHNKASIAVANKMARIVWAVWKYGNPYGVRSVPDSR

SEQ ID NO: 102471 - protein, 425 aa, unidentified
MTPPVSITSPPVWIAIDIAKGQHQVLIEWAERQRTVLRVPNNRPEIDRLIARLHEAGRRCVIAFEPTGDYHRPIAYWLGQAGFQLHQVSSLAVARTREALFNSWDKNDPKDAQVILHLLKTGATQRFVDPMAHGYVDLQELANTYQQVSLRKVRVYHSIVTHHLPLFFPEAEPYLHTSRANWFPEVLRLTPCPAAVRQYSKAAFIVAALETVGGQKRDKRRWLADFYDMAQTSAGLPVAADSEAMQLFRVVLEEYQHLCALRKRLEAEVVERLGAHPDFVRLQTLPGVGPILAMLILAEARDLRRFGHVRQFLKYCGFDLCTEQSGQFRGSTHLSKRGNARLRYAFWMAGTVAIRMTENSFRRKFEDYIRPDPKNADRRRKAYSAVAAKVARVAYALITTGTDYRRFPETARPSGRIPSPRAVEA

SEQ ID NO: 102472 - protein, 372 aa, unidentified
MDQHNRLFVGLDVSKLKISVAVADGERGGEVRFYGDIASDPNSVTNIVEKLAKRGAVLHFCYEAGPTGYELYRQLTGMGHDCVVVAPSLIPKRPGDRVKTNRRDAVSLARLHRAGELTAVWVPDRGHEAMRDLVRAREAAQEAQKRARQQLQSFLLRHGRIYSGRSSWSLAHMRWISTLKFEHPAHFIVLKEYCQAIEDAEGRLKRLTDLISETVKSWTMAPVVEAYQALRGVSLIAAVVFVAEIGDIRRFENPRQLMAFLGLVPSESSTGEHVKRGGITKAGNSRARRMLVEGAWAYRFPARVSRTKQAQLEGLPRTVREIAWKGQLRLCSRYRKMILAGKHKAIAITAIAREMGAFLWAIGQEVQPADHA

SEQ ID NO: 102473 - protein, 346 aa, unidentified
MKISRVGVDLAKNVFQLHGADRKGKTLWKRQLSRDKWLKVLFATVEPGTVIGMEACTGAHHWSRILISKGYEVKIIPPQFFKPFVKSNKNDANDAQAICEAMARPNMHPVKVKTIEQQDMQAIHRIRNEIKTHRIAKANQIRGLVAEYGLVAPKELSSLRSAIPDWLEDASNGLTMFFRQLLQGLYEDLCSMDKRMTELDKQIAVIAQQNPIAKRLQQLRGVGPLIATVLVATMGDGKQYRKGRDMAAAIGLTPRQHSSGGKDRLLGISKRGDAYLRCLLVHGARSAMRTAKDKDDRLSRWITNLQDRRHANVAACAMANKMVRMAWAMMAKGVDYDPDFSSVSAN

SEQ ID NO: 102474 - protein, 311 aa, unidentified
MPSPLVYIGLDIAKATLDVHHQGQAHTFPHDPGGCAALLALLGSLDGPVQVVCEATGGWERPIVQALWAAQVAVSIVNPRQVRDYARGAGLRAKTDRIDARVLAEFGATHHPKPTLVPSATQRELAAWVTRREQLQGLLNAENARQIPGLPKSIARALKASITHLEKQLAQAVATIAALLAATPELAAQAARLRVIQGVGPGTAATLLGHLPELGQVSARAIAALAGLAPFNDDSGPRRGYRRIAGGRASVRRALYMAALSALRCNPVLRPFYLRLRASGKPQKVALIATARKLLTTLNTLLQNPHFIPCS

SEQ ID NO: 102475 - protein, 339 aa, unidentified
MESFVGVDLHRKVSQLAALREPKPASQLRFPNNTVTVEKVLKKLPQGSKIALEATGSWWWFVELAQKTGHEVVMSHPKQTKAIASARLKSDKVDALMLAKLLKADLLPTVWIPPATQRYVRELLTHRARLVRQRTAVINEVHALYAKRNIDPGMIFHRVRPPAFMAKELSGYGPRIVEEDAELLAFFNRQLRGLDNELQKIAEEDVESKRLMTIPGVGPLSAVAVNCWIGTIERFSKAKKLSSYFGLAPRVRQSGDRERHGHITKEGNRMVRSLLIQAALWHIRLGKGASRKHYLGVLKRRGKQIARVAAANKLLGIMFHMMKERIDYQEFLRRGSSAQ

SEQ ID NO: 102476 - protein, 322 aa, unidentified
MYECIGIDISKSTLQIYLGRFDQDIEVENSPKGLKQLYAKVKKLYSKEVKVVWIYEPTGSYSALVKRFCFEHDILSYIIKPSQSSAFAKTIKNRNKNDIVDARMLYKMHIVASKEDVVVPKYDAQLDSLHNYLRYYKALIKERVIKTNQLEAALHRDDESFIIRKLRSKIKALKDEEKEIIQTMLKSVEENAEYKEHFLSITSLKGIGNISGLVLFELFMQYKDASAKEIVALCGLDPVEVSSGSSIKRKSRISKQGSRLVRNALFMPTLTAINHNPHMQAIYDRLKENGKHSTVAQIAVMRKMVAIAFSLFKTKQHYEMDR

SEQ ID NO: 102477 - protein, 416 aa, unidentified
MDSGCDSQIGGMQMNSVGIDISKGRSTIAVMRPFGEVVISPFEVRHTDSELSELARQLKSLNGETRVVMEATGNYHASVAKLLHDAGLYVSVINAKLVHGYGNNDLRRVKTDRKDAVKLANYGLDRWLTLPRYVPEEDTRLLLKNCYRQYRQYSKVQTVLKNNLISLLDTVFPNVNRLFSSPARADGSEKWVDFVAKFWHCECICERSEKAFVSKYQKWCKKHGYNFGEEKACAIYAEASGHIGVMPKSETTKLLVEQAVSQLRATSAALAALKHEMQSLASVLPEYPAVMDMFGVGPTLGPQLIAEIGDVRRFYSKKALVAYAGLDAPPNDSGDVTGRHKSMSKIGASSLRRTLFLVMSVYLQNAPLDEPVYQFMDKKRAEGKPYRVYMMASANKFLRIYYATVKAYLESLEHTA

SEQ ID NO: 102478 - protein, 412 aa, unidentified
MRLFVGDDWAEDHHDVEVMDGAGKKLAARRLPEGAAGMAQLHALIGQFVPEDDMDGAEVVIGIETDRGPWAAALVAAGYAVFPVNPLQASRYRERHGVSGAKSDAGDAHMLADMVRTDSHQLRSAAGDSPEAAGIKVLARTHKTMIWERTRAVQRLRHQLREYFPAALEAFDDLDAPDTLELLGKAPDPARAAKLTRAQVSAALKRSRRRNVKDKTDAILAALRSEQLGQPDALTAAYAATVRSLLAVITVLNEQVKALQGQVEEHFGRHPDAEVYLSQPGLGKILGARVLGEFGDDPRRYRDGKARRNYAATSPLTRASGKKKVVAARFIHNDRLVDALNAQAFAALGASPGARAYYDELRAREIEHNDALRRLANRLVGILHGCLKTGTLYDEATAWGHRENLPQSSAAA

SEQ ID NO: 102479 - protein, 490 aa, unidentified
MKVSLGIDVACRADHRASLAGPDGEFLWSGWRFRTSPLDLEALWSKIPAGAEVQVVMEPTRNAWVPLQAWLEARGAVVVLVPPEQSADLRNYYNKHTKTDRLDSRVLARLPLLHPEGLESVTGPTPADPFRRAVRRRTKLVKARTAVFQRLDALVELLGPAWADALGEGYSKSALVVLERWADPRALRRLGRRRLTDVLVKASRGAWREPKADELLAAAEESLELWKDGGLDLDELAADIAAEVRVARSLSAEIATLEARIAPMFAAADRRPETPDDREATPPTREGDDERDVGIVASLPGLDGILGAGILARFGDFDRFHSLAGIRSFTGLVPSIDQSGNSSGHGRPTKAGDPGLREALYLAADHLRRVDPHFAQRYHRLIVEEGKHHESAVCTLAAVAATRIAACWRRRECYVLRDTDGREITKTEGRAIVAERYTIPDDVRRARRRVANAKHLKGRTDRRDQKSTRAAPASGPSSANRTGKTTERVA

SEQ ID NO: 102480 - protein, 361 aa, unidentified
MNYIFVGCDSHDKTLVNKIALNRETAERKTFAASRAGRRKMIEYLKARSHAAGNAKVVVAYEASGNGFILCDELKQAGFECHVLAPTKIERSTKQKRNKNDDRDADRLLEILRGHYLAGNKIPSVWVPDPQTRDDREPVRGRQDLSQKQTAVKTQIQMLLKRHGLEKPEGVGRWSKPYRQWLKALAEDAHGGWGVQKALGSLLRQLEFLGSEIKQLDQAMEELADTPRWKPIVAAMRKESGVGLMTALKFSTDIADFSRFRRGRQVGSFYGLTPSSHESGDNDDRKGHITPEGSPTGRQVLCQSAWSRVRHDKHEREVYGRLVLKNPKKKKIAVVACMRRLAVRLWHVGFQAQLQMKANEV

SEQ ID NO: 102481 - protein, 416 aa, unidentified
MKIVRPICCGMDVHKNIIVATIGITNKKTRITEYIQETFSTLNPDLLNLKQWLINHKCFDACMESTGKYWIPIFNILEDEINIYLTHPKYVKAIKGKKTDKKDSKWICDLFKHDLIKFSFIPPKEIRALREISRYRYKLVGMRSSERNRYQNCMTVSNIGIGSVFSDPFGKSAQAIMKEVLESDIIEDEKILKCIHGSCKNKDKILDSIKHCNIETDQRFKMNESMTHMEELQVHINNCEIEIMKRAAPMFDRFMHITQLPGISTLSAILIISEIGVDMKQFESDKQLACWAGLAPANNESANKKKSVRISKAGQYLKPLLVQCALGAIKDKEGYFGIKYSCIKKRRGHKKAIIAIARMMLVSIYHMILTGETFNPSDYESFKNPKPPIKQQVLTEESAIEFLKKSGFDVSKLTKP

SEQ ID NO: 102482 - protein, 394 aa, unidentified
MQFVGIDLHTNRFTCCYLVDNSTVKQTKTFDLDTEGLKRFYATINKDTYVLVEATVNSFSFVSLFKDIVKKVIVANTYQLKSVGVPGKKTDKIDAGKLAEKLKADIISGVQQIVPVTIPPKEIRDLRALFATYRSLRKEIGRTKNRIHSLLKENLYPFTKEYIFGKKARLEIRTLSNDRILSFQINLLMDALEQLEAAFDKLVDEINKAGSPFMAQIAILTSMTGISVITAIAIIADVIDVSRFRNAKHFASYLRSAPLVESSNNTTIIKSTNKAGRKLSITLLSQSLNHFRDNNESLSRFYERTSVYKKKGVVRMALCRRVITQVYQMLKKQEYHYCYNPVLHKKKMAEYQRFLQRGEYYSSERAFSCKWHIIPPCIRMPYNPPFLDKKRRSY

SEQ ID NO: 102483 - protein, 409 aa, unidentified
MRYYLGVDWADQTHAVWVVDERGLKIAGRAVPHTVDGLTEWARELNEWRAQGIDLWAAIERPDGRVVDFLLDQGVVVYPVNPKALDRARDRFRQSSAKSDPFDARVLADFLRTDHAHLRALQPSSQAAQELKLLTEDCQRHIRQQTRLVNQLTATLKAYYPRALEVAALTSALAREFLPAYPTPAALTALTERQWQRWARAHGLSAARAGDLWALLRQPHLPVPAHVVRAKARLMRTLMEQLLPVVAAVAQYRKAIDDFFASMPAAQWARTLPIGKHGITTPTLWARLGDAPERWESFRHLQAHAGAVPVTKRSGKQQVVHFRFACDTALRHLVDQVAFLSLLSSAWARAYYDQQRARGHSQRQALRALGAKWLTIIFVLWHRQVPYDEPYHLAMMTRQPLRQPQKQVA

SEQ ID NO: 102484 - protein, 345 aa, unidentified
MAGKVTETAVVGGVDAHKDLHVAAVVDQNNKVLGTQFFSTTRQGYRQMLAWMTSFGALKRIGVECTGTYGSGLLRYLQNAGLEVLEVTAPDRMERRKRGKSDTIDAECAAHAVFSGIRTVTPKTCNGMIESLRVLKTCRKTAISARRVALQIIHSNIISAPDELREQLRNMTRMQLIRTLGSWRPDASEYRNVTNVYRISLKSLARRYLELHDEIADLDVMIAAIVDELAPELIKRNAIGYESASQLLITAGDNPQRLRSESGFAALCGVSPVPVSSGKTNRYRLNRGGDRAANSALHIIAIGRLRTDDKTKEYVARRVAEGHTKMESIRCLKRYISREVYTLTA

SEQ ID NO: 102485 - protein, 268 aa, unidentified
MTEIIRVGIDLAKNVFEVHAVNAAEQVVVRRSLRRNQVLTWFAKLPACLIGMEACGTANHWARELTALGHTVRLIPPAYAKPYVRRNKNDAADAAAICEAVGRPSMRFVPVKTVQLQSEALTHKARELLMKQRTMAMNSLRSLMAEFGIVVPQGPQHIGKLRLILADPEDARIPDLARAALNTLADTLAALDRQIEALDKAVKAQVRANATARRLDTIPGFGPILSGAIAAIVTDPRHFDSGRDFAASLGLVPRQDGTGGKVKLGPIS

SEQ ID NO: 102486 - protein, 332 aa, unidentified
MYLGIDVHKRYAQVAVMDEAGTIVEEVRVENANLDELAQRYAGAQAVLEATSNYYHIHDTLSEHLDVTVAHPKKITQIADSDKKTDRVDAKELARMLRLNSVPESYVPTEEVREARALVRGRQTLVENRTKYANKIHGLLSDHGITDDVKPLNLKGRESLRELSLPVPWDTLLESYLDLIESLTEEIQKLDKTIEERAGSLKETQLLMTIPGVSYYTALTIYAELGGIDRFDGDKEVVSYVGLNPVIRESGDSRIEGSISKRGSGRVRWLLVQAANTAVHTSNDEYLSRFYDRLASRKNSQKAIVAAARKMLVSIYHMLDRREVYDPPGVTA

SEQ ID NO: 102487 - protein, 316 aa, unidentified
MDQTNLCVGIDVAKAKLDVALSPTEPIVTVDNTEAGLQPLLTQLHRVRPTRIVVEATGGYEQLVVRLLVDAGLPIIVVNPRQVRAFAKATGQLAKTDAIDAHLLALFAARVQPALRAQPDQATAALAALLARRRQLVAMITDEKHRRHLATPPIRKSIQKHLVWLERQLATLDTEFTTTIRQSPVWQEHEDLLRSVPGVGPVMSRTLLADLPELGTLSRRQIAALVGIAPFNQDSGTRRGHRTCWGGRAPVRTALYMATLVATKCNPVIAVFYHRLLIAGKRKKVALVACMRKLLTILNAMVQHKTKWLEIRSYTS

SEQ ID NO: 102488 - protein, 318 aa, unidentified
MSNPTTLTAGIDTSKAKLDVAIHGHKRGRVFPNGPAGWQDVQAFLTEHGVGRIGIEATGGYERGVIRQLRQAGFVVVLLQPLQVKAFGQLHLRRAKNDRIDAMLIAACTDMIDAHNKLPPDPRFEALGDHLTYIEQTEEDIVRCKTRLEHIDEKRLQRTINADIRRLERRREEELKRLLAALRKHDDLARRLDLVLSIPGIGARTALSIVLRMPELGQVSREQAASLAGLAPFVHQSGKRQGETHIGGGRGRLRRALYAAALPAAFRWNPALKAFYARLTARGTSHTSALVACARKLLIYANTVVARGTPWCNRTADA

SEQ ID NO: 102489 - protein, 322 aa, unidentified
MSVSVLGIDIAKQKFDAVLLVEGKTKHKTCKNSAEGFETLRLWLEKQGIQEVHACMEATGNYGEALAIYLHEAGHVVSVVNPARIKGFAQSELLRTKTDKLDAALIARFCLAMKPGAWIPPSPEIRSLRALVRRVDSLIDMRSQEKNRISTAHESVSLLIKEHIAYLDQEIEKIRKQIADLIGQDPNLKRKKDLLDSIPAIGKVTIPHILAELDDLEKFNHVRELVAFIGLAPKETLSGSSVKGKPRLCKIGHARLRKALYMPALVSIQCNPVMIAFYNRLKDKGKNGKVIVCAIMRKLVHVIFGVLKSGKKYDPNFKPVAA

SEQ ID NO: 102490 - protein, 353 aa, unidentified
MRRPKDKLIAGIDLHSNNLMIGLMNQEGRRVAHRKLECDLKTVVEFLRPYKSRLESMAVESTFNWYWLVDGLRKLDYSIDLANPARIEQYRGMKHVDDKDDAYYLAELQRLNILPKAHVYDPTLRPVRDLLRRRTMLVHQRTALLLSFKSLYARTTGQALDLSDVKKMEPAQAPKLYEHPANQLIARVQTEQMQSLQKGVAKIEQAVLACARELPIYEKLLTLPGIGRILGMTVTMEVGDVKRFKTDGHFASYCRTVDARRLSNGKVKAENNQKCGNTYLAWAFVEAANFARRHDEHCRRWYDRKAAKTSKLIATKALACKLAKAAWHVMAHRSDYDAKRMFPELAVKTMKKK

SEQ ID NO: 102491 - protein, 331 aa, unidentified
MHFIGCDVSKLTLDVAGESQSEHRKPLISKVSNDTKGWRALIRWLDQHWPEGRDDIALVMEATGVYHLLAANYLHAAGVRIVLCNPGRAADYSRSQNRVNKSDAADALSLQRYGARLERIHWYEPDLPEIAQLKALLGLLDQLDKDIRRWQNRLEKAGYQPAGAEPAKAIRRQIRNLENEVRRTQTSIDALVATSKQLKHSQHLMCSITGIGAKTAQRLLPLVQAKRFESARQMAAFLRLAPCHRTSGTSLRSPGRLSGRGDRRVRSALYMPAVSAISHNPEMKSFYSTLIERGKTPKQALTAVMRKLVHLCYGVVKNQTPYQANWEGLPG

SEQ ID NO: 102492 - protein, 483 aa, unidentified
MKPKPQEKTQKATDHPTQGHWHEMNRKQRREMMRKMQSEDLSLEVIHPDAAGIDIGNESHYVAVPPGRDSQSVREFGCTTAELKAMAAWLKQCRIRTVAMQSTGVYWVAVYDILQQAGLEVYLVNARDTKNLPGRKSDVQESQWLMKLHTYGLLRNSFRPSQEIRVMRTYWRQRNDLVRSAGRHILRMQKALTQMNLQLANVLTDISGATGQAIIKAILAGEHNPHTLAEFRDPRVKASEEQIARSLEGNWQEDLLFVLKQEHEGYEFCQKQMAECDRQLQQYLQQREDRSHGANLPEENRKGRRKKKRANKPQFDLREGLFRMTGTDLTRIDGIDVMTATTVISEAGYDMSKWKTEDHFVSWLRLCPDNRISGNKVIGKGRLPTNNPISIALKMAASTLRESKTYLGAQFRRLRTRLGAPIAIKAMAAKLARLVYRMLRYGMKYVDQGAASYELRHRELQIKRLKAKAEKLGYRVTPIPVAA

SEQ ID NO: 102493 - protein, 401 aa, unidentified
MAVLFVGVDWGERHHDLCLVDQDGGVLATRRITDGLAGVGALHALVAAHAQDPAQVVVGIETDRGLLVGVLLAAGYQVYAVNPQVVSRYRGRHGSSRAKSDRGDAKVLADLVRTDRHNHRQVAGDSSLVEAVKVLARAHQSLIWARQRHVNALRSALRDFYPGALAALGTHLAEPEALAVLELAPTPEQGRRLTRAAVRRALVQAGRRRNLQGRVVAVHDALAAPQLAAPEQLEAAYREVVGALVTVLGCLNVQVAALEEQLTLRFAVHRDAGIVQSLPGLGVVLGARVLAEFGDDPHRYATAKGRKAFAGTAPVTRASGLRTTVVARAACNQRLVDACYLWAFAALTASPGARRCYDAHRARGASHHQALRALGNRLVGILHGCLARRVTYQEQVAWPAA

SEQ ID NO: 102494 - protein, 410 aa, unidentified
MEVFLEHCAGLDVHEASVVCCVLIGTPERKPQKLLRTFGTTTRELEALRAWLAEYGVTHVGMESTGVYWKPVYAVLEGHFDLIVGNTHHIKNVPGRETDVKDAEWIAQLVRHGLVAKSFVPPPAIRDLRELVRHRRTLIETRTAVRNRVLKLLEEANIKLSGVASDVFGVSGMAMLEALAAGTNNASEMAGLARGRMRRKHAALEAALDGRMREHQCFLLAMQLRSLEAIDQDLEALDARIETQLEPYQAQHRLLMQIPGVDWVTAAAIIAEIGTDMDVFATAQRLAAWAGVAPGNYESAGKQKGAGTRRGNVFLKSALFAAASAAVRTKGSYYRDKYNRLRARRGPVRAIMAIVHKLLIAAFHMLSTGEDFRDLGEGYLDQVARKRSTTKLVQRLSNLGYDVMLVPKAA

SEQ ID NO: 102495 - protein, 419 aa, unidentified
MDVAIGAVGRPGGTNQRTHVIDTSDIGAFLGLDVGKGEHHATAVTPAGKKAFDKRLPNSEPKLREVFGKLQAKHGTVLVVVDQPASIGALPLAVARDMGCPVAYLPGLTMRRIADLYPGEAKTDARDAFVIADAARVMPHTLRSVDLEDETIAELEMIVGFDDDLAGEATRISNRLRGLLTQIHPHLERVLGPRIQHPAVLTLLGRFGSPAQIRKAGRRQLVTLIRPKAPRMAERLVDDILTALDEQTVIVPGTDAAALIVPSLAGSLTAVLDQRKLLAARIQELLEAHPLSQVLTSMPGIGVRTGARILIDVGDGSTFPSAAHLAAYAGLAPATRSSGSSIRGEQPSRRGNKQLKRAFFLSAFAALADPDSRTYYDKKIAQGKHHTQALLCLARRRADVLFAMLRDGTFYESRSAATT

SEQ ID NO: 102496 - protein, 387 aa, unidentified
MPEPNSLDRSLVALEQDSTLVAVIDMGQSSWLVAGIVPGVERHPLKKLEVDEAALLRLLERWRGEAAKAGRTVTRIAVAYEAGRDGFWLARWLRARGIEAHVIHPTSVAVSREHRRAKTDRLDTELLKRAFLGWLRGERGHCSMAAVPSLEAEDAKRPTREHEGLVGERTRVINRIKASLARLGVRGFKPTLRGAAERLERLRTPEGVGLPPNTLAELRRDIARLSFVREQIKQLENARAERLERAPGEGGNAMVRLLARVVGVGLETADMLVHEVLSRDLRDRRAVARYAGLTGSPDESGTTRREQGLAKAGNARVRRGMIQLAWRFLLHQKGSALAQWYRARTADARPGTRKTLIVALARKLLVGLWRLVTTGELPEGIVLHPTA

SEQ ID NO: 102497 - protein, 339 aa, unidentified
MKYTLVSVDIAKHLIQVHFIDENTGEVVDKQLRGRGFLEYFSNRNPCLIGMEACGGSQHWARELTKLGHKVCLLQARFVKAFVMGNKNDVMDARAIWMAVQQPGKEIAVKTEEQQSVLVLHRTCRQLVKFRTMQTNSLHGTLLEFGETIHKGRAAMEREFPEALERMKERLPPYLITVLENQYNRLNELDLLIEDIEKQLTSVARQNETCKRLLDIPGVGPLIATAAVATMGEASAFKSGREFAAYVGLVPKQTGSGGKVRLLEISKRGNTYLRTLFIHGARAVALVAKEPGPWITELKKRRPASVAIVAMANKLARTVWAITAHDRKYVRNHVSIRPY

SEQ ID NO: 102498 - protein, 416 aa, unidentified
MKKVQNTRGYERYMALDIHREYILVGAWNQEKDWVLTPRRVSTEKFPEWAKKNIRAGDIVVLETTTNVWATYDIVVPLASRVLVANAAEVEEIAKARVKTDKEDIKKLLKLLIGGIVPEVWVAPMEVRELRAFISYRGRLVKTSAMIRNRLQSLLHKHNLKLSETGLLDQTWWEAQKDISPLEKMQIRQELALLQEVEKLKAAVDEELQRQSTGAVWGKPALQLMQLPGVGFVVAMTVLSAIGDISRFESARKLVGYAGIGAGVHDSGKTHKDKKITKKGRRELRWAMVEAAWRAVGMSPFWKAEYEKYLSRLRKKNQAIVVIARKLLVAIWHVLSKEETDIHASEEDLAYKMLLLSWSLKEDTRMGLTYKQFAKYALMQLGVETDITRFVRRDVPRRLAPREEVLARMTELGLTA

SEQ ID NO: 102499 - protein, 388 aa, unidentified
MQIITDRPQAPTTIRTDLGAIFVSLELSRSTWLITSLSPGGGEKMSKHTVSSCDVAGLWARFSQLKDKVQVRTGQVVPIIVIQEAGLDGFWIHRLLQDEGVESHVVDPASIATSRRRRRAKTDKIDGEALVRALLAYKRGEPRVCAMVRAPTPQEEDRRRICRERKTLTAERVEHVNRIKGLLFAQGISDYEPLLRKRRERLEELRTGDGRLLPEHLKAQIGRELDRLELTLQQIKSVETERDAMLSPSDEGTPAPGAMLKSLKGIGPEFAGVLWSEGLFRSFSNRRQVAAYAGLAPTPWRSGSVAHEQGVSKAGNPRLRTTMIQLAWLWVRHQPRSILTLWFHQRVQLNGGRVRKVLIVALARKLLIAFWKYVTAGVVLEGAEITAA

SEQ ID NO: 102500 - protein, 428 aa, unidentified
MSENSTTHPEPEFVGFVGIDWADQKHAWCSPRAGATQREQGELEHTPEMVEAWVSQRAQRFGPGPIAVAVEQGKGALVFMLNQYEGLHLFPVPSTMSASMRKSLYPSGSKDDPRDAELLLDLLLQHRKKLRRLMPDKEVTRRIQNLVEERRTWVDEKTTQLNRLTGYLKVYFPQMLEWFEKLDTKLVCDFLERWPSLEELQKVAPAELRKFFRQRRGRHQELTERRLEGIRQAMPAIGDRAVLEAKQAMVQVSAQLLRTLLEGIANLDSKIEEAASAHPDFFIFKSLPGAGSALAPRLLAAFGSQRDRYGSAEEVQKHSGIAPVMERSGKKKWVHFRWACPKFLRQSFHEWAGHSISQSAWARAYYQQQRGRGKDHHAAVRALAFKWIRILYRCWQDRVAYDENKYLAALARRGSPLSFVLTVTAPTL

SEQ ID NO: 102501 - protein, 427 aa, unidentified
MSVTQNEKIRQVTDTTMVIGVDIASEIHWARAFDWRGLELGKAVKFENSAEGFNFFLRWASELAVGKKKDSVIVGLEPTGHYWFTLAAFLQGSAFKLVLVNPYHVKRSKELDDGHPSKSDKKDPKTIAKLVLEGRYVYPYIPQGLYAELRVAMNCRWRVRKELASLQNQIQRWLKIYFPEHGKVFGRFTGAGSMALLRAAPFPSDLISLGAEGISGIWKQMKLRGIGRKRAQRIYEVAQTSVGCTTGMEAARMELQILLEDYDAKLQQYERVMQVVENLCSQIPAVPELLKIQGLGLVTVAGLFAEIGDIRRFESPRQIQKLAGLAITENSSGKHKGPTGISRRGRARLRAILFRAAIPLLAKNREFQLLHRYYTTRQDNPLQKIQSVIAICCKLLRVFYALATKGCAYSPEKMLADIQRNQPLKAA

SEQ ID NO: 102502 - protein, 355 aa, unidentified
MQQFKYHLGIDLHKRTSYWTLMDSDRKVLFRKNMATSERAMDEALTKIGTDPREIEAAIEPVSQWGWYGDLLEARGLTVRLVNVYKSKLIANSKLKHDKVDSRTLADMMRSDFLPEAYRAPRETRDLREFMRGRAFLVRMRTRVRNRITGILGKHGIISPWTDTFGKGGMIWLREQNLGSPHDPEVKNLLAVFGELSLHIGSLDRRCVELVSESEDLKILTSIPGIGSITALMIMAEVGDFSRFPTPGKLASFAGLVASSHSSGERNRFGHITHRGSVWLRSALVESTGKVSPKWGYLHSFYRRIQEKKGNSIARVALARKVLVLAWHLLRTRQRFHPHPVGPHDSVKTGSSDIS

SEQ ID NO: 102503 - protein, 376 aa, unidentified
MNNVRFIGLDVHAETIAVAVAEPDGDVRSVGVIPNRPESIRKLMKKLGPAEQLRVCYEAGPTGYVVYWELTALGVTCEVVAPTLVPVKAGDRVKTDRRDALKLARSYRAGDLTAVWVPDAAHEALRDLVRAREAAKKDQLRARHRLGKLLLRHGRRPPTPMKPWTQTSLAWVKTVHFEHAAQEATLVDYLHEVEHMADRITRLERAIDDAVKTAPERMRAVIEALQALRGIAQVSAVTVVAEVGELTRFAKPRQLMGYSGAVASEDSSGDRIRRGAITKTGNAHLRRVVIEAAWAYRYRPAVGPALRKRQASVSQEVKAIAWKAQHRLHARYRHLTAQGKCKQETVTAVGRELLGFIWAIGVQVEAHGRNPQSAAA

SEQ ID NO: 102504 - protein, 347 aa, unidentified
MVGRLKRQEADMESCGIDLAVRSSAICVMRDGGVIVTERGVPTEEEGLQAAVAGRARMVCVLEASPLAEWAAGVLEKAGHDVVVIDPRKAKGVITSKRKTDKLDARNLARMGLTGWYTEVHRKSPEARAMRTFLKARYGLVQTALAQGARIRGLLRAHGIRLGQVAESQFASRVRQVTKQQVPGLWPMLEPLVKVRRQALEGAERMKKQLERRASAESVPSQLMTAPGVGPLVASAYVATIDDPRRFRSGSQVAAYLGLVPSVEQSGQHEVHGRITREGDGLLRSYLIEAAQVLLTRSRRGCALKRWGLRLWRKKGFKKARVAVARKLAILLHHLWITGENFDPARA

SEQ ID NO: 102505 - protein, 391 aa, unidentified
MPDVSSNASAKTTRAFVALDVHKNAITAGVLPAAGGRVELVQLEHSEQAIRRLVKRLGGANGLAVCYEAGPCGYELYRLLAGIGVACDIVAPSLTPVRPGDRVKTDRRDATKLVRLYRAGELSFVCPPTPEQEGLRDLVRCRDDLRRARTAARHRVGKQLLRYGRVYREGKRGWTKQHQAWLRKQRLDDPLAQAALAQMLCHLDAVDAQLAAIDRQLEQVARAEPWCDPVRWLCCFRGISTLTALGLLAEIGDFRRFASARELMSFLGLTVSEYSSGERRSRGSITKTGNRHARRLLVEAAWHYQHPPRLSTRIRRSGELVPPEALARAWQAQIRLHERHRHLIRTGKLPTVATVAVARELCGFLWATMTRQPLRDDHPAHPRARKEVLAA

SEQ ID NO: 102506 - protein, 388 aa, unidentified
MLLDHPFDGLTAIRTHIAAIFVSLELSRSTWLVTSLSPGMGEKISRHSLTAGDVAGLLTLFAEFVHKAEVRTGQRYPVITIQEAGLDGFWLHRVLHEERVESHVVDPASIAVPRRKRRAKTDRIDGETLLRTLLAYKRGEPRVCAMVVAPSPEEEDRRRLCRERRTLIGERVTHVNRIKGLLFAQGICDYAPARRDRRKRLEALRTGDGRELPSHLKAQIGRELDRIELLLEQIKAVEAAQEALLAAERKPARQAAMDPVAMLLALKGIGINFTAVIWSEAFYRQFANRRQIASYAGLAGTPWQSGSIRHEQGVSKAGNPRLRTTMIQLAWLWIRHQPQSALTRWFKERSPQGRKRAIVALARKLLVALWKYVTQGVAIEGAVMKAAV

SEQ ID NO: 102507 - protein, 454 aa, unidentified
MKKAKSAPQPKAQAALQMVFPNAAGLDIGASEIMVAIPPDRDGVTVRGFGTYTPDLAALADWLKEAGVTHVAMESTGVYWIPIFELLEECGFEAIVVNARHIKHPPGRKSDVMDCQWIQQLHAHGMLRGSFRPEAEMCILRAYLRHRDNLLEDRAKHIQYMEKALLQMNLQLGQVLSDLTGETGLEILHAIVGGEHDPVVLSRMRHGNCKHSQEDLIKAMTGHYRQEHLFVLKQALEMFEAFSQRVRECDQEIARLLEEMQPELPDDFPPLPPDPKPNSHSKNAPSYEARTLLYPLAGVDLTAIPGLNEILLQKILSEVGLDMSRFPTAKHFCSWLGLAPHNAISGGRILYSHTLKNHNRAGQCFRLAARAVSRGKTVYSEFYRHIRARSGAKEANVATAHKIARTFYYMLQRGQPFLAPDLQTYLQIQREKDIRRLETRAAKFGFRLQPVEVS

SEQ ID NO: 102508 - protein, 362 aa, unidentified
MVSSLIRHRCAMIEMLTTIKREKTKMNVTTIGLDIAKQVFHVVCCNKQGRLIKKKMLKRAQMHSYFQNHSACLVALEACATSHYWAREIKKCGHNVKLIPPQHVKAFLIGNKNDYNDALAIAVAANQPHIRSVGVKSIEQQDCQAQHKARELAVGQRTALCNQIRSLLAEYGIVLSQGVNTIRKTIPLLLADDSQHLSGVFKRILRQLTEQLKSSDEAIEMFNAVIIQSVKENAICRRLQSIPGVGPMISSAYFNEVGNGSSYRKGRDVSASLGLVPKQFSSGGKNVLLGISKRGNSYLRCLLVQGAKSVVSRAKKKEDKLSQWINRLVETRGHNRACVAYANKMARMAWAITVSGEEYLPV

SEQ ID NO: 102509 - protein, 366 aa, unidentified
MKKASTKTVRRRGKLPDGQLTIGLDLGDRSSFYCVLNEAGQVILEERVATNPEAMKKTFSTMPRSRIALETGTHSPWVSRVLSELGHEAIVAHARNVRLIGESRRKDDRMDAQALARLARIDPQLLSPIQHRSAQAQADLSVIRARYALVRTRTALICAARGLTKSFGERIRSRYVRGFKPSMGEKLSPQLQVALGPLLSALETITARIREYDAQIEKLAEESYPDVALLKQVKGVGTLIALTYILTLEDPRRFRKSRDAGCYVGLQPGRRNSGQSEPQLHITREGDSYLRMVLVQGAQHILGPFGEDSDLRRWGLKLAERGGKSGKKRAIIAVARKLAVLLHHLWISCEEYEPLHNTRKRRLAAA

SEQ ID NO: 102510 - protein, 361 aa, unidentified
MRWLDKQIPIQAPSMRKSITDLSSVTTVGLDLAKHVFQVHGVDACGRVIVVKALRRKDVLAFFAQLPECLVGMEACGSAHHWARELIKLGHDARMMPPAYVKPYVRRQKNDAADAAGICEAVTRPSMRFVGVRTLENQAALMHHKLREMLVAQRTQLINALRGHLAEIGVIAAQGLKNARDLAWVIKAEGDETIPACMRAALAPLVRQLHALDQEIARSDQTIAAMARDDEMARRLMTIPGLGPVTASAIATSVQDVSVFSGPREFAAFLGLTPRQNSSGGKERLGRVSKMGNRYLRKLLVVGAHAVLYHRKPHDDALRSWAKKLMQTKPFKLVAVALANKMARIAFAIMLGKTSYSAAPA

SEQ ID NO: 102511 - protein, 456 aa, unidentified
MESKQNQGVLSMDIINPHSAGVDIGSRSHWVSIGQSEKEIREFGVFNDDLYDIAKWLKENNIKSIAMESTGTYWQSLYAVLIAEGFEVVLCNGKFTKNIKGRKTDVQDCAWIQKLHSIGLLSGSFLPDEQTEQLRTYCRHRANLLDMAASTQKKMQKYLRLLNLRLDIVVNDICGLTGLAIIKAICKGEQNPETLSELRHGNCRKSKEEIAKALHSNGRKDYLFALQQELETYEHLQAKIIICDKEIEKMFTHIIDNDDEKRQHQIGPKSHKKINKNTPKNIDLNLLGYQYFEGVDLMEIEGLSHSTLLTLISEVGLDGIKKFPTAKHFASWLRLSPNNKISGGKVLSNRIPKGSNRLKIALRNAANAIGNLKESTPLRDFFQRINFRKGRVSAISATARKLGVIIWNMVTHGTNYINPAGYLFLDQKRKLGIVKRIQKQIDKFGLTNEDVVFTTV

SEQ ID NO: 102512 - protein, 311 aa, unidentified
MEHPCFVGIDVSKAHLDVHVLPTGESFRVGHDDAGFVTLIARVRPFNPTVVVLEATGGYEVTVAAALAGVGLPVAVINPRQIRDFARATGQLAKTDALDARVIALFAEAVRPIARPLPDDQARALGDLVTRRRQLVDMLCAEQNRRRLLRDRGLQRYLEAHIAWLEDAISHLEGDLTTLIRSTPIWREADELLRSVPGVGRVTSSALIADLPELGHLDRRRIAALAGLAPVARDSGAFRGRRMIVGGRAHVRRILYMATVAAIKYNSVIRAFFHRLVAAGRPGKVAVIAAMRKLLTILNAMLRDRRPWQIA

SEQ ID NO: 102513 - protein, 388 aa, unidentified
MQTVADRSETPNAIRTDLGAIFVSLELSRSRWLITSLSPDGGEKMSKHAVRGGDVSGLLERFAQLRKKARARTGKVFPFVVIQEAGLDGFWIDRVLRKEGIESHVVDPASITTSRRRRRAKTDRIDGEALVRALLAYKRGEPRVCAMVKAPTPEEEDRRRLCRERKVLIGERVRHVNRVKGLLFSQGISGYEPLRHDRRERLDTLQTGDGRLLPDHLKAQVRRELDRLELLLEQIKAVEAERDVLLAAQQGAAPAPAAMLLNIKGIGPEFAAILWSEGLFRHFDNRRQVASYAGLAPTPWQSGSVDREQGVSKAGNPRLRTTLIQLAWLWLRNQPQSALALWFKERVNRNGGRLKKTTIVALARKLLVALWKYVTAGVVIEGAIVKSA

SEQ ID NO: 102514 - protein, 437 aa, unidentified
MLCCLNPNAAGVDIGATEIYIAVPADRDPQAVRCFATFTEDLHAAANWLKACNIETVAMESTGVYWIPLFQILEARGFKVFLVNAHHVKNVPGRKSDVSDCQWLQYLHSVGLLRGSFRPEQAVCTVRSILRHRDSLVQMASTHVQHMQKALDQMNLQLHHVISDITGVTGLAIVEAILAGERNPHTLAALRDRRIKASADTIAKSLVGDYRREHLFTLSQSLTAFRHYQELIAACDREIARYLEGFESKVDPPSGSPSPSKDESQPKTSEPRFDLQTHFHRILGVDLTQVPGINVLTTQTLLAEIGPDLSSFDDGSALASWLGLCPDNRVSGGKVLSVKTRKVKNRAATALRMAAQSLYRSQSHLGHFYRRMRAKLGAPKAITATAHKLARIIHHMVTTGHAYDETICAQNEVQNRKRTEARLRKQARELGLQVVAL

SEQ ID NO: 102515 - protein, 333 aa, unidentified
MKNYKHYIGIDVSTKTLDFQIVNSFAQLILHGQISNDIKGVKELFKQLKKHKIYEEYLFCFENTGIYSMNLCIILAEYDVDFAQCSALEIKQSKGICRGKSDKSDARDIAMYALRNIDKIELSKVPEIDILRLKLLYAEREKTIDAIKDFSATVENKDFLPKAVYTTAERINKKTLRFLKKILLEIEKNIREIINNNDGLKQQKKLLLSVPGIGEITSLYLLLATKGFKSFDNWRKFACYCGIVPFEYSSGTSIKKRNRVSHFADKKMKSILHLAALSAIKHDAEIQSYYQRKKQESKPSLLVINNVKCKIISRAFAVVARNQPFINTCKFAS

SEQ ID NO: 102516 - protein, 458 aa, unidentified
MQEVTQHDAVDVFVGVGVDVDVDVGKGQHHAVALRRNGKRLYNKALPNDEVKLRALIAELKTHRRLLFVVDQPSTIGALPVAVARAEGVLVAYLPGLAMRRIADLHAGEAKTDARDAAIIAEAARSMPHTLRSLRLADEQLAELTMLRGFDDDLAAQLTQTSNRIRGLLTQIHPALERVLGPRLDHPAVLDLLERYPSPSALAAANEKTLANRLTKLAPRLGKNWAAEIVQVLNEQAVIVPGTQAAAIVMPRLAQQLAALRKQRDEIAAEVERLVLAHPLWPVLTSMPGVGVRTAARRLTEAAPKAFATATHLAAYVGLAPVTRRSGSSIRGEHPSRRGNKVLNAPCSSPPSLPYETQSHGPITRARSSRASATTKHSSRSHGDAATSCLPCCATAPFTHPSQPLTLDERHRDTRACCAATSPRGAAPVRRMRSRPDVARAPTPLHAVNLSPGRRRPL

SEQ ID NO: 102517 - protein, 390 aa, unidentified
MPKPKQRKPNDLSRSLAALDVDRTLIAVVEMSLSGWLVAGIVPGVERQPLKKLKTDANALLELLHRWRAEAVRAGHEITRITVAFEAGRDGFWLARWLKARGIEAHVIHASSIAVSREHRRAKTDRLDTDLLKRSFLGWLRGERDHCKTVAIPTLEEEDAKRPNRERESLVGEQSRLVNRMKATLVRLGIRGFNPKLKRAAADLEALRTPEGSPIPPNTLAELKRDMERRRFICDQIRKIERARIERLDRAPNTGPNAMVRLLARVIGIGVETADLLVHEVLLRNMRDRRAVARYGGLTGSPDRSGTLNREKGIARSGNARVRRGMVQLAWRFLLFQKESALAQWYRQRTENAPKARKTMIVALARKLLIALWRLVREGVVPEGVAMRSA

SEQ ID NO: 102518 - protein, 320 aa, unidentified
MRKSSPASSEVLWAGVDLAKLTFQVAIWGHLSFPEMQCRSFDRTRKAMKGFLAWLRDQTPAGAKLGLVMEATGTFAEEMASWLMDLDSTLWLAIVNPGQTSAFIKSLGFRNKTDDLDAKGLAKYGQERRPVPWERPSPELAALKDLVRIRMDLINARTAMHLRLTDHKRAAKRASDAMRKVILSLKTQIQQLDIAVKDQVAAFPELAHQMERYTSICGVAQVTATTVMVELGDLRRFQRSRQLTAFAGLSPKRHQSGTSVNGKTRLCKQGSARVRAALYMAASCAVRFNPDMKATYDRLLAQGKERRSALVKHPRNTFIN

SEQ ID NO: 102519 - protein, 369 aa, unidentified
MTVPSMTRADGEDEALGVVLGVDTHKDFHVVVVTDSVGRRLDAASFPATGVGYTRLLHWAAQHGTIRVVGVEGTGSYGAGLSRFLRRQGLMVVEVNRPDRAVRRRRGKSDAVDAEAAAHAVISRRASAVPKAGDGRVEEIRVYKLAKDSAVKAKRQAVNQLHAVLVNCEPALRENLAGLGRKALVTRCARMDAGADPAGTSTTAAVVHTLGVLSRRVQALDAEINDLTDRIGQLVEQTAPKLLLEYGVGVDSAATLLRTVGDNPDRLHSEAAFAALCGVSPIEMSSGRTQRHRLNRGGDRQANAALFRILLTRLRDHQPTIDYVHRRTKEGLTKRRIMRCLKRYLARHLFAIIQAAFAAEPASAAPCRT

SEQ ID NO: 102520 - protein, 427 aa, unidentified
MGGTQSIAGAWLVAIDIGKRFHAVLVEGPDGKRQRFQMASTVEDYDRLVGFLRTLSGPVRIALEPTGNLHRTLAYRLLREGFPVVSVSSVAGARYREAMFNSRDKNDPKDATVILHLLKQGIVQHYHDPLLAGDHDLQELAKTYHQIALARKRLADSLLNHYLPLYFPEMARYWESTRVAWFVAFLERFPTPEAVRALSQEAFIEAAWGLVGRKVNKRAKLEELYALAQRSIALPVALDAPALATFRLQLGQLRRLATLRDELEAQAYALLKDRVDFQHLCSLPGVASILALVILAEGGDLRRFPHHRQFLKYCGLDLAKCQSGQFRGRETLSKRGNARLRMAFWMAAQRAVRMTENSFRDKYERYTKQNPGNPDVRRKALTAVAAKMARVAYALVKRNQPYRGYHEHALPSGSIPLIRAVGATPTP

SEQ ID NO: 102521 - protein, 410 aa, unidentified
MGIEVIHPRCAGLDVHMDTVMACVRIAEGRKVEVETRCFGTTTGELGKLADWLRERNCTHAVMESTGVYWRPVWHILAEGIDLILANPMHVKQVPGRKSDVNDAQWLAELLAHGLVAASFVPEAPVQEVRELTRTRKQFVREVAQHTQRIQKVLEDANLKLTSLVADVLGVSGRLMLWSIIWGETDPKVLAGLARGRMKAKHGELIEALRGRITDHHRFLLRLHLLQIKALEGSIAEVESRLDAQLQPLREQESLLCTIPGISRTLAQVMLGEIGTDMSRFPTVGHLISWAGLCPQMHESAGKRKSTRTRHGAPWLKTALVQAAWPGSRTKNTYFQAKFLRLKARRGPKKAIVAIAAEILRAAYFVLSRKVPYQDLGPDHFDRLDRTKAAKRHIQRLQALGYNVVLTPAS

SEQ ID NO: 102522 - protein, 409 aa, unidentified
MVVHAAPVTASTVAVAIDVGKNEFAVSVTDAARARLLKPQLACPMTAPSLRQVVDRIRRLIPANAQVKVGIEAAGHDHRPLLTPQSWPAGWELLELNPGHVTEQRRVLGKRTIKTDAVDLQAMTELLLAGRGWPIRGSDTVLTELAAWSANRRGRVALRTATKNQLLGQLDRTFPGLTLALPDVLGTKVGRLVAAEFADPARLVALGSSRFIRFGATRGLQIREAIADKLIRAAKDALPLPDAAVARAVLTADLALLAYLDAQIDAATAELARLVPLSRFRTLLTVKGWGTVRVGNYGGALGDPTRFTTSRQVYRTAGLNPIQYESAGKRRDTVISREGSVELRRALIDLGVGLWLNDASAKQYAADLRSRGKKGLVIACAMAHRANRIAFALVRDQAAYDPTRWTRED

SEQ ID NO: 102523 - protein, 370 aa, unidentified
MKKKILYVGLDVHKKSIDVAITDQRVSGKVRSYGKIDGTLEALDKLVGKLKSPGADLHFVYEAGPCGYPIYRHLTSKGHSCSVVAPSLVPKRSGDRIKTDRRDALNLVRLFRAGELTGIYVPTAEDEAIRDLLRCRVDIRRIERKTRQQLLAFLLRHGHYYPGKKNWTKGHMNWLAELKPTHLAQQIVLQEYIDAANECTRRIQRITEQIQGLVAQWSRAPFVRAYQALRGVSLIVATTVVSEIGDMNRFKNPKQLMAYLGLVPSEHSSGNRIRRGSITKTGNNHVRRALIEAAWTYNLRARKTKPILKRQQGLDDRICEISWKAQLRLCGKYRRLFARGKSKQAITTAIARELSAFIWAIDKQVQQLSA

SEQ ID NO: 102524 - protein, 312 aa, unidentified
MSNVTIGIDISKALLDVATYPDGQIEQFRNNAKGHKRLAKWFSGMKIKRIVFEATGAYHRELENFLGKHGCPFCKVNPRQARRFAEATGRLAKTDKADALMLARFGELLEPPHSESKSQTLEELGELVAARRALVKDRTAAKNRQHNLHSSLLKRQVRQRLKQIKQQIETIDARCLGLVQSDVLLSNRHSILTSIPGLGALTAIIILSEMPELGTMDKRQTAALAGLAPVARQSGTWKGKSFIRGGRANLRQALYMPALVAIRFNEEMAEKYKSMREAGKPAKVAITAVMRKLIITANSLLRDDRKWSKITA

SEQ ID NO: 102525 - protein, 316 aa, unidentified
MHAIGIDMSKDSFHAAFNDTHVREFRNTEDGIAAFLEAARSDGHTKKTTVIGVESTGVYHLFLCVSLFQSGWDIRVINPMLTAQMITAGLRMVKNDRKDAKIVRIATKMGKGYPFRDTPEILALKALVSEREDIVRMRADLKRRQHAHRIRARACGVTLHDSYAPAFIAFETAIKEIDARLQCYVAETQKLLRSITGIGVTTGALLVAFIGDINRFASPEQLVAYVGIDPRVKQSGTSIHGKGRITKRGNALLRHTLYQAAFIAQRYDPELNAYYQKKRAEGMHHTAVICAIERKLIHRVFAVWKRGTPYVKPPKT

SEQ ID NO: 102526 - protein, 345 aa, unidentified
MHYVGMDCHITTLDFAVVDDAGRLVKSCKVDTSAKNFMEFVKSVAAPRIVYMEESALAAWALETCIRFGEKLVITDPKQNHWIGSSTQKDDQLDAFKLAQLGRGGFIMEIRHPVGDRRRFRELMDCYHDTVKSTTRIKNKIKSKFRQNGIHCTGMTVYSETYREEWKQKLPQDQTLLLIVEGLWNQLKESEQTEKNLLKAARNFAKHYPEIKLFEDIPGIGFISAATISAILETPHRFANKRKVWMYAGLGITIRSSGGKTYSEKLSKDYNRLLKYTLKQVAETAVQAKDNPFRQKYLAMTTLRGIAPHRAKLTISRDLLATMWAMWKNGEKYNPEIRRSLVLNK

SEQ ID NO: 102527 - protein, 427 aa, unidentified
MSYRIAGIDVHKKMLAVVVSDVEVDDEYQFERRMFGSNPEQLRSLAAWLLEQEVEELVMESTAQYWKPVWEALERYWKPLRQKREGARRRSGTLHLAQAQSNRGPRGRKRDFADAERLVKRLVARELTLSFVPDAEQRLWRTVTRRKYQLTRDHVRLQNQLESLLEEAHIKLSSLVSDLLGASARRMLKALAEGETNPAALAALADERLRATPEQLCDALGACTDLKPVYRRLLKMVLEQVVFLEQLIGQLDQEMAGLLSAHQDAVQRLAEVPGLGVDSAQQIIAEVGPTAATFPSEKCLSSWVGACPGDEESAGVNYSHRSPKGNRNMRRVLNQAANAAAKAKGSIFEIVYRRLVPRLGHNQTIGAIAHRQCRLIWLILHQGVRYEERGPAVNKRSKQQRTARMVRELRKLGYSVSLATSQTGNRA

SEQ ID NO: 102528 - protein, 411 aa, unidentified
MDIIVERAAGLDVHKDTVVACVRVPGPGRQRREETATFGTTTRELLGLRDWLVAWGVTVAGMESTGVYWKPVYYVLEDAMECWLLNARHLRNVPGRKTDVADAAWIAGLVEHGLVRPSFVPPPAIRELRTLTRYRRAQIEERTRESQRLDKVLQDAGIKVSSVASRITGVSVRAMLDALVAGTRDPVVLAELAKGVLRKKIPELQDALVGRFSSHHALVISQILAKMDFLQELIDQLSDEIDRVIAPFEDQIALLVTIPGVERRTAQELIAEMGVDMSRFGTAAQLASWAGMCPGHHQSAGKHRGGRARPGPKWLQRALNESAKSAGRSKGTYLGAQYTRLRGRRGPAKATKAVGHSILVAAFHILRDGVPYNDLGADWFGRLHPAQHARRLVHQLEALGYDVTINATHAA

SEQ ID NO: 102529 - protein, 338 aa, unidentified
MTTKISMLAIDLAKGSFQVCAVGPDGTVLYNRALSRIRLAALLAEQPACIVAMEACATSHHWGRVAQRHGHEVRLVPAAYVKPFVKRQKNDCADAEAIAEAALRPTMRFVAVKSAETQGRAVAFRTHQCLVRQRTQLINALRGHLAEFGVVAPKGPASLKLLENALADDASDLPDPVRKMGAVYVEQIARLTEVIERLAGELEAATKTDACLRRLCTIPGIGPVTAGAVAAFAPDLETFDSGRNFAAWLGLVPRQRSTGGKAKLGSVSKMGQTDIRRLLIVGAMSVIRWVVRKGGSENRWLAALVARKPKMVAAVALANKMARMIWAVTTKQEDYRMA

SEQ ID NO: 102530 - protein, 334 aa, unidentified
MEQVTTVGIDLAKNVFSLHGVDDAGKMVLRRTVRRDRLLETVAGLSPCLIGMEACSGAHEWGRRFQLHGHTVRLMAPKFVAPYRKSDKNDGNDAEAVCEAVSRPSMRFVPVKSTEQQALLTLHRVRQGFVVERTAIINRLRGLLSEFGVVLALRSVTVRRQAAQAAEQLPELARRAIADLLEQLRGLDERIGAYDREIEAQARLSEPARRLMQIRGIGATTALAIVATVGNAREFKNGRQFAAWIGLVPGQYSTGGKARLGHISKRGDAYLRNLLVQGARSVLQTASAHQDRMSRWALELQQRRGYYRTLVAIANKNARIAWALLAKDEPLKMN

SEQ ID NO: 102531 - protein, 353 aa, unidentified
MMIIGCDFHPSFQQIAFVEQETGEYAERRLNHREEAAAFYRSLAGRAVRIGMEATGNDRWFQKLLSELGHELLVGDASAIHASAPREQRTDKRDARHILRLLMENRFPAIWQPSLGNEEQRQLLLHRCRLVRMRTRIKNQLDSIAKSEGLTGSRAWSSKRRQQIEALPLTGWYAERRKDLLALLEEMDKRIEPLDEAVRAAAEQNAEAQLLMTHPGIDPVVSLSYVLILGDWRRFPRGKQVSSYLGLIPAEASSGKRQQQMGHITKQGNTLLRWLLVEAATKAQSKDPSWHRQYMRLSMNKHHGVAKVAIAHKLAVRLYWMLRSGQNYTQIVERGSHAGQSELAGGCGFRPIN

SEQ ID NO: 102532 - protein, 342 aa, unidentified
MDNYAGIDVSLECSSVCVVDATGKIVREDKVASEPEALIGWFRQLGFELTRVGLEAGPLSQWLYAGMKAAGLAVELLETRHVRDAFKAMPVKTDRKDARGIAQLTRMGWFRPVHCKSMGAQEARAMLTARKLVQSKLFDVENSLRGILRGFGLKVGKTTELRFAGRIRELVSGHPSLEAIAEALLSVHAVLLCEFKAFEKRVRSMARSDTKAKLLMTTPSIGPVVALTYAAAIDDPKRFKSSKAAGPHFGLTPRKYKSGETDVSGRISKIGDASVRTALYQAAHIMLTGPIKGCSQLKGWAMRIARRAGMKKAKVALARKLAVILHRMLVTGTPFNVSSAVA

SEQ ID NO: 102533 - protein, 354 aa, unidentified
MKRTTKYVGLDVHQAMTVATVRSEGGRVIARSVVETSDESIREFFNAMAGSVHVVFEEGTQAQWLYDLLSPRVDRVIVCDRRGEKRSGNKGDQVDADELSEQLRCGGLRAVYHGAGGRADLKELTRAYRNLVEDSTRVMLRLKALFRARAIRTTGSGVYQPKGRAAWIAQLPQHGARLRAETLYAQLDVLRTQRKRTKAAMVAEAKRDPAFGVLETIPYFGPVRIALLLATIGTPWRFRTKRNLWAYAGLAVVTRSSADYELFDGRPRRRRRPPLTRGLNRNHNRVLKNVFKGAANVAIARPGPFQDFYHRMLERGMREELARVTLARKLAALTLRLLKTGEVFDPTQLSRPQM

SEQ ID NO: 102534 - protein, 326 aa, unidentified
MAKSITICAGIDTGKRKLDVAIDGSPERLQVENTSEGHRALVEWLRGHRVRRVGIEASGGYEQAVVAELRRKRFVVVVFQPAQVRAYARFKLQRAKNDKIDAALIAACTAAVRKIHPAPDPRLLPFAEHLTMIDQIGEDISRLKNRLETCRDERIRQAWKQEIARLEKNERIELKALVMAIRRHSDLAKRLDLIHSVSGAGLPTAVAVLVRMPEVGQISREQVAALAGLAPYDDDSGDQVGARHIWGGRERLRRALFAAALPAAMRWNPQLIAFYKRLIAAGKEHKRALIACARKLLIFINTVVARGTPWQDKPEAAAIAASPSTA

SEQ ID NO: 102535 - protein, 387 aa, unidentified
MSEAFDPRKSTTAFDQASTLVVVLELSGKSWRVGASVPGVSRRPLRTIAARDIDAVLKTIERWKEEARKAGCEVRRVVAGYEAGLDGFWIARALTAHGVEVYVMHPASISVERRGRRAKTDRIDVDILLRTLLGWLRGEPRHCTMAPIPSETEEDMREPGRQREALTAARLKVENQMRSLLARFGVANFRPRLKKAAEHLARLRTVDGRPLPPNTMASLERLLAQHRLLSEQLKEIETAREKVMAVADPDRLQRMIQMLAGLVGVGVETATTLVHEVFSRRFRDRRALAAFVGMTGTPYDSGGSTREQGLSKNGNPRVRRMLTQLMWRWTIFQPQSALARWFVARTGGAKGRMKKIMAVALARKLLVALWRYVEDGVVPEGARLAAA

SEQ ID NO: 102536 - protein, 403 aa, unidentified
MNAVGIDVSKGKSMVAIMKPFGEIVSTPFEIKHTTSDINSLVELINSIEGESRIVMEHTGRYYEILAHQLSNANLFVSAINPKLIKDFDNDSLRKVKSDKADAVKIARYALDKWQNLKQYSVMDELRNQLKTMNRQFGFYMKHKTAMKNNLIGILDQTYPGVNAYFDSPARSDGSQKWVDFASSYWHVDCVRKMSLNAFIDHYQNWCKRKKYNFSQSKAEEIYGKAKELVPVLPKDDITKLIIKQAVEQLNSASMTVESLRTLMNETASKLPEYPIVMAMKGVGSSLGPQLMAEIGDVSRFTHKGAITAFAGVDPGVNESGTYEQKSVPTSKRGSSDLRKTLFQVMDVLIKTKPQDDPVYQFLDKKRAQGKPYYVYMTAGANKFLRIYYGRVKEYLSLLPESE

SEQ ID NO: 102537 - protein, 325 aa, unidentified
MADVILGIDVSKKELSLALLLRGAFKRRKVANDMSGFKELIDWLKNQRINHVKACLEATGRYGENIADYLYDQGHKVHVINPVCIKFFAKSKLSRHKTDEVDASLIAEYASKNDLRPYKPKDSVFKELQGLYRCLQSLKDHKTQLINLQENEQYLPKTVQDVYRNLKAEIENQIQTIEAALDTLVDAQEKVKLDVENIRTILGIGKMTAIAILAQTPDLSSFENARQLAAYVGLTPCHKTSGTSVKGKTRLSKMGPSSLRKALYFPAIVAKKHNPILKVFAQKLAKTGKHTMVIIGAIMRKLLHIVFGVVKHKKSFNPDMLANVS

SEQ ID NO: 102538 - protein, 340 aa, unidentified
MLYIGLDVHKEFCQACVIDESGRALSNERFSSTNEELDRFLDGFQDARFVLESTGIWEFIYEGIERRGFEAVLAHPLKVRAIAEARVKTDKVDAETLAQLLRADLIPRSWIPPKDIRDLRQLVRQRAYLVRQAARFKNRIHAEILRRGVRRPGNLRTPFSQGSIRWMRSLDIPTVTSCLNCLESVQAQVQEINAQLLVEFERRGDAQLIATIPGIGFYGALLILAEVDDVRRFCHPEKLCAYAGLVPTVSQSASSVKYGSISKDGSAYLRWILTESVHVHTRYEPGSQLSRFHARIAKRRGRRVATVATSRKLLRIIYWMLVRHEPFHSHGFNPVKRLHS

SEQ ID NO: 102539 - protein, 343 aa, unidentified
MDHFAGLDVSVKETSVCIVDDTGKIVREVKVASEPEALLQVLMNPAYRFKRIGLEAGPLSQWLFSALAEAGLPVICVETRHMRAVLQAQINKTDRNDARGMAQMMRVGLYRPVHVKTLRSQKLRMLLTHRKLLQSKAIAIENDLRATLRNFGLKVGMVGTVKFEARIKELVANLPDLAVLVEPLLVVRRALREQIGILHRRLLAIVRDDDVCRRLMTVPGVGPVVALTYRAAVDVPARFRNSKAVGAVFGLTPSKYQSGENDRTGGISRCGDEMMRMMLYEAAHIVLVRSARWSWLKAWAMKIAKHRGLKKAIVALARRLAVIMHRIWVDGTEFRWTREVAAA

SEQ ID NO: 102540 - protein, 313 aa, unidentified
MKINSVYLGIDVSKRALHLATPKKFIREFDNNNTGRCELLKRIQSLAPTSVVLEASGGYERRIVELLQEHGISVSVVQPGCVRYYAKSLKVLAKTDTLDARVIARYAQAVQPAPTAKTPLNVRKIRALRDRRDQVVEDRVREENRLEACDDDEIAQEIQTQIEQLRATEKQLQQRILDLLKTDPTFQAKAKVMTGVVGVAEKTAATLLAHFPELGTLTRGKVAALAGVAPHANESGTYTGKRRIYGGRAAIRKAMYMAARTAVHYCPVMKEFYERLKERGKPFKVAIIACARKMLIRLNTLLAQLQAETKMTN

SEQ ID NO: 102541 - protein, 361 aa, unidentified
MASTIRGCYRISPVDGNLYPVEIAVGQNFGEPQGEVILERSVPTTKKAMEQVFAAMPRSRVALETGVHSPWVSRQLTQLGHEVIVAHARNVRLIGESSRKDDRLDARTLARLARIDPQLLSPVRHRSAEAQVHLTVIRARAALVGARTALVNAARGLAKSYGERLRKCGTQQVRQDLAAGLSVELRAALEPLLGEIESLSQRIAAYDRQIEQIAKKDYPGVRLLQQVKGVGTLIALTYVLTLEDPHRFRRSRDVGCYLGLRPGRRNSGSSEPQLHISKEGDSYLRTLMVQGAHYILGPFGEDSDLRRWGLRLAERGGKNAKKRAIVAVARKLAVLLHKLWVNGEVYEPLRNHPTTAVDAVA

SEQ ID NO: 102542 - protein, 321 aa, unidentified
MESQEIRFTQVVEIGCGLDVHKDLVTATIRKSNDDLETKEYNACTSSLKSLRDWCKKEKVTHVAMESTGVYWKPVFNVLERDFEVILVNARHVKNVPGHKTDKKDSRWLSKLLLSGLLKGSFIPPVDIRELRDLTRYKKKVTGQAASEKNRIIKILEDANIKLSSVLSNVDGSVGTKIINSLIEGQTDIDELMKFYHGKIKTSRKEFRLALEGKVTKHHQFMLQLHKDSIAEKERLIERIDAEIEEATKAYQVEIDLLQTIPGVGKDSAIRIISEIGVDMNRFPDETHLSSWAGMSPGNNETGGKKKMQEQSTATNTCKAH

SEQ ID NO: 102543 - protein, 385 aa, unidentified
MRLFVGDDWAEDHHDVEVMDTSGRRLVKARLPEGVAGMTRLHSIIGDLVGEDADDTEVLIGIETDRGPWVGALVAAGYPVLAVYPLQAARFRDRLGVSGAKSDAGDAHVLADMVRTHSHELRPVAGDSARAEAIKVVARMHKMMIWERTRHTQRLRHALRDYFPAALVGFEDLDAADTLELLAKAPTPAQAARLTTTQIGAALKGARRRNVADKAATIAAALRCEHLGQPEVVTDADAATVRALVAVLTVLNSQIKTLGGQVDAHFGQHPAAEIILSQPGLGQALGARVLAEFGDDHDRYASAKARKNYAGTSPITRASGRKKVAVARFVHNDRLLDALTSQAFSALSRSPGARAYYDKQRALGVGHNPALRQLANSRPCPHRPS

SEQ ID NO: 102544 - protein, 420 aa, unidentified
MNREVRAWIGIDWADEKHDVSVYEVATGRQERLEVKQSPEALAEWIGQLRTRYGNAGQVAVVLEQGRGALLNVLMGCEFLVLYVINPKSLSCYREAFYGSGAKSDPVDAELMREMVRQNPERFRAWHPDDVLTRSLRLMTEGRRDLVNQTTAVTNQLTALLKGYYPQALRWIGALDTHWACDFLDQWPTLQALQSSSRRQILRFYEKHPRHHLDLEQQIQQFHQTLPLTGDEAVLEYSTLMVQALIPQLRALLDSIDEFDRKIAEVFRKHPDRPIFESFPGAGAALAPRLTAAFGADRDRYAAASEMQQFSGIAPVTEKSGKQHWVHWRMACPKFIRQTFHEFADHSRRWSAWAKAYYQLQIERGKKHNAAIRALAYKWIRILFRCWKQRVPYNEQVYLASLLKHQSALLLKSAPAVKKL

SEQ ID NO: 102545 - protein, 365 aa, unidentified
MNECTHIGLDVHKDTIAVAVLRAGTGEIDERVIPNTPEAIRRLLGRHDPASTVLAYEAGPTGYDTHRLVDSLGFHCDVIAPSLIPRRSGARVKTDRIDARNLARLHRAGELTAVRVPGAHEEAVRDLIRVREEVKCDRRIARQRIRSFLLRYGKRYPGPRDAWSQRFEVWARSLSFDEPHAQEAFANLMSAYFVRDAQLAEMGRRIEQIAAAEPFAADVARLSALRGISTLSAMTIICETCDFSRFADAAAYMGFTGLTPSEHSSGASRHQGSISKTGNRHIRRVLVESAWAYRHAPAVRGKLRERLEGQSPEVAAYSWAAQVRLNGTYRRIAARKGAHTAVVATARELSGFVWGLMTGNLGPAR

SEQ ID NO: 102546 - protein, 406 aa, unidentified
MEVLHARCCGIDVHKETLVACLRVQDGRRARKEVHTFGTTSAEVLRLQTWLTHAACTHVAMESTGVYWQPIFTGLEDTVTVVLANAHHIKAVPGRKTDVRDCEWLADLLAHGLIRASFIPPADIRTLRDLTRHRKRLIRDRVTTTNRIHKLLETAHLKLASVISDILGVTGRAILRALAAGETDPARLAALGRARLARKTEALTEALRGRFTPHHAFLLSQLLAQLDQLTTLIDACDVEVARLSQPMAAHVERLQTIVGVGARSAQVIISEIGTDMTRLASSAHLASWARLCPGTHESAGKRRPTGTGPGNNWLRTTLLESAWAASHSRASYLRARYGRIAKRRGPKRAAIAVAHTILVLAFHILRDQVPFRDLGADYFDRLDVGRQKQYHLRRLRALGCDVSHVA

SEQ ID NO: 102547 - protein, 347 aa, unidentified
MEHVGIDVHKNESQICHLTELGELLEQRIATRRDRFAALLGQTPRARILIEASTESEWVARCLEDLGHEVIVADPNYAPMYATRSRRVKTDRRDAQALMEACRLGAYRPAHRTSDAQCQVRAELAVRDALVRTRARFISLMRALLRREGLRVRTGMASSFPRRLAELTLPEPLGTAITPLLAVIETLNRELDAADARLAQHADDDSVVRQLQTVPNIGPVTALSFVATLDRVERFRGPHPAAAYLGLVPGERSSGEQQRRGPITKRGNSRTRWLLVEAAWGMIRHAHPDTAELRAWAARIAARRGRRIAAVALARRLAGILYAMWRDGTDYRPQRVRATTQETAMVS

SEQ ID NO: 102548 - protein, 311 aa, unidentified
MNDTIGVDISKDALDTYWLSKRKHKQFANNKMGLRALIRWVRQAKVSLVVFEATGVYHRLLETSLAAHDLPFARVNPRQARRFAEGTGTLAKTDRVDAALLARMGSLLELNADKPKSETLHNLKGMETARQALIKDRTAARARLNTATYPLLRKQATLRLRQIERDITQIDAAIEAIIAADKALSQKADILISIPGIAKITAYAMLTEMPELGTLSGKQAASLAGLAPISRQSGKWQGKERIQGGRACLRRAIYLPAVVATRFNPDMKAKYHELIANGKCKKLAITAVMRKLVVMANALLRDGRKWTETRT

SEQ ID NO: 102549 - protein, 416 aa, unidentified
MFAVGVDVANGRSRVAVLDGMRNMVAKPFEVVHTAQGFAALVEKLRQLDGEVRIVMEHTGRYYESFAMSMHRAGFFVSAVNPLLIKNYQGGINVRKVKTDKADAQKIAQFALDKWTILPHYTPMDTIRYNLKTLHRQFQLASKTKTALSNNLIALLEQSYPGANRYFDSPVRADGSQKWVDFVDTFWHVDCVAMSSEHAFVERYRKWCKRHGYVFSEQKAIELHADARQKFPLVPKSDTCKLLVREAVSQLNAVSRTVETYRAEMDRLASQLPEYETVMGMTGVGKSMGPQLMAEIGDLRCFAHQKSLVGFAGTDPIKEESGDKVSQSAPSSKRGSPYLRKTLFVIMTILLQLQPQEDPVYQFLDKKRSEGKPYYVYMTAGGTKFLRVYYGKVRDCLKAKGLWEVPASASQEVNPG

SEQ ID NO: 102550 - protein, 339 aa, unidentified
MSKLLKNFVGIDISKTYFDAAIIKADHPSGSMHNQFSQCQDGFKKMLTWLQQQDVLLNTETLFCMEYTGIYNRGLVNFLIEQKAQLWVEMPLRIKKSAGFERGSDDKISAIKIAGYAFRYQDKMQLWRPVDSSIEKVKHLIAQRDRVVNAITQLSVPVKELSDCGCSKEAKELEKLQRSPLKALQKTKEAIEELIVKTVQQDAVITKKVQQVQSIKGIGQVTAVAFLAYTKGFTAFSNAKELACYCGVVPFAKKSGTSIKFKPGVSLYANKKLKKLLHLCALSAIKSDKEMRAYFERKVAEGKNKMCVINAIRNKLIHRVFAVIRDDRFYEENYVRKCA

SEQ ID NO: 102551 - protein, 378 aa, unidentified
MQTTQTFAGIDVSAKTLEVRRRREASEHRQEFSNEAAGHRELIKWLGKRARVCVEATGVYHLQLALALRAAGIEVMVINPRVAKDFSRSLSNRSKTDAVDAQVLLEYVVRMEFIAWNAPSEAVLELRELGRRISELVLTSTAEKNRLHARRVSAISRTVIADVRQHVAQIGRRIGAIEREALKVIKRDADLAEQYQILVGIKGVGRRSALLLLTELAVLDPTMTVRQLVAHAGLDPRVYDSGTSVHRPARISKVGNARIRAILFMVALSAVRRDRGARAFRDALRARGKKPLQALVAVMRKLLHGIWTALTRRIAFDGSILFAASLAQAESSDSAVAANQPEPARDHPKGRSAAEELRKQLDPGPAEATRRQKGLNAA

SEQ ID NO: 102552 - protein, 319 aa, unidentified
MAQNDIVVAGIDVAKDKVDVCIRSLSLRRAFASTAEGRLELTSWLRRQKVGKAVMEASGGYEREWARALRDARIEVRIVDPKRVRNFAQSAGRLAKNDAIDAEMIAWFAETFDQARGQACDAAREELVQIVNARQALLEQQTQMQNRCEHTVPVSVRKAHERLLKAIALEVARLEAAIAAMIKATPHFAEIAEIIESVPGLGKITSAGLIAAMPELGLVSNEAISALLGVAPYDDDSGKRRGERQIKGGRRKVRNLFYMACLGAATRHNPVLKTFYRRLITKGKKAKVALVACMRKLIVILNIMIARGEKWDANRYAVD

SEQ ID NO: 102553 - protein, 381 aa, unidentified
MSLYSYQYRPRRAGLLAPPTFLLVTTSKDTLLTHSMTGTVIGIDTHKDLHVAHAADHLGRPLGEYQMPTTTAGYAEFLTWARTFGPINAIGIEGTGHYGAGLARYLRSEGVTVREVSRPTRQHRARHGKTDAADAAGAAAIVLAGTDNGTPKHADGDIEMLRILTLTHTSAVHAKTVAITTMQDLLVTAPAPVREQLSGLSPRRLVSTCAKLSLAENPSTPTESVLLVLYRLAVRYQHLAAEADSLQHQIGRLATHACPALLTVYGVGPNSAATLLVALGDNPGRVSSEAAFAKLCGVAPIEASSGKTVRHRLNRGGNRQANRALHTIVTVRLRRHQPTRDYLARRIADGKTKREAIRCLKRYVAREVYNTVLPAQTRQPT

SEQ ID NO: 102554 - protein, 353 aa, unidentified
MNKFYKSKTDGTVFKNMFVGMDVHKNYLQVAVLDEKGKVVSNSRVDNNLIKVNEFFDTLHPGNNTKVVMESSGMWYNIYKILREKNLDVRLSNPTKTRAIASAKIKTDKLDAVKLADLLRGGYIAECYIPTRETMDLRELVRHRAALVRMRTKLKNKIHSIIAMNGTSISYVGTTFTKGHIEKLKELNDYRINGYLRIIESLNDEINAVSKKIILLAQEDEMAKLLMTVPGIGYYSALLIVSEVGDINRFPDSHHLCSYAGLIPSTHSSGGITYHGSITKTGSKYLRWIMLECLHAHIRNDKNSNVTQFYHRISKKKGNSKAAVAAASKLLKIVYWVMKENRTYHNNKSKYNV

SEQ ID NO: 102555 - protein, 343 aa, unidentified
MKIIRVGVDLAKIVFQVHGVDRNEEVVWRRKLTRASWLKVLLETVESGCEIGMEACGGAHHWARKLQAQGFTVRLIAPQFVKPYVKSNKNDANDAEAICEAMSRPHMRFVSIKTVAQQDIQGVHRIRFELSNQRKAKANQIRGLVAEYGLVAPKELAQLRRAIPSWLENAENGLTDRFRRLLNGLWHDLMALDQRVMEVEGEIAQIAHTDPVAKRLQQLRGVGPMIATALVASVGDAKHFANGRQMAASLGLTPRQNSSGGKERLLGISKRGDAYLRTLLIHGARSTLRTAKGKEDRLSQWVTRIAQNRHHNIAAVALANKTARIAWAMMKNGTEYQPKRVAK

SEQ ID NO: 102556 - protein, 362 aa, unidentified
MQTITRSQTLFVGVDVHKDTHTAVGLSPFGEKVFEMTIGNEAEDFILLVEKTKVEAEKSGLVPSFGLEDVHSWGERLSLFLVGEGLPVRAVAPILVDHRRQKTTHPEKNDSLDAQGVAEVMIQKIDTLPVYTLSQEAQKAKQIRELSLEREWLVKERARLKNQLHILLHRIHNTGYRTKFKDPFSKKALRYWMRSILKGTDAILEQRMKRAVRRLLDLREEIQEIEDELGAMTKDNGQTLSTASGCGTVIAAEIIGEVGDINRFHSPGALAKYAGCAPREHSSGKTIRWRKTRSGNRRLNRSFHRMALSQISRSGNDAARTYFKRKVSEGKTKAQALVCLRRQLINVVWMMMKHKTEYRWPC

SEQ ID NO: 102557 - protein, 322 aa, unidentified
MNPPSLGIDIAQATFRAALWFDQHRFVQAEFANHPGGFRQLGTWLKRHGVGPLAAGLESTNTYAEALAGWLHAQGHRVYLLKPERTACYARCRGQRNKTDAADAVTIAAFVAQHAGSPWQPPSAEQKTLRSLTRARHQLVECSKQLRNQLKTADPVARPHLQAVLGSVTRQLGALARSIAEHLRAQPALAAQVRRLMTIKGIGLVTAAIAIAELPPITPESDPRAICAWAGLTPRRRQSGKTELPARLSRKGNGYLRQALFRPALVAKKHNPLLRAFALRLAAAGKRPGAIVGAIAHKLLRIAVGLLRSNTDFNPHWVFQKN

SEQ ID NO: 102558 - protein, 444 aa, unidentified
MLSIIYKHVAGLDVHKKTVVATRMRVTEEDRAEWETTTFGTTTPDLLKLHDGLLAWSISHVAMESTGDFWKPVYNVLEDTFELWVVNAQHVHPVPGRKTDAKDSAWWAELMLHGLLKASFIPPRPQRALRETTRYRTTVIQERTRVVNRVQKLLEGANIKLSSVATDIMGVSARAMLAEIVAGQTDAALMADLARGRMRHKIPALPQALTGFVQPHHRFLLAQQLAHIDFLDEQIEALSAEIVRQLEEMSELPSSAGSDAGAEASEPSSESSEEEPLTWSEAVVLLDTIPGVGERAAEEILAEIGLDMSRFPSDKHLASWSGRAPGNNESGGQRFSGHRPRGHKPLSSILTEVAQAAARTKDTFLSARYHRLAARRGKKRAIGAISHSIIVSIWHILTYRQPYRELGSDYFDQRKKEIKVSYLVRRLEKLTGASVSIQLQPVAA

SEQ ID NO: 102559 - protein, 461 aa, unidentified
MAHPMVQVKPSRRQRDMSPVHPNAAAIDIGARMHVAAVGPDRDPEPVRTFNTFTDDLHRLADWFDQCGVKTVVMESTGVYWIPIYEILEQRGFAVSLVNARDAKHVPGRKTDVSDAQWLQRLHEYGLLRSSFRPQGEIATLRAYLRQRERLLDNAAAHIQHMQKALTQMNLQLHHVVSDITGVTGMRIIRAIVNGERDPDVLASYRDRGCHASVETIRQALIGNDREEHIFALSQALELYDIYQAKVAECDKRIAAVLKRLKEASPTPADPLPAARHKGRSSNPLTFDVREALHAVIGIDLTQIHGLGPYLALKLVGECGTDLSAWPSAKHFTSWLSLAPHNKISGGKVLSSRTRRSGNRAASLLRLAAVTVGRTDTALGAFYRRLSARVGKAKAVTATARKIAVLFYNALRHGMDYADPGASYYEERYQQRVLANLQRRAKSLGYVLQQADTAPAAVEVS

SEQ ID NO: 102560 - protein, 445 aa, unidentified
MSDSLPSVNPEPEWAAFAAIDWADQKNFWRLVPAGSQRHEQGELENTPEAVEVWAAALQQRFGGRPIAVCLEQSRGALVYMLTKYPHLVLFPVHPTTAARYRKTFCTSGAKADPSDTASLLDLLMRHRERLRALQPDTVETRLLHFLVEERRQMVDEKTRQGNRLTDCLKLYFPQVLRWFDEVDSPLVGALLERWPSLEQLQRAHPGTLRRFFHEHNCRSEELIQQRVDGIAQATPATQDQAVLEAGMMMTHGLVKLLETLRGNIAAFDERIAELVRAHPDSALFDSLPGAGAVLIPRLIVAFGTRRERYESAYQMQCYSGIAPVKEASGKTEWVHFRFTCPKFLRQTFHEFAGHSIGKSEWAKTYYEHLTKDEKKSHHAAVRSLAYKWIRIIFRCWKDGKPYDEQVYQNSLRRRGSLLGGALSSATTVGWKAVAGFQKLSEKSS

SEQ ID NO: 102561 - protein, 344 aa, unidentified
MKKVMAGMDLHSNNVVIGIMDIDGKRLASRKVPCDLKEVVKFLAPYKQQLERVAVESTYNWYWLVDGLQELKYPVVLANPAGMEQYSGIKHADDTNDAFFLAELLRLNILPTGHIYDVQLRPVRDLLRRRLGLVHQRTALMLSFKSLYTRTTGLEMALSRLKELEVKTAQKLYEHPANQLIAGMQLQHIGGLSGSIEKIEKVVLGCARELPCYTKLLTLPGVGKILGMTITMEVGDIKRFADAGQFASYCRTVEAKRTSNQKKKGQNNSKCGNKYLAWAWVEAANFARRYDEQCRKWYDRKAAKTSKVIGTKALACKLAKAGWYVMSQASDYDAKRMFGQPGHP

SEQ ID NO: 102562 - protein, 336 aa, unidentified
MMIIGCDFHSRFQQIAMLETETGEIAERRLEHENGEAKAFYAALGGPVRVGMEATGYARWFERMLAEQGHQLWIGDAAQIRASVVRKQKTDARDARHILDLLLGDRFPRIYVSPPEERDLWQLLRHRDRLVHWQTSIRNQLHGLAMGEGLCRKKKLWSQRGRQELEALRLGHWATRRRKELLQMLDGLAPAIAEWDRAVRQQAEQRPAAVLLQQQPGVGPVTSLAFVLLVGPVQRFANSRKLVSYVGLNPREASSGGKQRLGAISKQGNSMVRWLLLQAAQTASRTDAGLRRDYQRLVFRRGRAVAKVAIARKLAVRLYWMLRNASESDAADSHAG

SEQ ID NO: 102563 - protein, 324 aa, unidentified
MKHILGVDLAKDKLDCCLLSEGAPPAAGVFANGPQGFKKLLAWLKERGADPAHLLACLEATGHYGEKLLGWLFERGAAVSKVNPAQIKYFALSRLARNKTDRVDARIIAEFCRAHGPRRWSPPPPELARLQALTRLLGARKEQLAGERRRAAMVAACVRAPARALLRFLERDVARLQKQIDALIEGCPELKARRELLCSIPAVGPMTAQTVLAELPPEIKSARAAAAYAGLTPRREQSGQKEGRSRLSKTGNAHLRRAFYMPAVSGRSSNPRLKALAARLALEKATGAVIGACMHLLLRLCVGVLSSGKPFDPHWQERAREPRT

SEQ ID NO: 102564 - protein, 342 aa, unidentified
MESAVTIGLDLGKSVFQLHGVDAGGAVVVQRRLTRGKLLAFFAKQPACLVGMEACAAAHHWARELSKLGHRVRLMPPRYVKPYVKRQKNDAADAEAICEAVTRPSMRFVEIKTCEQQGTLVLHRVRLMLMRQRVQLSNAIRGHMAEYGLVAPVGRNGLQRLIAILGNPDDERVPAVARASLAPLVCQFGLVNDQVLENDRRVRASATSTELGCRLMEVPGVGPVLASAMVAAVPDPTAFKSGRNLAAWIGLVPRQNSSGGKEKLGGITKQGDRYLRQLLVAGALAVIRYAQRHGSKRPWLVHLLARRTPKIAAVALANKMARMIWAMMMTGERYREPGVAAT

SEQ ID NO: 102565 - protein, 346 aa, unidentified
MEQIIRIGMDTSKSVFQLHGVNAKEQPVLRRKLSRREMVKFFEKLPPIEIAIEACGASHYWGRVLSCLGHTVKLIAPQLVKPYVKRGKNDAADAEALCEAMSRPTMRFVPLKSEEEQAALMLIGMRARLIRNRTQLANTIRGYAAEFGITAPKGMCRIEALLDRIAADESLPTLTRELFALHAKEYAELQGEIEQLEGKVMAWHRANECSQRLAKIPGVGPIGAALLMMKTPDPHLFKSGRAFAAWIGLTPRDHSTGGKTRLGRITRAGDEVLRSTLVVGATAVVSHARRTNGKNASSWLRELLERKKPKLAAVALANKIARIAWKLMVSGEHYKRLLQQLGAAAV

SEQ ID NO: 102566 - protein, 349 aa, unidentified
MTIVEDRPVITGGVDTHADLHVAAALDPLGGLLGVQEFPATATGYAQLLDWLGGFGTIAVVGVEGTGSYGAALTRHLAAAGIGVVEVDRADRQDRHRQGKSDPLDAVSAARAAQSGRACGAPKGRDGAVEAIRALMVAKRSARHERTQAINQARALIVTGPDELRARFAGHSPAALVEAIAALRPRPGNVPGYATRVALRELGRRAQFLDTQLDRLDELIGPLVTARAPGLLSLYGVGPDTAALLLIAAGDHPGRLRSESSWAHLCGVAPIPASSGKVSRNRLNRGGDRQANHALWRIVITRLSSRPGHPATRAYVTRRTKEGLSKKEIIRCLKRYVAREVYHQLRAGA

SEQ ID NO: 102567 - protein, 354 aa, unidentified
MKRTTKYVALDVHQATTVASVREESGRVIARSVLPTDRGALTEFVRGMRGARHVTFEEGTQAQWLYDLLAPFVDRVVVCDRRGASRQGNKGDQVDADQLSELLRRGALRPVYHGSADRATLKELTRTYRNLVEDATRVMLRLKALFRARAIQTRGTNVYQARARGQWLAQLGDRGARFRAEALYAELDVLRTLRPRAKAAMVTEARRDPAWPVLRTIPFFGPVRVALLLATMQTPWRFRTKRNLWAYAGLAVVTRSSAEYTLVAGQPVRRRRPPMTRGLNRNHNRVLKDVFKGAATAATARPGPLQDFYHSVIACGTREELARLTLTRKLAALTLRLWKKGERYDPTKLTTPAR

SEQ ID NO: 102568 - protein, 408 aa, unidentified
MQVLYTRCAGLDVHKDIIVACVRCVSPPMHQEVRSFGTTTAELLKLADWLAEHDCTHVAMEATGVYWKPVWHVLEAEFELVLANAAHIRNVPGRKTDVNDAMWIADLLAHGLIRSSFVPPQAIQQLRDLTRTRKQLVREVSQHSLRIQKVLEDANLKLGSVLSDVLGKSGRAMLDAIVAGQTDPACLAALAQGTARNKTAELREALRGRITDHHRTMLRLHLQVVDALQRTLAELDAAVGKALAPIQQRARLLTTMPGISDLTASVVVAEIGVDMSRFPTAGHLVSWAGLCPRSDDSAGKRRSTRVRKSGTWIKTTLVTAAWAAVRVKTSYLRAQFLRIKARRGAKKAILAVAASMLTAAFHMLRDGTEYNDLGSEHFDRQAKFKTIRRLLKRLQDLGCDIPELAHAA

SEQ ID NO: 102569 - protein, 322 aa, unidentified
MAKVVIGVDPHKRLNAVVVLNHRGKVLARRQFPNTSEGFRELATFSHRWRPRTWAIEGCNGVGKHVAQRLVAVGERVLDVSTRRAALVRVFAGGNGRKNDDVDAHSIALVGLHTPDLPEVRADDRRVALRLVSNRRKELVGLRTQCVNRLHRDLVALLPGGAPRALTATKAKSLLAAVRPRDEIGRLRRQLAADQLADLVALDRKLSTIEAQLKELVKTTPTSLPELYGVGPVITGIILGEVGDVARFKNRHHFASYNGTAPDDKGSAGHPAYCVNIKGNRKLNHAIHMVAITQIRNSRSPGRAHYDRKLTETKTTKEALWP

SEQ ID NO: 102570 - protein, 387 aa, unidentified
MSQRVASLKLAAVDYERTLVLAIELSNKSWVLAAQVPGLPHTKAKRTVDPKAEALLAAIAGYRARATATGRSIERVIAVYEAGWSGFWLARWLKRHGVEVHVIQPSSVPVDRRMRRAKSDGIDAELLLRTLLAWLRGEPRVCSMVPVPDEADEDARRCVRERTELISERVGLTNRIGAVLATLGVSDYNPLLRNRNRRLAELRTGLGEPLPRNAHAKIERLLARLELVLAQIAELERERDAVVETEASDKASKMIQQLASLRGIGIQSATVLVREAFVRCFANGKALGSYAGLASSPFSSGAIEREQGIGKAGNRRVRTVMVELAWLWTRYQPDAAQVCWFRERVGSTGRRVRKIMVVALARKLLIALWRFVTEGVVPEGAVLKPAA

SEQ ID NO: 102571 - protein, 342 aa, unidentified
MDYYAGIDVSLECSSVCVVDAHGTIVGEGKVASEPQALIGWFGWRGLVLTRIGLEAGPLSQWLYAALQSAGLAVELLETRHVSDAFKAMSVKSDRNDARNIAQLMRLGWFRPVHCKSLAAQEVRALLTARKLVQSKLLDIENGLRGILRGFGLKVGKTTRTSFAGRVEELVTGHSNLQMVAQALLLARSGLLAQFKSLDKQVRQTSRLHAQARLLMSTPAVGPVIALTFASAIDDPRRFTSCKQAGPHFGLTPKKYQSGETDYSGRISKTGDASVREALYEAAHIILTKPIKGCTALKSWATRIARRAGMSKAKVALARKLAVIMLRMLKDNMPFNPLAQAA

SEQ ID NO: 102572 - protein, 330 aa, unidentified
MKLYNVGADLSKKTIDFVIHQLKAFHFLKVDNSISGFRELIKWFQQHSIDHSEVMIVMEHTGLYSYQLEQFLHQNGISFTKVSALAIKRSLGLVRGKSDKIDARRIARYAFEKQDSLSADQPVSENLTLLQRLHSTRERLVKTRASYITAVNEEREAYKLKETDIVIATQLKVIKSLDQQIQKLEIEIHAIVQSDQDLSKNYSLLQSIKGVGPVVALATIIKTGNFTRFTNPRKFACFCGTAPFEHTSGSSIRGKTKISSLRDKKMKTLLDLAAKSAIQYDKELQEYYLKRLTIGKSKKSTRNIVRNKIIYRMFAVIKRQTPYQEHPIAA

SEQ ID NO: 102573 - protein, 370 aa, unidentified
MSVRRILAKTIDTDLEYEAIGIDLAKNCVSAALLTTDGEVVCIDRLDYSELEKSAQALSPTTFAMEPCTEMNYLVQKLEAWGHRCLVIGGKNVQNYVENHYSGQKTDLNDAQALAFLAQDTQLRTIKAKDIEQQKYASLTTLREQYIKQYRQTIVSLKGICQAWGLNISKGISGKAQLKDLIENHAAFPEELRESLVDMVTHAQTTQKVLNKITKTLEVLAKNDKVCQLIQTIPGLGTICSCRLRATIGDIKRFKNPKDFPAYYGLVPRSIATGHNEKKGKITHRGDRTMRSLMVQGAGCVIRLATCGKLKSKQLTKWILKKQKEKMPWGKLVCAVAAKLLRIVRAILISSKPYNPKIAGVAKCSLSKGS

SEQ ID NO: 102574 - protein, 425 aa, unidentified
MSQPKQSLDRGSEFAAYVGIDWADKKHAWSLQVATTGKREEGEVEHSPEAVEEWIQGWMVRFPGQLLAVCLEQSRGALLNLLSKYQQLVLFPVHPATVSRFRAALYPSGAKDDPKDADLLLDLLVHHRERLRRLEPDTVETRTLRFLVEQRRHLVDQRTAHSNRLTSALKQYYPQVLCWFEDPAAPLVTAFLARWPTLDMLQKARPETLLRFFHQHNCRSEELIQERLQQIRKAVPATRDPAVLESGMVQTHWACQMLSLLSQAIADLDQRIQPIAQAHPDYAVFDSLPGAGEVMVPRLIAAFGTKRERFSNASQVQNFSGIAPVRESSGRTEWIHMRWACPKFLRQTFHEWAGHSIAHSSWAQAYYHQQIARGNGHHAAVRSLAAKWIRIVYRCWVNHMPYDERIYLDSLRRHGSPLAAAIPAH

SEQ ID NO: 102575 - protein, 427 aa, unidentified
MAYRIAGIDVHKKMLAVAVSDVEVDGEYAFERRKVGTSPDQLRSLAAWLVEREVEEVVMESTAQYWRPVWEALERYWQPLRQQRKDAAPMAGRLHLAQAQSNRGPRGRKRDFPDAERLVKRLVAQELILSFVPDAEQRLWRTVMRRKDQVTRNKVRLQNRLESLLEEAHIKLSSFVSDLLGVSARRMLQALAEGETDPAALAGLGSRRLHATPDQLKDALGACTTLHPVYRRLLKLTLEELRVIEDHIRQLDEEMAGLIRAHQPAVERLAAVPGLGVDSAQQIIVEVGPTAATFPSAKHLASWVGACPGADESAEVNLSDRSPKGNRPMRRVLNQAANAAVKTKGSIFQLVYRRLVPRLGHSQAIGAIAHRLCRLIWKLLHERVPYEERGPAVTKHRAQRRAAKMIRELRSLGYRVERGPTLSSSPA

SEQ ID NO: 102576 - protein, 427 aa, unidentified
MNEVMAGMDLHRNNVVCGLVDQDGRRVVEKRLPCELETIVQWLEPYRTRLRRIAIESTYNWYWLVDGLQEADFDVVLANPARIEQYSGLKHADDSSDAFFLAELLRLNILPTGHIYERQLRPVRDLLRRRLLLVRQAAALKLSFKSLYARTTGQTLSLSRLQRLTPAEVPGLFAHGAEQLIAQEQLRLIGELGQSIAQIELAVVREVKDWASYRWVQTIPGVGKILGLTIALETGPITRFASAGDYASYCRCVRSQRVSNGKVKGANNGKNGNRYLAWAWVEAAQFARRYYGPCRRFFDRKAGEVNGALASKALACKLAKAGWHVMREGVLFDWSRAFPGGVPGGEPERQVRAAGAPRTPPPPHRPALEKDPTSLTPLGSVSSRVSPGRGDSRTAAPSAKTRSKTQAKGAKPPVSTESRTKIMKKRT

SEQ ID NO: 102577 - protein, 415 aa, unidentified
MIPAVIERGAGIDVGRKFVDVCLMVGAAQAEPKQETRRFSTLNEDLERMHQWLKENHVTHAAMESTGSYWRPIYNILDDGEMEIVLANSQHVRNLRGHKTDRNDARWIAHLLRHAMIRPSFIPNRETRDLRDLTRRRKQMVGCAAEERNRVQRVLQEANVQLGTVLSDVFGDSGLNMLDALMNPDATPEQIAELAVRQARKKIPLLKKALEGHRMTDHHRKLIRHSMEHLAFLEEEIAELDKEISEHVNAHAALRKATELAQSVNGIKEIAAAAIIAETGADIKQFPDGGKLSSWVGTCPGNNITGGKRKSAPARKGNPWACRVLVECAWSATRKKGSEAQRHYEHLKHGHKHKPALVATAHLLTLQLYEALATGKPYVDKAQAELPASKVQRLVRHHSRRLKKLKHWLSRSSDS

SEQ ID NO: 102578 - protein, 423 aa, unidentified
MPVSTLYVGIDVSLKTNQVCPINFNQDVFFNEKFDNSPSGTERMIVKILDILNKNKDLNKVLFCMEATSVYHIHVSSILASDSRLLAYGCKVYAENAKSIQKYKETFLDREKTDPEDAYLCADYARIGKCKKSHPVIGYQKIALQRLTRQRKHIAEQLGKEKQYLSSNLFLKFSALKVNPEDNPFSDTFGKTSSVMLTDFLSNEEIVKADLGDLVVKISEVSNNRISDKDEVARKLKRMAQHSYHLDSYASDSVSMAMASSFRLIETYQNELKKLDKEILRLIEGYDNKYCAILTSIKGVGNVYAAGIIAEIDDIHYFRNDEHLASYCGLRWKKNDSGNKRSDHTRQPNTCNTYLRYYIVEATGSILRFNDEYASYYCRKKSEVKVNSHKRALVLTSRKFVRLVYGMLRDHKLFDDHYLAHRS

SEQ ID NO: 102579 - protein, 347 aa, unidentified
MADQNCRYSLFILVVLINRLDIFHIVEINKAGKQQKKKKLKRTQLSCFFVQLPACKVAMEACASAHYWAREFRAMGHEVLLLPPQHVKAYLRGQKNDYNDAKAIAEAAHHGSIRPVPIKSIEQLDAQAFHRIRRQLVGEQTRLANQMRGLLAENGITVARGVGVIRREAPEILENAKNGLSIRFRQLLDRQYQRFLGLDEELVWYMEQLKVEAKMDENCQHLCEVPGFGPVVSSAFKSWIGDGKQFKRGRHASAALGVIPRQHSTGGKEKLLGISKRGDKYVRTLVIHGARSVVTHAKKKKDPLSCWINNLVTKRGFNKAVVALANKLIRIAWVIVAHNERYQVQTA

SEQ ID NO: 102580 - protein, 322 aa, unidentified
MKQKPVLGIDVSKAKADCGLLWADSKYRSKVVGNHAAGFAQLYQWLQKYDAGQAHVCMEATGVYWEELALALSAQGMAVSVVNPAQIKAFGESRLVRTKTDKVDARLIAEFCRAMQPPLWQPPSPSEQALRALVGRLDALQRMRVQESNRLEVARDAVRSNIEAHLHWLDQQIKALTQQIDRHIDQDPELRRKRDLLDSIPGVGGRTSALFLAFCSRTEAFANARQCAAFAGLNPQQHQSGSSVRHPARLSKIGHALLRKAMYMPALVTLYKTPWGKAFRSRLRAAGKPPKLIIGAMMRKLIHVAYGVIKSNKPFDPTLHAT

SEQ ID NO: 102581 - protein, 340 aa, unidentified
MTITTIGIDLAKNVFAVHGVDQNGKTVLVKSRVTRAALPGLIASLPPCVIGMEACSGAYYWARLFLQYGHEPRLMAAKFVSPYRMAGKSGKNDAADAQAICEAVRRPHMRFVPVKDESQQAMQCLHRNRQGFIEEKTATYNRLRGLISEFGVIAPQSTDALRHMVSAQKSSLPLQVQQCVDDLLEHVDRIEANITEYDRILSRIAKTDHRSQRLMKLKGVGPTTACALVACIGNAYDFKNGRQLAAWLGLTPSQYSSGGKSKLGRITKAGDSYLRTLLVQGARSVLIGAEKRTDLFSRWVCSLVERRGYWRAVVAIAAKNARLCWASLHYGDDFRLYSAS

SEQ ID NO: 102582 - protein, 350 aa, unidentified
MDTTVAPLASIGVDIGKDVFHLVGFGTDGKIAFRCKIKRLALIETFKKLPSCVVGMEACLSAHFVSRALRKLGHEPRIIPAIYVKPFVKGQKNDYNDAEAIAEAPLRPNLRTVREKSQEQLDLQACHRVRSRLVSRRTATINQIRAFLIEQGIAVRAGVTALRNSLFEILKNREDEISPRMSELIVGLYEDWLWLDKRIEAITKEIEEISQREGNCVRLMSVPGVGPLISTAVVAAIGTGEAFDRGRDFGAWLGLVPRQYSTGGRSILGGISKRGSRYLRTLFIQAAKVLLMRSQNWPKFSFGPWLANAAPRMHRNKLAAALANKLARIAWSVLSTGKAFDIHKLEIEAV

SEQ ID NO: 102583 - protein, 419 aa, unidentified
MTFHLARGYVGTNKSVDQSSVKYSFGGSVMFYAGIDVAMDKHDCVVLDSDGNVVFEVFTFENNRNGFKSLKKVLRSCSKNPKKIKVGLESTGHYSDNLLAFLNSIGYAPVLFNPLHTNLFRKGLSLRKTKTDHVDAHTIATMLRTEDLKSYSQQSYHLSELKSLTRYRSTLVSDCSRHKLSFVRLCQILFPELKTLVPSLHMNSVYTLLSELPSADKIAKCNLTHLTALLSSASKGHYGRDKAVEIREQARTSIGIKSTVKELELQQTIELIRIFQRQIEAVEEKIDELMDDINSPITSIPGIANRMAAVIIAETNNFQDFERAEQVLAFAGLDPSVYQSGQLTSTHSKMVKRGSKYLRYAIFNAAKYVCHWDPTFNAYLAKKRAEGKPYNVAVSHAAKKLTRVMFHLVKTNKEFVPQV

SEQ ID NO: 102584 - protein, 362 aa, unidentified
MPNGMRWVGLDVHAHASAVAVFDDGTGEVITRRVNGRPMDVLDVVRELPGPVRAVYEAGPTGYGLVRRARAEGIEMAVCSPGNIERRPGDRIKTDKRDAIRLARLFAAGDLRLVWIPSEEQEQLRDLVRCREDLRADLMRARHRLATFLLRRERYFPGPGGRWTIKHRHWLSQQHFDDQASRITYADYLHAHDVLLARRDRVGRELEQLAPDCVWAETIARLCCLRGISTLTALGLCAEIGDWRRFDHPDSIASYVGLVPSEYSSGNTRRLGKITKAGSTHARRLLVEAALHYRLSPSVGGKLAVRQRGHDPALIDHAWRVQRRLNARWDLLRNGRGKPAGIVTIAIARELVGACWEIATAP

SEQ ID NO: 102585 - protein, 311 aa, unidentified
MGTLSQSILAIDISKDRLDTYAVPARRHGAVGNDPGGIGQLIEQARQADARVIFEATSVYDRLLMQALDDAGVPYHRANPRKARQFARSANFLAKTDKVDCIMLATYAASVDLPLSEPVAAERLAVRRLVDRRDQLVAMRKAELTRRQQIADAEIGAEVDQHIAELSRRIEHYDACIAEAMQHDKLAPLKRWLLTAPGIGPLTSAALAAGLPELGARGDNTIVALVGLAPLARDSGKLRGRRAIWGGRPKLRRLLYLAARHAMKNPAFKPFADRLLQAGKPRKLVIIAVARKLLIVLNNMVKQQRAFRPAT

SEQ ID NO: 102586 - protein, 424 aa, unidentified
MEVPVGAIHVCFKVVCGLDVHQAEVVACLSIQDARGRLRRETRRFRTVYAELLQLRDWLVAEGCEALGMEATGHYWKPIYSILEGHVRMIVGNPTQMKGLKGRKTDQQDAEWIADLTRLGLIKPSFVPPPDFRALRDFLRTRRGMIQARTTLQNETLKVLEVGGVKLSTFMSSVFGVSGMAMLRALAKGESVAGQVHLLAKGKLRSKLADLRLALEQPLPPHLQQILATQLERMDQLEGHLRTLDARVEERMAPYEAERHLLMEISGLGRTSVNVILAEVGVDMGVFPTPAHLAAWAGLAPGSFETGGKNRRAPTLKGNTYLKTILVECAGAAVRSKGTFFSAKFNQLRRRGLDYRKALVAIAHKLIVVIHRVLSGKAPFQDLGAAYFEQRNRAHMIRNLTRRLETLGFAVTLQNLNIESEPLQ

SEQ ID NO: 102587 - protein, 356 aa, unidentified
MQTQGTKKIDFKGKELFIGLDVHKKSWSVTILVEGMEHKTFTQLPDPKALFNYLQRMFPGGTYHSAYEAGFCGYGIHRELNALGIKNIVINAADIPTSQKDQLQKRDPIDSRKIARALEKGMLRAIHIFDRDMEELRSLNRTRFYLMRDLRRSKNRIKSFLQYYSITIPLEMDNNQWPLKFVAWLKQIQMQTLSGQDAFSNLIRSYEYHREQILTLSRQIRLRVTEYDKELYSLLKTISGIGPLTSSALITELGDINRFPHIDHLSSFVGLIPRVKQSGETSYSGGITFRCNSYLRTLLIESSWQAIRKDPALMQYYHQHLINNKGQKVIIKVARKLLNRIRYVMKNRQPYVTGVA

SEQ ID NO: 102588 - protein, 334 aa, unidentified
MALELLAIDLGKRSFHLYGIDTNGEILSRKVSRTKLAEVVNNLAPKAIAMEACASAHYWARCWLAAGREVRLINPRFVKPFVKGSKNDAVDAEAIFEAAMRPTMRFVPVKSRDQQDLQWLHRARDRLICQRTALINHTRGLLAEYGVVLPQGPWRFTAQAPAAVAGAELSDLARSIFGELMDQLDELDRRVKKLDATMVALCRTNETCRRLAKLPGVGPVIATAIVAAVNDGRQFRSGREMAAWIGLVPRQYTTGGKPRLGGIGRRANHYLRRQLIHGARAVVSRLPQHDARRSTWLKALVARRGFNRTIVALANKTARIAWALLNRKEDYAIA

SEQ ID NO: 102589 - protein, 393 aa, unidentified
MSCTTSRANLVQTAAHPDRATLFVSLELSKSKWLATVLLPGGDKMSKHTVLGGDWDALLALLLRARARAEARVGKSVQIVAIHEAGLDGFSVHRVLQMNGVESHVVDPASIAVPRRKRRAKSDRIDGETLLRTLLAYKRGEPRVCSMVVPPSPEDEDRRRLSRERQTLVSERVQHTNRIRGMLMAEGIADYAPLRRDRRERLDALRTADGRTLPPHLKARILREIERIEVVVRQIAEVEAERDALLRPETKVGVAGVSETAAALLMKLKGIGAEFATVLWFEAFFRRFDNQRQLSAFAGLAPSPWKSGKIDREQGISQAGNPRLRTTAIELAWMWLRHQPGSALSCWFRDRVSAERGRTRRITIVALARKLLVAFWRYATQGVIPDGAVMKTA

SEQ ID NO: 102590 - protein, 407 aa, unidentified
MAVTIGIDPHKGSHTAVALDEHETELGQLRVRSGPEQLARLVEWANAWPERTWAVENASGLGYLLSQQLVGTGEEVLDVPPKLAARARLLDNGDVNKNDPNDARSVAVAALRAKQRLSEVTKEDHAAVMRLWARRRKDLTSARTRAANRLHAVILELVPGGYIGEIYASKVARLLEAFEPVGAIAAARKELAEELLGDLRRLDAQLAELKERLAAVVAASGTTTTKVFGVGPVVAAITVGLTRDVRRFPDKDHFAAYNGSAPIEVSSGAKKIYRLSMRGSRQLNHALHMAAVTQVRHRHSEGRAYYDRKAAEGKTRKEALRALKRRISDALFAAMVADARRADKELGAGGPGGQTGSGSVACAAGSHPAKPALRPSHSRANPKARPSGQAARSLGRREVQKEIRKAS

SEQ ID NO: 102591 - protein, 454 aa, unidentified
MRKPQVVPDEDHEVIYERVAAVDVAKASGVVCLRTPDPARPGRFVNRIWDNVPAMRAQIAELGAELLRCRVQMVTLESTSDYWRIWYYVLESLGLAVQLVSASQAKNLKGRPKTDKLDAMWLARLTQWGMLRPSFVPPAAIRRVRDFTRARQDLVAERTRCLQRVEKLLEDAMIKITSVARDGMKAKSVVAMVAALAAGQRDPRALADLARGPLRAKRDQLAQALDGMFDSHHGMIARSLLDQVAFLDRQITLMEDQAIAALAGVPESWGVDADGQTGPQAGTSPGSPVLAAAHRLAEIPGISLWLAIVIIAEIGLNMTCFPTPAHLVSWMGLCRSAASSGTRHGKGKPKKGNSYARAAAGQAAIGAARTATFLGERYSRIARRRGKAIAQAAVARSIMIIAWHLLNDPQARYRDLGPDFYASRINRDKKIRNHIRGLQALGLTIAITGDEQAA

SEQ ID NO: 102592 - protein, 344 aa, unidentified
MSKFNLISIDLAKNVFQVGKFFHQKLQSNKAVGRKELLTILTTSPRCKVVMESCGGAHYWARKARSVGHEVVILDPRFVKAFRVGQKTDANDVIAIAAASFSPNVRPCKSLTQAQQSLQSIERMRALAEKQKRQLANQIRGLLLEFGIVIKQSECAFRQAIPEVLEDSDNGLTAGLRQCLAQCYELFKAQSTLKETLNELLTGLVKQDEQCERLLELEGVGPITAVGLLISLSDTTHFTSGRNAAANVGVTPRQHSSGGKVRIGHIAKYRGEITLRSHLFLGARAVISQLKHREPKTKKEQWLKALVERRGVKCAAIALANKTVRTAYAMLKKGTSYEPSLLAN

SEQ ID NO: 102593 - protein, 400 aa, unidentified
MAYCGGLDWGSAEHGVCIIEHDSGKIIARFPVAHDAAGIADLMRRLARLARPADLPIAIERPSGLIVDALVAAGHPVVPIHPNVVKASRPRYRAAGGKSDRGDPYLLADLLRTDGHRFRRLMPCSDEIKALRALVRGRDALVAQRLVLANQLRALLDSFWPGAVAIFADIDSPIALAFMQRYPTPDSAARLGEKRIKAFMAQHRYCGRRSASELLARLRRAPPCLAGDSEADAKGELVRAWAAVLTVLVAQIAELASRIEHTIGELPDGKIVTSFPRAGRICAAQILAELGDVRERFQAEDQLAAEAGVCPVTHQSGKSRGVVFRWACNHRLRAAITCFADNSRHSSPWAADIYQRARGRGCDHPHAVRILARAWVRVLWRAWQDRTLYDPARHRRLTPA

SEQ ID NO: 102594 - protein, 342 aa, unidentified
MEQVTTIGLDIAKSVFQVHGVDATGKIVLRRRLTRARLTQFFAKLAPCLVGIEACASSHHWARELRKLGHDVRLMPPSYVKPYVKRQKNDTADAEAICEAVTRPTMRFVEVKSPQQQSVMVLHRTRVMLMRQRVQLSNAIRGHMAEFGVVAPIGRKGLLTLTDILQDEADQRVPTEARRCLQMLTSQLRLVNAQILENDRKIIASARATDVGRRLMGIPGVGPLLASAFVATVPDPHAFRCGRNLAAWVGLVPRQNSSGGKERLGGITKQGNRYLRGLLVVGAMAVIRYAERHGTRRPWLVQLMARRTTKVAAVALANKTARMIWAIMTSGQAYREPELRAA

SEQ ID NO: 102595 - protein, 381 aa, unidentified
MQASTIGTPTAGHCGTIFVAIELSQKTWLVTLHSPDRDRISRHKFEGGDHGGLLLLIEKVRARVAQKLGSVPRVVSCYEAGYDGFWLHRLLEAAGITNFVFDAASIAVEQRARRAKTDRIDGELLLRTLMAHLRGEPRVVRIVRVPSVEAEDARRASRERDRLIKEQTAHTNRIKGLLRLVGMAVGNPRRRDWLAWLDRQRDWQGQPVPPHLLAEVKREHARLMLLRDQLAALEQAQAADATVPAAMVERRNQLQRLKALGPAFSTTLVNEVFYKDFRNRREVASYNGLAPSPWKSGGIDREQGISKAGNHRARHKAIELAWLWLRHQPDSALSCWFRARTLNAGKRARRIAIVALARKLIVALWRYLTTGLVPEGAAMKA

SEQ ID NO: 102596 - protein, 311 aa, unidentified
MRRMAGEAFVGIDVSKAHLDIAWEGEGAVERSANDAASCAAIAAELKDAPLVVVEATGGYELEIVRALQAAKAPVAVVNPRRIRDFARAAGRVAKTDQVDARVIAHFARAMRPSQTPQIEDGRMALAELVARRRQLIDMLVAEQNRIEHAGPSMAAAIRDHLAYLKDQLTGVDAAIAIQVRADLAIARRRDILESVPGIGGTTAAVLLAELPELGAIDDKKIAALVGVAPVAHDSGTLRGQRHIAGGRSSVRCALYMATLSAVRCNPAIKIFHRRLRDSGKKPKVALVAAMRKLIILVNTLVRRDQLWKPA

SEQ ID NO: 102597 - protein, 276 aa, unidentified
MSQPVKPVVVRMGIDIGKSAFHVVGLDFAGKPVFRSRFTRERVIEFLTRASPTVVGMEACPGSNWLARKAALAGHEVRIVPAQFVKPFVKSNKTDMVDAEAIAEAISRPTMRFAQPKTEAQLDLQALHRVRRRLVSSKTSVINQARAFLLEYGLTISVGAAYFVRDMPSILSDDQNGLTPSMRRLLEELWQEYRSIEARLLQLRHQIESIASADDAATRLTSVPGIGQLTATAITAFAGTGTQFKSGRHLAAWLGLVPKEFSTGGKQRLLGISKSV

SEQ ID NO: 102598 - protein, 325 aa, unidentified
MNQVSQHVLGIDVSKATFDVALLHHRQIHHKQFPNQARGFRALQAWLAKHTVAPIHVCMEATGKYGEALAEFLHAHAIRVSVVNPLRIKAFARSELSRTKTDKQDAAVIARFCVAMRPGSWQPAPPEIQQLKAYTRRLDALTALAQQEHNRLEGEKGFVEDDIRQHVEELQIRIHRLQKVIAEHLKQHPTLCQQQALLLSIPGIGERTVAQILSICGSIHQFSHAKQLAAFCGLSPRTHQSGSSVKGRGRLSKMGHASLRKALFFPALVAMKFNPQLKAMRERLLAAGKPKMVVVGAVMRKLLHQIYGVLKSGVPFRPERATGAS

SEQ ID NO: 102599 - protein, 369 aa, unidentified
MKQDTIFVAIDDSKRTLVLGILRPGADAPEMRSIPNEPRHVRRLFDRVKREGPVRVCYEAGPSGYDLYRQLTTLGVACQVMAPALTPRKPGDRIKTDRRDAVKLVRLFRAGELTAITVPDEAGEAARDLLRCREDVQEDLLRWRHRLGKFLARHGRVYREGRNWTQRHWTWIRSQQFTLPTLQRTLGEYRCAVEQLLARVADLTREIAALAETAPYRERVGWLRCFRGIDTLAAMTLLAELGDVHRFPHPRELMAYLGLVPSEHSSGDRTQRGSITKGGNTHVRRILVEACWHYRHPPRLGATLARRSQGQPPAIRAQAWQAQLRLHRRYRHLVGHGKRPPVAVVACARELVGFLWAALTQPAAVALAA

SEQ ID NO: 102600 - protein, 342 aa, unidentified
MAIVAGFDVHRAQITFDALDTETAEVTRGRIDSTPAAIRRWLARLGSDEVHVAVEACTGWLFVCDALAAAGATPHLAEPVETRALRGRKRRPKTDREDARWLRELLAEGRLPEAWIPPEHVRQWRSRARLRHTLIGERTQWMQRIQATLFHHGIHGTPEKLRTGEGREFLERIEIPQDARERIAIALAMVDAIEAQIAPLERELRRLARRQTGCKALMGLYGMGELTSLVTLCELGDVTRLSASRKAVRLAGIDIGVHRSDRRARAGKLTRQGSPQLRWALYEAALSACRPSSPDHADYLALKARGLSHTRASLTIARNLARRSYHVLHQLGPAALDPIPTS

SEQ ID NO: 102601 - protein, 338 aa, unidentified
MTNAVVKNFIGIDISKLTFDLTLILDLNKDKILYKVFSNSSQGIKEMKQWLKANMVNFEETVFCMEHTGIYCRLLVDFLNKHDCKTWLEMPVVIKRSMGLQRGKNDKIDSKNIALYAYKNREDINLWQAPRKEVLKLKELMTLRERLIRSKKSLTVPIDELRSIGDKETANMLMSRTKAAISGIEKSLKEVDKQLDEIIEGDVRLRELFKLIKSVPGVGKVTAINLLCFTNEFTLYKNAKQLACYCGVAPFDHTSGTSVKTKPRVSHMANKTLKTNLSLCACSVIKGKNELKDYYDRKVAEGKNKMSINNAIRNKIIHRVVAVIKRGTPYVGSDIIAA

SEQ ID NO: 102602 - protein, 284 aa, unidentified
MDVHTTNYTLCAMEPIIGEDDRVFATIKVTPDYKNILMFIENLRMKLGLNDEYDIQCGYEAGCLGYSLYNQLTAAGVKCVILAPTTMLTPQGVRIKTDMRDAYMIAQCLSYGGYHAVYIPTEADDSVKEYLRMRNDHKLALKKIKQQINAFCIRHGFCYDGTKWTLAHLNWLKKLEITNELYRETLDEYMASYEEQEAKIERYDKRIEEIAEQTKYYDKVKKLKCFLGIKTHTALSLIVENGDFERFAKGNQYASYLGLAPGENSSSDSIHRLGITKAGNSHLG

SEQ ID NO: 102603 - protein, 356 aa, unidentified
MSEITRVGVDLAKSVIQVNAVDAGGKLVTNRQLSRDKLLSWCAQLPPGCLVAMEACGGAHHWARKLIALGLNAKIIAAHLVAPYRLQGKGGKNDANDAAAVCEAASRPNMHFVPVKTTVQQGILCVHRLREGLKEERTASINRIRGMLTEFGLVASKSPDKLREKLTDMLEDASNDLSGMARLVIQEAYDQWKDLDERIDWCDERIKAHVKDDAHAKAAKELMGIGPVTASAVVATVGDFNQFKNGAQFGAWLGLTPKQNSSGGKSCLGGVTKRGDMYLRTLLIQGAKSAVMTAHKRDDPISKWLYQLREKSGWQKAAVAMANKNARILWAMMTKGCRFDPRHVSVKPTGSATTMA

SEQ ID NO: 102604 - protein, 337 aa, unidentified
MYYTGIDLHKKTSFITTIDKNGHVVKRSNLTNDETKIIDFFSALDADTKIVIESTSNWYWLYDLLVDDGFDVVISNPVKTKAIASARIKNDKLDSHMLAQLLRADLIATVHVSDMPMRQLKELLRHRSKLVRDKVRMKNRIHSILSKNNITVPVSDLFGKKGLVFVDHISLPAYQRRQVDTYIELLHSIDERVSTLTDEIRVAAKTNATAKLLMTIPGVGPITAMFMTAEIGDISRFPTYRHLSSYAGLVPSLNASADKHRIGRITKQGSPYLRTALVEAAQAAARTKSRLNLFFRRRIVRSGYQKAIIATAHKIIQYAYFILRDQKPYQEAKVAKA

SEQ ID NO: 102605 - protein, 362 aa, unidentified
MEHAGIDLGASRSAICVVSSEGVVLLERTIPTSDIDLFLAKRPKSRVAIESCAESRVVAIRAHERGHDVRVVPTSFVRSLGVGTRRIKTDKRDARSLAIASFRLGDELPHVHVRSDEAAAIQALVRARSSLVSQRTMAINFVRAQLRMALLGQGPRRTAKTFCTGVRELLGEDSSLEVSAHLATIDALNEQIDALEKRMKGVAEASEPATRLRKITGVGPIVSLAFLAAIADPKRFASGSHLASYIGLSPGENTTGGKVRRTGIIAAGQRQLRGLLVQAAHVMLNARKTREPMAQWALELEGRRGRKIAVCALARRLAIVMWAMLRDGTCYEPTLTRSRERTEPLTEEELAKAIANAASCPL

SEQ ID NO: 102606 - protein, 357 aa, unidentified
MKILGCDLHAKQQTIAMVDRETGEFTEKTLSHEGNEVREFYAALEGPVVVGIEATGAMQWFLELLEELGIVCRVGHPAKIRAAETRKQKHDRRDARLMLELLIEDRFPEIWMPSIEERDLRTLLRDRHQWVKIRTRVQNTLQAMALNHALRRGRGLWTATGQKALQALSLPSYTSQRRDELLRLYGQLQRRIQELDGQVEKQVQQRPQALRLLTHPGVGPVTALATEVFLGDPSRFANGKNVASYIGMIPCEQTSGKRQRLGKLTKEGNSLLRYLWTEATIHAVRKDPELKRFYRRKLIQKGMGKARIAAAHKLGIRLWIMLRDQIDYKEFCRRGQQRQCGEAHAGMPNYDSGPALQ

SEQ ID NO: 102607 - protein, 339 aa, unidentified
MGRFIGVDLHKNMFMVSFFEPGTGEHHLKSYYIKDIVSFKKVLRKDDVVGVESTNNTRYFVDQIRGNVGDVKVINPSQFKVISRSVKKTDENDAKVIAEFLSKDMVPEVRMKDKKTAQINSLANTRDKLVKLRTALKNKIHNILSSYGILLKQESLSSEKALARVLEYPVDSTAHVELEVIVTQIRSLNEGIKKLDKELEDKGRELPGHENITSIKGIGKRSGSILLSVIGDINDFESEKKLDAYFGIVPRVSNSNETERQGHITKHGSKLGRTTLVQCTLIAIKYSPYLRTFYERIKAKKGSGKAIIATSKKLLGIIYMTLKENIIYEDFPNFVIKTT

SEQ ID NO: 102608 - protein, 351 aa, unidentified
MMIIGVDYHPGFQQIAFLVEETGECGERRLNHSDGEAEKFYRDLKVRGISIRVGMETTGFSRWFERLLAELGFEVWIGDAAEIKTRRAKKQKTDRQDAQLLLKLLMEDRFPRIWIPNPENRDLRQLLWHRHRLVQMRTRIMNQLQALAMNENRCWKKKLWSEQGRTELEKLPLAFWASRRRQELLELLDRMNPTIEELTAAAALEAKKRPEALRLMTHPGVGPLTALAFVLIIGTPERFGCAKQICNYVGLIPSEDSSGGRQRLGHLTKQGSSLLRFLLVEAAQAAVRCNEDWRRRYRHLAMRRQRNIAKVAMGRRLQARLYWMWRNRRENSPSLELGSHAGKLGTGNGGQ

SEQ ID NO: 102609 - protein, 414 aa, unidentified
MELQHARCAGIDIGKKFALVAVRVAGAGRRKTKYTVNKYGSSTPEILRLRDELEAAGVTCVVMESTGEFWKPFYYALEGASFEQVLANARAVKNLKDNKSDVSDSRWLADLGAFGLVKPSFVPPPAIRQLRDLTRDRSAVMRQEAKLLTRVQDVLEDAGIKLSVVASDINGVSCRAILQAMIDGQRDPFSLAELARGRLRAKHDALTGALTGRFTDHHAFRLRQLLAQVDQCQASADAYTERIEQALGPYRTFRDLICTIPGVGTLTADVITAETAADMSVFATPKRLSSWAGVSPGMNESAGVAHQAGTGHGNKHLKAALGQVGMGISRSKNNYLSARHHRLVARRGPLRALVATEHKVLEIIWHMATTNTPYRDLGADYFTTRDPARATRRAINQLHALGYEVTLTLTPAAG

SEQ ID NO: 102610 - protein, 337 aa, unidentified
MKYSGIDLHSNNSVVTVTDEEDRVVAEKRLPNDLTKIVGLLTPWWEEMAGVVVESTFNWYWLVDGLQAAGFKVHLANTTAIKKYEGLKHSGDKTDARYLAHLLRLGILPTGTILPPEQRAVRDLARKRMQLVRSRTTHILAVENITARQYGARISSNQVKQLTADAVDRMPLPEDVALAIKTNVAVIATLSAQIDLLEKRLQERIGERPEYGLLTSVPGIGQVLATTILLETGPIDRFAAAGNFASYARCVDSVRTSNGKKKGEGNTKNGNKYLAWAFVEAANFALRYCAEAKRFYERKKAKTNNVVAIKALAHKLARACFHILKERKPFDVTRCFA

SEQ ID NO: 102611 - protein, 463 aa, unidentified
MARNNKGKKHKKPVHSLKAIQPDAAGIDLGSREHCVAGPPLKDNTPNVQRFGTTTPELLRLADWLKEQEVKTVAMESTGVYWIPLFEILDSRGFEVILANARQVSHVPGRKTDMLDCQWLQLLHACGLLRGSFRPSDDICRLRALFRERNTMIDQRSDWVRRIQKSLDQMNVCVHHAVSDITGATGMAIIRAIVDGQRDPRVLAQMRDRRCQKSEEQIAAELTGNWRPEHLFNLAQALKMYDQLCEVVSEYDAEIFAYIKTLQPCMDDDESAPPPASKSKARAIAKKGQEPMRQALYQLTGFDLTTIDGIGVDTAAVVVSELGLDFRAFPSEAHFVSYLRLAPNLSISAGKKVPSKLKGTTTSRVGTALRTAALSLRNSKTALGAFYRRISRRKGASVAVFATARKLAQIIYRLARYGQAYIDIGAKAYEAQFNNRRLTYYTKALKEMGYKVKLLETEESQAA

SEQ ID NO: 102612 - protein, 320 aa, unidentified
MRNAVGLDISKTTFDATAIIGGIEKSAKFDNDSKGFEQFKHWLTELGCTDAHICMEATGNYYEGIADYIGSLYKVSVVNPLKISKYAESRFTRTKTDKQDAKLIAEYCQTAKAQDLVIRKPVINDGYKLKRLSALYAQLTADSTAQKNRLEAAKDTFVVKICQSNIKHLQRQIKAVKKELEKLTKQPALKDQTDRLATIPAIGRLTAVMLLNYLSGADFQTSNKFAAFAGLTPQIKDSGTSVRGKPSLTKYGNRRLRAMLFMPAMVAYRIKAFPDFIARLEAKKKPKKVIIAAIMRKLAVIAYHVHKKGEDYDPTRYKAA

SEQ ID NO: 102613 - protein, 386 aa, unidentified
MIVIGADTHKGSHALAAVEAGTGRVRGGRQIQADDAGHLAAVRWARGLDEDRVWAIEDCRSCSRRLEQALLAAGERVVRVPPHRMGASRKGEREPGKSDEIDALAVARAVVKDGVEQFPVAYLNERAMEIRLLADHRNDLVAQRTRTVNRLRWHLLQSCPELERSVKGGAFNQSRVLDRVDRALRKLPAGARVRVAREQIAQIRSLNRQADQLEADLLELVKAHRPKLLAEQGCGALTAAILIGHTAGVKDFRKHSSFGLQTGTAPIPCSSGKRTQHRLNRGGDRQLNHALHIVAITRASRDPATKQYLARKEAEGKTKKGALRSLKRHLARRFYLLLAEPPVDQQQPARPEQITELEPPAVPDRPKPRREVEQITAPPSPMVCIS

SEQ ID NO: 102614 - protein, 342 aa, unidentified
MTIMIGIDPHKASHTAVAIDNNEVMLDELRVRACAKQTDQLRSWAAPFPDRVWAIESAHGLGYLLAQQLVAAGETVVDVPAVLSTRTRLLGSGKSQKNDPNDARSVAIAALRNDGLQHVTGDDHPQVLKLLAKRHRDLARHKSQASCRLHALLMELEPGGMAKEMTVTRANDILDRVSADSPTTQHRLEVAREFVADISLYEAQMKASLKRLRPAVAASATSLTDIRGVGPVVAALILGHVGDVSRFKSAAHFASYNGTAPIEASSGERRRHRLNQRGNRQLNYALHVVAIAQLRYPCEGREYYDRKRAEGKNTKEAIRALKRQLSNVIYRTLVADARRLAQ

SEQ ID NO: 102615 - protein, 366 aa, unidentified
MRKPSTTALRRRGKLQGEQLTIGLDVGDRSSFYCVLNGAGDVVLEAKVATNPAAMRQTFEKMPSSRIALETGTHSPWLSRLLTELGHETIVAHARNVRLIGESRRKDDRLDAQALARLARIDPQLLSPIQHRSAQAQADLSVIRARYALVRARTALVCAARGLTKSFGERIRGRNPKGFSLATSEALSPPLQIALAPLLSALAAITARIREYDAQIEKLAEESYPETALLKQVKGVGTLIALTYVLTLEDPRRFRKSRDAGCFVGLQPGRRNSGQSEPQMHITREGDSYLRMVLVQGAQHIIGPFGEDSDLRRWGLKLTERGGKRGKRRAIIAVARKLAVLLHHLWISGEAYEPLQNTRKRRLAAA

SEQ ID NO: 102616 - protein, 356 aa, unidentified
MATIAQIEPARITVGIDTHADVHVAAAKDQMGRPLGQTDIPTTPKGYRDLLSWAQGLGEVEVFGIEGTGSYGAGLARFLRSAGQVVIEVNRPKRQDRRRNGKSDPADAEAAARAVLSGDATAIPKSADDIIEMIRVLRSVRRTAMRARTQAINAMISALVTAPAELREQLRKLTGINLVRQAVRLRPGPVTSPTAATKKSLRSLGLRYEALEAEIKDLDVDLARLTTQAAPCLLERFGVGPDSAGALLVAAGDNPERLSSDAAFSMLCGSSPVEASSGKTKRYRLNRGGDRQANSALYRIVLVRMRYDQVTKDYVARRTTEGKSKREIIRCLKRYVAREVYDILKDASQQRLADAA

SEQ ID NO: 102617 - protein, 446 aa, unidentified
MSESSSMAAASEPEWAAFAAIDWADQKNFWRLVPADSPKHEQGELENTPEAVEVWAAGLEQRFGGRPVAVCLEQSRGALVYMLSKYPHLVLFPVHPTTAARYRETFTPSGAKSDPNDTAVLLDLLLRHRDRLRPLQPDTVETRLLHFLVEERRRSVDEKTRQSNRLTDCLKLYFPQILRWFDDVTTPLVGDLLQRWGSLGELQRAHPGTLRKFFHQHNCRSAELMEERITGIYQAIPATTDQAVLEAGIMTARGLAALLATLCSHIASFDQRIAQLVESHPDGALFASLPGAGSALVPRLLVAFGTRRDRYQSAYEMQCYSGIAPVKEASGNSEWIHFRFVCPKFLRQTFHEFASHSIRQSEWAKAYYEHLRQDEKKDHHAAVRSLAYKWIRIIFRCWKDGKPYDEQIYQHSLRRRGSLLADILGGATGFSWKPVAGIQKLSENNA

SEQ ID NO: 102618 - protein, 340 aa, unidentified
MNATTYGLDIAKRVFQMYWVDAQTGEIANRKFGRDDLIAFLAQRPAGRVALEACGSAHWWARKIRALGHEVVLLHAQFIRPFVQTNKTDAADARAIWTAVQQPGMRTVAAKTEDQQVMLSLHRMRSLLVKFRTMQINQLRGLLYEFGITFRAGRVAGLDEIRKRMAELEDTLPRSILLNLLEQLRRINLFEEDIDQLEKRIGAWQKHEAACRAISEVPGIGRLTATALVATIGDAKTFRSGREFAAFLGLVPRQNGTGGKIRLGSISRRGDPYLRTLLIHGARSVLCHTKVPTAWQKAIQARRPANVVTVALANKMARIAWAILAHGTSYEAHHVSNRPA

SEQ ID NO: 102619 - protein, 402 aa, unidentified
MNAVGIDVSKGKSMVAIMRPFGEIVSTPFEIKHTSSDINSLVKLIKSIEGESRIVMEHTGRYYEVLAHQLSEANLFVSAINPKLIKDFDNDSLRKVKTDKADSVKIARYALDKWQNLKQYSVMDELRNQLKTMNRQFGFYMKHKTAMKNNLIGILDQTYPDVNTYFDSPARSDGSQKWVDFASTYWHVDCVRKMSINAFIDHYENWCKRKKYNFSKSKAEEIYGKAKELVPVLPKDDITKLIIKQAVDQLNSASITVESLRTLMNETASKLPEYPVVMAMKGVGTSLGPQLMAEIGDVSRFTHKGAITAFAGVDPGVNESGSYEQKSVPTSKRGSSDLRKTLFQVMDVLIKTHPQDDPVYQFLDKKRAQKKPYYVYMTAGANKFLRIYYGRVKEYLASLPKS

SEQ ID NO: 102620 - protein, 331 aa, unidentified
MSNSIGIDVSKASLDCAYLHDPDQNKAKRKTCHNEVHCFAALVAWAEARSGLPVQSLAFIIEPTHVYHEQLVEFLHNTGATVYLVNPGKVRKFAEGIGILSKNDLVDADLLARYGLLARKLIAWAPVPQELNDLRSLLNRLEVLERNLRRELNRQEKIGKTRVFHRLEQQSIARTVKRLKAEIMTFKNAIRQCIQSTPSLQHNFYLLCTIPGVGAKTAWVMLVILGSRQFRSAPEVASFLGLNPIEKRSGKSQYRRPRLSKSGSGHYRQQLYFPAMVATRKNPDIKALYERLLAADKSKMCALGAAMRKLVHICYGVVKNQTPYQAQTVQS

SEQ ID NO: 102621 - protein, 340 aa, unidentified
MKLYGAIDLHSTNNVTVLIDEEDKIVYQKRLPNDLVLILKDLSVYQPRVEGIVVESTYNWYWLVDGLMEQGYKVHLANTAAIQQYEGLKYTDDHSDARWLAHLLRLGVLRQGYIYPRAERPVRDLLRKRSQLVRHRTTHVLSIQNLLTRNTGSSMKANQIKGLDVQQVDRLLPDGDLALAVKANVAVMLSADEQVELLEQTILQRVQLRPQFRFLKTVPGIGEILALTIMLETGNIGRFASVGNFASYCRCVGSQKISNGKKKGQGNTKNGNKYLAWAFIEAANFAIRFSATINGFYQRKKAKTKGVVALKAVAHKLCRACYYIMRDQVPFNITKAFGQK

SEQ ID NO: 102622 - protein, 347 aa, unidentified
METAQDTVRYRLFVGVDIAAATAMAAWQAAGGKVSRPVQIAQSPEGHAELHEKLRASGVPAGETLVVMEATGSYWITLATTLAQWGYAVSVINPSQAHDFAKALLKRAKTDAIDAQTLAQLAALLQPERWTPPPAIYTELQQRLAQRDSLLDLRQQVRNQLHALEQGPVVIAVVRQRMETLIATLTAQIKEVEKEITPVLAQDAAWAKAAALLQTIIGVGLVTAAWLVTSTLNFSVCPSPDAAAAYAGLVPYVRESGTSVRGKQAISRSGNKRLRRTLYLATLAATRWNPQIKAFYTRLRAAGKPAKVARCAAARKLLHLAWAVVTKDCAYDPAYQQRSTAQPASAA

SEQ ID NO: 102623 - protein, 343 aa, unidentified
MELYVGMDVSLKETSICVVDGKGEIQCEGTVISEPSTIADFLRSKAPGAVCIGLETGPTTTWLWHELRALDFPIICIDARHAKAFLSTQINKSDRNDAYGVARIMQCGWYKEVQVKSVSCHEIRAVLNSRALLVKIKRDLENQIRGLLKNLGFVIGKAGGNVFRHRVEELLGRQGLLWQAVRPLLEVREKVRREIAALHRKLLDLARNDVDSRRSMTVPGIGPITALAFHSAIDDPTRFRRSRSVGAYFGLTPRRYASGEVDWTGRISKRGDTMVRTYLFEAAGVLLTRVPQWCKLKAWGHRLWKRIGFKKAKIAVARKLAVILHRMWRDGTDFIWSSKEAVA

SEQ ID NO: 102624 - protein, 344 aa, unidentified
MDHFAGLDVSVKETSVCIVDEIGKIVCEVKVASEPDALLRVLRNPAHHFKRIGLEAGPLSQWLYGSLAEAGLPVICVETRHMRAMLKAQINKTDRNDARGIAQMMRVGLYRPVHVKTLLSQKLRMLLTHRKLLQAKTIAIENDLRSTLRNFGLKVGMVGKVKFEGRIKELVENLPDLATLAEPLLIVRRVLHEQLSILHRRLLDIVRNDDVCRRLMTVPGVGPVVALTYRATVDVPARFRNSKAVGASFGLTPSRYQSGESDRPGAISRCGDEMMRVMLYEAAQVMLTRTSKWSWLKAWAVRIARRRGMKKAIVALARRLAVILHRIWVDGTEFKWTREAVPAA

SEQ ID NO: 102625 - protein, 388 aa, unidentified
MTFYCGIDVAKRKHAVAILNESGQVCKPVFVTENTRAGLEYLLEHLSQLGDEVSIGLEATGHYWLSLYDALTSQGYPVSVINPLQISAYRKSGVRKVKNDRSDAVWIADFMRISNTPASSRDIPMLLQLRELSRFRYWLSEQIGDCKRKLVTILDRVFPEYEKLFSSVFVESSRALLRQAVSAQEFAELDLRELTEVLNKYSRGRFGQEKAREIQYQARQSIGVGFLANAAQVEMRCLLAQIELLEEQQKEVETAQTQLMARIPQYITSIPGVGVPTGAAILSEIGDISRFDSEDKLIAYAGIDATVHQSGQFQGTKTHMSKRGSPYLRLALWQAASMALQHNDELRAYYDKKIAEGKAHGTALGAVCRKLLIRIYVVLKENRPYVIH

SEQ ID NO: 102626 - protein, 343 aa, unidentified
MEQISTIGLDIAKSVFQVHGIDEKGAVVVLRQLRRRKVLAFFAKLPSCLVGMEACATSHHWAREIEKLGHEVRMMPPRYVKPYVKRNKNDAADAEAICEAVQRPTMRFVPIKTPQQQSVLMLHRTRQLFVRQRTTLINAIRAHMAEFGIVAGIGRNGVEVLLELIAKGEDERIPPAARECMMALAAQLQLVKRQILEADRRVLAWHRASKTSKRLEAIPGVGPLIATALVASIPDPSVFRSGRDMSAWIGLVPKQNSTGGKEKLGNISKAGNRYLRKLLVVGALSVIKRAKILGYTRHPWLVRLIERRSAKIAAVALANKIARMAWAMMVRDEKYRTPLPQAA

SEQ ID NO: 102627 - protein, 391 aa, unidentified
MVYVGIDVAKDKHDCFIVNSEGTVLYDVFTIQNNADGFGELFFKIKSASKDLSKVKVGLEATGHYNCNLLGFLKNKGLTTIVLNPLYTSLSRKRTSLRKTKTDKVDARTIASMIMSDVSLKPYSDKLYYNEDLKSLTRYRFDKVSERSRLKQSVKRLVTILFPELEKLVSTVHGSAVYALLYEFPGAHQIASANLKHLTKLLADASKGHLKRATADEIREAARRSISYYLPAKSLELRHTILLIRELNVQISEIEVEIKALLDKIDSPIFSVPGIGPNLGAVILAEIGDFNRFSSPDKILAFAGCSPSTYQSGQLYSSHAKMEKRGSRYLRYALLNAAKRVCTWEPTFTAYLSKKMSEGKHYNVAVSHAAKKLVRLLYHLEITGDSYRRAS

SEQ ID NO: 102628 - protein, 357 aa, unidentified
MTQVKKLDFSGTTIFCGIDVHKKSWRVNIQDSEFELEDFSQHADAVLLHKHLNRKYPGAIFRLCYEAGFSGFSAQRWLNSQGMDCRVVNAADVATSDKEKRQKNDKIDARKLCEHLQSKKVKGIYVPSLHWEHGRSLVRARARIVSNQTRSKNRIWQLLHFSGLALPKDYEAGQYWSSRFIKELHAIDCSSEALKTTLGLYIKDYQQTKTLLLEATRAIGKLCKQPGYQKDIALLKSIPGIGEINAAVMLFELQDVSRFKHFDHLCSYVGLVPNTHDSGETKTTKGITNRSNYYLRTALVESSWSVIRKDPALLMKYKTYCRKMEKNKAIIRVAKHLLSRINYVLKNKKEYVTAVVA

SEQ ID NO: 102629 - protein, 400 aa, unidentified
MNAVGIDVSKGKSTVAVIQPFGVVIAEPFDVFHTDSGLKELTSFIKSLSGETRVVMEYTGTYYEPVANALHNAGIFVSVVNPLVIDDYDTNRVRKVKTDKLDALKIASYALDKWIKLRKYEPEETVRKTLQIMNRQCIKLNKILVMQKNSLIALLDCCFPNANTLFTSPRRVSDGHEKWVDFVMKFPHVDSVAKLTLSAFKTKYKSWCKKERYNYSESKAEQIHAYARTIVSTLPMTDAVKKMISDAAKFLNSTLEALGTLHSEMDTLASQLPEYETVMNLYGVGKVFCSQLIAEIGDVTRLKCNKSLTALAGIDPPPDQSGKDDPKSRRISKRGSPALRRTLFLIMTIYLQRQPADEPVYQFLDKKRAEGKPYKVYMIAAAHKFLRIYYARAKEVMPKE

SEQ ID NO: 102630 - protein, 345 aa, unidentified
MQPMYYIGLDVHKRKISYCVKDGGGRIHAEGSISATRLELDHWMRSLPQPWSAAMEATMFTGWIYDHLKPHAATLKVAHPLMLRAIAAAKKKNDRIDASKICDCLRCDFLPESHMASTAIRERRRTLRYRNLLVRQMVQMKIKISALLMEAGVSYNKQRLHKAGYFRELLTTNPDIDEGLCSLLRLCRETVVRLGKSESALVRSLERDSLLVERIERLMTIPAVGPITALTWALEVGDVQRFSSIKKAISYCGLCGAEKSSGNTVQRTPLSKQRNKHLQTTLIEAAKMAPRNSPELAMLYDKEKQKGSANRATLAVARKLVAYLMAVDRGQRNFQRAGTSSSIAA

SEQ ID NO: 102631 - protein, 402 aa, unidentified
MIGVDPHKGSHTAVAIGAAEEPLGQVRVRASAAQAERLLAWAASWPQRTWAVEGAGGLGHLLAQQLVAAGEQVLDVPPKLGARVRLLASGNTSKNDPNDARSVAIAALRSAGCRPVRADDHATVLKVWAKRHRDLGRARTQVACRLHAVLCELIPGGFSKRISAAQAARVLSQVTVSGAVAQARFELAADFLEDLRRIDARMREARKKLAAAVQASGTTLTGIFGVGPVVAAVVIGEAGDPARFASRDHFAAYNGTAPVEVSSGNRKVHRLSRRGNRRLNHAVHMAAVTQVSQRHSDGRAYYDKKIAEGKTPKEALRALKRQVSDAIYKRLKADAARATAGSGQGPGGHQGNDSVASAAGLHPEHRLFGQATPGPALTLRSRPHDSAKKAASRTTKKTGRTT

SEQ ID NO: 102632 - protein, 355 aa, unidentified
MQSNKISFKRQNIYVGIDVHLKTWHVTTLTESGYKYSFAQHADAKELFDRLNKKFPEAHYKSAYETGFCGFSVHYALTELGFENIVVNPADIPTTGKEKAMKTDAVDSEKIAWSLKRGELTGIYIKDKRYMDDTNLMRLRQRFIRDLSRQKNRTKHLLYTQGVVYPERFSKKGTHWSRNFMKWLREDVELLSEEKRTLMLLCNQVEHIRKDILTITREIRRLSTTDRYKENFSLLSSVPGFGLITSMSMLTELDNDPIRFPNERKFVAILGLIPTCHDSGEKKSNGVKTFRGNKQIGPLIVEASWVAIHRDYQLGCYYTNCCQSMSPQKAIVKVARKLACKAYAVMKTKKAYVLS

SEQ ID NO: 102633 - protein, 395 aa, unidentified
MAHVWAGVDIGKTDHHCVVIDAEGSRLLSRRIANDQAELTALVEQVTALGDEVTWAVDLPEGGAALLIGVLLAADQRLLYIPGRVVNRAATGYRGVGKTDARDAAIIADQARMRRDLAPLRPGDELTVELKLLTARRGDLVADRTRAVNRLRNLLTGIFPALERALDNLTTTGQLTLLTGYQTPAALRRLGTARLEAWLRNRKVRNPGKLAQIALTAAHQQRIQLPGEALTAQLVAALAREVISLNEQIRDTDKLIEARFHQHEHATVIASMPGIGALLGAEFLAATGGDMTFFGTPDRLASFAGLAPAPFDSGRIRGNLHRPVRYHRGLQRVFYYSAMIAIAHCPDSKRFYARKRAEGKRHNQAVLALARRRVNVLWALLRDQRSYQPTAPLAA

SEQ ID NO: 102634 - protein, 415 aa, unidentified
MALKIVYKICCGIDVHKTFVVACIASTNDKGVTSYESHRFSTYTSGLKTLLQWLLDRNCKDVCMESTGKYWIPVYNILESDCSIVLAHPKYVKAIRGKKTDKKDAKWIADLFKHDLVAGSFMPPADIRQLRDLMRYRFKLTCFKSSEKNRLQNCLTVSNIQLGNVVSDTFGKSAQAILDKILENPADTSFDLEPLVFKSLKKKLPELRDAIDGYITPEQAGKLKVIKAHYENLESRKAELEELILALAAPYQQELTILQTAPGISSPFTAIGIISEIGTNMEAFPSAKHLCSWAGLTPTNNESAGKKKSVRVSKAGCYIKPLLVQCANAVVKSTKHPEMRNRYLRLKKRRGHKKAIIAIARMLLTALYHMLKNGENYNAELYQKSDLLPVDREITVEQALMIARNQGYKIKSATA

SEQ ID NO: 102635 - protein, 439 aa, unidentified
MTNRIPEMVLAIDFSLDRLDVSLRGDEREWRWAHQTYPNNWPGFQQLKQDLLTELNQVGPVRLTTVGESTGPYWWHAFYQFGHDEALQPFSPQLALLNPARVKGYRKAMAEQDKADPDDARLIDQYYRAVGVDHPYQFPDRYLRLRTFTRAYARVTHTLASEKAYLLSVLYLWGSEYQRREGKPFSNLFGATSLYVLDEFADIQAIAAIPLEELTTLLAQRSGHTFSDPQANASKLHQAALHSYPIPAPLADALHRVIQHTLAHIRFLSDNQKAYRQLIEQELATLPEAKRALDFKGLGPILVAGCLSEIQDTTRFVTGDKFDRRLKQRRPRTYHDGQASVAKLAGLWWPRHDSGHVQGLQPYLARERNPYLRYWLVQAAHTLQRYQPDYHRFYWKKYREALSHHHKRAIVLTARKAVRLVFALLHKGRQACLEEGLLT

SEQ ID NO: 102636 - protein, 416 aa, unidentified
MTFKIVRFICGGMDVHKNLIVATIGTTDKQTLTTEYIQQSFSTFYSDLIRLKEWFISHDCYDGCMESTGNYWIPIYNVLETELNICLTHPKYVKAIKGKKTDKRDSKWICDLYKCDLVKHSFIPEKEIREMREIARYRCKLVYMRSSERNRYQNCLTVSNIGLASAVSDPFGKTATNIMKELMQSEVIEDDKILKLNHKNSKDKDKILDSLQGYHIESDQRFKMDTVMNHIEYLDKQIQACEAELIKRAYPLRDYFQHITHIKGISALSAILIVSEIGTDMNQFESDKQLINWAGLSPANNESANKKKSVRISKAGLYLKPLLVQCALSSIKDKNSYFGIKYCRIKKRRGHKKAIIAIARMMLVCIYHMILTGEEFNPCDYESLTNPKPKKEPTMTVESALQFLKDSNFDFSSIQL

SEQ ID NO: 102637 - protein, 356 aa, unidentified
MLNDKKYIGMDVHKESISIAVRNGVGKIVMECVIETKASTILQLIDGLRGDLHVTFEEGTWAAWLYDLVKPHVTELVVCDPRKNASMREGNQSDQIDARRLAELLRLNHLSPVYHGEHGLRSLKELVRSYLTITKDLGRVMSRVKAIYRSWAIPCTGKQVYAPRHRAEWLGKISELGVRRRAEFYYQQLDALRALRQQVRRDLLAESKKHPAWKRLCQIPSIGPIRAAVLLGILQTPHRFRTKRQLWTYSGFGIETHSSADHRSVHGQLQRVKKPSSIRGLNRNCNHDLKNLFKGAAIVASSKPGPFQEFYTALLTKGIRPEMARLTLARKIATIALIVWKRGASFDAQHLKPQTA

SEQ ID NO: 102638 - protein, 370 aa, unidentified
MNEPTAFVGLDVHADTTAIGVAEPGRAAARFAGTVGPQFAELTKALSKLGAPSKLMIVYEAGPCGYALVRDLIAAGYRCEVVAPSRIPRRPGDRVKTDRRDALTLASLARAGELTFVNVPDERDEAVRDLSRARIDGVRARLKARQQLKALLLRQGRRYTGKSSWTAAHERYLAKVSFTHRAQDVAFVEYRQAVSESQARVQRLSEALAQEVECWRMRPLVQALTSLRGVDQLVATTLVCELGDFRRFAHPRELMGYLGLVPSEHTSGERRRLGAITKTGNSHARRVLIEAAWNYRFPPRITPALQKRQEKQAAHIRTIAWRAQLRLNHRYRRLKARGLQHKKICVAVARELVGFVWNIGQHVTGLATEG

SEQ ID NO: 102639 - protein, 310 aa, unidentified
MERRYVGIDVARDRLDVHIRPAGEVFVVARDSEGLAGLVERLKGVAPALVVLEATGGFETTVAAAIGAAGLPLAVVNPRQIRDFARATGKLAKTDALDAAAIAHFAEAVRPEPRPIPSEQAQMLGELVARRRQIVEMMTAERNRRRQLASKRLIKSVDRLLAVLQKELSDLEQEIDDSIRGTPAWRESEDLLRSVPGVGSTTARTLLAELPELGTLDRKRIATLVGVAPLNRDSGTLRGKRTIWGGRAQVRAALYMAALVASHRNPAIAAMYQRLRQAGKPAKLALTACMRKLLTILNAILRDRQPWQHA

SEQ ID NO: 102640 - protein, 356 aa, unidentified
MQTQVTKKIDFTGKDLFIGLDVHKKSWSVTVTVDGMEHKTFTQPPDPEALYNYLQRNFPGGSFHSAYEAGFCGYDIHRRLNSLGIENIVINAADIPTTQKDKLQKRDPVDSRKLARSLEKGSLHGIYVFDRNEEELRTLNRTRFYLMRDFRRSKNRIKSFLQYYGIPIPLEYDNNQWTLKFVSWLKQIKMQTQSGNDAFSSLVLSFEYHRKQLLDLSRQIRQRIREYDKELYSLLRTISGIGPLTASALITELGNINRFKNIDQLSSYVGLVPRIRESGETTRTGGITFRCNTFLRTLLIEASWQAIRMDPALMQYYHNHVVNSKGHKVVIKVARKLLNRIRYVMINRQPYITGVA

SEQ ID NO: 102641 - protein, 369 aa, unidentified
MKKNNKNRKEDARRNALQAKSRKTKLTVGIDLGDEWSQCCFLDEEGEIVEGCRVKTTREAMKTRFGELKPALIAIEVGAHSRWVSQLLSELGHEVIVANARELRAITGSDRKSDKVDAEKLARYARVDRRILRPLRHRGEEAQLDLLVIRGRAVLVKTRTQMVNSVRGIVKSFGYRMPKCSAEKFAQLKNLVPAGVKESLAPMMEALEQVQKKIEEYDERVKKLATEKYPETKVLRQVWGVGEITTVSFVLTIEDKNRFGKSRDVGPYLGLRPRRSQSSESDPELRITKAGDCFLRSLLVECGQRILSEKAPDTALKQFGKRIEARGKKKAKKRAVVAVARKLAVLLHKLWVTGEVYEPFPGARERKAA

SEQ ID NO: 102642 - protein, 339 aa, unidentified
MRLYAAIDLHSNNNVLVILDERDRVVYERRLPNELAAILNELKPHRKKIQGIAVESTYNWYWLVDGLMDAGYSVKLVNTAAVKIYDGMKYTGDEHDARHLAHLLRLGILPIGYIYPKEERAVRDLLRKRAQLVRCRTAQILSIQNLVSRNSGHGIAANDIRQLDEEAVGELCGGDQIRALAVQSNLTVLRCLDEQIRGLELVVLKQAKLKPKFEKLLSVDGIGNILGMTIMYEAGDMERFAKVGQFASYARCVSSSRWSNGKKKGEGNRKNGNKYLSWAFMEAANFAIRYNQRIRAFYQRKQAKTKRVVALKTVAHKLARACYHVLKDQAAFDLGRAFA

SEQ ID NO: 102643 - protein, 315 aa, unidentified
MTACLAQNVGVDISKDFLDVAFFPPTESWRFANDNKGFRALLKKLGKRVIERIVYEPTGAYHRLFERTLAKAHMPLVKVNPRHARRFAQASGKLAKTDRCDAAMLARMGAALQLEPHCVVSDAVDALKELQIARDALVKDRVAALNRQKTARSKLIKTQLGERLQQIDAQIEEIDREQKKLRNVDPTLTQSFDIITSIPSFGAVTANLLLVDMPELGHVDEEQVSALSGLAPIAEESGKHKGKRSIGGGRARVRQALYMPALNAIKPNGIFHKKFTATIDAGKPAKVAITAIMRKMLILANALIRDQRKWTPTPP

SEQ ID NO: 102644 - protein, 359 aa, unidentified
MVNEKQIKVYGGIDTHADTHHIAVIDAAGQRLADVEVPTTAAGYQAALRFLRTWPALVSVGIECTGSYGASVTRVVREAGIEVFEVNRPNRFDRRLRGKTDVFDAYSAAEAVLSGRATAPPKGGDGLVESLRVLRTSRSSALTARTATINQIKGMLIAAPEQLRARYRGLPNTKLIAALATSRPTKTPVTAAEATAYSLRLLARRWLDLTEQIQDLTRHLKRLLEDHAPALMGVFGCGPDTAAQLLITAGDNPERLRCEAAFAALTGVSPIPASSGKTNRHRLNRAGDRQANSALYHIVIVRLRYDQATRDYAARRTAEGKTKMEIVRCLKRYLVRQLYPLIVRTLQDPSETSTLEISQ

SEQ ID NO: 102645 - protein, 395 aa, unidentified
MYSLFVGIDVSKDSFSVAGLNDKTKLLFSLSPLMNAQGFSELLKALRSHQKDFSSVIVALESTGPYHLNLFSFLVSQGITTIVVNPLIIANFAKLSLRKTKTDKKDAVTIARFLFLNRDSINQLPSSQQTTDLRDLARERESILKMIASMKNDVRRILQSTFPELEHLVDILGDTMLCFLKVFPSARLIAQATPEAIAQGFNQGDWRRRISVHYTNIIDLAKTSVGATSPSKELILPGKIETLLYLKKRVDEITKMLVRLCTSMKKEDFALLTSIRGVNVKTAAPFLAELGDYQSFQSYKKILAFAGLDPTTHQSGKYEGMSMISRRGNRHLRKIIYNMTFCVVRYAGPLRDYFFRRKAEGLPFRKALLATSHKLVRTIFAMLNGRTFYKFAEVV

SEQ ID NO: 102646 - protein, 352 aa, unidentified
MPAHTKSAKSKTQIAVIGIDIGKNVFHLIGLDRRGAIVLKCKLSRSQLENRLANMPACLITMEAYLSRRLIALGHDARLMPAKYVKPFLKGHKNDYRDAEANAEAVQRPTMRFVATKTVEQLNLQALHRVRAWLVRERTATVNEVRAFLLERGIAVAKGIQRLRKALPEILARHAGLLLPRMIRIIEALAADWRRLDDRIEEISNEIEDLAQKDAPCKRLMTIPGIGPLISSATVATIGGGDMFSKGRDFGAWLGIVPKQLSTGGRTILGRISKRGNTYLRTLFVQAARVVLIKRQSWERYGLKPWIEAAARRLHSNKLAIALANKLARIAWSVLRHGRNFEVRHADEPQHA

SEQ ID NO: 102647 - protein, 367 aa, unidentified
MKKISTATAHAIRKVESQRLTIGLDLGDRSSWYCVLDETGEVLLEQKLSTIPKTMREVFGEMPRSRIALETGMHSPWVSRLLSELGHEVIVAHARKVRLIGESRRKDDRLDARTLARLARIDPQLLAPVKHRSAKAQADLTVIRARAGLVRARTSLINTARGLTKSYGERLRGCNSRNMKPEKASGLSPELQAVLEPLLAGIESLSEQIREYNEQIEHLAQESYPQVALLKQVKGVGTLIALTYLLTLEDPHRFRKSRDVGCYLGLQPGRRNSGQSKPQLHISKEGDPYLRTLLVQGAHHILGPFGADSDLRRWGLKLAERGGKNGKKRAIVATARKLAVLLHRLWVSGEVYEPLRNSSQAMLPAAA

SEQ ID NO: 102648 - protein, 413 aa, unidentified
MMSALVYRFHVGIDWATEKHRVVVLDAERRVVREREVCHEGAALESFADWLTHLAASAVETVAVAREVPRGAVVDVLLARGFHVFALNPKQLDRFRDRFTVAGAKDDRRDAQVLASALATDQPAFRRLEPEHPLLLELRELSRLEDDLQEELGRLTNRLREQLHRYYPQLLHLVPAADEPWLWTLLERAPTPSVAQHLPRATVRTILSRHRIRRVDTDAVLATLRAPALPVAPGTVQAAQRHLAVLLPRLRLIHQQRAECATQIEGLLERLGESQEHRDVPILRSVVGVGRVVAATMLAEASRLLAARDYHGLRAQTGVAPITRQSGRRTLVCMRYACNPRLRQAAYHWGQSAARHDPVSRAHYERLRARGHNHARAVRGVVDRLLHVLIAMLTAGTLYDPARRRLPVGEAVA

SEQ ID NO: 102649 - protein, 334 aa, unidentified
MHDHYIALDWAKANMAIARMTGKSEKIHVIDVPSDIGDLKMYLKKLSGSKVLTFEETATSQWLYTELKAHVDKIVICDPYRNKLLSDGPSNDKADAKNLVKLLRGGLLKEVYHSGEEFLKLRKIVSGYEDLVKLGVRLKNQKSSFLLSEGKTTDKDVEDQELKFVLDGVNKGIDNYEYEKEQYEKLFKQLSKKHLAIRNQASIDGIGTINAMKIVARVVNAERFREKGDYIIYCGLLKYDELSGGKSYGKRTPRYCRQLKSVYKTAAITVIGHDNYFNDYYEHLINERKFPEYQARHAVARKIASVSYGVMKSGKKFNPIRRTTLENKQVKTVL

SEQ ID NO: 102650 - protein, 322 aa, unidentified
MNTVFYLGIDVAKAKLDCALLLSTGKFKSKVVANSPEGFVGLAQWLKKHDADHARVCMEATGVYWEALAEFLVDAGFRISVVNPAQIKAFGGSRLVRTKTDRVDARLIAEFCQAMQPPLWVAPSARERQLRALILRLDALQRMHTQESNRLGVAREAVREGIERHLAWLREEIMAVTKAIAELIDQDPDLRRKRELLDSIPGLGERTISTLLAFYAESARFDNARQCAAFAGLNPRQQLSGSSVHGKTRLSKVGHALLRKALYMPAMVTLYKTTWGRAFRARLSQAGKPPMLIIGAMMRKLIHVAYGVLKSGQPFNPALHGC

SEQ ID NO: 102651 - protein, 343 aa, unidentified
MQTITTVGLDIAKSVFQMHGVDAEGQVVIRRQLKRRYVLAFFQKLSPCLVGIEACASSHHWSRELMALGHTVRLMPPAYVKPYVKRQKNDATDAEAICEAVTRANMRFVETKTPEQQSGLVLHRTRHLFIRQQTAVINAIRSHLAEFGIVAPVGRNGVEDLLDVVADPSDKRVPEIARACLAALGAQLHRLKEQILEFDRMIRAWHRSSEMSLRLDDCPGVGPVLATALVGSVADPKAFRSGRNFSAWIGLVPKQHSSGGKDRLGGINKQGDRYLRGLFVAGALAVIRYAKIHGTKHRPWLTALLARRPTKVAAIALANKIARMVWAMMARGERYKQPVALAA

SEQ ID NO: 102652 - protein, 417 aa, unidentified
MVEVIVSRCAGLDVHKNTVMACVRAPGPNGGRTSTVRQFRTFTAGLRQLRDWLVAEQVGQVVMEATGVYWKPVWHVLDATPGLALMLVNAHAVKNMPGRKTDVADAVWLAELGECGLLRPSFVPPPVIAQLRDLTRYRKKLIEERARETQRIQKLLEDAGIKLDSVVSDILGVSARQMLEALIAGVRDVTALAELARTRMRPKIPQLRQALEGRFGAHHALMLRMHLEHVDQLSVSIDRLDSEVDRVIRPFSSALQRLITIPGVGRRTAEVIIAETGADMRRFRTAGHLASWAGMCPGNHESGGKRRSGRARKGNAALRAALCEAAWAASHARSGYLPAQYRHLLRTFGKKGQTRAVFAVGHSILVIAWHLMAHDRDYADLGGDHFTRATDAEARERYLVRQLEALGHKVTLEPAAA

SEQ ID NO: 102653 - protein, 367 aa, unidentified
MDYRVYCGVDFHARQQTICCLKTETGEFTSHELKHDPKEAVRQFYAQLGGPVIVGLEASGYTPWFEELIEALGQQVWLGDATEIRRRARRRQKNDRRDAELILDLLVHDEFPRIHRPSPESREILRMLRYRHKLVKVRTIVKNSLQALSIQAGLSLQARLFTQQGTQQLETLALSPVMGQQRQQWLELLQELNQRITETERWLKQQARSDPRISLLRTHPGLGLLSSLGIVHTLIPVSRFSTTRKVAAYGGFDPMERSSADKKRYLGISKAGSRLLRFLLIEATQTAVKTDPELKRFYHRLTQRRGKPKAKVAVARKLLIRSFIMLRDEINYAEFQQRAIAARLAREFARPNVPVPLIGQPASPAKG

SEQ ID NO: 102654 - protein, 317 aa, unidentified
MTNPAVYIGIDVAKSWLDVALRPEGTPYRLANSGPGIEDLVERLLSVQPALIVLEATGGIETPLVAALVAAGLPAVVVNPRQVREFARATGRLAKTDAIDAAVLARFGEAVQPQLRPLPEAASQELAALVARRRQLVAMLTAEKNRLRRATPKVRPTIEGHLSWLESCLAEIDRDLDESVHSTPAWRANAELFQSTPGVGPVFATMLLAGLPELGRLNRKEIAALVGVAPLNRDSGQFRGKRKIWGGRAHVRSALYMATLVATRHNPTIHSFYQRLLAAGKPKKLALTACMRKLLTILNAMSRSSTSWRTAYAQDSC

SEQ ID NO: 102655 - protein, 482 aa, unidentified
MGKRKASTFERLQHAKMNRKQRRELGRKINSADPGLEVVHPNAAGIDIGNESHFVSIPPDRDAVPIREFGSWTADLQEMARWLKEHGVVTVAMQSTGVYWISVQEVLEAVGLEVYLVNARGTKNLPGRKSDVQESEWLRKLHTYGLLRNSFRPPEEIRAVRTIWRQRDRCVKECGRAVQQMQKALTTMNVQLANTISDLSGLSGQRILRAIIAGQRDPWELAKLRDRRIVASEEEIAHSLQGNWREDVLFELRQVIEAYDFYQKQIAECDQELAKYTAAIPSREITEPGDLPKESAPLPSSKTGRQRQKRSKNQPGFDLASELQRVMGVDLTGIDGINTMTAQVVFSEIGPDFSAFPDEKQFCSWLTLAPKRDISGGKIIRHIPAAGRHRVANALRMAAQSLSRSNSYLGARYRRLRARLDGPVAVKAMARYLACLIYRMVTRGRAYVDRGAAHYESKRKEKERIALQKKAATLGLKLVAVT

SEQ ID NO: 102656 - protein, 434 aa, unidentified
METDFAAYVAIDWADQKHAWMLQAPGSSVREAGNTDHTPEAVDVWAAELRLRFGGQPIAIALEQSRGPLVFMLTKYEHLIIFPVHPTTLANYRKSFRPSGAKDDPSDAGLLLDVLMLHRDKLRRLDPDTPQTRTLQFLVEERRKLVHEKTRYSNRITSHLKMYFPQLLDWFDEIGSNIVAEFLERWPDLDKLQRARPATIERFFIDHNSRNAESIAKRLDQIRKAVPATTDVAVLTSCTAAVVAWAGLLKQLLAAIAAYDDKVDALAREHPDYTLMKSLPGAGPALAPRLIAAFGSRRDRYATAYEIQCYSGIAPVVASSGKQRWVHWRWSCPKFLRQTFHEWALHSIAYSPWAREYYDQQRAKGKRRNTAIRSLAFKWIRILFRCWKDRKPYDEVAYQQALARRRPNPPTEEAPVQLQWKTVAGFSKIVASDA

SEQ ID NO: 102657 - protein, 431 aa, unidentified
MNSMNLIDNGCQETPDLAKGIVFALDISKKEIVYRICRIQTSSLPITVNQTMNGFKQIETEINKWRKNGYDIWVGYEPTGPYSCGIIEFLMGIGCRIAQINPKHTSMFNDIRDNKQGKTDPRDTNGIGCLIWQGCYRKPVHLTGTYAELRTISAEWLAASVDGARLRNQLYSAIELWYPELGMVYADKLCQNARAIIRKYRTAEEIAKAGEKKVKSTLKKVTGGRYANRAEELVRLASDSRALKSSQETRYQMILDLLDRFDLIEKQQKYMLKKMESLLGNIPESKYILSVKGIGVVTAAFLIGECGNIGNYSMEQLEKLVGLNLYEYSSGQHKGKQHISKGGRSALRYAVCMVATCMTSRNGIYHDVAEEMRARGMNFGQIRIAVARKLLRLISALVRKKEFFDLERFVARRKTVDDPLTRQDARIQKNA

SEQ ID NO: 102658 - protein, 317 aa, unidentified
MSKPTMICAGIDTAKRKLDVALASRAERLLVDNAAEGHRTLVDWLRRHRVKRVGIEASGGYEQAVVAELRRKRFVVVVFQPAQVRAYAIFKLQRAKNDKIDAALIASCTAEVTKIHAPPDPRLAPFAEHLTMIEQITDDIAGLKNRYESCRDPRIRQVWKMEIARFEKLEKTELKSLVAAIRAHRDLAERLDLINSIDGIGLRTAVAILVRMPEIGRITREEAAALAGLAPYDDDSGDYVGVRHIEGGRKRLRGALYKAALPAAFRWNPQLIALYKRLIGAGKLHKVALIACARKLLIFANTVVARGTPWTAQPSTA

SEQ ID NO: 102659 - protein, 347 aa, unidentified
MTIVEAARGVTGGVDTHLDVHVAAALDPLGVLLGSRSFATTPAGYQSLLAWLESFGSVTKVGVEGTGSYGAGLARFLRRSHIEVIEVDRPNRAERRRSGKSDPLDAVEAARAALGGRATSISKSKDGAVEAIRVLVVAKRSARGARIKALTQMRHLVITAPDQLRCRFTGVTIGALVSEGARLRPSRTGDEVMAAYKASLSSLAHRIQELDDEIAELDVRIETLLMETAPELLSLFGVGPDTAAALSISAGDNPERLHSEAAWAHLCGVAPIPASSGKSAGRYRLDRGGDRQANAALWRIVIVRIAHDPRTTAYFERKVKERRTKRDVIRLLKRYVARETYHYLPRG

SEQ ID NO: 102660 - protein, 391 aa, unidentified
MTMYFVGIDISKYKHDCCIISAANQKVVSKFTFKNDKSGFEQLNLILNSLSTPEDIKIGFESTAHYALNLELFLENANHSFMEINPVLIKDFKKSQTLRRTKTDSIDCELIARWLMTVEYKPHSKGFYHAYSLKSLTRLRDRLVRQRSFYLVKITNVLDHTFPEFKPFFHERLSKTALYLLENYGSAEKIARMNSASYEKLRSISRGKFSPQQFIRLKELAANTVGVNNSIFDVELNSLLTLYKSLVDEIKTLESEINRLVDEVHPHYMSIPGIGPISAAIIYAEYGDISNFSSPNQMLAFAGIEPSVHESGTESYNGKMVKHGSSQLRYVLINCCLPLIRFDVTFATYYARKRSENKPHRVAITHVAKKLVRVIYALESQDIDFDPKKLR

SEQ ID NO: 102661 - protein, 411 aa, unidentified
MELLHDRVAGLDVHRDSVTACARRPGPRGGTVTDKERFKTTTRDLGRLAGWLADQQVALVAMEATGVYWKPVYYALEDRFQVWLCNAYHVKNVPGRKTDMSDAEWLADVAAHGMVRPSFVPPLPIRELRELTRYRKTQIDARAAEIQRLEKVLQDAGIKLTSVASKVLTQSGRAMIEALIAGERDPARLAALAKGKLRPKIAELTEALAGHFGSHHAVAARRILDHLAFLDASVTALTEQITVRTAPYAAAVELLLPVPGLDRLTIEVVIAETGADLGRFPSSAHLASWTGLCPGNHESAGRRRRVGTPPGNQWLRRALIEAARAAARTKGSYFAAQYRQIARRRGPNKAAVAVAHSLLDVIWHLLSTGECFEDLGEDFFDRRRDPERETRRLVHQLEQLGYSVTLATASS

SEQ ID NO: 102662 - protein, 315 aa, unidentified
MAHQLWIGIDISSKWLDVATFPATEARRFPYTEEGLAALLAWLAGRDVAGIAMEATGGIERQLAYVLANAGKPPRILNPKRVRDFAKSITPAKNDRIDAAMIARYAAIAPGAPIARDLAREALAEMVGLRQLLSEQVTALLNHGRLLRQPSARAHIASQVKVLRARMQRIARDIEAAIKASAELADQAALLRSMPGVGPVVSAGLLALVPELGRLSAAKVAALLGVAPFDDDSGDRRGKRRISGGRVAPRNLLYMAALVASRRNPVMQAFYERLRARGKPAKVALVAVMHKMLTRLNAMVHTGHAWDPDHRGAHA

SEQ ID NO: 102663 - protein, 353 aa, unidentified
MPVYVAVDFHAREQTISWCDTADGEVHRTKLRHQHDDVRQFYEQFSGEVIVAFEASGYSAWFEQMLAELGHTVWLGNAAEIRRKAPRKQKNDRRDADLMLELMLKSDFPRVHTFSAESRTVLRQLRYRHKLVKVRTIAKNSVHAIGLNAGLPLRGRLLTPTGLEQLQALPLSPVLSQQRDEWLALIRLMNTQIGAVEESLAQRAQADEAVELLRTHPGIGLLTALALRYTLDPIARFTSTRCVVGYAGLDCVEDQSSERRRMGSISKQGSRLLRFLLNEAGQTAVRKDPQLKQFYRRLLRRRDKPKAKVAVARKLLVRSFIMLRDQIDYAEFVRRGVAARVARETHSPKVTDL

SEQ ID NO: 102664 - protein, 349 aa, unidentified
MLHVGLDLSRRRVDVCLISSDGELVEHFRAPADRDGLYGLTRRVAVYGEPVRGVVESMNGARFVHDELLRYGWEVLVADAQRVKGLAPLACKTDKVDARVLAELSFRDLVPAIWLPTPQIRAERERSRWRLHLVKHRAILKNRVHASLIAFGHQVPMADLFGVAGRRLLAELDFPEPWLGHVHASLELIDDLDRRVGEIERWLRRSGADHRYIPLLMTAPGIGWITGFTIAAEIGDIGRFSSPTKLTGYTGLCPRVSQSGEVDRRGPLSKHGPRYLRWGLMEAAIAASSHPLYKERYQRTKRRLGRQRGAKVAQIELARKLTEAIWYMLTRNQPFMPFVPAGAIIRLTA

SEQ ID NO: 102665 - protein, 412 aa, unidentified
MEAIVDRCCGIDVHKKTIVACLIVGKPNEKPRKTIKTFSTMTRDLLSCKDWLESEGCSHVAMESTGVYWKPVFNILEESMEIILANARDIKNVPGRKTDVRDCEWIAQLLRHGLIRGSFIPPKPIRELRDLTRYRRKLIQQRSSELNRIHKLLEDANIKLSSVVTDINGVSAQDMIYHLIKEDMTPKQMAELARKRLRNKITELQKALEGRLRDHHRLILKLSIEMIASYDQTIEELSLEIDKRMEPYREQSDRLQTIPGVKKRIAEVIIAEIGVDMSRFPSHAHISSWAGVSPGNNESAGKRRSGKTTRGNKWLKGTLTEAAWSASKTKGTYLSTRYKRLASRRGKKRASLAVAHSILIMAYHVIKEQCTYNELGGDYFDRLNEEHLVKRLSSRIQALGYRIEVQKLPVAA

SEQ ID NO: 102666 - protein, 410 aa, unidentified
MKSRVVAALDVHKIVLMAVIIVNGEVVERRRFLTGTAERKRLVELLLAHQVEDVVMESTAQYWKPIWLDPEEQFPPERLHLAQAYSKRARKGGKHDFKDAERLGRRLLAGELILSLVPDPEQRSWRMLSRTRVQLVEDHTRLQNQIEALLEEMRIKLSSVVSDLAGVSGLRILRAIASGATDGAKLAALGDSGLKCTREALTDALNVPVSTLHRQILKLMLDRLEMMRTQIEEIDKLLSTELKSNEPAIQRLAEVRGLGPQSAMQIVAEVGADLKTFRSAAEFASWIGTCPGSGISAELNKNDTSPKGNIFLRRLLMQAAMAAVKTKGSIFEVKFRQLLPKGYKQAAWAIAHKLSRVIWKILHEAVDYIELGPSRNLKAANDRIRRMCKELTRLGFKVQNSNAGTGDWLA

SEQ ID NO: 102667 - protein, 365 aa, unidentified
METKVNPINFLYVGVDVHKDQHTAVATDCFGQTLFEREINNSKEEFAELVSKVKILAENKKLKPVFGLEDTSAYGQRLALHLCRDFPVKVVSPVLVVRERKRLTHPEKSDSQDALGVARALISRIGTLPDFSISKTSEISKGLKDLTVDREFLVKEQTRIKNQLHRLLHRAYNSEYRVKFKNPFAVRALEYWSKHPVPAELSSNILLKNQIRRKVKRLKNIKKEVVEIEEEMKILLDQTGQKLDTLNGCGLVSASAVLAEIKDIDRFNSPDALARYGGFCPGEKSSGKKIRHIKSKSGNRKLNMTVHRIVLSQLGIHGNKYSKEYFKKKISEGKNKSQAICCLKRKIVNIIYMMLKHKAAYDYAA

SEQ ID NO: 102668 - protein, 422 aa, unidentified
MPVVQSTQSPSVLVAIDIAKLRHEVLIEAPGLKNRKRLVLLNTAVEFRRFADYLHGLKHPVRVAFEATGNYHRPLAHFLKAEGFDLVLIPSLAVARTREAMHNSWDKNDPKDAQVLLHLLRTGVTQRYHDPLLNQIHDLQELSLTHAQVSLEKTRTQHRLLTHYLPLYFPEIERYYCSTRSEWLLDLLHAFPTPASITCLSTEEFVKRAWPISGRKVAKRRLLEDIYRTARSSIGLPVREDSEAVAMFRVVLSEMKHLCQLRQQLEQRAAFHLQNNPDFQRLQKIPGIGPILALTILAEAGDLRRFGHHRQFLKFCGLDLSTQQSGQFRGSTKLSKYGNARLRCAFWMAATIAIRQTENSFRDKFERYLRKDPTSKDRKRMAYVAVAAKMARVAYGIVKSGTDYRCFHEVAAPSGRAASVGP

SEQ ID NO: 102669 - protein, 340 aa, unidentified
MKLYGAIDLHSTNNVTVVIDEQDRVVYQKRLPNDLALILKELSVYQSELEGIVVESTYNWYWLVDGLMEQGYKLHLANTAAIQQYEGLKYTDDHSDARWLAHLLRLDVLPEGHIYPKADRPVRDLLRKRSQMVRQRTTNLLSIQNLLTRNTGSSLSANRVKGLDVQQVDQLLPDGELALAVKANLSVMSSADEQVELLEQTVTQRVQLRPQFSFLKSVPGIGEILALTIMLETGDIRRFCSVGNFASYCRCVGSQKISNGKKKGQGNTKNGNKYLSWAFVEAAHFAIRYNSKIKSFYQRKKAKTKIVVAIKAVAHKLCRACYYIMRDRVAFDITRAFGPK

SEQ ID NO: 102670 - protein, 466 aa, unidentified
MNRKERKEWQQRLCAEDTGLEVVHPDAAGIDVGNASHFVAVPPDRDERPVREFGSWTADLRRMAEWLKRCGIRTVAMQSTGVYWVAVQEILEGEGFEVYLVNARGTKNLPGRKSDVQECQWLMKLHTYGLLRNSFHPPEQIRAVRTIWRQRDRLVKEAGREVQQMQKALTTMNVQLANAISDVSGVTGQAIIRAILQGERDPQQLAKLRDRRIAASEAEIAHSLEGNWREDILFELQQVVDAYDFHQKQIAACDVQLQRYLSALPIRSGPGAGEQSTADAPSEKPKKQRKHKLQKNQPVFDLAAELERTMGVDMTTIDGVDVMTTQVILSELGPDLSASFPSEGHFTSWLELVPRRDVSGGKVIRQKSRKSNNRVATALRMAAQSLWRSDSYLGARYRHLKARLGGQKAVKAMARYLACLIYRLLTKGQEYVDRGAAHFASKRTERELLALRRKAAGLGMQLVAVS

SEQ ID NO: 102671 - protein, 364 aa, unidentified
MVQTTTFVGLDVHAESITAAILENDSQHPEVVTLSGDLMKVRQLFRRLSEKAPVRACYEASGSGFVLHRVLTNDGFHCDVIAPSLIPRKPGERRKTDRLDAIMLARLYRSGHLTPVHVPDEEQEALRRLLRLRTTYQIYVTATKHRISGILRNHGHTFDEGKSTWTKKHRLWLGKLRNTLTGPLQTALAIELEHFEYLETQRQALDTELERFALAEPYRANVEALCCLRGVKILTALTLLCEIDDIHRFASPRHLMAYFGLVPSEHSSGQKEHRGPITKAGNTHARRLLVEAAWNNHHKAAAELILNRRRQGQPPAVVAIALKAQHRLHKKFWRLDQRKHRHVAVTAVARELCGFVWASLMSMN

SEQ ID NO: 102672 - protein, 377 aa, unidentified
MKNVRFVGLDVHAETIAVAVAEATGEVRSLGMIPNRAESIGRLVRKLGKPEQLRVCYEAGPTGYVLYWQLSELGVKCEVVAPTLVPMKSGDRVKTDRRDAEKLARSYRAGDLTPVWVPDGAQEALRDLVRARWAAKRDQLRARHRLSKFLLRHGRRAPEGISAWTERYLQWVKTQISFAHHAQELTLSDYLHEVEHAAARVTRLERSIDAAIETLPLKLRAVIDALQSLRGIAQISAVSIVAEVGELSRFEHPRQLMGYSGAVCREHSSGPRIHRGPISKAGNAHLRRIVVEAAWAYRHRPAIGRTLAARQQRSSAPVIELAWKAQQRLHRRYARLMARGKNKQQTITAVGRELLGFIWAIGIHVEQELSAPVRRTA

SEQ ID NO: 102673 - protein, 453 aa, unidentified
MRAKRSYSAVDVEQIDIEAVVLLLTVGCIVAIDVAKTKFVAAMATAAGEVRKLLRFEHPRQTKVFLDVLRGLQRAELKPVVVMEPTGTYGDAVRHQCHALGLRVHMMPPKHSHDFAEVFDGVPSMHDPKAAAVLAKLQAIKPGRVWQPESDGRRELRGWVDRRRPVVRVLGIYHGHLEALMARHWPEFAAHVDVYHHRSWFALLKEFPGPQAAAGASEAAAEVLRKASRGHFSHARAQEIVGSARSTVGVPMTAGEQERLRDITEQIEWHTGRLAVVDAKLAELVEQDPVLGRMATVVGASCAAAIGALVGSPLDFTNARALEKAIGLNLKEKSSGNTRGQMKITKRGPGQVRQLLFMAALRHMKDDATALSWCRARKGYKGDQKMKAVVALMRKLTRALWHVARGEAYDPSKLFDTRRLDVASVSNGRSRVAAPASPSAAAAKVCEGGAAIA

SEQ ID NO: 102674 - protein, 418 aa, unidentified
MQTELSQFTAIIGIDWADKKHDVCVQVTKTGQRQSYQIQHKAEQLDEWARALHRRYGGPIAVALELSKGPIVSALQKYDFFVIFPIDPTTLAGYRKTFTPSGAKDDPTDAEYALTLLLNHSEHFQAVKPQSVEIRTLMTLVEQRRRLMDDRVRLTNRLRNALKQYYPQALEWFERIDTPLFCDFIKRWPSLAQARRARKATLEKFFHEHNMNRKNLLEQRTRAIKSAIPLTTDEAVIVPYRLQVLTLVAQLEVALESIRSYDEEIAALAPQHPDYHLFSALPGAGPSLAPRLLVAFGEQRERFASAAEVQKYSGIAPVTERSGQKSWIHWRWQCSTFLRQTFVEWAAQTINKSYWAGLYYYQQRAKGCSYQAAVRALAFKWIRILYRCWITRTPYDEARYLKALKDRGSPLLTAAQTV

SEQ ID NO: 102675 - protein, 320 aa, unidentified
MLSFCGIDVSKDRLDVMVLPEGQRSSVPNDVTGWAELVEQLRGCSIAAIGIEASGGYERGAIRALLAADLPVRQVNPFKLRQFARASGVLAKNDPLDARMIASFVAIMPTRPAPQQAPPAERLAEMLAVRRQLTAEKVAAENASRLLEDAMLRRLSRRRIARLAADIDLLDRQLVEVAGTDAALAHRYRLLTSMPGVGAVLACTLIALLPELGRLSRKQAAALVGVAPYAFESGALKGRRRIWGGRANIRQVLYMAAMSASNWNPVLKAFRDRLAAAGKLPKVVIVAVMRKMITMLNAMVRDDVVWADRHSGRHIVPTAR

SEQ ID NO: 102676 - protein, 390 aa, unidentified
MTTVHSQNGQSAAVQTTLAAIFISMELSRSTWLITSLLPNSAGKMSKHTLKAGDVAGLFERIAHLREKALKRSGQMFPVIAIQEAGLDGFWIHRVLEREGIESHVVDAASVAVSRQRRRAKTDNLDGESLLRSLLAFKRGEPRVCAMVRPPSPEEEDRRRNSRERAALIAERVKLVNRIKGLLFSQGVFDFAPLKRDRRERFEQMKTGDSRPISVHLKAEIGRLLDRLELLMAQVKAVEAMRDTLVAAKPVNHGVEPRAAMLMRLRGVGPDFAEVIYSEGLYRRFNNRRQLASYAGLTPTPWQSGQVNRDQGVSKAGNPRLRTVMVQLSWFWLLHQPKSALAQWFQERVKLDGGRRRKTAIVALARKLLIALWKYVQFGEVIEGAVMKPV

SEQ ID NO: 102677 - protein, 350 aa, unidentified
MGQASTIGLDIAKWVFQAHGADATGRVVFRKRLVRAKVLEFFAGQPPCLVALEACGGAHYWARELGKLGHTVRLIPPAYVKPFIKRQKNDVADAEAICEAAQRSGMRFVPVKEEAQQANAVVFRARDLLVRQRTQCINALRGHLAEYGHVVPQGPAHVDSLVALVENPKSSVPESARGILQVLIRMLNALEEQLKELDGEIARRAKADPVARRLMTIPGIGRIAATAITALVPAPEGFRAGRDFAAWLGLTPLQRSTGGKHKLGAISKRGERTIRRLLILGASAVVRWASRRGAAAGSWLARMLARKPRMLVTTALANKMARIVWALLVSGRGAGYPAPPPQIPACGFVG

SEQ ID NO: 102678 - protein, 399 aa, unidentified
MNDGYGVYLGLDVGKEGHHAVGLAPDGKRLHDAALPNTEVRLRQLFDKLARHGQVLVVVDQPASIGALPVAVARAAGHQVAYLPGLAMRRIADLHPGAAKTDARDAYVIADAARTLPHTLRRVDVGDEALAELEVLVGFDDDLAGEATRVSNRIRGLLTQIHPALERVLGPKVHHKAVLELLSRCGGPVGLRKAGRRKLLSVAAVHAPRMGERLVEQIMTALDEQTVTVPGTAAAETILPRLADSLRDVLRQRDQVAVEVERMLDAHPLAPVLTSMPGIGVRTAARILLEVGDGTAFATPGHLAAYAGLAPVTRRSGSSIRGEHPPRGGNKNLKRAFFLAAFAALADPVSRAYYDRKRAEGKRHNAALICLARRRCDVLFAMLRDKIPYKPRPTSPVPA

SEQ ID NO: 102679 - protein, 401 aa, unidentified
MTTGTVDVTIGLDVGKTAHHACAMLASGEIIYDKPLPQDEDQLRQVFTDLQDHGTVLMVVDQPNTIGALPIAVARDAGCLVGYLPGLAMRKAADLYPGRSKTDRRDAFIIADTARTMPHTLRAVDRDNEVLSALKMLSGFDDDIAKDATRTINRLRSVLTQIHPSFERALVGDIITRPLVLEMLIHYGGPTKMKKAGYHRVLGWMTNRAKKDPTKLVDAIFEGLKAQTVIVPGTAAAEIVIPQLATNIKSLLEQRKTIAEQVEELLQDFPLSEVLMSMPGVGIKTAANILLAVGDCSDFRSAGHLAAYAGIAPVTRRSGTSIRGEFPARSGNKRLKNALFYSAFASIRFHEPSKTYYERKRAEGKRHNAAIMCLARRRCNVIYAMLTRAEFFREVPARAAA

SEQ ID NO: 102680 - protein, 309 aa, unidentified
MKQSVVYIGIDVAKTHLDVAWAGTFRRWPNERSGHAALVRWIKQSATPVQLICEASGGYEQALLESLEKSEVKVTLVQAVRVRQYARAAGILAKTDRIDAKVLAAFGSAMQPQPTPPLSAEQKRLRQYEAQRRHLSRILVAEENRLAQLSCAELRSLSRCLISKIKTQIKTLDRGISDLIAQDQTLCVKAQKLTAISGVGIRTAALLLAQMPELGQLNRRQAAALAGLAPFNRDSGSLRGKRAIFGGRPALRSGLYMTALSAARFNPILSNFYQRLRAKGKPHQLALTAVMRKLLLALNHTLKPIPCTT

SEQ ID NO: 102681 - protein, 349 aa, unidentified
MILAGCDLHTRKQQVALLNTDTGELWDQELLHAGDDVERFYAALPPPVTVGIESTGYSVWFHALLQRLGHTLLVGEAAKIRAMVVRKTKTDRRDARHLRDLLKEDRFPRVWIPDPTTRDLRALIKHRLRLVRIRTMVKNGLHAIALNQRLALGPSLWSRQGLAQLQALELLPHTRRRRDDSLDLLQWLNRHIEELDLQMATAAAADPEARRLMTHPGVGPVTALATVLVLGPVERFPGSKHVVSYIGLAPTVNASADKCRLGHISKQGSALLRWVLGQAAPLATRGDAGLKRIYFAVLRRRGRPKAKVALARRLLVRLYVMLRDQIDYAEFCRRGRARPGGLELTRTPG

SEQ ID NO: 102682 - protein, 323 aa, unidentified
MNTYYIGADVHCNKTELAVERKNKIIQRFSVPTTITAISEVLKSILGRKHLTFEEGPMAGWLYRNLNNEVDTITVCDPRRNKLIASDGDKDDKIDAAKLACLLRGKYLRSVYHGKDDKIVELKGWVGLYLGRVKQATACINKIRSQARMYGIKIPRRVLRDVQYRQEWLCSLSKESVAKRLQVLWIGYDASAQQTKLSKQQMSKLAGRYPIIRYWDRLPGVGPIRATTIFAYLETPWRFKRKNKLWKYCGVGLVRQFSGGGAGRLKLNWSSNKRLKNAVMGAAISAIRHRDNIFKDDYERMVKDGITPSNARHAVARKLLTVM

SEQ ID NO: 102683 - protein, 330 aa, unidentified
MKNFQIIGVDVSKSTLDVYLHTAKIHFKVDNSNQGMVELLEHSLSSLNCKPDDLMICFENTGKYSKLLSVMLDSLNIKFLMLSALEIKKSLGLTRGKNDKIDAMRIANYAFEKREKLKPTILPGVNVDRIKALLSLREKLIRHRTSYKNGLSDLKDCYIEGENSLIVEVQMNFIGELNKQIQKVEDEIRMIIQNDELLEVNYNLAKSVVGVGPILAAYLIAFTNNFINFDNPRSFACFAGIAPFSESSGKQKGNARVHPYANKQLKSLLNMGAMSAIRIPGELKNYYLNREKAGKNNMSTLNIIRNKIVFRVFAVVKRKVPYINHSKFAA

SEQ ID NO: 102684 - protein, 360 aa, unidentified
MRSDRTFVGLDVHAWSVTGHALDAETGEVWQRKLTPDPAEMLAWVSTLPGPVKVGYEAGPTGYHLYRFLNDHGVSCVVGAPSKLQRPHGDRVKTDARDAELLARLLKLHEFAEVVVPSIEQEAARDLVRAREDVRGDLMRARHRLSKLLLRQGILFNGGNAWTGVHDAWLRGQRFDQPGRQTAYDTAYETVVLTTDRRDRLDAAITAMAADSSYTNVVHRLGCLRGISTLTGFGLAVEIGDWTRFTGSTIGAFVGLVPTEHSSGGSRSQGSITKTGNGHARRLLVEAAWHHAKPYRSPGKVMRHRWEQAPAEARLRGHEGNRRLNQRWQLFTARKKKPVIANVAVARELAGWAWSLAVME

SEQ ID NO: 102685 - protein, 320 aa, unidentified
MQTPAVVLNIGADVAKDEIVAACSEGSFPVRKVANQRTALLAFLKGLPAGSRIGVESTGSYHELFAEVAHQLGFLVFLLNPKDTRHYAKAVGLRGKTDRVDAELIARMIAHEHTKLHAWIPPTPQQRELDRLIKRRAALVSLREAVEMSLHELDGFAADLKSLRTRFNQLIARLDLRVKALVDASPERKQNYRRLCTITGIGPVVGTALVNTLERVPLKSADAFIAFTGLDPRPDDSGQHRGKRRLSKRGPGELRRLLYMAAMSAIKTKTWRPLYDHYRAKGLSSTATLVILARRIARAAWSIYTHKTEFDPGRLTNPLT

SEQ ID NO: 102686 - protein, 377 aa, unidentified
MKEVTTIGLDLAKAVFQVHGVDAVGAVTLRRTVRRRQVLAFFAKLPPCLVGMEACATAHYWAREIAKLGHDVRLIPPAYAKAYVRRNKNDPADAEAICEAVSRPSMRFVTMKTEAQQAAAGIHKSLPLARTGVREMLIKQRTMLINALRGLMAEFGIVVAEGPQHVGELVAILADPANRRIPTPLHEGLLAIVETLRGLERRIEIVDKQIVGWGRGNATCRHLITIRGYGPILSSAMAAFAVDPAAFASGRHFSASLGLVPRQDGTGGKVKLGPISKRGNGYLRRLLVNGAMSVLCSKRAKEDPWLVKLLETKERKVAACALANKMARIGWAVMMRQEDFRNRRHDQPCSDLGEPGTVLAALKTAARTPAAVALGQS

SEQ ID NO: 102687 - protein, 273 aa, unidentified
MKIIGCDFHTRYQQIAMMDEATGELIERRLDHQSGEAQAFYRDLQGPVRVGIEATGPIRWFERLLAELGHELWIGDSAKIRASEVRKQKTDERDARLILDLLLANRFPKIWVPTPAERDLRQLLWHRHKLVCLRTMLGNQLHALALSEGLCRKKKLFTKKGRVELLHLGLGPWASRRREEVLKLLDQLEPTIAELDRAVLEQARRREDAVLLMTHPGIGPVTSLAFVLAIGPITRFARSKKIASYLRLNPSEESSGGRRRLGAISKQGNTMVR

SEQ ID NO: 102688 - protein, 351 aa, unidentified
MTLVGCDLHSRNQQVAVLDTETGEVQERRLDHEGDAVEQFYAFLPRPVTVGIESTGYTLWFHALLQRQGHTLLVGDAAKIRAMVVRKTKTDRRDAAHLRQLLKEDRFPVIWVPDPTVRDLRALVAHRMRLVRMRTMVKNGLHAIALNHRLAAGSALFTRRGRAQLGALALPPYTTQRRDESLELLTWLDTHVQSLEARIAEAADADPRARQLMTHPGVGALTALATVLVLGPVDRFPTSKHVVSYIGLAPSVDASADKYRLGHVTKQGNALLRFVLGQAGHVAVRSDADLKRLYCAVLYRRGRAKAKVAVARKLLVRLYIMLRDQIDYAEFRRRGQPRRLLQPRGEALVEA

SEQ ID NO: 102689 - protein, 350 aa, unidentified
MQYLGIDWGTRRAAWCALTAAGELTEGAVSADQDGLARLVSRLGPDVHGCIEMMSGAVWVRDRLAECGWTIEIADARKVKAIAPLACKTDRVDARVLAELARRDLVPSVWVPPLDDRAIRERLRRRSHLVRLRTSAINRSFGVLTQWGLRRNLTALRKPGAVDELAAHGVPDVWLQSIVTLLGVIDDLDRQLAPLERELRPLARTDERARLLMSIPGVAELLGLTIASEIGDIARFPSARKLVGYAGLAPRVKQSGQSSRTGRLSKAGPDTLRWAAVEASQQAWRPNNPWNRLYSDTKRRRGKSNPAKAAVARKILIAAWHILALQQPFKPSASRATDPAPASSSIRLAA

SEQ ID NO: 102690 - protein, 351 aa, unidentified
MKAKMESNQASLAVIGVDIGKEVFHIVGLGVDGKIAFRRKIRRSGLRDAFEKLPPCIVGMEACLSAHFVSRLLRALGHKPRIIPAIYVKPFVKGQKNDYNDAEAIAEAALRPNLRVVEEKSQDQLDLQACHRVRLVSRRTATINQIRAFLIEQGIPVRAGARALRNSLFAILENRRDEISPRTASLILGLYEDWCGLDTRIETVTGAIEELSQVEPKCRRLMSVPGIGPIIATGIVAAIGRGEAFERGRDFAAWLGLVPRQHSTGGRTILGRISKRGSKYLRTLLIQAARVLLMRPHNWSRYSFGAWLKTASQRLHKNKLAVALANKLARIAWSVLHNEKAFDTQPEAVAI

SEQ ID NO: 102691 - protein, 328 aa, unidentified
MKNYQEVIGIDVSKSKLDGYAYNRNIHREFSNDVKGYKALLKWANEEKEKVFFCFENTGHYSLKLALYLSSKKQAYVQENPIVIKRSSGVIREKNDVVDAKMIARYGWLHREELSPSELKNNELLEVGRLLALRDQLVRSRTGLKNTLSELKKLLTSSSTDTCCKTLLSSIAHLTSQINKIEKQLKSLIRTSDTLTHNYRLITSLKGVGLIVGAQLLYHTDNFKRFDSWRQFSSYCGTAPFGHSSGSSIHKKRKCHPIGDRQMKSLLSMAACTAIQYDSELRQYYKKKREEGKLKMIALNNVRNKLLSRVFAVVKRGTPYVELQKFAA

SEQ ID NO: 102692 - protein, 419 aa, unidentified
MQPTATHTTEYTEPQPVLYLAFELGERTWKLGFTTGHGQKPRERNIAARDLERLAHEIAQAKQRFRLATTTPVVSCYEAGRDGFWLHRFLQAQGIANCIVDSSAIEVNRRQRRAKSDALDVRKLVTMLIRYQHGERKLWSVVRVPSVAEEDQRQLHREIHTLKQERTRTSNRIKGLLSAQGLRLPQLKHLPVQLASVRLWDGSPVPASLWRRLERDYAHYLFLVKQLREVEAERRALVRTSSATSIAKVRQLMQLRGIGINGAWVCVMEFFGWRQFANRREVAASAGLTPTPFQSGGRAREQGISKAGNRHVRWLMIELAWCWVRYQPESALTRWYLERFYDGGSRARRIGLVAVARKLLIALWRFLETGELPEGATLKSECPRCPSESLGEPALGAGESRELPSDAGVPSGSPAPSRS

SEQ ID NO: 102693 - protein, 345 aa, unidentified
MAMVHYVGLDVSLKQTSICVVDEAGSLVREGVVDSDPEIIASFVRSKAPGAVRIGLETGPTTTWLWTELKRLGLPVICIDARHAKAVLKMQINKSDRNDAAGIARIMQSGWFKEVHVKDIDSHLVKALLVSRALLVKIKRDLENQIRGLLKNLGLIIGRAKFNVFGARTEELIEDRPELAAVIRPLLAARQAIEEQVDDLDRRALKLARQDVQVRRFMTVPGVGPITALCFKATIDDPTRFNRSRSVGAYVGLTTRRHASGEVDWSGRISKCGDAMLRTYLFEAANVLLTRVPKWSALKAWGMRLAKRNGLRKAKIAVARKLAVILHRMWIDGTEFNWTKEEATA

SEQ ID NO: 102694 - protein, 432 aa, unidentified
MNDQNTTAATPPAPPDYAAFVGLDWGDEKHALSLCAAGSAVVEPATLEQTPEALADWATTLRTRFPNRKIAVAVEQARGALLAGLSQYEHIVPFPVNPKSLARFREALYPSRSKDDLVDADLLLELLVKHREHLRAWQPDTVQTRQLALLNEQRRHFVDHRTGLTNQLLSHLKAVFPQAPKLLGEDLASRLATDFLKKWPTLQAVQKVKPAVLRQFYYGHNSRSEELIALRLELAKNAVALTSDPALLAAHSLSIQTLAAQLQALRPFLQQYDQQIAELFGAHPDAPIFQSLPGAGPVLAPRLLTSLGTDRSRFSEPVALSSYSCIAPVTEKSGKTQHWVHVRWSCPKFLRQSWHEFANSSIKFSAWAALCYQEFRKKMDHHEAIRKLAYKWQRIVWRMWQNRQPYDEARYLATLQKRGHKLFATPPVKSGE

SEQ ID NO: 102695 - protein, 347 aa, unidentified
MRFYTRQHRHYCGVDLHARSMYVCVLDRDGNVLVSKNIASAPEPFLELIAPYREDLAVAAECMFTWYWLADLCAREAIVFVLGHALYMRAIHGGKAKNDRIDAHKIAGLLRGGMLPQAYVYPQAMRATRDLMRRRNYLMRQRAELLAHITNTNHQYNLPAFGVRPARPAERSGLAEHFAEVPVRKSIEVDLSVIEHYDRELPRLERYLESNAQAHDPVALAIVRTIHGMGKVLGLSILYEIQDVGRFARVQQFLSYGRLVKPTKASGGKILGHSGRKIGNAHLKWAFSEAAVCFLRANKPAQALRTRLAAKHGKGKSLAIIAAKLARAVYFMLKRGEPFDAERFFAH

SEQ ID NO: 102696 - protein, 403 aa, unidentified
MNSVGIDISKGRSTVAVMRPFGEVVISPFEVRHTGSELSELARRLKSLDGETRVVMEATGNYHAPVAKLLHDAGLYVSVVNAKLVHSYGNNDLRRVKTDRKDAVKLANYGLDRWLTLPRYVPEENTRLLLKNCYRQYRQYSKVQTVLKNNLISLLDTVFPNANRLFSSPIRGDGSEKWVDFVAEFWHCRCVSEKSERTFTNKYQRWCKKHGYNFREAKAHTIYAEASGHIGVMPKSETTKLLVEQAASQLRATSAALAALKHEMQSLASMLPEYPVVMDMFGVGPTLGPQLIAEIGDVRRFYSKKALVAYAGLDAPPNDSGDVTGRHKSMSKVGASSLRRTLFLVMSVYLQNAPLDEPVYQFMDKKRAEGKPYRVYMMASANKFLRIYYATVKAYLESLELTA

SEQ ID NO: 102697 - protein, 388 aa, unidentified
MQIAADRPQASTAIRTDLGAIFVSLELSRSTWLITSLSPGGGAKMSKHSVRGCDVAGLLERFAHLREKARARTGQRFPIIVIHEAGLDGFWIHRMLNAEGIESHVVDPASIATSRRRRRAKTDRIDGEALVRALLAYKRGEPRVCSMVKAPTPEEEDRRRLCRERKVLTAERVLHVNRIKGLLFSQGITGYEPLRRDRRERLEQLQTGDGHTLPDHLKGQVRRELDRLELLLDQIKAVEAERDALLAAERAAARTPAAMLLDIKGIGPEFAAILWSEGLFRHFDNRRQVAAYAGLAPTPWQSGSVDREQGVSKAGNPRLRTTLIQLTWLWLRNQPHSALTLWFHERVRRNGGRLRKTTIVAVARKLLVALWKYVTAGVIIEGAVMKPT

SEQ ID NO: 102698 - protein, 360 aa, unidentified
MVIQGTSVGLDVHALSVVAHAVDEETGKVARARLCPDHGEVLGWLHQLRAPVRVTYEAGPTGFGLARAITEAGMECVVAAPSKLQRPAGDRVKTDARDAAHLARLLRLGEITAVRVPEREIEAVRDLMRAREDARADLMRVRHRLSKLLLRQGIVYSGGTPWTCVHEEWLRRHRFGDVHLKAAFDHGFDAVLAATAARDRLDEQIMVVAASPRFADPVNRLGCLRGISALTGLALTVEIGDWSRFTGSSIGAYVGLVPSEYSSGNSRVQGSITKAGNTHVRRLLIESAWHHRKSYSTSGPSLRARWAKVEPALRARGHAGNRRLNTRWRTFTERGKNPLVANVAVARELAGWCWSLATMQ

SEQ ID NO: 102699 - protein, 409 aa, unidentified
MRLFVGLDVSSFDMKVCFLNGDGEKLDSFSVSNDLSGATTLKEKLLQCVAGKEVEILKIGLESTSVYSFHPSMFLHHEIDLQRFGAKVFLLNPKQVANFKKSYSDMNKTDEIDAFVIADYLRFGRNQMSIVKESQYVALQQLTRSRYQLVKMLTKEKQHFLQHLSFKCNTFSQEVDTSVFGSAMTELFLEKFSLEELANMPLEELAEFLQEKSRNRFGDPKCVAASIQKAVKASYRLDKVIEDSIDVILGTSIAVIRTFQQQIKELEKSIKKIMAGLTQTLESIPGVGPVFAAGIIAEIGQIERFDDETKIAKYAGLYWRKHQFGRFTAEDTSLSRTGNHYLRYYLVEAANSVRKHVSDYQEYYVKKYNEVPKHQHKRALVLTARKFVRLVDALLRNHQLFTPERCVKE

SEQ ID NO: 102700 - protein, 387 aa, unidentified
MPRPDNSRRSLTALEQESTLIAVVELSRSSWLVAGLVPGLGRHPLKKLEPDEEALLRLLQRWRDEAAGAGRAVTRVAVAFEAGRDGFWLARWLRARDVEAHVIHPSSVPVPREHRRAKTDRLDTELLKRAFLGWLRGEPDHCSMAAVPTLEEEDARRPNREREGLVGERTRIVNRMKSHLARLGIRGFKPTLRKAPERLGALRTPEGAPLPPNTAAELRRDMARLRVVAEQIKEIETARLERLEREPAPRPHAMVRLLARVVGIGVETADMLVHEVLSRDLRDRRAVARYAGLTGSPDESGARRREKGLAKAGNARVRRGMIQLAWRFLLFQKDSALARWYRARTADARGGTRKAMIVALARKLLLALWRLVTTGETPEGLVLRPAD

SEQ ID NO: 102701 - protein, 438 aa, unidentified
MSNKVIFNLDDLFISVGIDVGADFSWMSIALPNQQFVGKPYKILHNSIDSLTTAVSKIKEAEELYSLESRIFLESTGIYHYPLFCYLRDKGFNCSVINPIITKNSTNINIRKVHNDRFDSKKAALVGLKPDLKVSLIPSDLALNCRNLCREYYDLMDNRSAYVNKLQGELRMAFPQYLGIFSKVTINTSLTLLETYTSPSAFLEADKQEIIDIIKSTARFGLTYAQNKYNAIIQAATDANQFGYIIDSNIKRIRLYISFIRKYDEEINNILESLHELVDANEDADFVKQIHLIETIKGAGFLSAVSIMGEIGDFSAFSKPKQLFAYFGLDPAVKQSGKFEGTKVQMSKRGSAIARRVIHTLTLQSISISRNGEAKNPVLREYYLKKCDSKPKLVAMGAVSHKVCNMIFAILRDNKSFEIITPQEHIKQYNASKCDMAA

SEQ ID NO: 102702 - protein, 416 aa, unidentified
MLFIGDDWAEDHHDLEIEDQDGHRLARARLPEGLVGITRLHALVAGHAPAVWADPPPEQVAGQVIVGIETDRGPWVTALRAAGYQVFAINPLSAARYRQRHSTSGAKSDAGDAHVLAEIVRLDRDHHRAVAGDSDLADAIKLLARAHQSAVWERTRQVLRMRSTLLEYFPAAVQAFEDLAAPDALALLGRAPDPDRAAKLIRSQLVSALRTGRRHHVEVKADMLLAVLRAPALRQPATLQGAYAAVVTGQVGIIAALNEQLAGLHEVMAAHFGRHPDADIYLSQPGFAVVLAARTLGEFGDDEDRFASSRARKNYSGQSPITRASGKKSVVLARYATNRRLGAALHLQAFAALGAAPGARAYYDALRARDIAHHAALRQLANRLVGILHGCLKTGTVYDENIAWQHHQITTRTVAA

SEQ ID NO: 102703 - protein, 365 aa, unidentified
MRKLTRPIRKVNAQVIGLDVHKRLIVYCVLDRQGREIAEGRFPASPESVEEFLARQVGRKKSHLAFEASGCSEWLYDLLLERYPADRIHVAHARRIRAIANSRQKTDANDAFWLAYLTHEGRLPESFVATGTLRELRTATRHRVDLVRWRTRAVVALKAEAARLGHDLRGAGLRSERARERAWQLARETRGACGQLLTESLEEIERLDLILEEWEQRIATLVESLPAVSVLRHRIPGLGSVLAATVYAESGPVERFASAKTYAAFTGLAPSCRISAGRAAPHTISREGNPYLRWALTQAVLACTRARHGAARAVGDWVRARERRMGAKGKARCAAARKLAESIWRLFDQPATFDAARPFGGGLTA

SEQ ID NO: 102704 - protein, 438 aa, unidentified
MKQKNIRKINHTAAGIDIGSTEIFIGIENKPVLSFPTFTESYIKAIEYLIENNITTVAMEATGVYWYALYDMIEQAGIDVHLVNGRAMRNVPGRKSDVQDCQWLQELHSYGLLRRCFIPDDITRQLRTYTRLRQDHLSLATQHIQHIQKAFDSMNIKLHNVISQINGTSGLRIIKAIISGQKDPIKLASLCENSIIKKKNDLVINSLKGNYRNDYIFALEQAFDGYQFYLDKVFLCDKKIENLLELITKDKHVPEKLNLPKRVRHNAPQIQDLHLMLMKLTGGNDPSQITGLTDKTLLEIIAETGTDLSRWPTEKHFTSWLCLAPGKHSSGKKNKTRNKKGHTKAGQIFRNAAYALTNSKHIALGAFYYRIKARKGPLIAIKATARKIAVLYYNIMTKGIEYVEKGIKDYQQKVKEQKIKFLQKQAKQLGFNLSPMIT

SEQ ID NO: 102705 - protein, 318 aa, unidentified
MPPAASAFVGVDVAKTELVMAIRPSGDRWTVANDDDGVRTLLKRLRQHAAALVVLEATGGYERAVVAALAAARLPVVVANPRQVRDFARATGQLAKTDRIDADMLALFGERVRPEPRALPDEAALAFDALLTRRRQILGMIVAERNRLEHALPAVRRGITQHIHWLERQLQDVDRELDTSIKASPVWRAKDDLLRSAPGVGPILSRTLIGELPELGTLPRKQIAALVGVAPLARDSGTLKGKRLVWGGRAPVRAALFMAALVGTRCNPVIRVFYARLRAAGKPPKVALTACMRKLLTILNAMVRTNTTWRHLAPPETP

SEQ ID NO: 102706 - protein, 325 aa, unidentified
MAILFADGLAETAARVFNEFKTTVSGYRQLVKWVEQNSCGIDSSLWLFCGENTGDYSKGLCNFLYGKGYDMWLENAKSIKDASGLRRLKSDRADASMIAEYAMRNYDKAVMYEPLSESLTQLRELFLYRQMIVRHRCSFQVRRGEKRLTMEKSPVKTMISQSGRHIVSELNKEIEKIDKRIADLIKSDEELTEVFTIVTSVPGIGTQNAVCLMVYTDNFRRFNYDSRKIACYYGLAPFGKDSGTSVHSDPHVHYMANRQIKAMLTQAALAAVNFNPIMARYYMRLVERGKKKQVALNNVKNKLVHLVTAMVRNRQTFTPEYKISA

SEQ ID NO: 102707 - protein, 465 aa, unidentified
MRDKTKPNREGASFSMTMIHPNAAAIDIGATMHMAAVSPDRSSEPVRSFGAFTADLHRLADWFAECGVKTVAMESTSVYWIPIFELLEERGVEVFLVNARDAKHVPGRKTDVSDAQWLQRLHACGLLRASFRPSGDIVELRAYLRQRERLLDTAASHIQHMQKAMTEMNLQLHHVVSDITGATGMRIIRSIIAGERDPAVLASMRDTRCHSSAEVIEKALTGHYRAEHLFVLEQAVALYDVYQHKVAACDVRIEAVLKQLGSVRAHEGDPRREASGPPPKRQSRQSNGLAFDVGAALHSLLGKDLTKIHGIGPYLALKLVSECGDDLSAWPSAKHFTSWLCLAPGNKISGGKVLSSRTRRSGNRAASLLRLAAVTIGRTDTALGAYYRRLSARVGKAKAVTATARKIAVLFYNALRHGMDYVDPGASYYETRYRERVIGNLQRRAKAFGFVLQAAVAPVAEPAVS

SEQ ID NO: 102708 - protein, 340 aa, unidentified
MDITTLGIDVSKNIFHVVGTNRAGKPLFREKFTRQKLAEFIAQHPLCLIGMEACPGAQHLARKFEEYGHQVKLMPAQFVKPYVKSNKNDYNDAAAIAEAVRRPTMRFVTTKTSEQHDLQALHRVRERLVRTRTSIICQLRSFMLENGVAVRTGRAALAKALPDILEDAEQPLSDRMRALIQGLRDHWLFLDEQIKSVSADLERIAKSRDDCRRLLTVPGVGPLVATALVASVANGKQFKRGRELSAWLGLVPREHSTGGKQRLLGISKRGSSYLRKLVIHGARSCYLNMNRSQHRMGAWIDDMANRGTHRNIIVVAIANKLARICWAVMRDGDVYHCARA

SEQ ID NO: 102709 - protein, 307 aa, unidentified
MFVGIDVAKDRLDVALRPSGETFAVARDGAGLETLVARLREIDPELVTLEATGGFETVVAAALAAAELPLAVVNPRQIRDFARATGKLAKTDALDAAAIAHFAEAVRPPARALPSAEAQALGELIARRRQLIEMMTAERNRRRQLTVKRLIKGIDRILEALQAQLSELEQDIDDAIRGTPAWREKEDLLVSVPGIGNKIARTLIAELPELGQIGRREVAALVGVAPFNRDSGTFRGRRSIAGGRAAVRSALYMSVLVSIRRKLPLHAVYLRLRAIGKPAKVAIVACMRKLIVILNAILRDKKPWQTA

SEQ ID NO: 102710 - protein, 353 aa, unidentified
MKCDKYMGMDVHQATTVVVVLDAEGKVILETIVATEGPAITRLVQSLSGPLHVTFEETTQASWLYGVVRAHVSDVIVCDPRRNKLLREGSKGDKPDALKLAELLRVGMVRSVYHGHAATVKLKELVRGYETLSIDTKRTMTRIKAIYRGRGIRTPGNGVYQLKQREQWLTQLSEPGVRERVAWLYEELDHLRPLRRRAKQSMLTESRKHCAVELLRTIPQLGPIRCALIVATVDTPHRFRTKRQLWAYSGLGIVTHMSAEYELREGRVVKSRKPVATRGLNPNCNHRLKEAFIGAATAGSRTEAYRGYMEGLEKKGMRAEMARLTLARKISAIALRIWKKGEKFDPKKLNGTT

SEQ ID NO: 102711 - protein, 394 aa, unidentified
MKFVGIDIASETHAVAVVDEKSDVLVKAKPFSEDADGYGKLLGLIGSSADTLVAMEATGHYWKNLFVYLAVNGFAVALVNPLRTHRFAGEDLQRTKTDAIDALGIARFAAQKRPPPTRLPDTITEELRELIRFRDRLKQDFDDRVRQLHRLVDLGFPEFTRYVRSLDSELATAILKDFPTAEAFAGIRPRSLSNLKYDGRHFVGLELANTLIEAAKVSVGRHHGHAYRVQVRCYCEDLDLLRRRLRELDRDIESKLDQHEIGKLLTTIDGIGPHTAARLVATVGNPADFRDERAFSAYVGAVPGLNHSGMHQPMRAGLTPIGNTALRAKLYMPTLSAVTHNPWLRAFYERLIAKGKLRKVALLAAMRKLLTAIYSVAKNRRPFTPNLLPAEGAK

SEQ ID NO: 102712 - protein, 311 aa, unidentified
MTTSSETYVGIDVSKDRLDVAVLGNEGVWQVDNTPNGIAKLVQQMENLQPELIVVEATGGYQRGVVEALFLAGLPVAVVNPARVRQFARACGLLAKTDKLDAQVLAVFGQRVQPKLYEGKSEAEKQLSALLVRRKQVEEMLKAEQNRLRTVSSSLRGSVERIITILKEEKKRLDEQIRELMIEQKAWQAQTQILTSAPGVGPVTTATLLAELPELGKMDRKKIAALVGVAPMNYDSGKKRGYRKTKGGRTDVRSVLYMSTLVATRYNPVIRTQYQHLLKRGKEKKVALTACMRKFLTILNAMMRDQQPFRM

SEQ ID NO: 102713 - protein, 339 aa, unidentified
MKYTPVGVDIAKHLIQVHFIDEHTGEVVDKQLRSKDFLTFFSNREPCLIGMEACGSSQHWARELKKLGHAVRLMQARFVKAFVMGNKNDVMDARAIWMAVQQPGKEIAVKTEEQQSVLVLHRSRRQLVKFRTAQINSLHGTLLEFGETIHKGRAAMDRELPEALERMKARLPPYLITVLEDQHNRLKELDSLIDGLEKQLNSVARQNETCKRLIEIPGVGPLIATAAVATMGEAAAFKSGREFAAYVGLVPKQTGSGGKVRLLGISKRGDTYLRTLFIHGARAAALLTKEPGPWITELKKRRPTGVAIVAMANKLARTVWAIAAHDRKYDKNHVSIRPY

SEQ ID NO: 102714 - protein, 340 aa, unidentified
MKITTIGIDLAKAVFQVHGVDAQGKAELKKQIKRDQMMAFFTSLLPCLIGMEACGSAHYWARRLQALGHTVRLMAPQFVKPYVKTNKNDMADAEAICEAVSRPNMRFVPIKDAEQQAVLSVHRVRQGMVKARTAQANQIRGLLSEFGLIIPQGIAHIHKRVPAMVEEAGDALPGALRSLVQRMLDHLKELDRQVGELELQIQAWHRSSSLSRKLEKIPGIGPITASALVASIGNARNFKNGRQLAAWLGLVPRQHSTGGKSNLLGISKRGDCYLRTLLIHGARAVIRHAENKLKGHEWLRTLMARRNKNIATVALANKNARIVWALLAYDREFRSDYAVA

SEQ ID NO: 102715 - protein, 323 aa, unidentified
MTSSSQQYQHIIAFEVAKDSLTLHILPDDTQERIANTPAAVRRVLRRQARRNGRHALGPMLVVCEATGSYDRHVLAVACELAIPLHRAHGVRTRHFARYLGLAKTDPIDARMLALFGRDTAALRLYSRPAASQVALRELRKRRDELKAMAYMEANRLEHACLARVRASIRVQLRRIDKEVAAIETAIDQMIEADPAMAHKTRLMQSLKGIGPATATACLAYLPELGSFTKAQVARITGLAPIANDSGKSSAPRHIHGGRKSVRNALYMAALVAIAHNPRIRLYAIALKKRGKPAKLVITAVMRKLIIILNAIIRDDAPALKYP

SEQ ID NO: 102716 - protein, 457 aa, unidentified
MSKRKSKAKLKNFNLPKLPAHLQHMNLNAAGIDIGSERHLVAVPEGRDTVSVREFGTFTADLEALASWLKQCGVTTVAMESTGVYWIPLFELLERRGFEVKLVDARHVKNVSGRKSDVLDCQWLQQLHTYGLLSGAFRPPDEVCVLRSYLRQREMLTQAASMHIQHMQKALQQMNLLLHNVVSDITGVTGMKIIKAILAGERNPRVLALNRDGRCQNSAATIAKSLVGNYREEHLFALRQAVDLYETYQAKIADCNQAIIKQVEKQPDISDDAPPPAEKQLQARDYIREGVDVRDLLFKKSGVDLFAIPGLAADTLLVLASEVGFDMTAWKTEKHFASWLGLCPGTKKSGGKVLQNKTKRNPNRATQAFRMAAASLYRSQTALGAFHRRIKSRSGGQQAVTATAHKIARIYYAMLSHGTSYVELGQKAYEQRYKARRIDHLKVQAKSLGFQLVPSAS

SEQ ID NO: 102717 - protein, 410 aa, unidentified
MPLSEFSAYVAIDWADQHHYWCLADAEGTRRDHGDLRNTPEAIDTWVAGLLVRFPDGSLAVCLEQSRGGLVFQLGKYARLVLFPVHPATIASFRQAFFPSGAKGDPGDAALLLELLLQHRQHLRRLDPDTPETRLLGMLIELRRRLVDERTRQSNRLTAWLKMYFPQPLNWIDNIDAPLGCDFLDRWPTRQQLQRAKPETVERFFREHNSRSETRIQERMEAIRTAVAAVQDTALLEAGAAATGALVALLKALHATIASLDQQIAALPKHPEADLLAGLPGAGPVLLPRLIVAFGTRRERFQSASELAAYSGIAPVTKQSGKSKSVHFRRACPTFLRQTFHEFAAHSLAKSLWARQFYDQQRQRGKRHHAAVRSLAFRWIRVLFRCWKDRQPYDEARYMEALQRRSGHQE

SEQ ID NO: 102718 - protein, 356 aa, unidentified
MQQVTTVVAARSGMSTGLTLGLDLGDRTSHFALLDVEGQVVERGTVATTREALRQRFAQLPSSRVVLEVSTHSPWVSALLQELHHAVIVANARAVKAVSQNPRKSDRIDAELLARLARVDPALLHPLAHRGETAQRDLAVLRARDSLVRARSRLINSARGLVKAAGARLPMCGADAFHRRVVEAVPAELRPALEPLLEVCAALTQQLRAYDRQVEAMLLRYPETQQLRQLRGVGPLTSLAFVLTIDDPQRFTRSRMVGPYLGLVPRRRQSGDRDPELHITKTGDGFVRKLLVECAQYMLGPFGEDCDLRSWGLRLAGEGSTARKRRAVVAVARKLAVLLHHLWVNGEAYEPLRQAA

SEQ ID NO: 102719 - protein, 309 aa, unidentified
MQNPSFVAVDIGKDSLHIQTSSLAFETTSGPAGLRKLLAYLRKEEDPLVVCEATGGYERPLLEALAKAKIAYCLINPARLRAFALSEGIKAKTDRIDARVILRFAQEKKLTPSIPLSPAQQLLADLLDRRSHLTDQIAREKNRLQKASKATATFIRRMIAFAQRQLQTLDRAIRLHLSKQPQLSAQARELISVQGVGEVTAWTILAYLPEIATLGRNQLVALAGVAPFNRDSCQTNRKRRILGGRAKVRRCLYMAAHTAATHNPVIRPYVQGLLARGKPYKCAIVAAMRKLLIHLQSKLKNLTNIPLAA

SEQ ID NO: 102720 - protein, 356 aa, unidentified
MDKVIREGAVRVGVDLAKRVIQVHSVDAAGRVLTTKPVARTKFIEWCVRLPRGCMVAMEASSSAHHWARKLAALGLDPRIISAQLVEPYRSQGASGKNDANDAAAICEAASRPNMRFIPVKSIEQQSMLCVHRLREGIKEDRTACINRIRGLLAEFGLVFPQSPHELQAVLSEVLEDATNELGVLARLTLQRAQSQWHELDEHLAWCDERIDAHAKDNAAVKTAATLLGIGPVTASAVVATVGDFKQFKNGAQFGAWIGLTPRQRSSGGKNNLGGITKRGDTYLRTLLIQGAKSAVMTAHRRQDRISTWVVSLRERSGWQKAVVALANKNARILWAVMTRGQAFDANHLSVKPTAA

SEQ ID NO: 102721 - protein, 357 aa, unidentified
MNKFASSPVDVHWIGVDVAKMTFNAALARHGQKWPSTPMASVPVRTFARTREGVGEFLAWLDALTGGDDAPCAVRAVMEATGRYSTELAVWMTELRPSLSPAIEPPRQTAAFIKSMGLRNKTDKMEARALGFYGIERQPAAYTPAGGQEALLRELVRNRDFLVRQRVAEANRADEVKHCPFSRKMADRRLAQTDRDIKKTELEMRKVVNSTQELKDDIGRMCTIYGVGFIVAATVRAELGDLRRFQKARQLSAFAGLSPSSRQSGTSVHGRPHMDKRGNPRVRQVLYLSALVVIRGNNRLHRDYLRLRADGKAAMSAIGAIMRKLLVLMRAILISGKPFDPLWKTQSIYAPYQGQNT

SEQ ID NO: 102722 - protein, 358 aa, unidentified
MKSRAAAANVQTIAVDLAKEVFQLACADADFRIVQSLRLKRTDFLNFWNNLKPVHVVMEACGSAHHFGRWLTSLGHRVSLLPAQYVRAYVRRNKTDAADCAAMLEALRASDIKIVPVKTQYQQMIQLMHRTREQWQHDRTARINLARAILCEFGIAVPLGAETGQAVMRAQLANELLDQNIRSLLAQILEEIEGFEQQVVTLDRRLRDLSEHDAILVKLESLPGIGWITATALRASVGDIHRFKNGRTLSNWIGFTPKEHSSGSTRSLGRMSKRGDVYLRTLMIQGARSVLAHAMKAAQMKKPLDALRTWAINLRERSGFNKAAVGLANKMARIVWATWTHDSVFNGNHAQAQKVSVA

SEQ ID NO: 102723 - protein, 410 aa, unidentified
MRRVIGIDIHRTFGEVVIWEDGVLRREGRVEMTRTALEGFGRRLEKSDEVVIEATGNCMAVARVLSPHVARVVIANPLQVKAIAYSRVKTDKVDAGILASLHAAGYLPEIWTPDAATERLRRLVARRYQVVRHRTRLKNEVHSILHAHLIPKCPHADLFNRPGREWLARQPVPEDEREAIARHVRELDRLGKDLGVLDRAIAETGLEDVGANRLLTITGVNLTVAAGLMAAIGDVARFDSPQKLVSYFGLNPRVRQSGLGAAHHGRISKVGRSHARAMLVEAAWAAAKAPGPLRAFFIRIRARRGHQVAAVAVARKLAVLCWHMLTKDEDYLWARPSLVAQKRRAMELQAGRPQRKGNARGPAYAYNVKALRDQEARIAERAEKGYEQFVAAWRRRPPKDRIAPQVERST

SEQ ID NO: 102724 - protein, 321 aa, unidentified
MSAPSAVTVGIDVAKAHVDVSVLGANLDIRRFNNDAEGHSALAVALQPLNVQLVVMEATGGYETELACALQGAGLPVAVVNPRQARDFARSMGRLAKTDAIDARMLAELASVLLRRDDLSSLLRPVPDERQQWLAALVTRRRQLLTMLLSERQRLQITPVGLHSSLLAIIAAIQAQLDDIDAQMVAHVRQHFGELDRLLQSTHGIGPVSSACLIAELPELGRLNRRQIAALVGVAPIACDSGLRNGRRRVQGGRFAIRRVLYMATLTATRYNPAIRAFYQRLKAAGKLSKVALVACMRKLLTMLNAMVKTNTPWDDSLHRA

SEQ ID NO: 102725 - protein, 409 aa, unidentified
MLVERQSALDVHKAQVTACVRLPQEGGGRRELVEQFSTTVPGLLALADWLAAHGVKHVVMEATGDYWKPVWHLLEEDFELMLVNARHVKQVPGRKTDVSDAAWLCRLAEAGLLTASFVPPKPIRDLRLLTRYRRTQIAERKREAQRLHKALEDTGIKLDCVATDILGKSGRAMLDALVSGTTDPEVLADLALGKLRKKIPALKDALQGRFGPLHALLIGSILAHLDFLDEHISGLSAAIEEQIAPFAAARDLLMSIPGVGQRTAEIVIAEIGVDMSCFPTAGHLASWAGQCPGNDQSAGKRRSGRTRKGSKNLNLALKDAAMAAIRSNGTYLQALYRRKRPALGHGRAVGAVKHAMLCACWHMLNTGELYNDLGGDYFQRRDPERQTKRLVAQLQRLGHTVTLQTANAA

SEQ ID NO: 102726 - protein, 432 aa, unidentified
MRIESTITQVGLDNHKNFSRITGRDCTRKIVFRQRLEHKDRAALREDLRRLPPGTPVVLEGTFGWGWMSDELKACELEPHLASSRKTAAWRKARGMAKNNKLDADLLSELWSEPERWWEVWLAPPEVRDQREWLRYRMSLVRMQTSIKNRVHATLHRHGVLHEFSDLFGKKGLVFLKGLCQAPPRTGDDEGQAIEPPLSASGRGTLTGYLKLLAQVRQQVAAVTRMIRKIVTSSEEGERWRTLPGVSWVLAHTILAETGPSLRFANHRKFAAYALLAPRDDESGDEEGEAPTGRHVGHMGRLTLKWAFIEAARGAVRKSEHFRSIFDRRTNGGKHDRGRGYIAVAHELSRVGLSCCHYERDYSEQRPPRPGSQAAREAQWAEKREADQRRLIKEKEIAGVSNESELRRVSRPGMGGPEDPMVAVAGSKRRRT

SEQ ID NO: 102727 - protein, 406 aa, unidentified
MFYLGIDVALNTHRLVMLDDNGERVSSGISFQNNNADFEKVLSKLKELSINPDNSICGLEATGNNWENLYCFFTDKGFRVIVLNPHQTNKFREALRKKAKTDDIDAFVIAGLLRSNEFASSYVPEDKIQTLRELTKLRYEFIKDHKNYQRQTLALLNIIFPEYRQTALKNPFAIASIAIFKSFATAKHIASAKPKHIEKIVRSIKGNNFNVKEIENLISIAKTSVYSGRCQESRALTLNILLTQVENFDKSIQQLEEQVNLILSPESNDDINSFPGSNLLTIPGVGPKTLAAILSCVGESGQAFSTGVKLIGHIGFFPQIYESGETKRANKLSNKGPAYLRHALYMASVACLKHNLQLRNLYHTKISQGKKPKQALICVAKKLAHICLSMLHSGQDYNPARVFSCA

SEQ ID NO: 102728 - protein, 382 aa, unidentified
MQASTIGTPTAGHCCTIFIAIELSQKTWLVTLHSPDREQMSRHKLDGGDHGELLALIERTRTRATAKLGSAPRVVSCYEAGYDGFWLHRLLEAAGIRNFVFDAASIAVEQRARRTKTDRIDGELLLRTLMAYLRGEPRVVRIVRVPSVEAEDARRASRERDRLITEQTAHTNRIKGLLRLHGMAVDNPRRRGWLVWLTRQRDWQGHPLPPQLLAEVTREHARLTLIRDQLAALEEAQAARASPAPAPMAERRDLLLRIKALGPAFTATLVNELFYKDFRNRREVASYCGLTPSPWRSGGIDREQGISKAGNRRARQKAIELAWLWLRHQGDSTLSRWFRTRTANAGKRAKRIAIVALARKLIVALWRYLTTGLVPEQATMKA

SEQ ID NO: 102729 - protein, 459 aa, unidentified
MGKRGEKRERRSAILEPDAAGIDIGSEEIYVAVPPDRDEQATRRFSSFTCDLYALAEWLECCRIRTVAMESTGVYWIPLFQILEERGFKVYLVNAHSLKTVPGRKSDVSDCEWIQYLHSVGLLKASFRPAEDICAVRTLWRHRGSLLQMATEHTQHIQKSLSLMNLQLHHVLSDITGASGLAILDAILAGNRDPLCLAHLCNIRVKSPRETVAQALVGDYRPEHLFTLKQSLDGYRYYQKLIAELDDEIALLMHTLPNATEHPAPIPKRTKRTAYQRMGNDPLFDLRSELYRIAGVDLTDIPGVSAIAAQVVLTEVGPDVSRFRNASAFASWLGLCPEKRISGGKVLSTKTRKVKNRVAIVLRLGAKSLSRAKDYFGAFFRRMRARLGTAQAITATAHKLARVVYHVLHSKEPYTETVFHRCDEQEQQRAEMRLRKHAAQLGFQLLPISTNPAASQISS

SEQ ID NO: 102730 - protein, 460 aa, unidentified
MPKHRPNRKSTRKHILAKPLNTINSNTAGIDIGSSEIYVAVPPERDEQSIRVFSSFTCELYNLVHWLKDCRITSVAMESTGVYWIPLYDILQHEGIEVCLVNARYVKNVPGKKTDILDCQWLQQLHSYGLLSNSFRPSEEIRRLRTIARQRDMLLKYRAAHIQHMQKALHQMNIQLDNVLSDITGVTGLAIIRAIIAGEHNPQTLAQYRDEHCRRSYEDIVRSLQGTYLDEYLFELTQAVELFDFYSKQISACDLRLAELYDQTKKNISSPSTLPPPAKRYKRVAQNLPFDIRSCLYRLAGVDLTQIDGLSALSVQTILSETGVDMNKWPSVKHFTSWLCLAPNNKITGGKIFATAARKTTNRAAQAFRLAARSLYHSKSALGASYRRIQALHGPQLAIKATAHKLARIVYAMLKYHSEYCDLGEIRYEQISKERNLKRLQRKAAQFGLQLTPLPIKFVT

SEQ ID NO: 102731 - protein, 346 aa, unidentified
MEINRVGVDLAKNVFQLHGADRKGKAVWKRRLSRGKWLQVLCDTVEPGTEIGMEACAGAHHWARQLIRRGYPVKIIPPQFVKPFIKSNKNDANDAQAICEAMGRPNMHPVKVKTVEQQDLQAMHRIRDEIKSHRIAKANQIRGLVTEYGLVAPQQLAALRGAIPDWLEDAENGLSFLFRQLLQGLWADLRTLDSRMAELDQQIAVIAQEDPTAKRLQQLRGVGPLIATALVATVGDGRQYRNGRDMAAALGLTPRQHSSGGKDRLLGISKRGDTYLRCLLVHGARSAMRTAKNKEDRLSRWIIDLQARRHANVVAVALANKMARMAWAMMTKDVDYDPELAAASVS

SEQ ID NO: 102732 - protein, 339 aa, unidentified
MLFAGLDVSSARIALCVMNEAGELVCQASIESEPGVIAEELRPWRDQLSLVGLEAGPTSAWLARELRALDLPVTVIDAAHASAALRTGFRNKTDKNDARGIADLMRVRKFRPVHVKSPEAQRDRALLSVREHLRRQGLDLRNAVWSILQAEGLKPPKLTTSRFQQLLVAALEDPDLAPVLTPLVRLIDKTEEEVAELDRQIAKKAKARATCRRLKTIPGVGPLTALTFATGIDDPARFSRSRDVGVHFGLTPRRYQSGDMDWSGSISRAGDAAVRRALYQAANAMIHHSRRWCALKSWAVRLAARRGLKKAKVALARKLAVVMHRMWVDGTDYRVSTAN

SEQ ID NO: 102733 - protein, 361 aa, unidentified
MTAPVAGIDPHQDTFTVGIVDHNGVELTTATFPNRGAGYAEAADLLTTHRVGQVGVEGTASWGQHVAIALAGAGLDVREVPAQRSAQQRRARRLAKTDTVDAVAAARALLAEPTLGPAQALEIYDPLVAKIEAVLEHRRALVEARTLMLHYAADQLAKLPTEIRDQLPTTGKIESRLRKLNTINTTIVSTQAGAYRLSWLLPLVNQDRAARRQIRALECRIDELLDTHGTTLRDEPGIGPIAAATLLSEVGDPFRFARESKFARWSGTGAVAVSSGEGDGLPVRHRLDFGGNRRINSVLYIASVTQQRDVDIARAYIDRKTAEGKTPREARRAHKRHLANRVIRRMWNDEHRRTATHSITA

SEQ ID NO: 102734 - protein, 311 aa, unidentified
MPKPFYAGIDISKGWCDVALEAGDSSARFDQTTEGREALVAWLKAHGVTHAVLEASGGYERPVLRALDQAGLQACLVPPHRVRALAKASGQSAKTDALDARVLAAFGRLLSPRVRQSQDVEVQALATLIRRRRHLVDLMALEVTRRQQEEDADILADIKELLGLLRRQLEAVERRITEQIRASRPLREKHDVLTAFPGVGPVTCAVLLAEMPELGSLDAKQAASLAGLAPFNNDSGSSERKRAIHGGRVGVRCALFMAALSAIHHNPDIKAFYKRLRDQGKPQKVAHIAAARKIVVILNAKLRDAPIAAGA

SEQ ID NO: 102735 - protein, 274 aa, unidentified
MKRTSKHVALDVHQATTVASVREDSGRVIARTILPTADGPIVEFFRGMRGTIHVAFEEGTQAQWLHDLLEPLVHRVVVCDRRGEARRGNKGDQVDADALSELLRRGSLRAVYHDSAERATLKELTRAYENLVEDATRVMLRLKALYRARGIPAVGKRVYHPAERAQWLARLTNQGARCRAETLYAQLDPLRALHPRVKAAMVAEARRDPAWKVLQAIPFYGPVRVAQLLATMQTPWRFRTKRNLWAYAGLAVVTHTSAEYELVGGRPVRRRRRR

SEQ ID NO: 102736 - protein, 315 aa, unidentified
MSQEPTYVGLDVSKDRIDIAARPTGTSWSVSYDSDGVDDLVAQLKDLKPAGVITESTGGLELPLVAALAASSLPVAVVNPRQVRDFAKSIGRLAKTDRLDAQELAHFGEAVRPPIRPLRDADTQALGAVLARRWQVMGILVSEKNRLRRAATEVRPSIEAHIGWLEQELDDLDTALRQRIQRSPAWREKDDLLRSVPGVGPQVSLTLLAYLPELGKLNRKQIAALVGVAPFNRDSGPYRGKRSVWGGRATVRKTLYMGALVATRFNPVLSEFYRRLLDAGKPKMVALTACARKLLTILNSMARTGVHWDPTAPKP

SEQ ID NO: 102737 - protein, 339 aa, unidentified
MYSIGVDFHKAYSHMTVMDAQGQVVKVGKVSNTFEAVHAFVAPYRDDAQAVLEATRNWTVMYDMLERELRAVYLAHPLKVRAIAEARIKTDRIDSKILAHLLRCDLLPTAYVRPREQRVSQQILRQRMFLVRVRTMVKNRIHVLIDRQLDVREVATQFSDLFGSAGLAWLRTVGLADIERQLLNAELALFEAVQERIAESDGLVRNLAAGDPRVRWVRTIPGFGRFFAVLVVHEIGTIRRFATPEKLSAYAGLVPSVHASGGKVFHGRLTKQGNKWLRWAVVEAVRPAVTTDPDLRGGTTSACASERDRIPRRWRRRGAYCSSPIGSSARSARTGSLDP

SEQ ID NO: 102738 - protein, 449 aa, unidentified
MGNGSGVSRGDRNRNARLERLRALVPVTNAIVGIDLAGSKQMVVVTDHDSKVIARRTFRCRAWDLGSALDWAAGRAAAKGWAGVTVSCEPTGHRWRVLGQLAADRSMPFVCVQPMVTSWSRRTEDLTCDKTDEKDAVLIARLTAQLRCYVPEPVDETWGRLRHLGTRREQLITEAGSQIQQMRDLLECVWPAALDTARQPFRSGTWVAALSVIAGRDGGDFARTRRLGAARFEQAVRREITHRGGQKPCLRIVRGLFTALADPAGVIAHRAGALERVQFLLEDWRHTQDRLAGTEQRMTAVLDQLGLTGLVTSMTGLSAIGAAAILAETGDPRRFATGRAVVKHAGLAPREKLSGAFTGRTRLTGQGRPGLRLAAWRAVWGAQRANPVYAARYQYLTSREQNKLTPTQAQTVIAAAILRQLHAVITTGQAWDPVTATHGTRWDSTPKAA

SEQ ID NO: 102739 - protein, 332 aa, unidentified
MQTYCGLDVHKDSVFMCILNESGVLKERPFKTLSSDLYALRNELLSYRVCEVAMESTSIYWIPIWRILVDEFALKLVNPLFIKQLPGRKSDVGDAHRTGLVLMKGLVGGSYVPDRKVQSLRQYERRYSCLNKRIVHVQQCMDMQLQRCNIRFGNYISGMGSQGMRKVVKKLIEGITGADEPVKCAHSRTKNKYGEDIIKESLHGVVSQVDMDMLTLFMQELELYETQREECVRKMLQLCDESYSKELKLLTGIPGIKTQSAMTILAELGNDLSSFRTSSNLVGWAGLRPRNEESAGKIKSRKTMHGNKFLRVILVQCAWANTRCSIVFSHLL

SEQ ID NO: 102740 - protein, 387 aa, unidentified
MTVRTVSNLPAAMHVETARCLFAIELSKQSWVIGFIMPLSAKISRRILSGGDWKGLLDLIEEVRARVSRETGRAVDVITCYEAGYDGFWLHRLLEAHGIRNYVIDPASLQTDRRARRVKTDRIDTERLLRSLMAYLRGEPKVWSVVRVPSVAEEDARRLHRERDRLVSERVQHVNRIKGLCALHGIYDYQPLRPQAMARLEQLRTAQGISLPPRLESEIKRELQRLEMVVEMIATLEAERDAIVEDEASTHVNAKKIQNLHQLKAIGPEFAAVLVGEIFHRDFNNRRQLASYVGYAPSPFQSGNVAHDQGISKAGNRKGRTTGIELAWLWLRYQPDSDLSVWFRARVGTTKGRIRRIAIVALARKLLVALWRYLETGLVPRGAILKG

SEQ ID NO: 102741 - protein, 351 aa, unidentified
MVTIGLDLHKRYITACALDDAGTVLAEHRRLEPSLDALGRWLGALPQLMTVALEATLYWHWLERQLTAFGITVIVAHPYQVKLIWQARTKTDPIDARKLAELARVHLLPTIWIPDLATRALRQLLRGRVFLVRQRTVMRNRIHAYLTAENLRCPALDLYRKAGQAWLAAVELPAVVRGQVGLVLANHAHLTTQIQALDRYIKQTVRRDATARRLQTIPGIGPFGALLLQAEIGPIARFGSAQELAAYAGLVPSTRSSGDKTRHGQVGRGNPWLKWLLIEALQTLKLAPGPVGDHYQRLLRAKGKPKATVAAARKFCTYLYWMLKEEWSYTEWLRQHDRSEVRPMQPLGSAA

SEQ ID NO: 102742 - protein, 344 aa, unidentified
MNKLSRVGVDLAKNVFQLHGVDRHGENAWRRRSTRDKWLKVLLDKVEPGCVIGMEACTGAHHWARYLQARGFTVKLIAPQFVKPYVKSNKNDANDAEAICEAMSRPNMRYVAVKTIKQQDIQAAHRIRSELIGQRTAKANQIRGLVAEYGLVAPQQMARLRAAMPAWLEDAENGLTNRFRWLLSGLWNDLQTLDQRIAALDYEIERIAQIDPVAKRLQQLRGVGPLIATALVAAVGNAEQFANGRQMAASLGLTPKQHSSGAKERLLGISKRGDAYLRSILIHGARSVIRTAKHKDDRLSQWVTNLAARRHPNVAAAALANKTARIAWAMLRHGTDYQPDRIAA

SEQ ID NO: 102743 - protein, 346 aa, unidentified
MENYAGIDVSLELSSVCLVDATGKIVKETKVESDPRALIALFNGLGVAVTRIGLEAGPLSQWLYAGLTQAGFEAVLLETRHVKAALSAMTVKTDRKDARGIAHLMRMGWFRPVHAKSAGSQEVRALLTACKLLQDKLKDVELSIRGILRGFGLKVGKVTTKIFETRIRQLVSGQPTLEQIAEAMLSARASLQRQFNVLHKAILKVVRKEKVCRQLMSVPGVGPIVAITFKTAVDDPNRIKRSKAVGPLFGLTPKKYQSGETDVTGGISRVGDAMVRTILYEAANILLTRITRFSALKRWGMDVAKRRGMKRAKVALARKIGVILHRMWIDGTTFRWTKSQSTAARA

SEQ ID NO: 102744 - protein, 316 aa, unidentified
MTQTSTTAGIDTSKSKLDIALHGRPERWQVVNSVSGWRILTDKLTTAGVSRVGIEATGGYERGVVQHLRAAGFTVQVLQPVQVKAFGRVHLRRAKNDVLDAVMIAACTATLDQVRDAPDPRLAELAEQLTFLEQIEEDIKRYKIRLEHIGEPRLRRLMLAEIKRLTTRRLTQIRFIARQLRAHRDLAVRLGLVLSIPGIGERTALAILIRMPELGRISREEAAALAGLAPFDNDSGQHKGQRRIAGGRARLRHSLFAAALPAAFRWNKALIALYQRLTAAGKPHKAALIACARKLLIYANTVIQRGTPWTERPIGV

SEQ ID NO: 102745 - protein, 431 aa, unidentified
MNESGSEQPLSPKVAAYVGIDWSDLKHDVVLRSAGNPSAKPEHQVIKSEINSLADWIAQMHERFGAKGKVLVCLEQSRGALIYQLMAFELFELYPINPSQLANYRKTFFSSGAKDDRPDADLLSELLMCHRDRLKAWKPDDQLTRELATLNEGRRNAVDRRSELANAIKSELKLYFPLALQVLDNDITTALAADLLVQWPTLAELQKVSPGKLRKFFYGHNSRQEKKILERLALIKEAKPLTTDLAIIRPNALRVKLLAQQLKSLLPFIAEYERRIAEIFGSHPDRFLFDNLPGAGPALAPRLLTAFGTDRDRFEVAGDLLNLSGIAPVRIASGKKTGKNASVHCRRACPKFLRQSFHEFGECSIRYCPWAQACYQAQRSRGKGHHAAVRAVTFKWIRILFACWKQRTPYDPQRYFQALQTRGSDYAQTTA

SEQ ID NO: 102746 - protein, 331 aa, unidentified
MNYSHFVGLDVGKKTFDASLMSADEKELSHKSFDNTPTGIQSLLDWIAGYHLSLSKLLFCAENMGSYVTELSVSSVSMGFSLALVCPLTIKKSIGLQRGKNDRIDAKRIANYAVLHYRKLELYKLPNKDLVRLRGWIIIRDNLVKQKVSSIKLLETFSWMAKLADVTESISFLEEQLKSIKERILEVEEDMEQLIAASTSLYTNYLLLRSIKGIGIINAIVLLCVTDNFQRFDNPRKFACYCGVAPFEHTSGISIRGKTQTSSLANKEVKVYLTRAAITAISWDPQMKAYYKRKIAEGKHKASVINAVRAKIIARSFAVIRRQTPFVTLAV

SEQ ID NO: 102747 - protein, 344 aa, unidentified
MEEYIGLDVSLKETAISIRRGGKRMWRGKCKSDPNCIVTLLHKHAPDAKRVVFETGPLSIWFYHALIAAGLPAICIDARHAKAALDMAANKTDANDADGLAHLAEVGFYREVRVKGYDSMLARTLVAARTRLVTICTELSNQIRGLMKTFGLIVPGGKGAIFASNVRMLLDDHQSLSRIILPILKAWHSTREQAAELGRQLMAIARASQSCRLLMSVPGVGVVTATSFVTAIEDPENFKKSRSVGAWLGLTTRRYQSGDVDYDGHISRRGDAHLRGLLFEAATFILTRSSADSSLRTWGLKLRERLGFKRAAVAVARRLSVTMHAMLKTGQFFDRAVGMDATNG

SEQ ID NO: 102748 - protein, 410 aa, unidentified
MELQMKCACGLDVHQATVVACLLSVLGNGKVRKQIRTFGTTTRELVGLREWLQSEGCTHLAMESTGVYWKPVYAILEGAFDLLVANAQQIKNVPGRKTDVKDAEWIADLLLHGLLRPSFVPPKPIRELRDLTRYRRKLVESRSAERNRLLKVPETANIKLASVASDVFGVSGMRMLAALAEGQAKPAEMAELAKGRLREKIPQLEPALEGRMEQHHRDILKLQLRRMQALDQDLAELEAKIQEKLKPYRPQLELLTEIPGVDWTLAAVIIAELGVDMKVFKTASQLASWAGVCPGNNESAGRRKSGRVTQGNVHLKTALVEAAQASTRAKGTYLRDKFYRLKARRGAKRAVVAIAHKILVAAYHMLSQQVSYNDLGDLYLDKLNKQHLTRNLVRRLERIGWRVTLEQAAA

SEQ ID NO: 102749 - protein, 317 aa, unidentified
MVEGTEGSHHKEGTTKMSKHSMVCAGIDTGKHKLDVALDGHPEQMRKHRAQRIGIEASGGYEQAVVATLRRNGFVVIVFQPAQVRAYAKFHLQRAKNDKIDAALIALCSAATKTVHAPPDPRLVPFAASLTMIEQITEDIARLKTRRESCRDQRLRRFWNEEIGRLKLLMRGELKQLIAAIRQHPDFAEQLDLIASVEGIGHRTAVAILVRMPEIGSLTREEAAALAGLAPYDDDSGKRLGERHIAGGRERLRTSLYAASLPAAFNWNPQIIALYRRLTAAGKSHKAALVACARKLLIFANTVVARGTPWVSKTATS

SEQ ID NO: 102750 - protein, 352 aa, unidentified
MNQTKYIGMDVHMTSTVISILNSTGKVVTEAIIETKASTIQDFIKGQRGALHVTLEEGTQAAWLYDLIRPYVTQVIVCDPRKISKTDNKADKLDAKRLAELLRTNALKAVYHGEHSTQAIKELVRSYISIVHDSTRIKNRLKALFRARGIACKGTSLYSKEDRDHWRNQIDNNARRMRIERLWKQLDYLTELIKEAKEDLIQEARKYPATKILKSVPGIGPLRSAIILGIALTPHRFRTIKQFWNYCGLAVRTKISSEYEINQGRVRRSKKQPLVRGLNRNYSRTLKEAFKGAALSASNGQWEEQFQAMVDEGIDPALARLTLARKISSITLAIWKKGERYDAKKLKFKHAV

SEQ ID NO: 102751 - protein, 355 aa, unidentified
MDNLRYIGLDVHRDTISAAVLNREGQLIMQSVVPTRAPAILDLLDGIRGTLHVTFEEGIHSAWLYDLLQRRVARVLVCDPRKTSLLKSGNKGDLIDARKLAELLRNDALSPVYHGELSSLEVQRRTRSYTMLTEDTTRIMSRVKAVFRGQAVPYHGKSIYRPDRRESYLAQLPTEGLRQRVELLYQELDAVHRLRLRAKREMLAECRKHPAMKWLQSVPFLGKVRTAVLIGRVQTPHRFRTKRQFWSYCGLALETHDSAQYHVLHGQVERKPRFVQVRGLNWNHNHDLKDVFKSAATMAAVREGVFRDYYCGLLAKGIRPEMARLTLARKIAAITLKIWKEGGTFNAEQVKPQAA

SEQ ID NO: 102752 - protein, 413 aa, unidentified
MQVMVERCCGLDVHQETVVACVLVGAPGFRPQKEVRTFRTMTRELEALRDWLKAMGVTHVGMESTGVYWRPVYAVLEGHFELIVGNARHIRNVPGRKTDVKDAEWIANLVRHGLIAKSFVPPRPLRELRDLLRYRRKLTESQAAERNRLLRLLETANIKLASVATDVFGVSGQAMLKALIEGNASAEAMAGLAQGKLRRKHDDLVLALEGRVEEHHRFLLSLQLRRLEAAEEDIEALDLRIAERLEPYSLQHALLMEIPGVNWVVAAALIAEIGVDMSVFLSVHHLAAWAGVCPGNHESAGKRKSGRSRKGNVHLRTMLVGAAISASRTKGSYLRNKFYRLKARRGALRAALAIAHKILVAAYHMLTKGVGYRDLGEAYLDQIDQTRTAANLKRRLERLGYIVQLQPKENAAV

SEQ ID NO: 102753 - protein, 311 aa, unidentified
MEEIAAFVGIDVSKEQLDVHILPSKETVTVAYTEDGVAGLCQRLSVLGPCLVVLEATGGLQERVAAALAAAGLPVAVINPRQVRNFARAGGRLAKTDRIDAEIIAAFAAHMRPEPRPLPDADRKALMDLVARRRQLVEMRTAEKIRRSQIASHLRPGLEAHLDWLSKAIADLDNDISNALRSSPAWRVEDDLLQSVPGLGPVTRAMFLAKLPELGKLSRRQIAALVGVAPMNRDSGKLRGRRMIMGGRADLRSVLYMATVTAIRFNPAIRAFHQRLTAKGKPAKVVITACMRKLLTILNAMFKAKSQWQPA

SEQ ID NO: 102754 - protein, 359 aa, unidentified
MRIIGCDLHARQQTVAMLDTTTGELVKITMTHEGNNVREFYSTLPRPVRVGIEATGSMMWFVNLMEELGIECQIGHPAKIRAAEPRKQKHDRRDADLILTLLVENRFPTIWLPTKELLDLRSLLRHRHQWVRMRTRIQNALQAIALANGLRRGPSLWSQAGQHTIASLPLAPHTAHRRTELQALYVKFESDIEQLNQRVEEQAGMRPGSRLLMTHPGVGPVTALATDVFLGDPTRFADGKVLASYVGIIPREYSSGGRQRLGGLSKQGNPLLRFLWGEAGAHAVRRDPELKRFYRRKLVQKGLGKARMAVARKLGIRLWIMLRDQIDYNEFCRRGQKNGDACAGMPETRYGATGHRPVD

SEQ ID NO: 102755 - protein, 361 aa, unidentified
MKRALKDNQDAFAGQEFYIGIDVHQKQWTISVQSNKLPLAKPLTMDPSAGSLSSYLKRQYPGGKYYAVYEAGYSGFWPARDLLTYEIETMVVNPADIPTMHKERSTKTDSVDSRKLARSLENKELRAIYIPERKAEEYRLLNRYRSQLVRDETRIKNRIKAILAEFNYRVPVELEGNRLSGAYVLWLQTVKLETQYAQRAYNERLEQLAESRKRLAKVLRELKLMATQEPAIASLVKLLQSVPGVGFLTAILLVVELIDMTRFKRFDELASYIGLAPSIHESDERSYSRGLTKRQHHELRSRLLESAWIAVRKDPVLTMKFGQLCKRMNKNKAIIRIAKMLLSRIRTVWKTETPYVYGVIE

SEQ ID NO: 102756 - protein, 354 aa, unidentified
MSEDKYIALDLHLHTIVTSVMNVAGRQLDASIIAAQARPLLNYLAGFRGRLHVTFEEGTYAAWLYDLLEGRVAELVVCDPRHNALLREGSKTDRGDARKLADLLRTGMLRPVYHGSRSLRPLQELAHSYEALVEDTTRVMNRLKAFYRSRGVDCTGRGVYAPAQRTAWLTRLPAGASRLRAELLHAQLDQVRSLRRKARQALLKESRQQPVSARLREIPGLGPLRVALLIARVQTPHRFRTSRQFWTYVGLGLVTRASAEYRLVQGRIVRRAQPPSLRGLNPNHQPPLKAIFKSAALTALRRPGPFKDYYDTHAQQGGDPAILRVTVARKLAALTFSLWKKGGHYRAAAPKPQA

SEQ ID NO: 102757 - protein, 378 aa, unidentified
MHKDSVYLCIMRENGEKIERVYDVLTPELDSMRDFMTENDVSEAAMESTSVYWIPIWRVLVDSFDLKLVNPYFIKQLPGRKSDVKDAQWIAECVLKELIRDSYIPAPKVQKLRLYDRRIFELNAELGRKKSKIDAILQRCNIRLSNYVSNTDCKSYKNVVTQISEGVTSPKELLKSVHKRIINKHGEKKILASLTGIISDAEIDMLSQYVAESTLLEDNKNKCIEKMREICNKEFEEQMKNLQTIPGVSERSALAILAEIGPNVNAFPSARHLVSWCGFNPRNDESNKKIKSNKITHGNRFIRVACVQCAWAASRTKDCYFSKFYAFHTQVRKKFKLKVIVAVARKILVCVWHILNSNVPYRDFVTSNPTVKDCIQLT

SEQ ID NO: 102758 - protein, 349 aa, unidentified
MVIVGIDAHKRTHTAVAIDEAGRKLGEKTTHATTTEANLELVRWAGGFDPERRFAVEDCRHLSRRLEVDLLAAGEELVRVPPKMMAHARDSARTYGKSDPIDALAVARAALREPNLPIARLDGPSRDLRLLVDHREDLVRDRTAQINRLRWHLHELDPSWDPAPRVLVRFKHLDGLAARLEGLEGTVAWVARDLVARIRELTVAANDLQRLIVEKVAGLAPALLEIAGVGALTAAKIVAEVADVRRFRSKDAFARHNGTAPLPVWSSNRVRHRLSRTGNRQLNAAIHRIAITQMRIHDDAKVYLERRIGMGNTKMEALRALKRQLSDVVYRALMADAVSTQAACFGEAA

SEQ ID NO: 102759 - protein, 399 aa, unidentified
MTALRRVVIGADTHLDTNHLAVITDAGKPLADAEFPTSPAGYDDAVRWARSFGTIAIAGVEGTSSYGAALTQVLRAAQIEVAEVSRPDRAARRRQGKSDPLDAYTAARAALAGDRLAVPKDARTSALRALLSARRSAVKAHTAATNQIHALLVTAPAELRERYRRHSITALVKALARCRPATHSDPTTAAVLTAAKALAQRTEFLDRQKQDLTAQLDVLVQQINPALRAAYGVGPDTAAQLLVTAGTNPHRLRNEASLAALCGTAPVPASSGKITRHRLSRGGDRAANNALYRIALVRMSAHPQTRDYVQRQDANGRTKKEILRLLKRAIAREVFRLLTRPHPVDDYSDLRPARQAKTITLKTVATHFGVPLITVSRLERGLQRNDTLANNYRQWLTAA

SEQ ID NO: 102760 - protein, 410 aa, unidentified
MDGNYQHFVGIDWASVEHEVCAMDGSGKQIDARSFKHSGDGLAELCAWLRKLGDPPTIAVAIEVPHGAVVETLLDGGFAVFAINPKQLDRFRDRFTVAGAKDDRRDAMVLADSLRTDGNLFRLLAIQPAKIIELREWSRMHQELQGDRNGIINQMRAQLTRYYPAFLALVEDPGEDWATRLLELIPDHAAALKIKPGRVTKLLKDHRIRRLDSEAILSHLRGTPVYSAPGTATAAIAHLELLAERVRLINKQLKGCKARLETLLEGMATESPAGQKDEQRDVAIIQTMPGIGVIVASTLLGEAAGPLQARDYPALRALAGVAPVTRRSGKKKSVVMRTACHPRLRYAVYHWARVATQTDDVAKARYAALRARGKSHGQALRSVADRLLGVLCAMLRNQTDYRSPRVTAAA

SEQ ID NO: 102761 - protein, 314 aa, unidentified
MTAEKLFVGIDVSKAGLDIVLLPSGEYWHLENTPKDIARLVHQLRCLALDRIVVEATGGYEAKLVERLVEADLPVCRVNPARVRRFAQGMNWLAKTDKIDAKVLARFGEKAQPRLLEMPTEAEKCLAALVKRRRQIVDMLVAEQNRLELVESQVLASITDTVQFLQKQLTDLDTQIHDQIDQNPDLKQKQELLKSVPGVGKVLSATLISQMPELGSCDRKEIAALAGLAPYSHDSGRYRGRRMIRGGRPFVRKVLYMATVAATRFNPVIKSMYERLLEAGKLKKVALVACMRKLLTILNAILRTKTAWQPALVP

SEQ ID NO: 102762 - protein, 350 aa, unidentified
MNVNHYIGFDVHKKSVSYCVKLADGTIVEEGKLRATHDVLRQWAGERTEPWRGAMEATLFSGWIYDTLQPFAAELQMGHPALMKAIAASKKKNDKLDARKIADMVRCDLLPACYVAPVEIRELRRMLRYRNLVVGQATRLKNKMSGLLMEVGAEYNKERLHGKQYFTELLDTVAEVPDSVKDLLRLSRGAMEMFETTQQQLLLRLRKDPLLSKRVMVLESIRSVGEVTALTWALEVGDPQRFSSVAHAVSYCGLTSALVSSADKQQRGPLSKQRNAHLQTVLIEAAKLAPRWNPQLATVHTRELTRGNRNRATLAVARKLVAYLLAADKSGQPFQVRSAPAIKTEVQAVA

SEQ ID NO: 102763 - protein, 345 aa, unidentified
MKNTIVGVDLAKRVIQACVIKNNKVVSNEEIAADDFSAWLANMKPTIVVFEACGTSNYWKQIALELGHDARLISAKLVSKIRQNQKTDKNDALAIAQSSQLADINFIQGKTFQQQELQSIMRMRELAVKHKIAIRNQLEALLLEFNIKVSPRVGGISGVIESVLEDAENGFCPSFREALDSTWKIYLYTVQDIKEKEKLLERVIRAHPECKKLLDLEGVSTINAVNLYLSIGCGDICVFQSGRDAAACIGLTPLQHSSGGKTKTGTIGKGVKNVSVRSYLVNGAMAVVQHVDKREPKTKKEQWIKQLLERKSKKCVAVALANKTVRTAFAMLTQGTNYHAESLAA

SEQ ID NO: 102764 - protein, 319 aa, unidentified
MAQNNLVVAGIDVAKDKVDVCIRQLSLKGTFASTAEGRRELASWLRRKKAGKAVMEASGGYEREWAKVLRDAKIQVRIVDPKRVRSFARSAGRLAKNDAIDAEMIAWFAETFEEAPCQVHDAEREKLVQMVNARLGLIELQTQMQNRCEHSVPGVVSRMQARLLKKIAAEKAALEVEIVALVKATPRFVERAEIIESVPGLAEITSASLIAKMPELGQANNKAAAALLGAAPYDDDSGKRRGERHIKGGRRKVRNLFYMACLGAATMHNPVLKAFYDRLIAKGKEKKVALVACMRKLIVILNIMIARREKWDAGRYAPI

SEQ ID NO: 102765 - protein, 408 aa, unidentified
MTVFVGDDWAEAHHDVHLMNEAGDKLAAHQFPEGLAGVGEFHGLIAEHSDDPGEVVIGIETDRGLWVQALVAAGYQVYAINPFSVSRYRDRHNVAGAKSDPGDAKVLADLVRTDRHNHRPLAGDSEEADAVKILARAHQNLIWERTRHTNRLRNTLREYFPAALEAFSDLAHSDAVAVLAKAPTPHAAARLTVTQIRAALKGGGRRRYLDARAGEIQTVLRSPQLTAPGAATVAFAATTRSAVGLIGEINHQITDLETELETHFDQHPDADIYLSLPGIGVILGARVLAEFGDDPQRYDSAKSRRNYAGTSPLTIASGRKRAVLARHVRNRRLYDAIDQWAFCSLQASPGCREFYDQRRAAGDLHHQALRALGNRLVGYLHGCLRTHTPYNEHTAWAHRQTDQTQTAA

SEQ ID NO: 102766 - protein, 422 aa, unidentified
MEGIAYARTIGLDVHQKMIVCCFTAVQADGKIIKETAEFETFKRGLKALASWCAERKPDVVLMESTGIYWKAPYVYLERAGIIPAVVNARHIKNLEGKKTDIADAEWLAVVARGGMFCRSYIPKEAYRNLRVLSRHLLGVTKSRQQYKNRISKILADGGARLNVVFSDISGVNAQRCVKGLIAGMKPEDIAATLDYTHLKATREDIVAAMECELSPAHLATLDELVAIVDFLTEQIDKGRKTLLEMLPEESREMLLILQTIPGIQETAALELIVELGGDNLEAFATADRLASWVGLCSGNNESGGKRRPAHTRKGNIYLRRILCEIAHAATKTKGSTFQSKYKSLRMRKGAGKTIVAIACKIIKLVYTLVKKREGYRDPHIDYEKMRLQKNPKRHIQNLFKLEDWKIKAVNTKTGEVLESTP

SEQ ID NO: 102767 - protein, 385 aa, unidentified
MDVLMECCCGLDVHKDMVEGCIIQGDLENPSIYRSQFQTDQISLSALVQWLTEHQCYHIAMESTGVYWRTIYEAIEEHSPRWDCLMVVNAKHMRNLPGRKSDVKDAEWIATLFRHGLLENSFVPPKDERNIREFSRLHRSLVSEKNRCANQLEKFLQIHGFKLSTALNDIHSVTGRKLLDTLAEQGYLSEGDVLRCAGHRLKKPLSEICACVCGTLNSAGQRMLQILLRRLDEVRANIALVDEEMLALAEPYQRQVEILDSIPGVDKLSAVTILGEIGMQPQQYFPTAECLTSWAGLVPRNDESAGKVKSRKILPGNPYVKCILCQVSWVSVRTRKSHYHDWFWCRQGRLGRKKAIVAVSRKILKLIYFLLSTNQLYDLSLAKAV

SEQ ID NO: 102768 - protein, 418 aa, unidentified
MARVVEIVYPICCGIDVHKNFLVACIATTDSRGHTAHLLRRFSTNTGDLRRLAEWLADNDCKDVCMESTGKYWIPVFNILEQTCNVTLTHPKYVKAIKGKKTDKKDAKWIAELFKCDLVRSSFIPPYDIRQLRDLCRYHMKLTYMNTSEKNRSQNCLTTCNFKLDAVFSDIFGTSATRVLDKLIELGNSNFDIAPLMHKRCKATVEEVAAALDGELSFAQGEKLKLIRSHMDSLSKLKAKLESLIYELATPFQAEIDLLLTVPGIGTPLTAIRILAEIGADMSVFETSKHLCSWAGVTPQNNESAGKKKTTRISRAGAYLKPLLVQISLATCKSNKHPELKDKYQALKKRRGHKKAVIAVARRLLTAIWHILSKREIYNAELYRKADKPPANRVLTPEQAFAILRSKGYQIEISEPAA

SEQ ID NO: 102769 - protein, 345 aa, unidentified
MKRGITIGMDLGDKKHQVCILDKTGKIIAEEEVAGTRAAMTSFFKRYRGAVVAMETGAHSRWVSQIAETEGLEVLVGNARKLRMIWQSRQKSDMRDAVMLARIARFDRALLCPIRHRGEQVQMDLEIIRARDLLVGERARMVNHVRSVVKSMGERLAASSTASFGSKAKIPEALNEALKPMLEIIRELTKKIRAYDLMIKEAATEKYPETERLRQVVGVGPLTALAYVLTLEEPERFTKSRKVGSYLGLVPRLDQSGQTDKQLRITKHGDGYLRRILVGSAHYILGPFGPDCDLRAFGLKLMQRGGKNAKKRAVVAVARKLAVLLHALWRSGQQYEPKRKQPLAA

SEQ ID NO: 102770 - protein, 342 aa, unidentified
MKIHTIGIDLGKTKFHVVGLSERGEVVVRKQFSRVQLLRFTANRKVHVIGMEACGGSHFLGRLLQRQGHEVRLMPAQYVKPYVKTNKSDYIDAEAIAEAVGRPTMRFVPIKSDDQLDLQSLHRVRERWVSRRTAVINQLRGLLLERGITVRKGRRYIEAALPGILEDADAKLSGALRLLLAQLKLELDQMAQRLEEADALIEQTARENEDCRRLVKIPGLGPVTATAVIAAIGNGAAFRKGREFAAWMGVVPREHSTGGKQRLLGIGKRGNRYLRKLFVQCARAVLQQKAKQTPGLRAWLEKLTSRTHRNVAAVALANKLARMAWAVLATGEAYRAPTVAAA

SEQ ID NO: 102771 - protein, 467 aa, unidentified
MTPHKDYFLDPCPPVPTPTLPQSSVLSEALQVCNPHAAGIDIGEAEHWVAVPPGCAPQPVRRFGTFTVDLDALADWLIDCGVTTVAMESTGVYWIPLFELLEARGVQVLLIDPRQAKRAPGRPKTDRLDCKWLQRLHAYGLLAGAFRPADQVCVLRSYLRHRQMLITSAAHHIQHMQKALQQMNLKLTQVVSDITGATGMAILKAIIAGERDPVTLAKLRNPHCQHDADDIAKALQGTWRAEHLFALQQAVALYEFYHQQLALCDQQIKAHLETFADKSEGQPLPPKARRHKKTNEPRFDARTPLYRMAGVDLTTIEGIEENTALIILSEIGTDMHRWPSVKHFCSWLGLCPQHKISGGKVLSRRVRPGAHRVTVALRLAARSLHHSQSALGAFFRRMKARLGTPKAITATAHKLARLVYSLLQHGSAYVQQGLDAYEAQYRARKVTTMAKQAKALGYTLVPLAAQG

SEQ ID NO: 102772 - protein, 448 aa, unidentified
MDSFPIINLNAAGIDVGSGEHWVCVPEDRDEEPVRCFACFTDDLYAMADWLKKCHIDTVVMESTGVYWIALFQVLETRGFEVKLVNARHAKNVPGRKTDVLDCQWLQRLHTYGLLAGSFRPEDCICVLRSYWRQRDRLIRYTSAHVQHMQKALTEMNVQLHKVISDITGTTGMRIIRAILEGERDPLKLAQMRDPRIKSSAETIAKALQGDYRQEHLFALRQSLELYEFYQRQIQSCDREIEAYLEQMDSKVDPESNPPPASKRGNKKPRGNEPDFDLRTHLFRISGVDFTQIDGLHVLTVQTILSEVGLDPGKFPSAKNFASWLGLCPNNRITGGRVKSTKTRKVVNRAADAFRLGAQAVANSSTALGAYYRRMRARLDAPKAITATAHKLARIFYHLWKSHDLYHDPGADYYERQYRDRIINNMKKRAKNLGFEITFNPITKMQVS

SEQ ID NO: 102773 - protein, 453 aa, unidentified
MAKKAKKLHTKKGVELKIVNPNAAGIDIADTEMQVCVPTDRDGDNNRRFGSFTRDLNEICGWLKDCGIDTAAMEATGIYWIPLFFKLKESGIDVILVNAHEVKNISEKKTDEADAEWLMLLHTYGLLKASYQPENEARQVRNLARHRGNILRAAGKEVQHMQKAMEQMNLKLSNVLSDIVGKSGRAIIDAILNGERNPEVLAQLADGRCKRSKEEIALSLEGTWDEDHLFELKQAYDLYKYLQTQMTECDHKIEELLMAYAAVVDTDMSGLVQCKKVIGKKNAVDFDVEKYGYAIWGVNPMTIPGMSAGSVLQLIGELGHNFVDKFDTPEKFCKWCNIVPNNKISGGKLISSRVPKRKNPVGQVFRLCANALKDAKNPMGFYFRRIRSRGGHMQAIVATAHKIARIFYVMVKNKCAYDETKVGLDEQELLKKKIERTQRALDKLNARLSVAIG

SEQ ID NO: 102774 - protein, 375 aa, unidentified
MQKVTVLSELSVGIDLHKTQFTVCVISSDGEILLERQYETKKEGYQAFIKNMHDFEKERDCTIALAIEATCNARFFRNMMIREFFRVVVVNTNRFELISKSTKKTDKHDAAELAYYLSKDMLPESHLCDEREEEIRRLLKTRSILVSTEVKIKNQVHGMLLGHGEVTKSAQLQSKKKRQALVDSLGQDPYTKTVVASLKEMFTILDSLIVSVNDLEKYIKELVADDEDYELLNTIPGVGFVTAATISCYTKDLDRFEGDYKRFCSYAGLTPYIHSSNKTEHIGHITKHGPVELRTSFVQMCMGLLRNTKKTGEWRLLVNYQNMKETKGSGKSIIATSRKLARIVFVMLSRREEFNPSLMIKAVGHSLTVDEIIGA

SEQ ID NO: 102775 - protein, 340 aa, unidentified
MEQAIMIGLDIAKNVFEVHGRNAASEVVLRRSLKRGTMEKVFGKLSPAQIGLEACGSAHHWGRVLSKLGHDVRLMPAAYVKPYVKRNKSDAIDAAACWEAMGRPDMRFVPLKTADQQAALSLHRSRELLVRQRTQLGNALRALLSEFGIVAGKGKAGLSHLIEQLRAGTLELPQDALFSATILADQHAAADATAAQLERRIKAQAKADKTARMLQTAPTVGPITAHAVRAALPDPARFKCGRDFAAFLGLAPSNSGTGGKTRTGHITKKGDRTVRRLLVLGATSWVRQVSKRLDKASPWLRGMLARRPKKVVAVALAARTARILWAMLTHNQPYRAAAVS

SEQ ID NO: 102776 - protein, 392 aa, unidentified
MIYIGIDVAKEKHDCCIVDSDGVIINDSLRVSNSRQGFELLYSSILSSLPDKDISNVKIGLESTGHYSTNLQNFLYSKGLKLSILNPLATSLFRKAQTLRKTKTDKTDALVIAKMLFSDDTKSYSPVSYQIQELKSLTRHRYRLIGYRSKLKLSITRLIDIIFPELPKHVWSIHQNSSYCLLSELPGPKDVAKCHLTKLTNILNKASRGKYGKDKAIALKEAAGSSIGTCTRSLSFELQQTIRLIQSVQAEIDALDLQIKEVVTEINSPIISIPGISYTLAAIILSEIGDIEKFTNPAKLLAFAGLDPSTYQSGKYSASHTPMVKRGSTYLRWAILTASRTVSMRDSTFSSYLSKKQSEGKHYYVAMSHVAKKLIRVVFYLLKTNTTFVPQM

SEQ ID NO: 102777 - protein, 321 aa, unidentified
MYKVIGIDVSKATLDGCFLDGSQKESFVVSNTQQGFKKIALKAKGALVVMEASGPYYLQLSNYLHTHGIEVSVVNPLVIKRFSQMNLQRAKTDKKDAETIANYGRIYDPKRWSPNSKNTNSIGQLHSAMELLDKQIRQLKGQQEAFDNSGELASLLRKELKSMVNFLVKKKQKLSLEVERLAEQEFGEKIDKITSIPGIGKKTAIMLNVITDGFTKFEHHKQLTAYIGFSPRVYQSGTSVKGKGHICKMGNAQIRKLLYLCSWTAKFCNKACREMYERLKEKGKPERVIKVAIANKLLKQAFAIGKSQMNYSENHGDNICF

SEQ ID NO: 102778 - protein, 356 aa, unidentified
MEKLTTVGIDLAKDVIAVCVLDVHGAVVERRVLRRDAFERWAGQLPVSNVVMEACGSAHHWGRWFAARGHHARLIAAEFVVPFRKGGKNDTADAEAIAIASRQPTMRFVPIKTVDQQAILAWHSVREGWKEERTALLNRVRRLLAEYGVVIGRSADRFLAALPKLSEDSRLPDPVRAMLLEAREQFAALHVRLARCDAQIAAHAKNNPAAQRAGELLGVGPVTSSALVATVPDARVFKSGRQFAAWLGLTPRQHSSGGKTRLGRVSLRGNVYLRTLLVQGARSTLQAAINTEPARATRLQRWIIELYGRKGYYKTLIAIANKHARILWAMLAKDESYDASAWQRHPMNQPPLAGNA

SEQ ID NO: 102779 - protein, 344 aa, unidentified
MDHFGGLDVSVKETSICIVDDTGKIVKEVKVASEPAALLKVLGNPSYRFKRIGLEAGPLSQWLFSALAEAELPVICVETRHMRAVLKAQINKTDRNDARGIAQMIRVGLYRPVHVKTLRSQKLRMLLTHRKLLQSKAIAIENDLRGTLRNFGLKVGMVGKVRFEARIQQLVENFPDLSVLVEPLLIVRRVLREQIVILHRRLLAIVRDDEVCRRLMTTPGVGPVVALTYRATVDVPARFRKSKSVGAVFGLTCSRYQSGEIDWSGKISRCGDEMMRTMLYEAAQSMMHSKKWSWLKAWAMQIARRRGMKKAIVALARRLAVIMHRIWVDGTEFRWTREQAAAAA

SEQ ID NO: 102780 - protein, 347 aa, unidentified
MDTIGIDLHKRESQVCIIRDDGTLTERRIVTSRDRFTAVIGDRTPARILLEASTESEWVAAHLEGLGHTVIVADPNYAPMYATRRRRVKTDKRDARTLAEALRLGAYRPAHRTSAARRHVRAELAVREALVRTRTRYVSLAKALVRRDGLRVASSEAEHVPARIAALPLSPTLMAELAPLLTVLGPITEQITAADRRITALMQADPAVALLATAPSIGALTASAIVATIDDVTRFGSAHQFEAFLGLVPSERSSGEQRRVGRITKTGNARARYLLVEAGWRLLRTKSAATAALRAWALTIAARRGKRIAVVALARRLAGILYAMWRDERAYDADKLRLPQPRVAQSA

SEQ ID NO: 102781 - protein, 321 aa, unidentified
MTKEAVYIGVDVAKNSLDVAVSSSEGVRQFANDHEGVTNAVQYIAGLKPAGIILEATGHLEMPLAAALQAGRLPVAVINPRQVRDFARATGTLAKTDTIDARILALFGTGVKPEIRPLPDEKTREMRNLLTRRRQLIEMLTAEHNRLFHSSDDVRPSIETHIKWLGEALSEINNDLDRRIRLSPSWLEKDNLLKSVPGVGKVVSSSLLIELPELGRLNRRKIAALVGVAPFNRDSGTMRGRRTIWGGRAKLRAVLYMAALVASRRNPIIAAFYQRLLDAGKAKKVALVACMRKLLTILNAMIRTMTAWQPGIILRHISVEA

SEQ ID NO: 102782 - protein, 454 aa, unidentified
MSGEPLELEAEEQEQIVERVAAIDVAKASGQVCTRVPHASIPGRRVTKVWNVQATTNAIVALAEQLAKERIERVIVESTSDYWRPFVYLLQARGLTVWLVNAREVKQVPGRPKTDKLDVVWLAKLNERGMLRPSFIPPPEIRRLRDYTRVRSDLVEERTRHAQRLEKLLEDALIKLSTVATDILGVSGRAMIEALIAGERDPEVLAGLARGRLRVKHAALVEALTGRFDDHHAELARMLLEQIDALSAKIDALTLRVEQLLAETPAAQAPGVPGKPGRGGESHDPATAPLAAVARLDEITGIGPYAAQVIIAEVGLDMRQFPTADQLASWAKLSPRTIQSGARSRSGRTGKGNRYLKAVLGEAAAAAARTDSFLGERYRRLVKRRGKLKALVAVARSILVIVWHLLADPSVRFRELGSDFYATRIDKERRTRQLVRQLEALGHTVTLEAPPMAA

SEQ ID NO: 102783 - protein, 351 aa, unidentified
MMIIGVDYHPSFQTIAFFVEETGECGEQELNHSDGQAEKFYGDLKQRGICVRVGMEATGYSRWFERLPAELGFELWIGDPAEIKAKRVKKQKFDREDARLLLRLLRENNFPQIWVPDPENRDLRQLLWHRHRLVQMRTRIMNQLHALAMNEGYRWKKKLFSEQGRMQLEKLRLAPWASRRRQELLELLDRMNPTIGELTATVEQEARKRPEVLRLMTHPGVGPLTALAYVLIIGTPTRFQRGKQIGTYVGMIPCEESSARKQRLGHISKQGNSLLRFLLVEAAQAAARIHPDWRRRYIHLAMRRHKSIAKVAMGRRLAVRLYWMWRNGCEYSSSLEFGSYAGQLGTGDGVK

SEQ ID NO: 102784 - protein, 342 aa, unidentified
MTQPAPARITVGVDTHAEVHVAVAKDSFGRRLDAISVPTTPAGYGELLGWARRLGPINAWGIEGTGSFGAGLTRFLHRHGQVVVEVNRPDRQTRRRRGKSDPLDAEAAARAVQAREGAIPKAGDGQVEMIRSLRVARATAMKARTQAINALKGLLITAPDELREQLRALSAVRLVQTAAELEPGPVTTPAAAARLGLRSLARRYQALSAELTILDTELDRLTVTAAPKLLALFGVGSDSAGALLVAAGDNPDRLRSNACFSMLCGASPIQASSGKTQRHRLNRGGDRQSNAALSRIVIARLRHEQQTRDYLDRRIREGKSKKEAIRCLKRYVAREVFAVLRP

SEQ ID NO: 102785 - protein, 341 aa, unidentified
MRKTLFCGVDLHSNNAMYVITDPQDKLLFRRRLPNRLPVVLESLEPFRQQLKVVAVESTYNWYWLVDGLQDHDYPVVLANPAQMDQYNGIKEADDLTDAAFLARLARLNILPTGYIYPREDRPVRDLLRRRTLVVQHRTAIKQSLQNMATRQTGQSFGWRAIQKLSDSERTELLGDNDCLGFVASQQVDLIELLSKKIQRFEQKILEHAHLKPAYVCLLTIPGVGMILALTIMLETGDIGRFETVGDYTSYCRCVRATHTSNGKSKGKNNSKNGNAYLAWAFVEAVHHALRTCPQAKHFYDKKLAKRNGALATKALAAKWSKAAYYIMKRQEAFDLTRVFG

SEQ ID NO: 102786 - protein, 347 aa, unidentified
MDHIIIGVDTHKSNHIAVAINAQGARLGVVTIPTNRQGYRDLEIWAAKFGRIKAFGIEGTGSYGAALSRDLLVKGHTVLDVMRPNRQLRYLHGKSDSLDAESAARSVLNGQASALAKTQTGSSEMIRHIKIVRDSAVKVRSQAMITLKTMIINAPAELRDTLDQIKGPISLIRHIAALRPGDIASPTASAKWAMRALARRWLALHEEIQAHEVELERMAREKAPELMKSHGISTQTVAEMLILVGDNPERIKSEAALAKLCGVCPIPASSGKTNRMRLNRGGNRQANAALYRVAIVRMRDDEKTKTYVTRRTAEGKTRREIVRCLKRYIVREIYRHLCVPPTAASST

SEQ ID NO: 102787 - protein, 415 aa, unidentified
MLSTDALVAGLDVHKKTVVVVILQKGQPDQDYATGTFGTTSCGLKELAAFLRQHRVTHVAMESTAQYWRPIWMALEGEFPLTLAQARSTRARRGRKWDQADARRIAKRLLSGDLTVSFVPPPEQRDWRLLSRTQITLRESLVRLRNQIEVLLEQAQIKLSSVVSDLLGKSGRRMLEALLAGVTDPVALAALGDRRLQASQEQLTDALNGRLTEAHRLVLRLFLEQIDQIEQHLAELDQALAKALTVHQEAIARLCEIPGINVRTAQYVIAETGAHAAVFESAGKLASWVGICPGQQESAGVSVSTRSAKGNWMLRRTLSQIAWAAVASKGSEAQRRFQAWRPRLGAQKAIWAVAHYQLRVIWKVLHDGVRYRSPDTERRNQRALLARAKRVLSGLRKLGYTVSITPPSSTPVPEA

SEQ ID NO: 102788 - protein, 450 aa, unidentified
MLPRDGAVIGIDLADEKQALAVIDHDVRVLARKTVRVKAFRLGEALDWAAAQARAKGLAAVTVACEPTGPRWLQVQRLCAERGLPMVCVQPLVSHIARQQQDYTTHKTDEADCVMIARLAVELHCYIPEELDEVWAGLRHLGRRRAALITSETASVQRIRDFLSVAWPVVPEACAQPFESMTWLAALQAVTSRCGGQPGELAIIGLEAFTALVRDALPGWGGQRIHGPICKTVFAALTSTEGVVRGHRRGLLRRVAAELGDLQRARTQRQETEAAMIAALGDLGLARLGDIPGLTATGAAAILAETGDPGRYDTSSSVVKHAGLSPADNASGAFGGEAHISRRGRPGLRLTVWRAVWAVLIHNPVMAAKYAAMTQAADQAAADARAGNSGHATSAAQAARRRRAKARVACAAALLRWIYSMVVHGTCWDPGVAAGRKDALAAPSCQPEAA

SEQ ID NO: 102789 - protein, 347 aa, unidentified
MRRIAVDLAKSVYQVAESVRSGQVVQRKRLNREAFRRYIQEQRETVEWVMEACGTAHYWGRTMQAHGHAVMLIHPRYVRPYRRRNKTDRNDCDAMLEAARCKGIHPVPVKSHEQQQVQQLHGLRETWKKSRTQRINLLRGILREAGIEAPASTAAFLRAAHELVERAELAPLRHQLHIVLAEINLHAQCMVECEQQLKRWHADDEIVRKLDEVSGIGVLTASALKAAVGKPERFASGRQLSAWLGMTPREFSSGERRKLGHISRQGNVYVRTLLIHGSRAALLAAQRCQAQTPEKLTQLQRWAVETAARIGHNKAAVALANKLVRICWAVWCHERRFSGDWQRAKPA

SEQ ID NO: 102790 - protein, 450 aa, unidentified
MIRGVQSFEAKNGPLIDTQGGLKMNYTQNQKISQITPSTLVIGIDIAKDKHVARAQDDRGIEFGKRLVFVNRIHGFQSLLEWVERHQKQNAKNHVIFGVEPTGHYWLNLAYFLTAKGYDFVLVNPMHVKKSKELDDNSPTKNDTKDAKVIAQLIKDGRYSVPNLLDGIYAELREGVKVRDQLIQQLMITEGRIQNVIQRYFPEFFDVFGDWEGKAALCTLKLFPFPSQIIEMEPDEVLSKWKPFVQRGVGIKRATKLVETAKKSIGIQIGIEFAKHELDFLIQQYELYKEQLEQLDNQIEALLTSIPGTKQMIDINGLGAITVAKLFAEVGDISKYSHPQQLVNLAGLSLREHSSGKFKGQTRITKRGRSGLRRALYQAVRPLIAHNETFKALHHYYTNRSKRPLKKQQSLIALCCKLLRVLFVIGQKQCEFDGSKLLQGLPQINTLQAA

SEQ ID NO: 102791 - protein, 318 aa, unidentified
MSYDVKYIGMDVHKEAIVIAVQNESGKLVMESVIETKASSILQFLHGLRGELHVTWEEGTWAAWLYDLLQPHVQHIVVCNPRRNALLKEGSKSDKVDAQKLSDLLRTGMLRPVYHGENGLRTLRELGRSYQTISKDLTRVMNRLKALYRGWGIPCAGTQVYAARSREEWLSKIPQAGVRRRAELLYQQLDGLQALRRNVRPEFLAESRKHKAAKLLRQIPCIGPIRAARLIALMQTPHRFRSKRQLWTYSGLGIETHDSAQYRFVRGQLQLSKKPQQLRGLNRNHNHEMKEIFKSAATRASCAGDRSTISTRLCWPRA

SEQ ID NO: 102792 - protein, 340 aa, unidentified
MRQLYAGSDLHGNNNLVGIVDEQGKRIFRQRLPNESQVILEVLEPYKEEIVGIAVESTYNWYWLVDALMGEGYKVHLANPSAIQQYEGLKHSDDKHDAFWLAEMLRLGILPEGYIYPKEERPMRDLLRKRGHLVRLRTSLITSLQNILSRNLGVNVIANELKALREDRITPLLEGSEDLALAGRVSKEAIDFLTRQILKIERVVEKRIEVKESYRYLLTLCGVGKILALTIMLETGPIDRFATVGDYASYCRQVPSQWTSNGKRKGSGNKKNGNKYLAWAYAEASELARRFYPEPRAYYNRKIHKTNAPVAHSALAHKLARAAYYVMRDQVPFQPKKLFG

SEQ ID NO: 102793 - protein, 366 aa, unidentified
MFAMHYVGLDVHAKRSSLCILDSCGKTVKQLEVKGTWPLLLERVAAEVPRPFSVCFEASCGYGYLHEKLSTMAHAVSVAHPGQLRLIFKSKKKNDRVDAGKLAKILYLDAVPAVHVPSVDVRAWRGLIECRRRLMDRRVAVKNQARALLRSLGIVALVAKTLWSKKGLAWLEAQTLSEADSLRRDLLVQELSELNQKIKRVEKELAQRGNAHPGVTLLRTIPGVGIRTAEAFVAYVDNVQRFSRNKKVASYLGLVPCQDSSAGKDRLGHITKDGPGTVRKMLCEAAWQGIRRSPSLKSFFDRVMGADPDRKKIALVATARHLAIIMAAMLRSGEVWREQTVVEEKIGKDGCADGDSASPLRKTPKP

SEQ ID NO: 102794 - protein, 401 aa, unidentified
MKYVLVLDVAKGKSMFMLSSNVGEVLLEPTEYIHNKKNFELIDSNINKLNIKDNLTVVMEATSIYHKAPERFFKENNYHVIVFNPLIGKEITNTIRKTKTDKQDCIKLTNLFWKGSIPDRNYTEDEIYTKLNELSRQYYHLDEGLTRHKNRYKELLHLCFPEFELCFKDGKIYDLTALNIIKEFPHAYIIKEKRVDALAYNMANTNNRHLNYYKRKANTIKEYAQNSYPGVNENSKDVDNLKQLANIIIDITEQKDDVKNQMIELAKQTKHFNNIASIFGIADLSASLIIAELKDITRFNNIKQINASCGLDPTIVQSGKSINYHGPISKRGNRYARKILFNCSRNIVTISAKCDKENPIYVYYQKKKQEGKHYYACLTACSTKLIRIIYALCMNNSTSQN

SEQ ID NO: 102795 - protein, 356 aa, unidentified
MTSTKYVGMDVHKESISIAVMNSAGKIVMECVIETKASVLLQFFNGLRGDVRVTFEEGTWAAWLYDLLKPRVSEVVVCNPRKNALLKDGSKSDRIDAHKLAELLRGNHLKPVYHGEHGLRTLKELGRSYLTITKDVTRVMNRLKALYRGWGIACAGHEVYVPRHRSEWLGKISEAGVRRRAEHCYQQLDVLRLLRQQVRRDLLLESRKHPAWRLLGLIPGIGPIRAALLIALIQTPHRFRTKRQLWTYSGLGLETHDSAQYRVVEGQLQRSKKSVTLRGLNQDHNRDLKDIFKGAATKVSSSNSGPFHDFYEHLLAQGRKPTMARLTLARKIAAITLIVWKKEVRFDASYLKSQTA

SEQ ID NO: 102796 - protein, 414 aa, unidentified
MELVYERCCALDVHKRQVTACVHVPDRKGKRTELRAEFQTMTPDLLAMRDWLKGLGVSCIAMEATGVYWKPVYYLLEDDFELLLVNAQHVKNVPGRKTDVGDAQWLCQLLEHGLLRASFVPPKPQRELRDLTRYRKSLVWERAREANRLQKLLEDANIKLSDVASDVLGASGRAMLAALCGGNNDPAALAELARGKLRAKLPALETALQGRFSSHHALLLSHLLSHIDYLDQSIDSLSAEIEERLDPFAQQRELLCTIPGVAERTAEVILAELGPDMGRFPSHRHAASWAAICPGNDESAGKRKTGKTRKGDRWLRTALVEAANSAAGRTKDTYLRAQYLRVKRRQGHKKAIVAVAHSILVAAYYILRDQVPYQELGGDFFIRRQDQERLTQRLVRQLERLGQRVTLEPALQER

SEQ ID NO: 102797 - protein, 316 aa, unidentified
MTITTVGIDLAKNVFAVHCVDQNGKTVLVKSRVTRAALPGLIAGLPPYVIGMEACSGAHYWARLFRQYGHEPRLMAAKFVSPYRMAGKSGKNDAADAQAICEAVRRPHMRFVPVKDESQQAMQCLHRTRQGFIEEKSATYNRLRGLISEFGVIAPQSTDALRHIVFEQKNSLPLQVQQCVDDLLEHVARIEDNIAEYDRILSRMAKTDHRSQRLMELKGVGPTTACALVASIGNAHDFKNGRQLAAWLGLTPSQYSSGGKSKLGRITKAGDSYLRTLLVQGARSVLIGAEKRTDLFSRWVCSLVVTPTLCRYRRFM

SEQ ID NO: 102798 - protein, 365 aa, unidentified
MNKCHSNTELSSHEGTRSQFNGGKCAIKLGIDVHQDFYVVVEQVDGTNPKPPQRFPKRAFLRWAARLKENTGAEVHAVYEACGFGFSLQRQLSSLGVQCHVVCPQKLDEQNRRVKTDGLDAKALVLKLDRFVQGNRSSLALVRVPTEEEEQKRAIHRQREQLVKARKQLEAQGRSLMVNHGLEPVQSWWKPRAFAALPVPQWMKELLANSQPILVALQQKIASLTIQLQSSATPKQPRGLGLMTSVIIDREIGDWRRFSNRRQIGSYTGLCPGEYSSGNTRLQSCVTKHGNPRLRAALVELAWRLVRFQPNYKPIVKWRQILAKGALATGAARKKAIVAVARQLAVDLWRIKTGRLRAEELGLIN

SEQ ID NO: 102799 - protein, 394 aa, unidentified
MRFVGIDVAAERHVVAVVDEADRVVIKPTPFSEDADGYTKLFEVLGAPTDALVAMEATGHYWKNLFAALVASGFAVALLNPLRTRRFAGEDLQRTRTDAIDAVGIARFAAQKRPPASRLPDRATEELRELVRFRDRLRQDFGDRVRQLHRLVDLGFPEFTRHVRDLGSELATGLLHEYPTAAGFQGVPVRRVAAFRYDGRHKVGEDLAAALIAVAGNSVGRHHGEAYRIQVRYTCEDLDVLRRRLRDLEREIDRLLEQHEIGRLLTTIDGIGPQTSARLVATFGAFSGFASAGALASYVGAVPALKQSGKRTFQRASLTPLGAAHLRAKLWMPVLTAVRINPWLRAYYERLIARGKLPKVALVAAIRKLLHAIYSVATHRRPFVANLLTAEAHP

SEQ ID NO: 102800 - protein, 371 aa, unidentified
MKEFNKYIGLDVHKETMAVSVAEARGGEVRYVGEIANTPEAMEKLVRQLRKDGANLSFCYEAGPCGYGIHRQLTDLGWECLVVAPSLIPKKAGDRVKTDRRDSLSLARLHRAGELTAVWVPDGAQEALRDLTRAREDMKHLQRQAKQRLLAFLLRHSRRYDGKSHWTQAHYRWLEETKFDHPVQQIVFQEYIDTVKAMSRRVEALDKQIESAASESVFWPVIEGLMALRGVSLLTATTIVAEIGDLRRFASAPQLMAYLGVVPSEHSSGGTKSRGGITKTGNGHVRRVLVEAAWTYRHPARKTAVLQRRAERTPELIQEIAWKAQKRMCGRYRLLESRGKLKVQVTTAIARELAGFIWAIGQALPPPVANA

SEQ ID NO: 102801 - protein, 415 aa, unidentified
MEDLGLQPLHRRVAGIDVHRMLHVVTVLIEQTDGSMQRHTREFGGFRRDCRALAAWLTELGVELVVMESTGIYWKSVYAHLENAGIAAWVVNAHMIKHVPGRKTDMADSEWLAVLARFGLVRASFIPPKDLRELRLVSRYRRKLSAMCASEINRLHKILDDGGIKLGGVVSDINGVSARAMVSALIAQQPIEHMLGLARGALKQKREDLAAGLDGDLSARHLFVLGHIHAHIETLQREIAALDAYLLAAMQRYAWAHQLLQTIPGIDEIAAALILIEIGDDMGRFGCAARLASWAALSPGNNESAGKRKSGRTRHGNSIVRFILCECANAARMTKSTLASKYRSLMVRKSHKKAIVAVAHKMIRLIFLMLSRRQPYIDQAIDYAAMSAKKNAPRWIKQLKTIGRWPASKAAAASH

SEQ ID NO: 102802 - protein, 357 aa, unidentified
MQSQIKELDFTGQNIYAGIDVHKNSWNVSIYSDDLYHKTISQPPRPEALYGYLSKHFPKGTYYSAYEAGFCGFWIHNQLQSLGINSLVVNPADIPTTDKEKKHKTDKVDSNKLAKHLRNGDLDPIYIHNVNILEDRNLLRTRRTVVKELTRYKNRIKSDLYFFGIEIPENFSNKSYWSKRFLNWLSSVKFRKDSGDAAFGVLLDQIILLRSQLLEINRKIRVLSRTEKYHKRVTLLLSIPGVGKITAMTFLTDIEDINRFANLEKLRSYVGLTPGSHSSGDKAIHGEMINRGNRFIKSSIIESAWVAARRDPALHLAYIRYRKRMDKNKAIVRIACKLLDRINFVLKNEKPYISGIE

SEQ ID NO: 102803 - protein, 344 aa, unidentified
MDYYAGIDVSLEYSSVCVVDASGKVVREAKVVSEPEALIGWFGSLGLELARIGLEAGPLSQWLYAAMKQAGLAVELLETRHVSDAFKAMPVKSDRNDARKIAQLMRLGWFRPVHCKSITAQEIRAMLTARKLVQSKLLDLENSLRGILRGFGLKVGKTTRTKFAGRIEELVKGHPNLQTIGQALLRARAVLLAEFNGFEKRVRAMSRLHDKARLLMSTPAVGPIVSLTFACAIDDPSRFTSSKQAGPHFGLTPKKYQSGETDYTGRISKHGDASVREALYEAAHIMLTKPIKRCSGLKSWAMRIARRAGTNKAKVALARKLAVIMLRMLKDNVPFNPAAKPATA

SEQ ID NO: 102804 - protein, 339 aa, unidentified
MLVSPNGYPRMNVHKQGRDTAAGPRVNAGVDVAKDGLDACWGTEARRFAYDAEGIKQLAAALQQAEVDLVVMEASGGYEVTAAAALQAEGFAVAVLNPRQARDFAKSMGVLAKTDRVDARVLRDFANVVAAHPQRHRYLKPLPDGQREHLAALVMRRRQLVEMRGAEANRLATAHKSARKSVAAILKALDRQLASVDADIDGCLRKDFKDTMAWLDTVKGVGPVTMSTLVALLPELGQLSGRSISALVGVAPMARESGTWRGRRHICGGRYEVRSVVYMATLSAVRHNPVFRAFHQRLITAGKPPKVALVACMRKLVVILNAMARDRAAWRHPEASYAA

SEQ ID NO: 102805 - protein, 352 aa, unidentified
MKHFIGCDVHTRDQVVAWIEEETGEIKKRRLEHEGKEVKEFYAQFPRGTVVGIEATFPAHWFERLMGELGHELWVGDAARIRASEVRLQKTDARDAEHMLDLLRTDRFPRIWVPSLEERDLRQLLVHRMKQVRARTQVKNQLHALAISQGVCRKSKLWSVKGRKELESLALLPWAARRRKELLETLDRLDEQVRELDRAVEEAGRERQEVALLRTHPGVGMVVGLAFALTVGPVERFSNSRKLVSYWGLNPRENSSGGRQRLGSISKQVNPMMRWLLVEAAQTAARLDPQLGRIYQRLKKKKTSGVAKVAVARRLAVRLFWMLRTRNNYAQLVQMSGSPSSAVVPPTAEPKL

SEQ ID NO: 102806 - protein, 344 aa, unidentified
MEHFAGLDVSVNETSVCIVDDTGRIIREVKVASEPDALVEVLKNGAYHFKRIGLEAGPLSQWLYSALGEANLPVICVETRHMRAVLKAQINKTDRNDARGIAQMMRAGLYRPVHVKTLRSQKLRTLLTHRKLLQSKAIAIENDLRGTLRNFGLKVGVVGTVKFEARIKELVENLPDLAALVEPLLIVRRVLREQIAVLHRRVLTIVRDDEVCRRLMTIPGVGPVVALTYRTTIDVPARFRNSRAVGAVLGLTPCKYQSGESDYTGGISRCGDEMMRVMLYEAAQVLLVRSTKWSWLKAWAMQIARRRGVKKAIVALARRLAVVMHRIWIDGTEFRWTRQEFAAA

SEQ ID NO: 102807 - protein, 420 aa, unidentified
MKPIKTIKRSFVNGKALIVTADIGKDKHFGYWRCPDGTDVKPFAVPNNRAGFGEFWERVSRAQKLHKLEGIIFGFESTGPYGEPLAHFMRTRGAELVQVNPLHTKRFKEVTDNSPNKTDQKDPKVIADIIAMGRFLTVVIPEGPAAELRRLSQARERSTRRHTALANQIQCLMASIFPEFLPAMKGVKSASAQYLLKHYPTPQEIAACGLTELTRTLRKVSRGKLGADRAQALYEAAQSTVGVAEGQASMVLEIQELLALMEASQRFTKNLELKMITHLAQIPYSNTLLSLKGIGDVTAAGLIGEVGDFRKFRTLGEVMKLAGLDLFEVSSGRHKGQRHISKRGRPLMRKLLYFAAINTVKQGGAMHQWYRSACERGMLKTKALVAVSRKLLGILFALVRDHSEYVPNYSETRCQLTEAA

SEQ ID NO: 102808 - protein, 412 aa, unidentified
MDVLYPCCAGLDVHKDSVFVDVRRIGPGGSVRETIKKFGTMTPDLLQLGDWLAAEGVTHVAMESTGVYWKPVYYILEGRFELVLANAQQLKRVPGRKTDTQDCAWIAKLMQHGLISSSFVPPEPQRDLRELCRQRVQLMRQKAAVSNRIQKILEDANLKLGSVASDVLGKSGRAMLRALIAGETDPVKLAELALGRLRKKMSQLRAALTGRVTEHHRFMLKLFLDEVEVVENFVSQLEQRIDKVLGPFAEAVQRWMTIPGVNQRTAQAIAAEIGTDMSRFPTEGHLATWAGICPGNDESAGKRRSGKTPKGNTWLKGALVQAAWAASHTKGTYLSTFYRRLAARRGRKRALVALAHTMLGIMYHLQRNGTDYVDLGGDYFERRDKDKLTRHLINRLERLGLKVEVHPQDSAA

SEQ ID NO: 102809 - protein, 414 aa, unidentified
MDVLHERCAALDIGKKDLKACVRTPSPSGRRSRRQEIRTFATTTNALLELRDWLVAENITLVVMEATSDYWRGAFYLLEDCLNVILVNAAHAKGLPGRKTDVADAAWLCQLGECGLLKASFVPPEPIRHLRDLTRYRTTLAGELSREAQRLEKELEDAGIKLSAVATDILGVSGRAMLDALIDGERDVHTLAQMAKARMRPKIPELMEALTGNFGEHHAFLCRLHLERIDHLKATIAEISARIEEEMHPFARQVELLQTIPGVGQAVAEVLIAETGADMSRFRTAGHLASWAGVCPGHHESAGKQKSGRRRHGNRWLGAALGTAAMAASRTRDRTYLGARYMRLMPRLGKKKALVALEHSMLTAVWHMLTHDAAFHDLGGDYYAKHDPERALRRITRQANALGLTVRFDPIEAA

SEQ ID NO: 102810 - protein, 410 aa, unidentified
MTSHCRTLPIYIGGYTVAFKIFRKNCCGLDVHKTWIYACIGITDPNGRTEYKQARFSSFTKGLQELADWLAKYDCTDVCMESSGKFWIPVFNILEKTCWVTLAHPKYTKPQKGNKTDRKDAKWICDLYMCDMVKPSFIPPPDIRQLRDLMRYRMKLTNMVTSEKNRALNCLTVSNLKLDDVFSDVFGKSSRSIIHYILEHPGESFNVTPFIDRRCKHPIEEVQAAVDGAISHEQAVKLRECLQHLDELETHKANVEKEILRLAQQYPYQLELLQTVPGFSGNVMTAIALISEIGADMSVFPSAKHLVSWAGCCPRNDQSSKKVKSTRISRAGVYLKPLLVQVAIQPFTANADKLSAAGALEIRCQICDGRFLSMWAALFIFLGCPLPPCPKNLHVHNGRIVILASVAWIF

SEQ ID NO: 102811 - protein, 415 aa, unidentified
MALKIVYKICCGIDVHKTFVVACIASTDNKGITSYESHRFSTYTSGLKDLLQWLLTRNCKDVCMESTGKYWIPVYNILEKDCSIVLAHPKYVKAIRGKKTDKKDAKWIADLFKHDLVAGSFMPPADIRQLRDLMRYRFKLTCFKSSEKNRLQNCLTISNIQLGNVVSDTFGKSAQAILDKLLENPADTSFDLEPLVFRSLKKKLPELRDAIDGYITPEQAGKLKIIKAHYENLESRKAELEKLILALAAPYQQELTILQTAPGISSEFTAIGIISEIGTNMEAFPSAKHLCSWAGLTPTNNESAGKKKSVRVSKAGCYIKPLLVQCANAVVTSKKHPEMRNRYLRLRKRRGHKKAIIAIARMLLTALYNMLKNKEPYNAELYRKSEILPVNREITIEQAILMAQFQGYKIKSAAE

SEQ ID NO: 102812 - protein, 349 aa, unidentified
MNRTTYGLDIAENVMQLHWVDTETGEIGRKKLVRAKLSEFFARLQPVRVAMEACGSAHHWARVLSSLGHQVELLPARQVRPFVRSNKDDAADARAIWVAAQQSDIRRVPLKSVAQQASLALHRSRQHWVSVRTATINALRGTLYEFGVTLAGGKHAGLKALTTHRAEIDAKIPATTQRLIDGQLATLKEIGRRIDELEAEIGVQQEQLEEAAKLRKVPGIGLLGATALAATLGDGGAWKSGREFSASLGLVPAHSGTGGKARVGHLSKRGDPYLRTLLIHGARAVIARAKHKPKWLEQLLARRPMNVAVAALANKMARTTWALVAHGREYQREWKSTPPKGCTAQAAAA

SEQ ID NO: 102813 - protein, 323 aa, unidentified
MSELWVGIDVSKKYLDVCLRPTQQASRYPNKPEGIDTLVAYLQPLSPQLIVMEATGGLEVPLAAALAVAGLAVVVVNPTNVRNFARATGTLAKTDTIDAAILAHFADAIRPPIRPLPDQQAKHFNDLVTRRRQIVEMLVAENNRLPHLSGLAHSDLEEHITWLKSRLKNLEQHLQQAIEQSPIWQARNDLLISVPGIGQVVSTTLIAELPELGELTHKQLSALVGVAPFNRDSGRMQGQRRIFGGRASLRAVLHMAVVVGLRHNPVIQKFYKRLRAAGKPAKVALTACVHKLLIILNAMVKSGQRWNPKTVEDSTAEQSTAVA

SEQ ID NO: 102814 - protein, 409 aa, unidentified
MSYFVGLDWATQDHAVCVVDGHGAVIASFTVTHTAAGMRELASRLAKIAPPADLRVAIERPTGLVVDTLVDDGFAVVPIHPNVVKASRPRYSAAQGKTDLGDAYLLADLLRTDGHRFRTLAPLSDETKALRALVRVRDELVAQRVALGNQLRCLLEQFWPGAAAVFADIDSPIALEFLDRYPTPASAAALGDKRMAAFMSRHAYCGRRSATELLERLRGAARSAAGELEAEAKGECVRALVTVIRPLGAQIATLTAAVEHAVDAHPDGKVVTSLFRSGRVCAAQLLAEIGDDRARFVSAEQLAAEGGVAPITRESGKHRAVTFRWACNMRLRAALAILADTTRHTSPWARALYQRARDRGCQHAHAIRILARAWCRVIWTCWQNRVAYDPAKHRAARAFTSRPVDQEAA

SEQ ID NO: 102815 - protein, 322 aa, unidentified
MQGKAMPEPNATPVYAGVDVCKEWLDVHVHPSGQTLRVSNDRFGLKRLKRVLAALPVARVVMEATGKHHRAAQRSLHAAGLSVAVVNPLRARLFAEAAGKLAKTDAIDAHLLAVMGAALEPAETPPSPVALEDLCELVNARSAAMAERTALTNRLAAAETAFLKAELRRRRDACLRHVERLDAEIERRILAQPDLAHRHAILCSIPGVGPVTAAIFLTSLAELGACSAKQAAMLAGVAPVANDSGERTGRRAIRGGRMPVRNAAYMAALSASRHNPDLAVFAKRLRNAGKRPKVVLVAVMRKLIVLANTLITQNRLWSPSAP

SEQ ID NO: 102816 - protein, 345 aa, unidentified
MELHTIGIDLGKTVFHLVGLDLHGEVVVRKKFSRTQLLRFTANVHVGLIGMEACGGSHFLGRALREQRHEVRLIPAQYVKPYVKTNKSDYIDAEAIAEAVARPTMRFVPIKTDDQLDLQSLHRVRERWVMRRTAVINQIRGLLLERGITLRKGRHHVDAALPLILEDADAKLSGAVRLLLAQLKLDLDQLSVRIDEADEVIKKIADENEACRRLVAIPGIGPVTATALIAAIGNGGAFHKGREFAAWMGVVPREHSTGGQQKLLGISKRGNSYLRRLFVQGARAVLQQRTKQSSGLSAWLAQLTSRTHRNVAAVALANKLARIAWAVLAKNEQYRPSVVPDVAAA

SEQ ID NO: 102817 - protein, 366 aa, unidentified
MKKTSTVRVNGNMIFKGHKLTIGLDLGDRWSFYCVMDEAGQIIVEQKLATTPEAMKQTFGKIPRSLIALETGTHSPWVSRLLTELGHEVIVAHAQKVQLISKSNRKDDRHDARTLARLARIDPELLGPVRHRSAKAQIHLTVIRARAELVSARTALVNAARGLAKSYGERLRKCGTQQVSRELAAELSEELREVLEPLLQEVESLNERIKEYDARMEKIAKESYPQVELLKQVKGVGTQIALTFVLTLEDPHRFPKSREVGCFLGLRPGRRDSGESQPQMHISKEGDPYLRTMLVQGAHYILGPFGQDSDLRRWGLKLAARGGKNAKKRAVIAVARKLAVLLHRLWVGGEVYEPLRNSQKAMRAVA

SEQ ID NO: 102818 - protein, 342 aa, unidentified
MNTIGRDLHKRESQLCILTEAGEILERRIVTSRERFTAVLGGGAAARILLEAATESEWVARHLESLGHEVIVADPNFAPMYATRRRGVKTDRRDARTLMEALRLGAYRRIHRASAAQRHVRAQLAVRDALIRTRTRYVSVVRALTRRDGLRLASGGPEYLEAKLAALSLAPPLQAEIAPLRVVLAPVNAQIEHADAQLAATAAGDPRVARLRTVPAIGPVTAVAFVATLDDVTRFRTAHQVAGYLGLTPREYSSGERRQRGRISKTGNPRMRALLVEAGWRVLRATDPGAASLRAWAERIAARRGTNVAAVALARRLAGILYALWRDGTTYRPPATRDATAA

SEQ ID NO: 102819 - protein, 425 aa, unidentified
MSLVQPTQPSTVLVAIDIAKLRHDVLIEAPGWKNRKRLILPNTAAEFRLFADFLHGLKHPVRIAFEATGNYHRPLAHFLQAEGFQLELIASLAVARTREAMHNSWDKNDPKDAQVLLHLLKTGVTQHYHDPLVNQIHDFQELSLTYAQISLEKTRTQHRLLTHYLPLYFPEIERYYHATRSEWLLAFLQVFPTPALIARLSMEDFVQQAWAVVGRKVSKQRLLEDIYRTAQSSIGIPVAENSEAVAMFRVVLGEMIRLCQLRDQLEERAACHMKDNADFRRLQQMPGIGPILALTIMAEAGDLRRFNHHRQFLKFCGLDLSTQQSGQFRGATKLSKYGNARLRCAFWMAATVAVRLRENSFRDKFERYLRRDPASADRKRMAYVAVAAKMARVAHGIIKTGTDFRCFYEAAAPSGRAASPGPSRP

SEQ ID NO: 102820 - protein, 347 aa, unidentified
MLHVGLDLSRKRVDVCLISDQGELVDELAAPFDEDGLCRLTERVAAKHAGRVRAVVESMNGARFVHDTLEALGWDVLVADAQRVKGLAPLACKTDKIDARVLAELSFRDLVPAIWLPDPQVRRERELARFRLHLVRHRSSLKNRIHSTLITFGKPCPVSDLFGVAGRKLLGRLEVPEPWRANVEASVVLIDQLDRQIDAIASELKHVGADHPYVPLLMTAPGVGWLVGFSIACEIGDINRFASPTKLCGYTGLCPRVIQSGEGDRRGPISKHGPKYLRWALFEAALNACDHPLYKERYERTKKRLGRQRGPKVAQIELSRKLTEAIWHMLTRNEPFAPAGAPIRLAA

SEQ ID NO: 102821 - protein, 350 aa, unidentified
MSIVAETVEHVVGIDTHARTHTYCLVHTRTGAVVDTATFPTSKSGNARAISWIHRRSPGSVLAAVEGTSSYGAGITAALLEQGFDVAEVRPAARSAHAHAGKSDLLDAEAAARSAIGRDYNTLARPRQTGARAALRVLLASRSIIDQQRTANRNALTALLRSVDLDVDARKPLTDAQIRVIAAWRVGRGATAAAASGIARREARRLAVTVLEQTELLKDNHRQLHQLTEQLAPGLQDLPGLGPVTAAIIVCAYSHHGRVRSEAAFAALGGIAPLPASSGNTSRHRLSRSGDRQLNRAFDIAVRTRMSYDPATRAYITRRRTEGRTNREIRRCLKRYVCRSVFRQLQASMA

SEQ ID NO: 102822 - protein, 412 aa, unidentified
MNRKARRCCGIDVHKASLSACIRLHGKGRKVSEEIRTFGTTGDELLALHDWLKEHEVTEVAMEATGVYWKPVYYVLEDGLRVILVNPAEIKRMPGRKTDVSDCAWLAQLLDHGMLRPSFIPPREIRELRDLVRYRVSLKHDHTRIANRLHKVLQDADLKLSSVMSDILGVSGRQILSQLAKGNCDPVALADLARANLRGKLPQLRQALSGRFNAHHAFLLSRLLADLDNTEEAMAQVAQRIQAQLVPFAAELERLCTIPGVKQVAAAAILAEIGTEMSWFPSTADLDSWAGMAPGNNQSGGKRHRAKARKGNRWLRTMLVESGNAAGRTRNTALSALYRRMIVRGGRKHAAFVVGRHILNIAYHLLRERTTYRELGPTYFEQRRVEQLKRRCLDQLRNLGFEANLVPLPKAA

SEQ ID NO: 102823 - protein, 348 aa, unidentified
MSKHSVQAGDIAGLFKRFAQLKEKARARTGGDFPIIVIQETGLDGFWIHRVLQSQGIESHVVDAASILTSRRRRQAKTDRIDGETLVRTLMAFKRGEPRVCSMARAPTSQEEDRRRVCRERRTLVGERVRHVNRIKGLLFAQGVFGYEPLRKGRRERLEDLRTGDGRPLPVHLKAQIVRELDRLELVLEQLKTIGAERNALLKPAGNEATSPAAMLVRLKGIGPETAVVLWSEGLFRQFDNRRQLAAYAGLAPTPWQSGSIDHEQGVSKAGNPRLRTTMVELAWLWLHNQPSSALSLWFHERVRRLGTRIRKTAIVALARKLLIALWRYTTAGVVIEGAVMKEASATT

SEQ ID NO: 102824 - protein, 390 aa, unidentified
MFYAGIDVAMDKHDCVVLDSDGDVVVEVFTFENSRDGFKTLKRVLQSCSKNPKKIKVGLEATGHYSDNLLAFLNKIGYDPILFNPLHTNLFRKGLSLRKTKTDHVDAHTIATMLRTEDLKSYSQPSYHLNELKSLTRYRSNLVSDCSRCKVSLARLCQILFPELKAIVPTLHMSSVYTLLSELPSADKIAKCNLTHLTALLSSASKGHYGRDKAVEIRELARTSIGIKSLVKELELQQTIDLIQVYLHQIEVVEEEINELMDDIESPITSIPGIANRMAAVILAETNNFHGFERAEQVLAFAGLEPSVYQSGQLTSSHSKMVKRGSKYLRYAIFNATKYVCNWDPTFHAYLAKKRAEGKPYNVAISHAAKKLTRVMFHLVKTNKEFVPQA

SEQ ID NO: 102825 - protein, 421 aa, unidentified
MRSIGLDVHRDFCEVAIVEGGEVRSAGRIETTPATLELFAQSLCASDRVVLEVTGNAWEIARILEPHVGEVLVVHPGDTGIRQARAKTDRLDARALAKLLAAGSLDGLWMPDEQTRALRRRLARRSQLVRARTRAKNECHAVLVRRLIKKPAVSDLFGLAGREWLREVELPVEERETVDGCLRQIEFLDQEIAVLETQVARGALGSSQVKRLMTVPGVNVIVAATFLAAVGDVSRFPTSRKLVGYLGLDPRVRQSGSTPATHGRISKQGSASARHALVEASWSVVRQPGPLHAFYQRIRARRGHQVAVVAAARKLACLFWCMLTRGEDYAFQQPSLTRKKLRRLELTAGAPRYQGGRSVWSTNDAMRRAERDLALQAERAYQRTVADWQSTKGASATPGRASQRRQSGKQRGKASIPNPAL

SEQ ID NO: 102826 - protein, 419 aa, unidentified
MSKSNIARQLAQVQPGSLHAGVDLALENNVVVVINEKAERLDHFSFPQDRGGYGYFLRRLEGLRQKYQASEVVVAMEPSNYFWKLLAKELEEKKIIYHLVNSYTVKKHREGDQLDRSKDDRRDAGQIAELSRNGNYTGTHLQKGAYEDLRVYATLYDQSVQAIRREKQVLWGLVGQVFPELSQVFKNLVGETGQALLITGACAAIIRQLSVEDFIALVRAAYSGKRLFVSKLRRVHQLATTSIGLTEGLGAIQLAIQVHLAELQTFQKQLKRVTTAMTACLATLPEAPYLLSVKSLQAVSAAIFLAEVGDPKRYQSAAQWVKLAGIQPAPNTSGKKQRSQTPMSRQGRARLRTMLYFTCLRMVRFDEHFAQIYAHLQRRQKNPLTKMQAIGVLMNKFLHILWALIHNQTFYNPSFGQSI

SEQ ID NO: 102827 - protein, 419 aa, unidentified
MPSKKDNTSVVSVVHHICCGLDVHKKMIAACIISSDAGEGQRSEVMEFETFTDDLIKLRDWLLERECPVVAMESTGPYWTPIHNILEGYVQVILVNPRHMKNVPGRKTDISDSRWLSGLLRYGLLKAAFIPPKYQRQWRDLTRMRKNYMETAGHFKRRVHKLFQEANIKIDSVLADLFGTTGRNLMRLLVSKESSLTFSEVENCLRGSLREKGRELYRSVKGFFEEHHRMLLTVLLDTIEKLESQIVELELRISQVLKTSEDLIERLKEIPGVGDVSAHAVLAELGPTLEAFPTAAALAAWCGVCPGNNQSGGKRFSGRSRVRNHHLKTIMVEIAWPAVKKSNSYYKAKYYALKSRLGAKKAIIAVAHRILKAIYYVIKHGVRFKDLGEAYLLERSKASKIRYLSKQASLLGFELKPVI

SEQ ID NO: 102828 - protein, 358 aa, unidentified
MVDKVTEAAVVGGVDTHKDLHVAAVVDQNNKVLGTQYFSTTRQGYRQMLAWMTSFGTLKRIGVECTGTYGSGLLRYFQNAGLEVLEVTAPDRMERRKRGKSDTIDAECAAHAAFSGIRTVTPKTRDGMIESLRVLKTCRKTAISARRVALQIIHSNIISAPDELREQLRNMTRMQLIRPLGSWRPDASEYRNVTNVYRISLKSLARRYLELHDEIADLDVMIAAIVDELAPELIKRNAIGYESASQLLITAGDNPQRLRSESGFAALCGVSPVPVSSGKTNRYRLNRGGDRAANSALHIIAIGRLRTDAKTKEYVARRVAEGHTKMEAIRCLKRCISREVYTLLRNQNRRINSIPITA

SEQ ID NO: 102829 - protein, 412 aa, unidentified
MNYQDYLFVGVDTHKNQHTAVIINCFHQKLGVVETPNNPSHFNEFIAELKTFISNQETLVFGLEDTRGLGRSLAQWLIKRNYQVKEVNPALTKRERQHSPNPDKSDQIDGEAIANVLLAQWDDLPTVHKDGNSKAIKQLNNHLRGLVKQRTQVKNQLHDLIHQQYPNYEEFFSKPFKVKTALAFWEKFPHPSKLKHYGEKRLHNFLKKQTKNISNNKASKILSLVDKDKDQDVSVTTRNKLVVMLIEQLRLINQQLEKIKNELKEAVENSPYQLTTMPGISYNLAAKFIAEIGYINRFDSADKLARYAGLAPAEHSSGKSNRTSRKKYGCRNLNHAFYLLALQQISTTRNGRPKNPVAYNYYQKKLAEGKSGKSALICLQRRLVDIIFAMMRDKTAYRLPDTPDYDILNKAG

SEQ ID NO: 102830 - protein, 356 aa, unidentified
MSRDIKYIGMDVHKEAVVIAVLNGSGKLVMESIVETKASSILQFIHGLQGELHVTWEEGGWAAWLYDLLKPQVHEVLVCNPRRNALLKEGSKNDKVDARKLADLLRTGMLRPVYHGEHGLRTLRELGRSYQTISKDLNRVMNRIKALYRGWSIPCAGTQVYAPRYREEWLSKIEHAGVRRRAELLYQQLDGLQGLRRTLRPELLAESRKHKAAKVLRQIPCIGPIRAARLIGLMQTPHRFRSKRQLWTYSGLGIETRDSAQYRWVHGQLQRSKKPQQIRGLNQNHNHEMKEIFKGAATRASCGVGPLRDFYVALLAKGMKPEMARLTLARKIAAIALTLWKKEECFDAEQLKPQAA

SEQ ID NO: 102831 - protein, 358 aa, unidentified
MVQRKELNFEGQNIYIGIDVHLKTWHVSILTESGCLKKHSQQSSAQALFEHLKKHYPNGNYLSAYEAGFSGFSTYYSLLDFGIECLRVHAADIPTGQYESVMKTDAIDSTKIARALKSGLLRGIYIPKKEVLDDRNVMRLRITLKRQLSGYKSRVKHLLYNNGVIYPECFQNSKSHWSKRYLKWVHEDVQLLSESRNSLDLLLRQVELFRKSLLEITRLVRTLSRNGRYGEAYENIVSIPGIGMITGMCLLTEIGDIHRFRNERQFASYLGLVPTSHSSGEKTSHGEMTFRGNKRLGPLLVESALVAIRQDRALAAAYGEYCKRMLPQEAIIRITRKLSNRILIILKSGKKYEHDRCY

SEQ ID NO: 102832 - protein, 340 aa, unidentified
MNATTYGLDIAKTVMQVYWVDGGTGEIGSRTLRRAQLAPFFANRPAGRVVIEACGSAHYWARTLGALGHEVRLVHARHVRAYVRGNKNDAADAQAIWSAAQLPGMRWVPAKGEQQQAVLALHRVRAQYVKNRTQMVNGLRGLLYEFGAVLPGGRQAGLKAIAASRAQLDATLPAPMHGLIDGQFEMLAAIERRIQAIEAQLQALERQLDSAQRVRAIPGVGPLGATALAAVLGEDAKGYRNGREFAACLGLVPRHRGTGGKVSVGKLSKRGDPYLRTLLMHGARSVIHHAKDKSPWLEQMLARRPLNVVVAALANKMARTAWALVAHGREYQVGGLARAA

SEQ ID NO: 102833 - protein, 355 aa, unidentified
MNSIKYIGLDVHRSTISVAVLDGEGKLVMQCVLATQASAILDFFQGQRGTLHVTCEEGTHSAWLYDLLVRRVAQLVVCNPRKNALLKAGNKSDTIDARKLAELLRAGLLSPVYHGQNSTAAVKQLGRSYAALTEDTTRIMARLKALYRSQAIACAGQKPYGARHREEWLAQLTESGLQRRARRLYLELDLLQQLRREARRDLIVECRKHRESKLLRTIPWLGPIRTALLFGRVQTPHRFRTKRQFWAYCGLALETRSSADYQMVNGQLERRKKPVFIRGLNLNHNHDLKNLFKSAATTASSRAGPFRPFYENLLGKGMKPELARLTLARKIAAITLHVWKKGEPFDAQYLKPQAA

SEQ ID NO: 102834 - protein, 340 aa, unidentified
MTTAPPLYRLWCGLDVAAKTFTATWTTDRTQYASPVTLPQTAEGVTALQQHLQASGIPAAETLIVLEATGSYWIGLAVLLHAAGFVLSVVNPKQAYYWAQSLPRRGKTDALDARMLTQYAWERQPRPWSPPPALYHELRQRLTAREALAGLRQQARNQAYALRQWPVVVAAALQAIEEVNAELDAQIADLDAAIAQVLREGAWAASAELMQTIIGIGPLTTAWVLVLTVNFRLCPTAAAAANYAGLIRLPHESGTSVRGRARLGHDGNARLRTALYRATVNAARFNPIIKRFYERLRAAGKAPKVARCAAARKLLLLIYAVVQNQRPFDRAYQQAGAVGR

SEQ ID NO: 102835 - protein, 376 aa, unidentified
MRVIAVFFGPCGPDVLTAHVSVFSHYFKRLDQFTKLATSSLYGGIDLHVNNSVVVLLNEQDQRIYHKRLPNDLATIVEQLAPHHADIEGLVVESTYNWYWLVDGLMDAGYRLHLANPAAIQQYSGLKYTDDHSDARWLAHLLRLGVLPEGYIYPKAQRPVRDLLRKRAHLVEQQTANVLSVQNIILRNTGARLSANRIKSVSQAEVDALLPDADQALAVSSALAVLHCLAEQIKTVETRVRTRIQSTPLYALLQTVDGIGPILAQTILLETGDIGRFPSVGDYVSYCRCVDSTKVSNGKRKGQGNVKNGNPYLAWAYAEAAHFAMRFNLKVQRYYQRKQAQTNVPVAHKTVAHQLARACYHMMRHQVPFDAAKALG

SEQ ID NO: 102836 - protein, 483 aa, unidentified
MKRKSIPSSRGPKTSRQSKCKKQAWKVVHPHAAGIDIGATEHYVAVPPDAVAAGESTVRSFGCFTQDLDALVEWLKACGVDTVAMESTGVYWIVPFQKLEAAGLEVVLVNAHTLKHVPGRKTDVQDCQWIQQLHTYGLLRASFRPDELTCRLRTLVRHRANTVSSGAEYILQMQKALTQMNVQLHHVVSHLTGETGLRILRAILNGQRDPLILVELRDPQITRSTKEEMRKALVGDWRPELLFVLKQSLRGWEFCQEQMRECDGQIEQLLKEMPSAVAAKTPAARPQPDPLASTNPRPKGKQSRKRNDPEKDLGPELARICGVDLTAAHGLRLLTVLTLVSEIGVDVSKWRSAKAFVSWLGLCPNNKISGGRILSSRTRKVINRAANAMRMAAVGVGDTDTWLGSFHRRMRAKLGPAAATTATARKIGTVVYHLLKHQEPFIDRDLMAYEAKVYRHKLARIKKQAAALGYALVKTDEEKQLTE

SEQ ID NO: 102837 - protein, 480 aa, unidentified
MNKSIFQRKNQDIVDLFESAEHPKKVACVAIDYAKGTHVALICDGEGKRLKAAFPVENNADGLAYITECVNRICKKRHISHNHVFFGGEACGTYALNFIHAIEQRGFLVISVDPKEAKDQRASFQASTDKLDLLGIAKVLLSMRGSSDSVSAESERQLRNVTRHRADLVVSKTAVSNRIHSIVDQLFPNFLDESKSGIPAFSETSLWLMEDRFSPRQIKSRKLSTTVQNARKHGLKQPDGCIKMLQEHVCSVLQPVPEWVGTLQTTLHHEVQLYRKLLLCIEQADKEVALHLACVPAAMMTTIKGIGITLAAGVGAEIGSPEKQPAIRRLTSYCGIIPRVKQTGGPDGEPRYGKVSRRCNHVLKNFIVQCGNHAGQHGPAELKEDHRRRGANGQHADFGMARRVLRISMRLMLDTQAYVPPALRERADKEELATYYLKAWERMRRIWQKSGALEVAFDSKNPLGKWRDCIQELYEIKLPL

SEQ ID NO: 102838 - protein, 327 aa, unidentified
MIEHYIGVDLHQAFFQACAVDATGARLWEERFPRSGGGIAALLARCDRRTALAVEASTPTWHFADALGDHVGDLRIVDPLKTKLKAGYAAKTDRLDARRLADALRRDSVVGIYYPPGAIRDLRELCRYRHALVQVRTALINRLRAVLLRQGVVDRRRLARTRCDAWLTLLALPPHAAASVAGLRALLVTVRAQVADAERAVLAAAAQDPIATALQAIPGIGPVLALLIRAEVGDVRRFPTPGHLASYAGLVPSVDNSARRIRYGRITRRGSPWLRWALVEAAIHGTRRTDRIGRWGRGLAVRKGAMKARIALARMLCADVVRHWPIG

SEQ ID NO: 102839 - protein, 427 aa, unidentified
MTSDQDSGGTSFVAIDIGKAFHAVLVEFPDRTHQRFRMANSAEDYGRLVAFLRTLPGTVQVALEPTGNFHRTLAFRLITEGISLVSVSSVAGARYREAMFNSRDKNDPKDATVILQLLKHGLVQHYHDPLFAGHHDLQELAKTYHQVTMARKRLADSLLNHYLPLYFPEMARYWESTRVEWFVAFLTRFPTPRAVQALSLPEFIEAAGPLIGRKVNKRAKLEELYGLAQSSIALPVAVDSPAIDTFRLQLTHFARLAELRRELEAQAHRLLKDRPDYQCLCSLPGVASVLAMVILAEGGDLRRFSHYRQFLKYCGLDLAKCQSGQFRGRETLSKRGNARLRMAFWMAAQRAVRMTENSFRDKYERYMKQDPGNADVRRKALTAVAAKMARVAYALVKRLEPYRGYHEHALPSGSIPLNRAVGALATP

SEQ ID NO: 102840 - protein, 307 aa, unidentified
MKTVGIDVSKSTLDICYLNNQSPQFSQCQNQETDIEQLVLALREFAPTKITLEATGGYEKPLYLALKAAQLPVVKANPRQVRDFAKACGILAKTDKLDAKVLAHYARVIQPQETDFLPPQALVELARHQEQTTQALATLKTQAHQATDPFVIADLAAQCEALKQRLSAIVVELKRRIALDPSIQSKQACLETVAGVGFKTSVVLLACLPELGCLGRGKIASLVGVAPKNRDSGAWRGKRCCWGGRSGVRRLLYMAVLSSVRHDERLKVFYERLRGVGKPAKVALVACIRKLLTILNAMVRDHLKATA

SEQ ID NO: 102841 - protein, 318 aa, unidentified
MKLYNNFIGIDIGKFSFVIALHGSKKISEYENTQSGIADFIRDHKENLAESLCILETTGGYEMELLTTLYNENFAVHRANTRKVKNFIRSFGNGAKTDALDAKALALYGFERQDRLELFKPQIKLMIELSELVSRRNDLKQILVAEKNRLKAPGNNFIKSSCKKLIETVSEEIKSITNMINEKIATDKVLQAKKEVIKEIPGIGDVVANELLTVLPELGNLNRRQIASLAGLAPRSNDSGTFSGYRFTGHGRDTVKPILFLAAMAARNSKSELKEFYEKLINKGKKKMVALVALMRKIIVIANAKLRDLMHSRAVIKI

SEQ ID NO: 102842 - protein, 366 aa, unidentified
MDTIYIGVDFHARQQTICYLKTETGELVTCELKHQDKEVVRAFYAQFCGQVIVGLEASGYSPWFERLLEQLGCEVWLGHATEIRRRARWRQKNDRRDAELILELMLHNEFPRLHRPAMQSREVLRMLRYRQKLIKIRTMSKNSLQAIALQAGLAKRSSLFTKDGQLQLARAEMSPVMHWQREHWLQLIEPLNQQLLETMGWFKAESKGDVCITRLRTHPGIGLLTSLCLVHTLQPVSRFRNTRKVAAYVGFDPIERSSAERKCFLGISKAGSRLLRYLLVEAAQTAVRKDEDLKRFYQRLAERRGRPKAKVAAARKLLIRAYIMLRDEIDYAEFRQRAVAARLARRGQGPSNVPEVLIGQPASPEQ

SEQ ID NO: 102843 - protein, 376 aa, unidentified
MKDTTKFIGLDVSKEKIAVAIADEGRDTPRYFGMIDNIPEDLRKLVMKLGDPSSLKVCYEAGSTGYGIYRLLTSIGVNCEVIAPALIPKRAGDRVKTDRRDALRLASLYRAGELTAVHVPSEEDEILRDLIRAREDAKEDLLRAKHRLTKFLLRRDIHPPHSIKRKWTIAYREWLYKLSFESSTLNLVFQEYYQQVTELEQRIQRLEKEIQRQAEEGFHAPIIQALQVLRGVSVLTATGLTAEICSFVRFNKAGQFMANAGLVPSESSSGPLRNQGEITKTGNKHVRKLLIESAWSYRYKPAVRGDLKKRQEGQPASITAISWKAQQRLHQKYNRLLARGKPSGKAITAIARELAGFVWAIAREVELEKIKETQAA

SEQ ID NO: 102844 - protein, 345 aa, unidentified
MPIVGGLDIHRKQLTFDYLDTVTGEIKRGQIAPADRQHLRAWLARFAGRGDVAFAMEGCTGWRYLAEELAAAGVAAHLAEPADTAAARGRKRHAKTDKTDSRHLRTLLAEGRLPECWIPPAHILEYRALLELYHDLRTEHTAWVQRIHAVFFHQGAPALGEGALRTEAGLAALRAAAAAHLSPAGQLQVATALDMLAAVETRMDMLRRQLRAAARQLTGARVLAERLYGVGPVTALALTCWLGGADRFSSSRKAVRFAGLDVTVWSSDRKGPPGRLSRQGPPVLRWAVYEAGKTHARAAAPDHAYYAQVKDRKNGKRAALSEARKIVRQACHILAELGDDALTAA

SEQ ID NO: 102845 - protein, 421 aa, unidentified
MKKRAYKATKVKALNLHNLNNQVKDKEIVFAIDVAKEKFMGSIMTADKQVIITIKWDHPTETSLLLDILVNKLSWHCLDVAMEPSGTYGDSIRFQFQERGIAVYRVSPKRTHDASEIYDGVPSSHDAKSCAIIGRLHLDGFSEEWCRQDESQRVLVATLTMMEIFDDAYGRNINRLEALVARYWPELPQYLKLRSASLLVLLATFGCPAAVAASAEEAGELMRKIGGSSLKEDKINGVIASADSTLGVTCLEAEQKLMRELAQEVRRLQKNRNQARTRIELMTQEIEEVQQMTPMMGKVTSAVLYVILGNMKMYDNAGSVVKALGLNLKEHSSGAHKGQLHITKRGSGSARFYIYMAVLRLIKGNKIIKAWHHAKVKRDGGIKMKSIAAIMRKIAAALWHVGQGSKFDASKLFDTSRLAIS

SEQ ID NO: 102846 - protein, 338 aa, unidentified
MKKFSGIDLHSNNSVVVVTDESDQMLYRQRLPNELSAIVAALEPHRADLVGVVVESTFNWYWLVDGLMAAGHSVHLANTSAIKKYEGLKYRGDVTDAAHLAQLLRLGVLPHSYICPPQLRAIRDLARRRMQLVRCRTTQVLSIENVLSRQTGHRLKSAEVKRLTSQAVGQLGFPADVNLSILANLAVMKALNEQIEVIEQRLWIWLKCRPEFTLLKSVPGIGVGLATAILLEIGDIKRFATAGDFSSYCRCVRSLWESNQKKKGEGNTKNGNAYLAWAFVEAAHLALRCCPEAKSFYERKKRQRNGAVATKALAHKLARACYHMLRQNRPFEVTRCFA

SEQ ID NO: 102847 - protein, 312 aa, unidentified
MIEQCFGGIDVSQDRLDVLLLPQGTGFSVANDEAGWSTLIGRLRGLPVAAIGLEPSGGYERGVLRALLAAGLSVRRINPNRLRQFARARGALAKNDRLDARLIAAYVATMPTHVVRHDPAAARIAEIVTVRRQLCDEHVAIENQAAQLEDAMLRRLAKRRLARIETDIRLLEKRLTETIAAEADLARRYARLTSMPGVGPVLAFTLIALLPELGRMSRKQIAALVGLAPYDFDSGKLRGHRSIYGGRMPVRNVLYMAALSACRYNPALKTFHNRLAAAGKKPKVILVAVMRKMITTLNAMLRDGAGWQPQAA

SEQ ID NO: 102848 - protein, 342 aa, unidentified
MNITTIGIDLAKNVIQVHGVERSGRAVLKKAFKRDQVLGYFAKLPPSLIGMEACGSAHYWARKLQALGHTVRLMAPQFVKPYVKTNKNDAADAEAICEAVSRPSMRFVPIKYPEQQALLAIHRARQGFVKARTAQANQIRGLLAEHGIIIPQGISHIATRLPEILEDGENELPGVFRQLIDRLGSHLKELDRQVHELETQIQVWHRANPDSKKLAQIPGIGPITASALVASIGNAQNFADGRQLAAWLGLVPRQHSSGGKQTLLGISKRGDSYLRTLLIHGARAVVRVAESKLNHAHSWLGGVMKRRNKNVAAVALANKNARIVWALLANDRNYQSDYGLVA

SEQ ID NO: 102849 - protein, 391 aa, unidentified
MEARVVNNLSPAAAHDGAARCLLAIELSKKSWVVAVNTPLSDKISLYKLKPCDWKELLQLIERIRKRVSEELKKPVEVISCYEAGYDGFWLHRLLEAHGVHNHVIDPASLQVDRRARRAKTDGIDVGKLLRSLMAYLRGEPKVWSVVRVPTVIEEDNRRLHRERSRLINERIQHVNRIKGLLAIHGIYDYEPMHPERMQRLERLRTPDRHTLPLHLKAEILRELQRLELVLGMIQTIETERDAIASAKSKSQQTTSAKKIKHLVKLKSIGPEFATVLVGEVFYRTFDNRKQVGSYVGLTPSPFQSGSTSRDQGISRAGNAKARTTMIELAWLWLRNQPDSPLSVWFRERVGNRKGRIKRIAIVAMARKLLIALWRYLETGVVPEGAVLKSK

SEQ ID NO: 102850 - protein, 338 aa, unidentified
MSNITTIGLDLAKNLFHVVCCDEHGKVVRKKMLKRSQVLAYFSNLPQCLVGMEACASAHHWARELGALGHQVKLIPPQYVKPYVRGNKNDYNDALAIAEAVTRPEMRFVSVKTPEQQDIQALHRLRERRLQERTALCNQLRGLLAEYGLILPKGVNILRRHLPELLEDAENGLSDLFRRLLAQSYQQLQALDSHIDHYTQEMKRQSQQDETCRRLQTIPGYGPIVAGVFHSVVGSGEAYRRGREVSASLGLVPRQHSGGGKEVLLSISKRGDRYLRSLLVHGARSVVIRAAKKDDRLSRWINKVKAERGFNKAVVALANKMARIGWAVLVNKTVYQIA

SEQ ID NO: 102851 - protein, 338 aa, unidentified
MNKFNHFVGIDISKKTFDAALIICSNTATVKHQAFKQDAAGFADFIDWLAYYKVADDEALICMEHTGLYSYGIIDALMAVNLNIWVEMPLRIKKSMGLQRGGDDKAAAIQIALYAYRYQDQVSLWKPEQAMVAELRQLSAQRDRLKLSFNQLTIPLQEMTDCSYDKTAVRMQIKLQAPVIKAIEKSIASIETKIDGLIAADPAVKATIARVSSIKGVGKQTAIHMFIYTKGFTTFSSGKQLASYCGVVPFTKSSGTSVRYKTQVSPFANKHLKKLLHLCAMAAIQHNEELKHYYNRKIEEGKNKMSVINAVRNKLVQRIFAVVRDGRNYVENYEYRRA

SEQ ID NO: 102852 - protein, 359 aa, unidentified
MQTQNETKVPDFTGQNIYVGIDTHFKTWMVSIYSDEFELKTFGQEPDVDRLENYLHQHYPNANLKLAYESGFCGFWIQRSFAKKGINCSVVHAADVPGSNKELIRKTDKVDSRKIAKGLKNNDLNYIFIPDERLESDRQLLRSRIKIVRDTTSVKNRIKAFLKFKGINIPDDYKSNKWSKKFICWLQNIKHNSISGKTAFESYIDELVFLLQKQTQLNKAIEVLAKSENYSGNIHLLKTVPAIGLLSAMTLLTELGDINRFQKQDHLYSYCGLTPDCHSSGDTERVGKVSRRGNIFIKTVLIECAWVAVRKDPALLLYYKQQLPKMDRNKAIIKVARKLLNRIRYVLKNKAEYQAGIVE

SEQ ID NO: 102853 - protein, 454 aa, unidentified
MTPKAVPSQFQAINRYAAGIEVGAEEHGVAVPADSEAQPVRRFGACTADLEALADWLRQCGITPVAMESTGVYWIPLFEWLEAHGLVVVRVDPREVQRAPGRPKSDVHDCQWLQRLHTYGLWAAACRPAEQVCVLRSYLRQRAMLVTYAGQHIQHRQKALTQMNLKLQHVVSDVTGVTGMAILKAILAGERDPHKLAQLRTRHCKHDAGEIARALQGNWRAEHLFALQQAVELYEFYHRQIAECDRQIEAHLQTFTDRSAGKVLAHRRRQRKRGANEPRFDARPPLFRVTGVDLTTIEGIDESTALVLISEIGTDLSRWPTEKHFAAWLGLCPHHKISGGKVLSRQVRPSANRAALALRLAACCLPHSHSAVGAFLRRLKARLGTPKASVATAHKLARLVYRLLKYGDDYVARGMEEYEQVYRERIVQTLGRKAKALGYRLLPTTDATLQEAVT

SEQ ID NO: 102854 - protein, 345 aa, unidentified
MGDRITYVGLDVHKEGIVVAVAEGGVRGEVREYGRIANTPTALRRLAGKLCHQGVGLRFCYEAGPCGYGIQRQLSQHGHECIVVAPSLIPKRTGDRVKTDRRDAASLARLHRAGELTAVWVPDPGHEAMRDLVRARLDAVRALRRARQQLSGFLLRQSCHYGRPAWTKLHRRWLAGLRFEQAVHHIVLEDYIQAVEAAQARRDRLTAQIAAMLPDWTLAPVVAALQTMRGMALVNAATLIAELGDLSRFANPRQLMAYLGLVPSEHSSGASIKRGSLTKAGNSAARRLLIEAAWTYRFPARVSRELRLRQEAQPRPIREIAWKAQLRLCARYRKLARGGKPANVA

SEQ ID NO: 102855 - protein, 468 aa, unidentified
MRSKRKPKRKQESYVQTQVSGGLPAIEQHAAGIDIGSQEHWVCAPLPDGSGREIANFGGKTPELIRMVDWLNQHQVKSVALESTGVYWIAPFEMLEAAKFEVRLVDTRKLASVPGRDQKSDPNDCQWIQRLHSCGLLAGAFRPAEEVCKLRTLIRDKLTLVEEASDWLRRMQKSLDQMNVRVHRAVSDLNGETGMAIVRAILKGEKDPQKLAKLRDRRCHKSEQEIAEELTGNWREDHIFSLRIAVKMYDEIQERIQECEQEILKYLEKMAKPDRKGQPVPPVKNPEKGKTMRKRGQEEMREALYRMSGVDLTDIDGIGVETIQVVLTEYGPDLSRFPTEKQFVKHATLAPHVPKSGGKPLKKKRKPGTASSRVAAALRMAASAVGKTETALGAYYRQISRRKDGKVAIFATARKLATIIYRYLRWGKPYVDIGAEEYEKQYQKRRIASFTAKAQALGYQLIPISVQD

SEQ ID NO: 102856 - protein, 334 aa, unidentified
MAKKYYIGLDVHKDQTTYAVKDWDGATVASGKTATQFADLQNVLGEYIGEAIVAMEACTSYYSLYKKMKEKEIDVHVANVLQLRKVIGKNDRLDSERLADMLRLKMMPESYIPEDKVQNLRVLINLYHNSVEENVRYQNQIHAVLDRNGNQIQCRDIFSKKGLIRIKQYLQMNNDFALRNLVAAFDYSEQRKENLKCEITAYLNINFKEEYELLKSIPGIGETIAGYLIAEICPLDRFVNKRKLRRYAGVVPISEKSDKKVYATYLPKHASRSLLRYALVLAANCAVRTSCRLQKYYQKKKKGGTHGQAIMCVASSMSDIVYNVLRSKKAYPRS

SEQ ID NO: 102857 - protein, 342 aa, unidentified
MHHAAIDLGSKESQICIRQPDGAIIEERKHPTRKLTELIKTWPTSRVVMEVSAEAFKIADAALAAGHQVRVVPGKLVRLLGVRDRGVKNDQRDARQLSQASWQTDVPSVHIPSAAARELKSICGARDVLVATQRNLSNNVRGWLRTQLWKPPGGTMVTLPERVRAHARAGGHELPEHIERQLTMLTQVTEQVQAANKQARRLAKEHPVCRRLMTVPGVGPLTSLRFVAAIDDPSRFPTAHRVQSYVGLTPGEHSSGGGGGKRGITKAGPSELRRCLVQAAWSVMLARRSHPMLEWVRQLAQRRSRPVAVVALARKLAGILFAIWRDGTTYEANHAARRSALT

SEQ ID NO: 102858 - protein, 356 aa, unidentified
MSQKLDTSPAVIGIDIGKNSFHIVGQNQRGAVVLRQKWSRGQVEARLANLPPCLIGMEACVGAHHLSRKLQALGHQARLMPAKYVRPYSRGQKNDYRDAEAIAEAVQRPTMKFVATKTVDQLDLQALHRVRERLVSQRTGIINQIRAFLLERGIAVRQGLRFLRLELPGILATRADVLSPRMMRVLEDLSGDWRRLDTRIEGLTSEIEALARQDQHCERLMTVPGVGPIISSAMVAAIGTGDVFSKGRDFGAWLGLVPKQISTGDRTILGSISKRGNRYLRVLFVQAAWMVLVKLGPEKWERYGLKSWIEAAKKRLHHNVLAIALANKLARIAWAVLNKGRAFACIKTDAMASCPA

SEQ ID NO: 102859 - protein, 296 aa, unidentified
MQNNIKYFIGIDMSKPFFDAAFMPVINHQKQAIQSAHFENSEIGLKSFQKWLKSHKVSFDKNTVLVIENTGIYHRLLWAFCNKINLQIHIGNAAHIKWSFGIARGENDKIDAIRLCKYACKELDELIMSKLLNSKLMQLKDLQTSRVRLLSQKNANQTYLKELNDINDKATQKALEQVYKTAIEGLEKSIIAIEKLIKELIKSDDTLQKSYDLLLSVPGIGNITAVYLIVCTNNFAGNISGKQLAYYAGVAPFGNSSGTSIKKPEKVHKMANKESHGRPREKNITHGSHVSDSLQP

SEQ ID NO: 102860 - protein, 323 aa, unidentified
MSTKATKKRRSFIGIDVSKKLLEVGVHQSDYHFRCPNDPKDFPALITELISLRPARILLEATGGLERALLQALHAVGLPVVVVNPRQVRDFAKALGLLAKTDRLDARVLAHFAAAIRPAIRPVKAQQETDLDALMGRRTQLSDMLAQEKNRRGSAATEDTRDDIEAHIEWLEERIQELDEKLKEQLKCSAVWQQKDKILQSVKGIGFVTSMSLLADCPELGQLNRHQIAKLVGVAPLNRDSGQQRGARHIWGGRAQIRCKLYMATLAAIRSNPVLKAFYQRLIDRNKLKKVAIVACMRKLLTIINVMVRENKFWDVKAQPVSA

SEQ ID NO: 102861 - protein, 366 aa, unidentified
MKKISTVQVFGNEILKEQKLTIGVDLGDRWSFYCVLDEAGKIILEQKVPTTPEAMKQTFSRIPQSRIALETGTHSPWVSRLLTELGHEVIVAHAQKVQLITKSNRKDDRHDARTLARLARIDPELLGPIRHRSVQAQIHLTVIRARAELVSARTALVNAARGLVKSYGQRLPKCGTQQVSRELAAALSTELRDVLEPLLKEIESLNERIKEYDARMEKIAKEVYPEVSLLKQVKGVGTQIALTYVLTIEDPHRFLKSREVGCFLGLKPGRRNSGESEPQKRISKEGDRYLRTMMVQGAHYILGPFGADSDLRRWGLKLAERGGKNAKKRAVVAVARKLAVLLHRLWVSGEVYEPLRNSQKAMRAVA

SEQ ID NO: 102862 - protein, 373 aa, unidentified
MAGKKFIGLDVHQDTIAIAVADDGVDSEVRYFGTIANRPEALHSALKKIGQGGSELRVCYESGPCGFIIYRLLAKLGVDCMVISPSSMPRRPGDRVKTDRRDAQTLARLLRAGELVAVWVPDEAHEAVRDVVRARRQAKDELGAAKSTLKSFLLRHGRRFNGKAIWGKAHWGWLSEQKFAFPHQQFVFEEYKRRIHDLIARCNRLDDVLKEAVSGWVLGPLVHALQALRGIKLTAAATLVAEIGDLHRFDSPKQLMAWLGLVPAEHSSGKRIRRGEITRSGNAAARTMLIESAWHYRFPAREGRSLIDRNAEIPEDIRAIAWKAQVRLCAKFRRLVASGKQTVKVVTAVARELAGFIWDIARQTPPVAVEPRR

SEQ ID NO: 102863 - protein, 384 aa, unidentified
MPQPAAVPHASYDRTLVLAIELSSKSWVLAAQVPGLAQVKAKRTIEPTKEALLEALASYRARAAAAGHQIERVVSIYEAGWSGFWLARWLITQGVQVHVVQPSSVLTDRRMRRAKSDGIDAELLLRTLLAWLRGEPRVCSMVPIPDQTDEDARRAVRERGELIAERVGLINRIGAVLATLGAGDYNPLLQSRRRRLNELRTGLGEPLPPHARAKIERLLARLELVLAHITELERERNAVAETAAPDHAARMIQQLAGLRGIGVQSATVLVREAFVRRFANGKALGAYAGLTATPYSSGGLEREQGIGKAGNRRLRSVMVELAWLWQRYQPGAAQVVWFRERVGKTGRRLRKVMVVALARKLLIALWRYVTDGVVPAGAAMKPAI

SEQ ID NO: 102864 - protein, 389 aa, unidentified
MKNTIVHHEGAASLEDAVGKVKLSGSIIKIGLDVHARLYVAVAQYDHLLPKPARRFAPMEFVPWVEQLLRVGHTVHVVYEACGFGFGLYRELKALGAHCYVIAPRKLDEHFTRVKTDPRDATTLCQRLSRYLDGNTRELAVIRVPTQEEEQDRHVSRQREQLLRLRQKLEAQGRSLLISQSLPSPAHWWKNQTWSRLRKLLPGWICIRLEVHRPPLLTLQKQIDALSAQLEAAAPADVPLGIGKLSTVVMTREICSWERFRNRRAISCYTGLCPGEHTSGTKRMPGSVTKHGNPHLRAALVECAWRMVRFQPNYPPVKKRLSVLAKGARATGAQRKKAIVAVARHLAVDLWRIHTGRCSAAQLGLSSAETSSCSRGTEKEARTASTIIT

SEQ ID NO: 102865 - protein, 345 aa, unidentified
MSNNIHFSCICGIDIAKKVMQVFKVTSDGVVTNTSVSRKDFLEHFRNIPPALIGMEACATSQHWGRELQGLGHTVKLLSPKAVKPYVKGLKNDRNDAEGIYRALIMGVREVSIKSTAVRDLSLLQTMRAKRQRDKVATINHIRGILAEYGLVMGKSVRAFLSNAGTLIARLKESETTSQLVISELEKLLKEVKEIVSRIEELESSIKKIASENKNYDLFRSAPGVGPITAAMMVVLLCNPTGFKNGRDFAAYLGLAPMSFGSGGRNQVTGIPSKYRCHNEARSLLVQCAHSITRLKYKSDWVASILSRKPKKVAIIAIANKLARQLWVMAKKGDKFEKRLVLAAV

SEQ ID NO: 102866 - protein, 393 aa, unidentified
MLRASAHALSKPLMASLPYHLRNDAGHSRASGLYSGFAQTTPQGRPTMTVITIAQNTPVLVAIDIAKARHEVLIAVPGKKRRRRLTVLNELADFARLIAALKDYGHPVRAAFEATGNYHRALAYHLATASFEVKPVSSVALARTREAPHNSWDKNDPKDAQVILHMMEIGNEQFYHDPLVCGTNDIQQLSKTHNIVSKSKTELWHRILTHYLPLYFPEADRFHCSSRSDGFFAFLERYPSPHFISAMSKDVFIANAWEVVGQKVAKERLLANIYETAKASVGLPVASGYDAIGIFRLVFGEGRSLIAQRNQTEDRAVALLKDLLDYQRLTSFPGIGPINVLTILAEAGDLRRFGHHRQFLKFCGMDLATIQSGTFRGQTKLSKYGNGRLRRTL

SEQ ID NO: 102867 - protein, 452 aa, unidentified
MSKRGQSKEKKPLRRVNPRAAGVDIGSATHWVAIDPSLSQQPVREFAAYTGDLQKLADWLLEHKIQTVAMEATGVYWIALFELLRERGLEVCLVDARATKQVAGRKSDISDCQWIQELHSYGLLKQAFVPEAQITTLRSYVRQRDRWVADAARAIQHMQQALELMNVKLTEVVSDITGTTGLAIIDSILAGERKAERLSELRDRRCSRSQEEIARALHGSWREEHLFALSQARDYYRYLGERIAACDKQIAAAMTACASPKAPSSEPPNGGKRDSGAHPFGFDAHGHCYQMAAVDLTAIAGVGANTVLTVLSETGTDMSSWRSERAFGSWLGLAPNPRKSGGRVLRSATKPGSQRAATAFRLAARSLSNSKSALGAFYRRLRARIGAPKAITATAYKIAKLFYRMLKTKQPYEEIGQAAYDERFRARRLRSLRRMATELGFSLVPTSADSGA

SEQ ID NO: 102868 - protein, 401 aa, unidentified
MYIGWDWAAEAHDITVMNDAGTAVDHWAPAHDEAGIEITLRRLATHGDPAELPVAIEATASLVIDRLLGAGHPVVPVHPNAFHVTRPRWGASKAKSDPGDSWKLADYLRTDGHRLRRLRPLDAATAELRALVRMRDDHVGAKVAATNQFRALLERHWPGAEAIFARLDSAIALDFLDDYPNPESASRLGEARMAMFCRRHSYCGRRSPAELLERLRAAPSATSVLGAEVVTELVGAQVRLLRALLGTIADLDRAIGAALLDHAKASLLAPLPRIGEINLAQVVAEVGPILDRAADVEHACAEAGAAPVTKASGKTTAVNFRWAVNTQARQALATFADNSRHSSPWAAQLYAQARARGKRHPHAIRILMRAWMRVMWVCWHSGTAYDPALHGGERRLVEKAA

SEQ ID NO: 102869 - protein, 330 aa, unidentified
MNYCGIDVSAQDLIVALRVADHDLGPESFPNNAAGHRRLLAWLRAHRAQVRVTLEATGAYSLDLALFLAAAERIELAVVNPKLIRRFAESLDERSKDDPLDARVLLEYCARMPFRCWQPPSPTLLAVREITRHMLATTEVRTATRNRLHAARSTRSTPACVRQELERSLRQSEASLARLQRQARSLLLQDSSLEAQFQLLLTVPGIGELSALQLLAEVGLLGQRSARQWVKHAGLDVRHYSSGASVRRLPHISKCGNRHLRRALFMPALVAARFDPSLRACYQQLLARGKSKRQALTALMRKLLHAIYGMFRHHQPYRGDLLCPAFALAA

SEQ ID NO: 102870 - protein, 413 aa, unidentified
MTEENFAWFAGIDWGSERHQACLVDAQGRIVGEREFPHGGKGLADLCDWLLSMCGAAETVAVGIEVPHGPVVDTLIDRGFVVHAINPKQLDRLRDRHSVAGAKDDRRDAYVVGDGVRTDRRLFRRVHVTDPRLVELRAWSRLAEELTEERVRLSNRVHHELWRYYPQMLKIADGDVAATWVLDLWDLAPTPARAHRLRAAPVEKLLKQHHIRRIDGDTVLRNLQEPAIKVGKGVAEAASVHLRSLFTRLRVVNRELRQADAKLDALCAAIGETDADSGEGLQRQDVMILRSMPGIGRINLATLLCEGSGPLSRRDYPALRTLCGAAPVTKRSGKSHIVIMRYASHVRLRNVVYHWARVATQHDPKSRERYAALRRRGKSHGRALRGVADRLLGLACVLLQRQTPFDPNFAQAK

SEQ ID NO: 102871 - protein, 379 aa, unidentified
MSDHSEAFVAFDASKLRNAVAIAQAGRSGEVRFLGEIDNTPAATAKLVRKLAGKYDRLAFCYEAGPTGYGLYRQITGLGQECVVVAPSLIPKKAGDRVKTNRRDALGLVKQFRAGELTAVWVPDPRHEAMRDLTRARGAAVADLRAKRQQISSFLLRLGLHYAGKKSWTKTHMNWLASQKLEHAEQRIAFEEMLLAVRQAQERIARLEEAIRVAVPDWSLAEVVEALIAMRGIDMVSATAFLAEIGDLSRFRTPRELMAYLGLVPSEHSTGDTVRRGPITKTGNRRARQTLVECAWSYRHPPRVGREKQHKVAASPPAVREIAWKAQHRLYARYRALTRRGKLKTIAVTALARELSGFIWAINREIATTHAAARPQGIQ

SEQ ID NO: 102872 - protein, 408 aa, unidentified
MNTLYVGIDVSSKSNVVYLMLPNGDKHSNFSVANSHEGSTLLVKKIYSALTSHSLDTVLIGLEATSVYGDNLVYFLREDATLAPFNRKIHVLNPKQVKKFHDTYNDLPKNDYVDSFVIADCLRFGRINKEVYMGDYRYKALQNLTRARFFAVQNLVKEKQRFMNVLFKKYSTMTQEKVFSDDFSTTALAVYDEFESAEALANMDLHELTDFIIEKGKNRFPDPDAVAKAIQKAARSSYRLPKTVNDSVNQVLSISITSMKALESQIKEFDKAIIALMELLPNVLISIPGIGPVYSAGIMAEIGDINRFDNQASLAKYAGLAWKQHQSGGFEAEVTRLIPSGNRFLKYYLCEAAFSLVRCDKKYSDFYHLKYKEVNRCQHKRALALTARKFVRLVFRLLKDNRLYCPAK

SEQ ID NO: 102873 - protein, 357 aa, unidentified
MKIVGCDLHARQQTIAMVDTQTGEFTEKTLSHEGDAVRAFYAALEGPVVVGIEATGSMQWFLELLEELGIQCRVGHPAEIRAKETRKQKHDRRDARLIWELLIEDRFPEIWMPSSKERDLRTLLRDRHQWVKMRARLQHTLQAIALNHALRQGHALWSAAGQRALEALPLPPYTRQRRDELLALYAQLQKRIQELDKEVEAQARQRPQARRLLTHPGVGPVTALATDVFLGDPSRFASGNQVASYIGMIPCEHTSGKRQRLGKMSKQGNALLRYLWTEAAMSTVRKDPELQRFYRRKLIPKGMGKARIATARKLGIRLWIMMRDQIDYEEFCRRGKLRQTGEAHAGMPDFNSGPAQQ

SEQ ID NO: 102874 - protein, 358 aa, unidentified
MVLQCGMDLHGKNVLCSLTDENDKVVEERRLPTKLGDVLGFLEPHRESIANIVVESTYNWYWLVDGLREEKYPVSLANPNAVKTYDGLKHGNDSGDARHLAHLSRLGVLPTGYIYPKEQRGLRDLLRRRMYLVQERTGLILSLQSLCERVNGGKVAAEKFKHMKPEELMEKIDDPNHRAGAVEYLEIVRRINQSIYRLETKVLTECKDTRQFELLNTIPGTGRILAMMISLESGPMGRFASAGNYASYARTVNADRFSDGKKKGENNRKCGNKYLAWALVQAAHHLIQHCDEARSFYDRKKAKKNGAVATKALACKLARCIYHMLTKEEAFDVKRIFGLRSPAAASMFWGWLITIRPD

SEQ ID NO: 102875 - protein, 359 aa, unidentified
MPILADTIDGVIGVDTHRDTLAAAALSPVGGVLAQTATSADATGYQQLLEFAGTQIPRDPARRCWAIEGAGSYGAGLTAFLHTHGERVVEVARPKRPARRTGAKTDAIDAIRAARETLGHQHQTLPRRRGDREALRVLLTTRRHATSSRVAAVNQLKALIVGAPEELRAELRGVVTKAQIDHCVGLRDRPARPLEHRMTVRALRTTARRIQALQAEIDELTAATDTLVAAIAPWLVELPGVGPITGAQILVSWSYAGRLRSEAAFAALAGTNPIPASSGQVTRHRLNRSGDRQLNASLHTIALTRLRYDPETRAYGARRTTQGKTRRDVKRCLKRSIARQLFKLLEHYDQPGVEIIRAA

SEQ ID NO: 102876 - protein, 343 aa, unidentified
MEHFAGLDVSVKLTSLCIVDDAGGIIREAKIESDPDALLQVLKSGAYQFKRIGLEAGPLSQWLFSALAEAGLPVICVETRHMRAALKAQINKTDRNDARGMAQMMRAGLYRPVHVKTVRSQKLRMLLTHRKLLQSKAIAIENDLRATLRNFGLKVGMAGAVKFEARIKELVENIPDLAILVEPLLIVRRTLREQFGIVHRRLLAVVRQDEVCRRLMTVPGVGPVVALTYRSTVDVPARFRNSKAVGAVFGLTPSKYQSGEIDRTGAISRCGDEMMRVMLYEAAQSMLYSRKWSWLKAWAMQIARRRGIKKAIVALARRLAVVMHRIWVDGTEFRWTRQEAAAA

SEQ ID NO: 102877 - protein, 369 aa, unidentified
MSSQLLNYSLGLDCSSDDFKVCFLNFDTEQTYKVKGSRKFDNRPGCFKELVDWTEKRRKDKSVPLRITMEVTGVYHERLAYYLHETGYEISIVAPNKAKHYLRSLGHKTKTDKMDALGLARMGAEQRLEKWQPSSKQMLKLKRMTRHRAALQKQITMTSNQLHALNRAAGDNQEVMDMKRALLDFLRQQVKQTDKQLEAILAQDEQVSQKVRAIAASLDGVGELTVMSLVAETDGFKHFSSEAQLTSYCGYDVVANQSGKTNGKTKISKQGNTHIRRALFMPAFNVVRYETGKFPALYERVHQRTKIKMKGYVAVQRKLLCLIYTLWKNDTVFEENYGEAQSQDVQQEQTADLNIGQCRAGAPLSGVAA

SEQ ID NO: 102878 - protein, 322 aa, unidentified
MAMLSFGGIDVSKDRLDITVLPDEQCSSVSNDAAGWAELIEQLRGSSITAIGVEASGGYERGVVRALLAAGMSVRQINPFKLRQFAKASGILAKNDRLDARMIASFVAIMPTRPAQRQTPMIEQLAAMVTVRRQLSDHKVATENASRLLEGAMLQRLSRRRVAGLTADIDLLDQRLVEIVTADPALAHRFWLLTSMPGVGAVLACTLIALLPELGQMSRKQVAALVGLAPYDFDSGKLKGRRCIWGGRARVRHVLYMAALSASNWNPALKAFHDRLAVTGKKPKVVIVAVMRKMITTLNAMLRDGTAWVDRYSGRRSAATAR

SEQ ID NO: 102879 - protein, 370 aa, unidentified
MKKNNIECPKQERKSRKQLSGKLTVGIDLGDRSSRYCILNQDGEVVQTGSVATTKKDLNRVFGALRHSRLALEVGTHSPWVSRHLKALGHEVIVANPRRTRLIAESSNKQDRLDAETLARLARVDPKLLFPIRHRGEEAQADLAVIRVRAALVEARTRAINTARGLTKSFGERLRKCDAHSVNEELAQDLPPVLKAVVAPLLEQARELSARIREHDEALRKIARERYPETALLTAVYGVGVLMALTFMLTLDDPHRFQRSRDVGAYLGMRPRRRQSSGSDPALGISKEGDVYLRRLLVQGAHVILGRHGADSDLRRFAQKLAARGGKGAKKKARVAVARKLAVLLHHLWVTGEVYEPVHRKPAQPVQTAA

SEQ ID NO: 102880 - protein, 343 aa, unidentified
MNEIKVLGIDLGKDVCSVVGLDAAGKVLLRRRMRRDSVLKLAAGMPACVMAMEACCGAHHLGRQFREQGHDVRLMSPEYVRPYVKAQKNDDRDAEAIAEAATRPTMRFVDLKSDEQLDMQSLHRARDRLVGERTNLINQLRAILLERGIMIAKGRRKLELRLEQLLAGEMAIGRRIRVLIEDMRAEWRALDARIATLDAEFAELARTDASMKLLTTIPGIGPLNATAFVASVGKAEAFGRGRDLAAWLGLVPRQMTTGGKPRLVGITKRGNGYLRRMLIHGARAALPALAKGKTPLGEWLRGLLSRAHTNKAVVALAAKMARIIWAVLRSRRPFEMAALPSVG

SEQ ID NO: 102881 - protein, 313 aa, unidentified
MEQTTPIATYVGLDVAKDRLDYTVDGLRCDHVPNTPIGHERLLAVLRPLGAVRVICEATGGYEHAIVAALLVAHMEVCVVNPGRVRAFAHAEGLLAKTDRLDAQLLRRFGQKVQPRLHAPMDQAAVTLRELLDYRRQVSDQLVAARNRLELAGPVLRTRLVAQIAFLEQEQTETDRLIQDHIDHDDTLRRKATRLRELKGAGPVLTATLLAYLPELGEIADPQLSALVGVAPFARDSGRSHRTRHVRGGRGVVRHVLYMAAIAATRYNPILRAFYSRLVAAGKPKMVALIAVMRKMLHVLNRLLADPHFVLAN

SEQ ID NO: 102882 - protein, 429 aa, unidentified
MTHPQSTPEAVVWVAIDIAKDRHEALIEAPGWKSRKKFRVQNTAGEFRAFAEFLHGLALPVWIGFEPTGNYHRALAYFLHTEGFHLELVSSVALARTREAMHNSWDKNDPKDAQVILHLLTGRITQHYHDPIVHELNDLQELSKTHHHISLEKTRTQHRLLTHYLPLYFPEIAQYHSCSRSEWLWNLLIEFPTPRSMNQLSREEFVRKAWNLVGRKVAKERILTDIYLTAQSSVGIPAEESSEAVAMLRFVLRQLLTLCQLRATIEKRADDLLSGNEDYQRLRRIPGIGPISALTILAEAGDLRRFSHHRQFLKFCGFDLATEQSGQFRGLSRLSKRGNARLRAVFWMAASVAVRMRENSFRAKFERYMRSDPGSADRKRKAYVAVAAKIARVTYALIRSGADYRCFHKVAVPSGRTRSAPAVEANLTS

SEQ ID NO: 102883 - protein, 370 aa, unidentified
MSVRRILAKTIDTDLEYEAIGIDLAKNCVSAALLTTDGEVVCIDRLDYSELEKSAQALSSTTFAMEPCTEMNYLVQKLEAWGHRCLVIGGKNVQNYVENHFSGQKTDLNDAQALAFLAQDTQLRTIKAKDVEQQKYASLTTLREQYIKQYRQTIVSLKGICQAWGLNISKGISGKARLKDLIENHSAFPEELKESLVDMVTHAQTAQKALNKITKTLEELAKSDKVCQLIQTIPGLGSICSCRLRATVGDIKRFKSPKDFPAYYGLVPRSIATGHNERKGKITHRGDRTMRSLMVQAAGSLVNMATKGKLKSKQLTKWILKKQKEKMPWGKLVCAVAAKLLRIVRAVLISNKPYNSKIAGVAKCSLPKGS

SEQ ID NO: 102884 - protein, 329 aa, unidentified
MYVRILNAAGGTLVHRNIRTDQTRFLALIAPYRDDLVVCVECIFTWYWIADVCAREHIAFVLGHALYMKAIHGGKAKNDKLDSHKIALLLKGGMLPQAYVYPNAMRATRDLLRRRLHLARQRAHLIAHIQNTVHQYNLPALGVRLGKPTERGEVAACFPDPVVRRMMQLDLDLIGYYDEQLAQLEWQLVKQARGQDAQMYHLLSSVRGIGKILTLVLLYEIQDIHRFPTCGQFLSYARLVRCPKESAGKIVGKSNKKIGNSYLRWAFGEAAVLFLKGNPAAQQWLEKQASRHGKGKALAILAKKLAQTVYAMLTKNRCFDEARFMAHLQ

SEQ ID NO: 102885 - protein, 315 aa, unidentified
MKKHSMICAGIDTGKRKLDVAIDGSAERLTVANTEAGHRKLSAWLRQHGVKRVGIEASGGYEQAVVAQLRCDGFVVKVFQPAQVRGYAQFHHRRAKNDKMDAALIAECTAALKTIHQPPDPRLAALPAQQTLIDQIVDQIARCKNYRESCQGAQRQFWDDEINRFRGLFRHHLKQLVAAIRCHRDLAQRLDLIASIDGIGLRTAVAILVRMPEIGSLSRERVAALAGLAPYDDDSGDRNGPRHIGGGRERLRNIIYAAALAASFQWNAELIALYRRLTATGKVHKVALVACARKLLVYANAVVARGTPWVSQAAA

SEQ ID NO: 102886 - protein, 348 aa, unidentified
MEQISRIGMDTSKHIFQLHGVSAAEKPVLRKKLRRKEMVRFFEELPPTQVAIEACGSSHHWARLLQSFGHEVKLIPPQFVKPYVKRNKNDAADAEALCEAMSRPTMRFVPVKTAEQQAALMLVGVRERLVRNRTQLSNVIRGYAAEFGVTASKGLSRIEQLPERVASDETLPALARDLFALHDKEYGQLQAQLEKIEARLMAWHRADACSQRLAQIPGIGPIGASMLVMKTPAPETFRSGRHFAAWLGLTPKDHSTAGKSRLGGITRAGDEALRSVLVVGSTSVLHHVRQRGGTSSPWLMELLKRKPPKLAAVALANKNARIAWKLMVSGERYRPIQPVTGFNSSQAA

SEQ ID NO: 102887 - protein, 416 aa, unidentified
MKSWQEITHYAGFDWAKDHHEVVIVDSQGKIVADFVFEHSLEGWQQMVKESSGFGNLAVAIETSRGAAVDQLLQRQYTVYPIHPVAAKSYRERKAPSGTKTDHLDAWGLADALRVDGHGWKALKPMDPMTEQLRLLCRDEVALIEQRTALVNQLQQALSEYYPAALQAFDDWTQPFTWDFALSFPTPQALVKAGKGRWEKFLHSHKLWRPETTQKRLKLFAEADQFKASDPIVLAKSQLVVSLARLLRTLAQQLELYGKQIESLFKNHPDHDLFGSLPGAKKVLAPRLLAAIGADPQRYGSHEVLQCIAGTAPVSYQSGRINKVRVRWSCDKFLRHTIHLWADCFRKVSAWGQTYYEQKRAEGMSHACVLRCLGQRLLKILFAMIKTRKPYDAQLHARNQTKYGSWVIELVNAPAA

SEQ ID NO: 102888 - protein, 440 aa, unidentified
MTTPSLPVLDPTAAAIDVGSEQLHVSVAGGPPKVFGTTTGQLHECRDWLKAQGARTVAMEATGVYWLCPYEVLEQGGLEVVVVNGKYVKNLPGRKTDMKDCQWQATLHAHGLLKPGFVPPEHIRRLQDYLRVRTDHITMAGSHEQHMQKALERMNLKIHDVISDLTGASGLKMIERILAGERRAGELLAVCDPQIQKKKAAALRAALEGTWKKEHLFALRQAYELWQSYQTKITECDQAIEGVLREMTGPEDPTQPAPPAATKRGGINTPQISGLHSMLWRLCGDKDLTALPGVADYVLLQLLGEVGTDLGKHWKSEKEFTAWMGLAPGSRQSGKRRGSQKRGRNRAGRLFCVIARSVGRSVDKALGGFYRRLKGRRGGLIANMALARKLAELFWRLMVRGVAYVEQGLKKYEMKVAETEQRLLQKLARKYGMVLQPKTA

SEQ ID NO: 102889 - protein, 326 aa, unidentified
MTKMNKFPSLFDDRTFIGIDVAKDNLAVFVDSTAQHSVCLNQIKELRQLAKQFKKLNPTLIVLEASGGYETSAAVVFAEFELPFAVVYPRRVRQFALGLGMLAKTDAIDAETIAYYGRVARIEPKPRQSDERLQLQALTSRRLQLIEMRIAEQNRLDTAHPKMQKNIEQHLDWLVNQIQAIETEINLRLSADETLQQTDGLLQSVPGVGQVLSATLLTELPELGVLSDKKISALVGVAPFARESGKWKGKRFCQGGRNSVRRVLYMATLSATRFNPVIKRFYDNLCERGKVKKVAIIACARKLLTILNAMVRNNSHWQPKLLPISA

SEQ ID NO: 102890 - protein, 390 aa, unidentified
MQVEADRPEAPSAIRNDLGAIFVSLELSRSVWLITSLSPGAGEKMSKHSVPAGNIGGLLTRLSEFKQKAIARTGRSFPVIVIQEAGLDGFWIHRVLQSEGIESHVVDPASIATSRRRRRAKTDRIDGEALLRALLAHKRGEPRVCAMVKAPTPEEEDRRRLCRERKALIAERVEHVNRIKGLLFCQGVSGYEPLRRDRRQRLGELKTGDGRGLPDHLKAQISRELDRLELLLEQIKAVEAERDALFAAAKASAPTPAPVTMLLEIKGIGPEFAAILWMEALFRSFANRRQIAAYAGLAPTPWQSGSVDREQGVSKAGNPRLRTTLIQLAWLWLRHQPQSALALWFKERVARSGGRFKKTTIVALARKLLVALWKYVTAGVVIEGAVMKSA

SEQ ID NO: 102891 - protein, 336 aa, unidentified
MGGEKEIMTTYAGLDVHKRKCHGVIMNEGGEVLRDEEFENTINGIELFFSEFEDAQVVIEACYSWRPTLERLEEVGLEVKLAHPYKVRAIAEAKIKTDSIDAKILADLLRADLIPESYVPPKQIRKLKDKVRLRAELGKERTRMKSKIRAELEKNRIIARGNPFTIKERENLRELGIYSTDHYLTILEIVEERIKLVEEDFREIAKKNEDARLLMTIPGVGPFSALLILAEIGDVYRFPSPEKLCSYAGLVPTVHQSGDTRRYGSIKKAGSKHLRWIMVECVWVHISNAESRLTEYYYRKKREKNDGKMAAIATARKMLTAIYFMLKRGEEYRPEG

SEQ ID NO: 102892 - protein, 356 aa, unidentified
MQLVYRRCCGMDVHKESVTACLLLIDDDGEFRAEKRVYGTMTRDLQELAGWLKSQGADRIAMEATGVYWKPVWNILEAAGGFELLLVNAQHVKNVPGRKTDQKDSEWLADLLQHGLLRGSFVPPLEIRQLRDLTRMRTRVRQDLAKYANRIQKVLEDANIKLGTVASDVLGVSGRHMLKALIAGQDDPKQLADLARGRLRARIEALELALEGHFTGHHGFQLKTLFELLEFGEAQFNKLGIEIQRLITKLNAHAPMQAVADETPGPEPEPEPLPLTPPLPLTPKSRLQTAVELLKTIPGVDELTASMLVAEIGANMDQFPGPHHLASWAGLCPGNNESAGKRRSGKIRKGSPWLVW

SEQ ID NO: 102893 - protein, 378 aa, unidentified
MSNCTRYLGLDVHAETISAAIAEGRGRIRSLGKFPNRPEAVRKLIEKLGSGKNLKVCYEAGPTGYALYWQLTKLGVDCEVIAPSLIPKKAGDKVKTDRRDAEKLAQSYQSGDLTPVWVPSPEHEALRDLVRQRAAAKTDESRAKHRLVKHLLRRGLREPEESGAWTHPWWRWVQSLKFEHEAQQVAFADCIAEVLHMGERLARLDKAIDRLVESAPAHMRAVIEALQALRGVAKLTAVTIVTEVGTFKRFRRPTEMMGYTGFVPSEYSSGGRESKGRLTRTGNAHLRHVLGEAAWHARHRPWLNLRMKKILPTLPAGVAEIAWKAQERLHRKFTKMTYCRKPAGKVAAAVARELVGFIWAIGTLVESRLDDNSKARAA

SEQ ID NO: 102894 - protein, 347 aa, unidentified
MRFIGLDVHRDCCEVAIAERGAVRSAGRVRTEPAALALFAHSLAVDDEVAVEATGNALGIARIIEPHVGRVVLANAKAVKGITRAGAKTDKIDARTLAKLLAGGFLPAVWLPDEQTRILRRRISARAQLVRQRTRAKNQVHATLIRNLKAKPPVSDLFGARGRRWLAEQDLPADELETVAACLRQIEFLDREIALIERTLAEQVLAAAEMRRLLTLPGVNFVTAAALIAAIGEVSRFPTARQLVSYLGLDPRVRQSGIEPARHGRISKQGPGETRHVLVEAAWHAARTPGPLRAFHERSPPAAAATSPPSPSRASWPSSPGTCSAAARTTPSPAPRSRARSCAGSSC

SEQ ID NO: 102895 - protein, 343 aa, unidentified
MQENACFIFWVGVDVSKDSFTAAFRSVARNESTRFPPGDRYAIDRNGVGEFLQWADGLSGGLGFGIAMESTGVYSRRLAALIRSVSPSRHVAVCNAASVSLYARSFTEQKSDRSDAELIARYACDRNPRAPRPKDATEERLRELVRERDRIVGLKTDMDNSGGALESADARRIHAAAAKALEKAIERLDTLIRETVASSKNLGEEVARMATAPGVGFLSAACIYAELGSMRNYTRRQISAMSGVCPVNRVSGTSLDRHAVSRRGSRLLRKILFLDSHQAIQRMPAMGEFHRRMLEKPNSSKMSAKCACMRKLLLILHAMVVNETDFRPDYKSEKIIKKTDETA

SEQ ID NO: 102896 - protein, 309 aa, unidentified
MTIASCFIGIDVSKGWLDCYIHPQARRYRLANDAKGHAALVELLERQGSFCVLEATGPYDRALRLHLHGAGQRFHRANPRKARQFARSAGFLAKTDRVDAMMLARYGAAMSLPDEEPCEPERQELRALMDRRDQLVEMRKSERIRLAEPHADWMKASLLQVIDMLDRQIAALQARMDALLASAHTLLQEEAILRSAPGIGPVTARVLLAHMPELGKRNRRAISALAGLAPIACDSGNLRGRRCIWGGRKRVRDALYMAALAACRSGPFQAIAKAMREKGKPAKLVLIAIARRLLVTLNAAIRDNKPVRT

SEQ ID NO: 102897 - protein, 355 aa, unidentified
MASITLLGIDLAKDVFQLHGLDELGRPQLKRTLRRRALVQFVAKLPACTIAMEACSSSHHFSRKFQQNGHEVKIISPQFVKPFVQGNKNDAADAEAICEAASRRNRRFVATKSVVQQDIQCLHRVRKRLVHNRTALTNEIRSIVGEFGIVFAKKRSALVEGIKGLLNGSCPREELSSEGLTLLQDLYSELLELEQRIENCELKLKKISSQPQCQRLFKVGGLGLLSVTALAVALADPGQFKNGRNFAAWLGLVPRHQGTGGKNRILGISKRGDMDLRTLLIHGARAKLRGINAKCRAERKLDPLEDWAYRLCQRQGYNKATVALANKNARIAWSISAHKTEFESHQAVASLKKGA

SEQ ID NO: 102898 - protein, 455 aa, unidentified
MAAPRLSGVRRRSAFVEWFNEGTLHMIVIGADTHKRNHTLVALDGMTGAVRGELAIAASDAGALEALRFATGLDEERVWAIEDCRHVSARLEAALLAAGERVIRVPAAMTDQARKVSRVAGKSDPIDARAVALVAVRDGVESFPQAFCDEHAMEIRLLCDYRDQLISERTRMICRLRWHLVTLAPELEAGLAQASLKGPRVCATLTRRLARLPRSPRLRVARALLRRITEIGKEERELLAELTSLIDAHAPQLLAQPGCGTVTAAIIIGRTAGAQRFPTDGHFARHAGTAPIPASSGNTQRHRLHRGGDRQLNRAIHIIAMSRARTDPATRAYLHRRTHRRQNQTRGHPLPQTPPHPPHLPPALHHPHPRRRPRIDRSPKPGNTDIHLTEEQPLGRSARECPVDRKAVSARAEFGVDGGEWPLYSGSARRFSVALVAPSQWLARVASSEVRASER

SEQ ID NO: 102899 - protein, 461 aa, unidentified
MTFSPCRSHGLGGGVTGSGGIDRPLIRGMTTGFFGGREALRNVDVAIGAVPRPGEYDRRLHVIDTSDIGAFLGLDVGKGEHHATAVTPTGKKAFDKRLPNSEPKLREVFGKLKAKHGTVLVVVDQPASIGALPIAVARDMGCAVAYLPGLTMRRIADLYPGEAKTDARDAFVIADAARSMPHTLRSIELEEETVAELEMVVGFDDDLAGEATRISNRLRGLLTQIHPHLERVVGPRIQHPAVLKLLDQFGSPAQIRKAGRRRLINLIRPKAPRMAERLIDDIFTALDEQTVVVPGTDAAALIVPSLAKSLQAVLDQRKLLAVRIEELLENHPLSKVLTSMPGIGVRTGARILIDVGDGTAFPSAAHLAAYAGLAPATRSSGSSIRGEQPSRRGNKQLKRAFFLSAFAALADPVSRAYYDKKIAQGKHHTQALLCLARRRADVLFAMLRDGTFYDPQPSPTG

SEQ ID NO: 102900 - protein, 446 aa, unidentified
MSDRSALSRGDRNRNARLARLRQLLPPQNAIVGIDLADDKQAAVVTDHDSRVIARRRVIARAWELGGLLEWAVGKAAAAGFASVTVACEPTGHRWRVLDQLAAERGLALVCVQPLLVYRAREGEDLTRDKSDPKDAVIIARLAAGLHCYEPERADAVWARLRHLGARRHQLTTAATAQVNQIRDLLECCWPAVLAASGSPFRSASWRAAVAVTLQRCAGDLGRVRRLGPSRFEAAVRRELPRWGAARPCLRIVRAVFAALADPAGVAAHRPGALERAGLALADWHDTRQRLAGTETRMVAVLDELGLTGLVTTIAGLTAVGAAAILAESGDPARFATPRSLVKHAGLCPRDNASGAFQGKTPISGRGRPGLRVAAWRAVWAAMPNNPVLAARFTHLTTREQNRLARQQARTACAAALLRWIHVVVTRRVAWDPAIAAGTTQLPRAA

SEQ ID NO: 102901 - protein, 377 aa, unidentified
MHSENIAAYIGLDVHKETLAVAIAAPERLGEVRYYGTINNEALAVRRLFQKLQGLYGNILSCYEAGPCGFGLYHQLTAMNIKCQVIAPSRIPKSPTDRIKNDHRDAISLARLLRAGELTPVWIPDLTHEAMRDLIRARAAAKRDSRVARQRILSMLLRTDKHYAGKHWTGKHRTWLANQSFSQPSQQIAFQHYCQSLEQIEDRILQLDQEISRLLPEWSLCNLVCQLQALKGVGQLIAITLVAELGDFSRFSNPKQLMAFLGLVPGEYSSGNSIRPRGITKVGNSELRRLLYEAAWSYRTPAKVGAWLIYYRPDSVTQYSKDIAWKAQQRLCSRYRSLTAKGKKSQVAITAVARELTGFMWDIALAAQSSFSQQKQN

SEQ ID NO: 102902 - protein, 413 aa, unidentified
MGYKVAGIDIHKKVLMVVVMLLQAGGLVEKIERRRFGTTTPELAQLAAWLQALSVQEAVMESTAQYWKPVWSALEGKIPTLHLAQAFSNRARRGRKDDFRDAERLLRRLVAGELVLSFVPDREQRNLRTMTRMQVHLTYDRGRLHNQVECLLEEMRIKLSSVLSDLFGVTGRGILGALAKGETDPQKLAALAGNRLKCTSKELLAALTGEVQPMHQRLLGLYLQRLQLIDDQIDELKHMIAEALAAHQEAVQRLAEVPGFGADSAQQIIAEVGPEAATFPSAGEMSSWVGTCPGKNESAAQNHSSRSAKGNRYARRLLTEAANAAVKTKGSHWQVVFRRLLPRLGYQQAVWAVAHRLCRLVWKILHDKVRYVEQGVNRDPKARANRARTLARALRQLGYKVELTSLTPAPAQI

SEQ ID NO: 102903 - protein, 360 aa, unidentified
MHATTVAVDLAKSVFQIAVADEHWRIVESQRLTRTQFERLFANRSVDLVVMEACGSAHHWARWLGGLGISVRLLPAQYVRAYVRRNKTDATDAAALLEAARAADIRPVRVKSVEQQALQGLHRIRSLWMGTRTSRINALRGFCREFGITIPQGARIGVETIGRVLADPRSAVPDLIRHTAGMLLEEIRLLEARIAQLERELASVARHSPACTLLLSVPGIGLLTATALVAATSGDVTHFQDARHFSSWFGLTPREYSSGSSRYLGRISKKGDRYLRMLLTHGARSVLRAAKVAEGAGKEVCGIRRWALEVQGRSNHNKATCALANKLARICYAALRDHAPFDEAARLTKKQSRQSFALPA

SEQ ID NO: 102904 - protein, 343 aa, unidentified
MKATTIGIDLAKNVFQAHGVGEHGKVALKKQLKRHQVAEFFANMPPCLIGMEACGSAHHWARKLQALGHTVKLMAPQFVKPYVKTNKNDAADAEAICEAVARPNMRFVPIKNVEQQAVLALHRARQGFVKARTAQGNQIRGLLAEYGLIIPKGIAHIAQRVPELIEDASNELPGVFRLLIQRLMDHLKELDRQARELEAQIVAWHRESELSSKLAAVPGIGPITASALVATVGDAKNFTNGRQLAAWMGLVPRQHSSGGKNVLLGMSKRGDTYLRTLLIHGARSVILRAGKKVGGWLPTLIARRNPNVAAVALANKNARIVWALLAHDREFRPDYKAAASFVG

SEQ ID NO: 102905 - protein, 361 aa, unidentified
MSLANWLVAGMIPGVDRQPLKKIVPNPEVLLQLLHRWRDEAIKAGKEITRIAVAYETGRDGFWLARWLRARGIDAHVIHATSVAVSREHRRAKTDRIDTAVLQRGFLGWLRGERGHCSMAYVPTVEEEDAKRPHRDRESLLKLRTSTVNRMKSILIQFGVRNFNPILRKAPENLASVRTPEGIPLPPNSVTALRRHMERFRVIKEQIKAIERTRLERLQRDPAEKLNAMVFLLVRIVGLGIETAEQLVHEILSRNLRDRKAVARYARLTGAPDESGSKRRDKGLSRSGNRRVRNILIQLSWRLLRFQPESDLVLWFKKRTANAQGSRKPMIVAFARKLIIALWRYVNTGLVPEGFQLRSAT

SEQ ID NO: 102906 - protein, 387 aa, unidentified
MSNVIMIGCDLHDETMLLKIANGLLAPETLSVKNTARGREGMIANLKRRAQAVGGARLVFAYEASGLGFGLYDQLTAAGIECYVLAPTRIAHSQRQRSQKTDEKDALELLELLRAHILAGNSLPKVWIPKAELRDDRELVRMRLDVGDKVTSLKTQIKSLLKRYHLYRPPALGKGWTKSFRVWLSRDLASPADPQKIPLGAGGRAALASLLRQLIFLEQECECLDQEIITLAWSPRYEKAMLEVTKLCGVGVLTGMVFLTELGDLSRFANRRQLAAYLGLVPSSYETGKSNDRKGHITHQGSSRVRKALCQATWSRVRYDPDEKAAYDRIKAKNPKHKKIAVVASMRRLSVRMWHCGQTATAAPEETRQDQAKPHTECGCAAGFSEV

SEQ ID NO: 102907 - protein, 434 aa, unidentified
MNDQNTTATPPLPPDYAAFVGLDWGDEKHALSLCAAGSTTVERATLEQTPEALADWANTLRTRFPNRKIAVALEQARGALLAGLSQYEHIVPFPVNPKSLARFREALYPSRSKDDPVDADLLLELLSKHRDHLRPWQPDTVQTRQLALLNEQRRHFVDHRTCLTNQLLSHLKAIFPQALKLVGEDLASRLATDFLKKWSALQAVKKVKPAQLRQFYYGHNSRSEELITQRLELVKSAMALTSDPALLAAHSLAIQTLAGQLAALRPFLEQYDQQIAELFAAHPDAPIFQSLPGAGAALAPRLLSSLGTDRNRFPEPVALSCYTGIAPVTEKSGKTQKWIHLRWSCPKFFRQSWHEFANASIRFSVWAALCYQEFRKKMDHHEAIRKLAYKWQRIVWRMWQQRQPYDEARYLATLQKKGNKLFTSVAVQPTKPGE

SEQ ID NO: 102908 - protein, 350 aa, unidentified
MTEAYDGRQVVGMDLHRRRSVLVRMTADGKRLETARITNGAAELRREIAKAGEHPQVVLEATYGWYWAADELAAAGAEVHLAHPLGVKAFTYRRVKNDEKDAADLADLLRMGRLAEAWIAPPEVRELRELTRYRIKLVRMRSSGKEQVHAVLAKLGIPVTCSDLFGAWGSAWLDGLRLPQPYAGKVASLRELTGWLTTEIGLLDAVIADLLGSYQPYHAVRALPGLGPVLAAVAVAEIGDISRFPSPGQLCSWAGLTPRHRESDLKVARGHLTKQGSPILRWAMVEAIQHQPADSPPRELKDRIIARRGAQARNIAKAAAARKLLTCVFYALRDGQVRSLATRSGAHQAG

SEQ ID NO: 102909 - protein, 350 aa, unidentified
MVTIGADLHKRSHTVVAVDDNGRRLAEKSVGATSAGHLELLAWARERFPERRWALEDCRHLSRRLERDLVTAGEAVVRVSPKLMAGARRSGREPGKSDPIDALAVARVALREPDLPIARLDGPEREVRLLLDHREDLVAERTRAQNRLRWHLHELTPGEEPVSRGLDRRVVLDALESRLSSMEGTVARIARDLVARIRALTADIGRLERELEVLVRPLAPTLLALEGCGVLTAAKLVGETAGIGRFRSSSAFARHNGSAPVPVWSANSGRHRLSRTGNRQLNVALHRIAITQMRLEGRGRDYIAKRRAAGDTQTEAIRALRRHISDEVYRRMRHDEATRAASQAPLAMAA

SEQ ID NO: 102910 - protein, 420 aa, unidentified
MKVVYQTCCGVDVHKSFLVATIIKTTSGVEPSYQKKRFSTFNNSILQFKNWLIENQCRDVCMESTGKYWVPVFNLLEDDINVTIANPKWVKAVKGNKDDTKDSKWIGDLFRLGLVPGSYIPCKPIRILREFTRYRYKLTSCRTSEKNRYQNALTVCNVALDSVVSDIFGKSATSVIDYLIERSDNSINHEEIASRLLRSLKKKSDSVIESIEGYQMTDSQKYRMRLVRTHLDYITSTINDIDTMLDSLIAPYENAVQLLCTIPGVDRNSAITVISEIGTDMTPFSNSKRLCCWAGLTPGNNESAGKKKSVRITRAGVYLKPALVQVAHAAVKSDKSPYYKQKYERIMKRRGKKRAIIAIARMILTAIYQMLSTGEAWNPTDLYKIDIPEPLKEKQKEKAIKQAKKLLIREGILSESQLAS

SEQ ID NO: 102911 - protein, 338 aa, unidentified
MTIQADQIVKESKLFSGIDVGAEELILVIRKNGISCKPLKFKNNRSGYALLVQKVVKSPGIIVCLEATGAYHFDLSIALHDAGVALMVVNPKASHNFSKVLMKNSKTDAVDAETLAQYAERMDFIAWTRPSNEKMALRCFARRIDALTHQKAISKNQVHALNVTQATPKAVLRDATLAISQLEKRIARLSQEALLLIRKHTDLERVFLLLIDIKGIAETSAIALMGELLLLPPGLSHREWVKFAGLDPRAFDSGKSVHKPARLSKTGNRHIRSALYMPALSAKQHDPHVKAFFQHLVDNGKKPLQAVCAVMRKLLHAIHGMLKYDKPFDNTRFYAIPA

SEQ ID NO: 102912 - protein, 350 aa, unidentified
MEPKVLIGVDPHKATNAVAVLDEHAQLLERTEFLADRKGLLALERWARRFPKRRWAVEGAHGLGRTLAHKLASSGEEVVDVPPKLSARVRVLSVGNGRKNDELDATFVALAAWRNGRLAQVRPDERIDVLRLLSERREDLVCERTRVLNRLHALLRDLIPGGVPGRLSESRASRILRSVRPRRGSRTYTESVRRQLASELLRDVRALNKRILNLNARIREEVEASGTTLTDIFGVGPILAAKIIALVGDTRRFPTKGHFASYAGVAPVEVSSGEVVRHRLSLAGNRRLNHALHMIALNQVRYEGKGGVYYRKKIAEGKTHREAMRCLKRRVSDAVFKRLTTDLEEVRTAV

SEQ ID NO: 102913 - protein, 376 aa, unidentified
MVTGVGSRHRPRRDRKPAAVSDVKPRMSLELRSLLPYPNSCPGTSPHQQGRDTKMPMLSYCGIDVSKDRLDVAVLPDGECFSVRNDAAGWAELVERLCSFSIAAIGIEASGGYERGVMRHLLAAGMPVRQVNPFRLRQFAKASGVLAKNDPIDARMIASFAAIMPTRPAQRHAPALERLTEILAIRRQLSAEKVAAENASRLLENAMLRRLSRRRIARLTADIDSLDKYLLEIVVSDAALGHRYELLTSMPGVGPLLACTLIALLPELGTMSRKQVAALVGVAPYAFESGTLKGKRCIWGGRAPVRHMLYMAAMSASNWNPALRAFHARLKGAGKLPKVAIVAVMRKMIIALNAMVRDDVAWADRHRGRHPMPTAR

SEQ ID NO: 102914 - protein, 454 aa, unidentified
MNENKISMEIVNSNAAGIDIGSRSHWVAVGQKEEDIKEFGVFNEDLKNLSNWLKERNIQTVAMESTGTYWQALYAILLADGFQVILCNGKFTKNIKGRKTDVQDCQWIQKLHSIGLLTGSFLPDETTEKLRTYCRDRANLLDSAASTSKKMQKYLRLLNLRLDVVVNDICGLTGLLIIHAICNGETDALKLAELRHGNCRKTEKEIAKALHTNGREDYLFALNQELEMYEVLQSKISQCDVEIEKILNTTIDEDNNKKEHYIEPKKHKKINKNTPKNIDLNLMAYQYFEGVDLLAIEGVSYSTVLSIMSEVGLEGIKKFPTAKHFASWLRLTPNNKISGGKILSNRIPKGSNRLKIALRNAANAIGNLKDSTPLSDFFKRINFRKGRVSAISATARKLAIIIWNMVVKNQSYVNPEGYLFLDEKRNLGLVKRIQKQITKFGLTNEDVSFVTSSL

SEQ ID NO: 102915 - protein, 352 aa, unidentified
MLYVGLDIHDTRIAICILGETGQIVRRAQVRTIDEMMRILEALPDRFEVCYEASCGYGHYHDLLSPIAARVTVAHPGRLRLIFRSKDKNDRKDAERLAKLLYLGEAPAVHVPSADVRTWRELITCRGRVIAKRTRAKNSIRTLLRCAGVVPPGRPALWTKKGLEWLRRLELPTTSQQLRRDLLLEEIEALTNQVRRIEHELNHQAGRSPAVARLRSIPGVGARTAEAVAAFIDDPHRFVDAKAVGRYFGLVPSQDQSGDRNRLGHITREGPAVVRQLVAEATWQALRRSPTVRAYFERVGRGDPQRKKIALVATAHYLVRVMWALLKRGTDWEEGLDPADEPKEVAQSIVNI

SEQ ID NO: 102916 - protein, 341 aa, unidentified
MTPKLSVVGIDLAKSIFHLVGLDERGKIILRKRLARGEVMPFMAQLPRVLVGMEACGGAHYWARQLRAQGHEVQLMAPQYVKPSVKTNKNDLRDAEAIAEAVTRPSMRFVPIKNVEQQDLQALHRVRERLMGARTALVNEIRGLLAEYGIVLPTGVNAFRHALAAKLEAEHAKLTPLSQELFGKLREEFKKVEAEVAYYDEKLQALATTHPESQRLLTIPGIGPITATALIAAVGDVGGFTNGRQFAAWLGLVPKQHSTGGQTRLLGISKRGDSYLRKLLIHGARATLRWARTKTDSRSQWIRGLLARRGWNRTAVAVANKNARIVWALLSRGGVYRESTN

SEQ ID NO: 102917 - protein, 403 aa, unidentified
MIFVGIDWAEAHHDVCVLDEVGVVQAKGRVPDGVEGVARLHAMVADHAEDAAEVLVGIETDRGLLVGALVAAGYRVYAVNPFAVSRYRDRHGTSGAKSDPGDAKVLANLVRTDRHNHREVAGDSELAEAVKVLARAHQSLIWTRQRQVSALRSALREFYPAALRALPELGTVEACSILGMAPTPERGRRLTLAKVRRSLAASGRTRNLDRRAAEILEALLAPQLEAPPILSEAYGSVVGSLVVVIDGLLHQIARLETELAERFERHPDAEILRSLPGLGLVLGARVLAEFGDDPARYADPKARKNYAGTSPITRASGKRMVVLARVAHNRRLADACYLWAFASLNASPGARRYYDARRTAGKTHHQALRALANRLVGIFHGCLQHRQLHREEVAWPTGLDAVA

SEQ ID NO: 102918 - protein, 368 aa, unidentified
MSEITTAFVGLDVHKESIAIAVAEPGRAAPRFIGTTRSVLAEVEKALSHLGSPADLLIVYEAGPCGYVLARQLAARGYRCEVVAPTMIPRKPGDRIKTDRRDALALAHFARAGDLTPVLIPQEPDEAIRDLSRAREDAVRARLTARQQLKAMLLRHGQRYTGKSSWTAAHERFLATVRFAHPAQNIAFVEYRMAVNEAHARPERLTTALREQVAEWRLQPVVAALMTLRGVDLVAGVTLIAELGDLRRFAHPKQLMAFLGLVPSECSTGESRSLGSITKAGNSHARRILIESAWTYRYPARIGRELQVRQEGQPRTVREIAWRAQLRLCQRYRRLSLRGVHQNKICIAIARELAGFMWDLARQVAPHA

SEQ ID NO: 102919 - protein, 346 aa, unidentified
MQSTTIAVDTAKLVFEVVVSDGHRVIGNHRLNRADFQAFIVHQPPSRFVMEACGGSHHWARLMLAHGHSVRLLPVPYVRAYRRRNKTDRADCMAMLEADRNPEILSVPVKRVDAQAIQGLHRARSAWMGCRTARINTLRGLLREFGVILPLGAHAALKQMATAIDDPAVPDLLKITLLELLAEVHDLDDKIARVERQLASVARQNPAVRLLQDIPGIGLLTSTALYASAGDAKHFRSGRHLASWLGLTPKEHSSGSRRHLGGISKRGDKYVRTLLIHGARTVLLGARRNENAGRPLSPLQQWALGVQARSNHNKAACAVANKLARIAWASWANGTCFDANYQAIAA

SEQ ID NO: 102920 - protein, 352 aa, unidentified
MSERYAPKRFIKPNQLSLIKKRYFMGIDVAKATFDFCLFSSNGSRLWKGHFSNNSTGIEEYLSQLQARPLKLKQIHFGLEATGVYGKALVGALHQAGLAVSVLNPAQVRFFALSVLRRTKNDSLDAEIIARFCLERKPPATRPLRSIEEQLKVLVHERDSRVAEQGRERNRAKQDPFQLELPKLVSRQRQKRLTQLKKEISQLNNAIFELIEADQSLGRQSQLLCSIPGIAQLTAAKLLAEFAGKEFASARQLAAYAGLSPAERRSGGTFYGQTHLSKIGNAFLRKALYMPAAVARRWCAALKPWVALLERRKLHDLAIRGAIMRKLLHIAFGVLKHQQPFNPALVFIPKTV

SEQ ID NO: 102921 - protein, 366 aa, unidentified
MSFAHADGTEVRPKRRCAFMKVLIGVDPHKTSLAVAAVDEATGELLERTSFPQDHAGLRSLERWAKRFPERSWAMENAGGLGRHLAGRLVAAGESVVDVPPKLSARVRVLSRGNARKNDGLDALATALAASRNGRLAAVDPEAASEVLSLLSERREDLVAERTRALNRLHGLLRVLVPGGVAGKLSARRAARILRGIRPRGGASDRLRRRLASEVLRDVRTLDRKIADLDGRIEAEVEASGTTLTQIFGVGAILAARIIGTVGNVARFPTKAHFASYAGTAPVEASSGDVVRHRLSLAGNRKLNYALHMVATSQARSDARGGEYYRKKVAEGKSRKEALRCLKRRVSDAVFKSLVADSQAPSRSAA

SEQ ID NO: 102922 - protein, 338 aa, unidentified
MQLYCGIDLHSNNSMISLIDDNDRLISEKRLDNNLDDIHHHLMPYQDDISGIVVESTYNWYWLVDGLMEKGYPVHLANTLAIQQYSGIKYTNDATDARFLAHLLRLNILPTGYIYPKAMRHVRDLLRRRLLLVQQRTAQMLSLQSMIARHTGKRLTAQIIKHLQADALTDYFAQAASLFAGRHAQQLLQHLTTQIEEIEEFVLDRCKQDKHYAQLTSVPGIGKILGMTILLETGPIERFPAVGHYSSYARCVPTNKISNGKTKGHGNAKNGNRYLALAFIEAAHYASIWDDTIKRYYQRKCKKVPLMVAKKTVANKLTRACYHMLKDGTLFDVKRAFG

SEQ ID NO: 102923 - protein, 460 aa, unidentified
MKKRTPNRRNKKLKMDGPMTRINPDAAGIDIGHREHWCAVPAGRSARPVQCFGTFTEDLEQLADWLESCGIKTVAMESTGVYWIAAFQILERRGFAVCLVNARHVKNVSGRKSDVLDCQWLQRLHSYGLLSASFRPADAMCVLRTYLRYRDELVGARSVQCQHLQKALQQMNVQLHQVLSDVTGVSGLRIIEAILNGERDPRQLAALADRRVRATRATIEKAMQGDYRAEHLFVLRCAFELHQTYERKIQQCDEQAVAEMKKLPTRPGQPLPARKAGRQPVRDLVAGTDLRQELHRWTGVDLTAIEGIGVLTAEVVLSEIGTDMSRWPSEKHFASWLGLCPDNRISGGKRLSSHTRHVLNPVADALRIAATTLQNSKTALGAFYRRMRGKLGGASAITATAHKLARIIYRLLKYGELYVRTGMEQYQQKYQERVLHNLRKTAQSLGFQLTPDKGPAPCVS

SEQ ID NO: 102924 - protein, 389 aa, unidentified
MFYVGIDVASEKHDCCILNEKKKIIQSFSFLNSPVGFQSLLSALSGIQPGEIKIGLEATGIYSENLSVFLRRKGFNVTTINPLLLKKHQCATTLRKTKTDKADAKGIALFIAEEGFQPDLPVSYHIQELKSLTRARFSFVQDRSALKNKVKRLVVLLFPELLEQFSDIFGASATALLKQYPSAEKLAACHTDALAALLRKSSRGRFGRAKAAYLKQLAKCSIGNHSPARVMELKMLLARIDLLSEQIKDYDKQIKIIMDELDSPVPTIPGIGYTLGATIIAEVGNISRFSSPAKLLAFAGLEPSIYQSGKFVPASGRMVKRGSPFLRWALLQAAGYVPNYSSTFALYREKKLSEGKSAAVARSHVAKKLVRTIHSLMTHSTAFSDQLTA

SEQ ID NO: 102925 - protein, 285 aa, unidentified
MMLIGVDYHPSFQTIAFFVEETGEYGEQELNHSDGQAERFYRDLKQRGICLRVGMEATGHSRWFERLLAELGFELWIGDPAEIKAKRVKKQKFDREDARLLLRLLRENNFPQIWVPDAENRDLRQLLWHRHRLVQMRTRIMNQLHALAMNEGYCWKKKLFSDQGRAQLEKLALAPWASRRRQELLELLDRLNPTIEELTAVVEREARKRPEAKRLMTHPGVGSLTALAYVLIIGTPTRFQRGKQIGTYVGMIPCEESSARKQRLGHISRVENLCAHAGLVARLTE

SEQ ID NO: 102926 - protein, 403 aa, unidentified
MFCLGIDVSKKSCRYLLLNHEGQKAKIFSLDNTHEAFQDLLKRLKDLSIPKEDLLIGLEASGGFWENLYSFLKDNGFRVVLLNPYHTNKFREALAKKAKTDDIDALVIAQLLRTGEYVQSQVAEELIQSLRELTKLRYELMTERKNFQRQVFSLLSIIFPELEKTALKNPFSVASMAILQRFPTAIDLAQAKPKQIEKIVRSIQGNNFNIEEIGKLIQTAQASIYSGRAKEARATSLRILLRHVETLSSSIEELEAQIKEILSPQEPQGSFPGENLLTIPGVGDKTLAAVLSYLGANGSSFSSSTKAVGYVGYFPKIFQSGQTHRDNTICKRGPKLLRWALYMAAVASLKHNPEMRTLYHRKLSQGKTEKQALICVGKKLLQIMLAMLKSGEPYNPAKVFVTC

SEQ ID NO: 102927 - protein, 453 aa, unidentified
MPSQPTVTNEVWSVVNPNAAGLDIGASEIWACVPADRDPNPVRSFGTFTPDLLALVAWLKACRITTVAMESTGVYWIPIFELLEEHGLQVYLVNARHIKNVPGRKSDVQDCQWIQRLHSYGLLSASFRPEAEMVVLRSYLRQRAMLIEHRAAHTRSEHMQKALQQMNVQLTQVLSDISGVTGLAIIRAIVAGERNPAKLAQLRHGRCQRSAADIAKALTGHYRPEHVFALKQALALYDAYTAQLAECDHQIEQQYSTFKPRYDPDDPDAPLGPDPKINSHSKNAPDFDVRRQLFRLTGIDLMRVDGLHVSSVQQLLAEIGTDMSKWPTDKHFSSWLGLAPHNDITGGKVVRSRTLKNHNRAGQVLRVAAQSVGRGKSALGAYFRRMRARLGVQQAIVATAHKLARIIYQMLKHRQPYQPLSAEAYTEQHRQHEINRLKRQAAQLGFTLQPQPS

SEQ ID NO: 102928 - protein, 401 aa, unidentified
MNEFSNNRSESEPLVSSRVLAKATTQGGEGHGAYIGLDVHKDSIAVAIANPGRSAARFEGEIKNEPKAVAKLVKRLSERYGGEVLLWCYEAGPCGYVLYRQLLALGQDCQVVAPSLIPKKAGERVKTDRRDALKLAQSLRSGDLTAVWVPGIEQEAMRDLTRARGDFKLQEKKAKQQLNAFVLRHGHRWHGKTRWTQAHYRWLETRRLEHDWQQVVLQEYIEAVKTAGQRVAEMRGHIELALPQWSLAPVVDSLVALRGIDVLAATVLLAELGDLSRFDSPKQLMCFLGLVPSEHSTGKRRRQGGITLTGNGYARRILVESAWCYRFPARRTAHLRRKAARASDEAKAISWRAQKRLCGRYQHLLRAGKNTKQTTVAIARELVGFVWDIARREMPSRPAAA

SEQ ID NO: 102929 - protein, 355 aa, unidentified
MDSKKYIGMDVHKESISIAVMNGAGKVGMECVIETKASMILQFVDGLRGDLHVTFEEGTSAAWLYDLLKPHVTRVVVCDPRKNASMKEGNKSDKIDARRLAELLRLDHLNPVYHGEHGLRSLKELVRSYLTITKDLGRVMSRVKAIYRSWAIPCTGKQVYAPRHRAEWLEKIGEPGVRRRAEFYYQQLDALRAVRQEVRRELLAESKKHPVWRRLCQIPSIGPIRAAVLLGILQTPHRFRTKRQLWTYSGFGIETHSSADHRSVDGQLRRAKKQISIRGLNRNCNHDLKNLFKGAAVVASSKPGPFQEFYTALLTKGIRPEMARLTLARKIAAIALIIWKRGVSFDAKHLKPQTA

SEQ ID NO: 102930 - protein, 402 aa, unidentified
MADDPMRYIGLDIHKEYFVAVGVNAKLEVIFGPQRVSNYQLDDWILRCLTPEDAVVLEMSTNTYQFYDALLPHVHSVMAVHSPNVAMVTNAQVKTDKKAALALAQLHAAGLLTGVWIPPYPVRDLRSLIARREKMVHLSTMAKNRLHSMLHRHHLVTPEKPFAYAQRTWWESLPLSANEQFLVRSDLDTLDFAQKQIEQIEERLKQESAEDARIPLLIQLPGVAMLTAITILAAIGDITRFPTAKKLVGYTGLGTHIHDSGMTHSSGRITKAGRKDLRCAMVNAANHAVEYHIHWKKELERLVPHLGRSKAIVAIARKLLVAVWHVLSEQVADRFANPRDVASSFLRYAYRVGVRNLPNEQPALAFTRDQLDRLGVGKDLKEIPWGSKRFKLPPSKILLEKE

SEQ ID NO: 102931 - protein, 482 aa, unidentified
MLNTTTFVGLDVHARSIKAVALDAMTGEVRSATFGYDAAAVAEWAGSLDPAAKCVYESGVTGFDLQKKLTALGVDCVVGAVSKMIEPSADRKRKNDRNDAEFLARMLSVGNVVEVWVPDDECEAARDLVRALDDAREDLKRCKQRLSKFLLRHGLVFSETNAKGQRKKNWTAAHWAWIRSIEFPEKADDDVLAYYIDATRQAMEDKKRLERLVEAEASKPRWKKRVDSLRCLKGVDTMTAADIVFEAGEFSRFKSARSFAAWLENHPLEHSSGESVRQGGITKAGNKHLRRVLVESAWHYLGCSPHSKDLAKGQAPDPGARRHAAKGVRRLVGRRAAMLERGVHKNKANVATARETRVLVLGDRLHGRERLGHRDDELNRQRVAHIPSCCLIRVRWGEPQTSFLRAPKAPPATKDCRIDRGSPSRSNGLPSAEMRHGRILNCEDERRRDTPRSPQGCRDRKGLTQKNLGQARLCLLTMSCSY

SEQ ID NO: 102932 - protein, 315 aa, unidentified
MSEVPCFVGIDVAKAQLDIALRPSGERWAVPNDPEWCMTLVERLQAVQPTLIVLEATGGLERAATAALATAGLPVVVVNPRQARDFARATGQLAKTDALDARALAHFADVIRPTPRPLPDTQTQELRALLGRRQQLIGMRTAEQNRLAGTNAYLAKDIEAHITWLNARLATLDDDLETLLRASPVWRENDDLLQSAPGIGPVCARTLLLELPELGTLTRQQIAALVGVAPLNCDSGTLRGRRRIWGGRAHVRTVLYMGTLVATRYNPRMKAFSIRLLAAGKVNKVALTAGMRKFLTILNAMLKHRTPWQSQEVQG

SEQ ID NO: 102933 - protein, 363 aa, unidentified
MKIMVGIDLHSNNALCGLMDESGRRLVHKKLPCDLPAILQLLAPYKDRIATIAVESTFNWYWLVDGLQDHGYHVALANPARMQPYSGMKYTDDVSDAYFLAELLRLNLLPTGHIHERKTRPVRDLLRRRLLLVRQRTMLILSFKSLNERTLGQRVSLARVKAMKVEEAQARFTAPADQLLSGTEITLMGQLTDAITKLEQHLLSVAGKWKTYQRLQELPGIGKILGLTIALETGDAQRFADAGNFASYCRCVKSLRTSNGRKKGENNRKCGNKYLAWAFVEAAHFACRYDDPCRRFYDRKKQQTNPIIATKSLACKLAKAAWHVMKADVPYDATRVFGPARKTDFGETGREPAKGSGHPSQLE

SEQ ID NO: 102934 - protein, 413 aa, unidentified
MSSPVKPRKGKSAEGDLREWAIKLVGGGRIRREPGNDVEVETQFTGKPAKPASLAGVDGERPICVLRHRPRREAKGPSIDPGQTRTAERAPSSHCKMETNQPDTANITYVGLDVSKDRLDYTVDGEACRHVPNTEEGLRKLAAELAKIRPPARVVCEATGGYERAAVAALLAANLEVCVVNPGRVRAFAHAEGQLAKTDQLDARLLKRFGEKVRPRLHAPMDQASVALRELLEYRRQVCDQLVAVRNRLELAGKTLRPLLETQIRFLEEQLAQAERLIRDHIDHDDNLRGKAERLRQLKGVGPVLAATLLAYVPELGQIEDKSLSCLIGVAPFARDSGKSEPKRRVRGGRATVRHVLYMAALAAIKHNRILGEFYRRLRDAGKPPTVALVAVMRKMLGVLNRLIADPNFALAC

SEQ ID NO: 102935 - protein, 339 aa, unidentified
MTEVSTIGLDLAKRVFQVHGVDKTGEVVIRRALRRSQVLTYFAKLAPCLVGMEACATAHYWAREIGKLGHRVKLIPPAYAKAYVRRNKNDPADAAAICEAVSRPSMRFVEIKTEAQQAAGGLHKVREMLMKQRTMLINALRGLMAEFGIVVAEGPQHIGELVAILADPEDRRIPAPLHEALTRMAEVLRGLEGQIEGIDKQIVTWGRGNETCRHLITAPGYGPILSSAMAAIVVNPAVFRSGRDFSASVGLVPRQDGTGGKVKLGPISKRGNGYLRRLLVNGAMSVLNSKRAKQDPWLVKLLQTKERKVAAVALANKMARIGWALMMRQEDFRAKPAAA

SEQ ID NO: 102936 - protein, 370 aa, unidentified
MSQSRTLFIGMDVHKDSIAVAYVAQDHGAEVTYLGARGTRQCDIDQLVRKMQSKAKHLLFVYEAGPCGYWLYRYLPRKGYDCWVVAPSLIPHKPGDRVNTDRRDARQLARLARSGDLTVVYVPKVEEEAIRALSRAREDAISDLKDAKFRLKAFLLRQDIRYVGRAHWGPAHLRWLSEVVCPTPAQQIVFQEYVRAVQEHTERLQRLEQELQEQVNAWRLHPVVEALQALRGVQCTVAVTMVAELGDLTRFDTPRELMQFLGLIPSAYSSGEQRRQGSIPNAGKTHARKAVVEGAWAYRYPAKVSRHLQLRLEKPPKMIQDLSWKAQVRLCTRYRRLVSRGKHATVVTVAMARELVGFMWAIATQVPLTA

SEQ ID NO: 102937 - protein, 454 aa, unidentified
MGRHRKKQTKIGFHEGLEQIREDAAGIDVGAEELWVDVGRKKDPEPVRRFETFTADLNAMAEWLVAKGIKTVAMESTGVYWIPTCQILEGRGIEVFLVNAAHAKNVSGRKSDMVDCQWLRTLHSYGLLPASFRPAAEIGVLRAYLRQRQMLIECAAGHIQHMQKALAQMNLQLAHVVSDITGVTALRIIRAILKGERDREKLAKLRDPRTRASAETIAKSLEGNYRAEHLFALRQSVGLLDYYQTQIQECDREIAAQLQTMESRVDPVKQPLKEARSRKKKTRNHPAFDCREQAYRISGVDLTQIDGISESAALTLISEIGVDMSRWETEKHFVSWLTLCPNNRISGGKILQRSTRKSASRARDTLLLCGQTLLRSNSALGAFCRRLCGRLGRPKGITATAHKLALLVYRMLKFGHDYVDIGQEQYEQKYKDRALKQLARRAKDFGFQLAPCPQ

SEQ ID NO: 102938 - protein, 400 aa, unidentified
MQCTDHPRHSWSTVHPYDRSLFVALELSKSIWLTAVSAPGSEKVSKYRVAAGDAAALWSLLARLKAQAERHRSGPVKIVSIYEAGLDGFWVHRLLEANGVESHVVDAASIAVDRRSRRAKTDRIDVEKLLHTLMGWARGERRICSMVRPPSPAEEDERRLTRERATLVTERVRHVNRIKGLLATQGVLSFEPIRQDRRKRLDDLCRWDGQPLPPRLKTELLRELDRLELVMLQLAKLEAERDKALQANQVMSEQVGKKPAAETTSIGETGAQLLRLRGIGPEFASVLSLEAFYRSFANRREVAAYSGLAPSPWKSGGIDVEQGISKAGNARLRKTVIQVAWLWLRHQPESDVSRWFHQRVGDRRGRIRRITIVAVARKLLVALWRYVTQGLVPTGAELKA

SEQ ID NO: 102939 - protein, 400 aa, unidentified
MLSIGIDVSKGKSTVCGMKPGGEIVYAPFEVQHTREGMLELVSLLRSSGEEVRAVLESTGSYHCPVVAALLENGIFVSVVNSLRMKRFCSQSIRKVKTDRIDAMQIALYGLAYWQELQPTKLPEDTYRELQLLARQYYQMTSLLIKAKVDFNAICDQVLPGMQELMSDHAGRHKLSDFVLQYHHTTHILEMGETRFRKDYCKWAEKKGYRNCERMAALIFATAQNGIPVLPNAPSTQIVITEAIRVLHTVEASRDAILTQMQALAKTLPEYSLVREMPCIGDTLAPRLIAEIGDVRRFHSKRALIAYAGIDAPPYQSGKFCANNRHISKRGNRYLRKTGYEVMQSYVMHKPANDPIFTFIEKKRGEGKSGKLAMVAGLNKFLRVYYGKVTELYRSLSAIE

SEQ ID NO: 102940 - protein, 348 aa, unidentified
MKIVGVDLHAKQQSIAMLDTETGELREKIIRHEGNAVREFYGSLEGSVIVGIEAIGCMQWFLELLEELGIQYRVGHPAKIRAAEPRKQKHDRRDARLILELLTANRFPDIWMPSTEQRDLRILLRDRHQWVKMRARLQHTLQSIALNHALRKGTSLWTAAGLETLQGLSLPPYTSERRNQLLRLYAQLQKRIQELDRQVEEQAQQRPQARRLLTHPGVGPLTALATEMFLGNPSRFLTAKQVASYIGMIPREYSSGQRQRLGNLTKQGNSLVRYLWTEAAMHAVRKDPELKRFYRRKLIQKGMGKARIAAARKLGIRLWIMLRDQIEYEEFCRRGKLRQNGGSPSGNA

SEQ ID NO: 102941 - protein, 401 aa, unidentified
MQDTQQRDAVDVFVGVDVGKGHHHAVALDRSGKRLYNKALPNDEAKLRALITELKTHGRLLFVVDQPSTIGALPVAVARAEGVLVAYLPGLAMRRIADLHAGEAKTDARDAAIIAEAARSMPHTLRSLRLADEQLAELTMLCGFDDDLAAQVTQTSNRIRGLLTQIHPALERVLGPRLDHPAVLDLLERYPSPAALAGTSEKTLANRLTKLAPRMGKGLAAEIVQALSEQAVTVPGTQAATIVMPRLAQQLAALRQQRDEVAAEVERLVLAHPLWPVLTSMPGVGVRTAARLLTEVAHKAFASAAHLAAYAGLAPVTRRSGSSIRGEHPSRRGNKVLKRALFLSAFAALRDPVSRAYYSRKIQQGKRHNQALIALARRRCDVLFAMLRDGTIYQPKSAPNA

SEQ ID NO: 102942 - protein, 392 aa, unidentified
MVYVGIDVAKDKHDCFITNSDGEVLFKSFTIPNNREGFESLFQRIKSVSEDLTKVKVGLEATGHYSYNLLGFLLDKGLTTFIINPLHTNLYRKSLSLRQTKTDKVDAHTIASMLMSDVNLKSYSDTSYHNEELKSLTRYRFDKVKERAKLKTSISRLVTILFPELEKLVPTLHMASVYALLSEFPSASDVASAHLTRLTHLLEEASKGHYSRDTAVLFRETARTSIGSHMPAKSLELKHTIHLIQELTSEIDEIEAAIRRIMDDEIHSPILTIPGINYRMGAMIIAEIGDFSRFDSPDKILAYAGLSPSTYQSGQLDGSYSHMEKRGSRYLRYALFNATKFVCNWDPVFSAYLSKKRAEGKHYNVAISHAAKKLVRVIYQLEISGQAYHKAA

SEQ ID NO: 102943 - protein, 406 aa, unidentified
MELTTLHKRVIGLDVHQAQITACALIEDEDGTRRAEHRQFGSFKRDRRALAQWASSLCPNVVVMESTGIYWKSPYAALEAAGLQVLVVNAKHVKNVPGRKTDIGDAQWLATLARAGLLRGSFIPPARLRELRLVSRQRQKLVSQLAAEKNRLHKTLTDGGIRLGVVVSDVHGVTARKMVKALIAGQGTAEVLALASKRLKASREELFDALQGELTPSHRFVLDTLMQHIEYLEACIARFDARLLEAMAEQRHALALLQTLPGVDLIGAAMLLVEIGTDMDAFGSPERLASWAGVCPGNNESAGKRKSGRARKGNPYVRRLLCEFAHSARRTACVFKTKFESLHIRRGHKRAIIAIAHKLLRTVFFMLKRGQYYRDSATDYEALTVKRNAPRWIKALTKFGFIANPV

SEQ ID NO: 102944 - protein, 423 aa, unidentified
MMKLKYSICCGLDVHKNVIVATIVTTNSQGISEYLQKSFSTINSDIQKFHNWLIENNCYHVCMESTGKYWIPIFNYLENDIEVCLTHPKYVKAIKGKKTDKKDSKWIADLYKFDLVRCSFIPPKDFRQLRELARYRFKLVCMKSSEKNRIQNCMTVSNIGIASILSDPFGKTATEIMSYLLEHTSESMDEKAVRKLIKKGAKAKSDEIIEAIKGYNIETDQAKKLELARAHLDYLDDMITQTEVELYVRIKPYYEFVEFVSSMPGMTELSSTIILAEIGINMDIFDDVKHLCSWCGLSPANNESAGKKKSVRIAKAGAYLKPMMVQCALAAIKNKKEPYFAIKYGRIKKRRGHKKAIIAIARMMMVCIYHMVSEKKPFSPTDYEELMDPQNHVERVVLNENNVFAYLESLGYDSSQLVKRNDY

SEQ ID NO: 102945 - protein, 345 aa, unidentified
MKHFAGLDVSLEETAICVVDETGTMVREARVSSEPEALVAFFRGLGLVVERIGLEACSLSAWLHESLVAASLPAVCIETRRAKAAMGAMPNKTDRNDARGLAQIIRTGWYRAVHVKSPTCRSWRALLTARRLVLNKMRDLENGLRALLREAGLKLGTPARKEFAARLRELTAADPVLSIMTEPLLTIIAAMTRELAQLTKRVLDIVRDESVCRRLMGVPGVGPLTALTFRATIDRPERFRRSRDVGAHLGLTPKRYQSGETDVQGGISRCGDELARTALYEAAHSLLIRSRKWSTLRAWGMQVAKRRGMARARIAVARKLAAILHRMWADGTEFRWGEADAAVAT

SEQ ID NO: 102946 - protein, 343 aa, unidentified
MDHFAGLDVSVKDTNVCIVDDTGRLVREVKVASEPAALLPVLTNPAYHFKRIGLEAGPLSQWLFSALAEAGLPVICVETRHMRAVLKAQINKTDRNDARGIAQMMRAGLYRPVHVKTLRSQKLRMLLTHRKLLQSKAIAVENDLRATLRNFGLKVGMVGTVKFEARIRELVENLSDLAVLVEPLLVVRRVLHEQIGVLHRRLLAVVRDDEVCRRLMTVPGVGPIVALTYRATVDVPARFKNSKAVGAVFGLTPSRYQSGVSDRTGGISRCGDEMMRMMLYEAAHSMLVRSTKWSWLKAWAMKIARQRGLKKAIVALARRLAVIMHRIWIDGSEFRWTREVVAA

SEQ ID NO: 102947 - protein, 399 aa, unidentified
MSVNSPLELRVGVDVGCHSHNVAIGLSTGQLLDEFDIPHNPEGFRLFFSRIEKQEKKHDCPVAVAMEGFNGYARPLDTLVRGRNYRLFNVNNLKLARFKEIFPAPAKTDHIDARKCLELFQLRDHLPLAKDALLEVAATPLENDILKRLTRRRRRLVNERSRVLNNMQGDLQAVCPGLLEITADASNLWFLRFLTSSDSLTKLARLQRATLLKITGIGVKYAALIQGWQKRAHFSHEAELVGEMIQEDACRILDLHDKIQALEAKLEDIASRSFIAQKIETIPGFGAISKSELAGEIGTIDRFQDEGSLALYLGMATLDNSSGKQKGTKAHKHVNTRAKAAMMIAVDRHRKFIPESQRYYEKKRAEGKKHNQAVRALGRHLCRVIFKMLKQEKDYEIRK

SEQ ID NO: 102948 - protein, 423 aa, unidentified
MKKHRDSATDIKRIDWPALVEQTQGQRLVLGVDAAKEEFFGVLMRTDLSVCATLKWQHPGQSRALSEHLAQDLGVERLEVVMEPSGTYGDALCAHLDDQGVAVVYRVSPKRVHDAAEVYDGVPSLHDAKAAYIIARLHLDGGSRPWERLGEVRRDRRALVEELDLYKDQHQRNLNRLEALLSRHWPEAGAILDLGRVSLLALLAEYGDPAHISAESEAVVREQLRHRGRGFLHKATVDPLLESAQDTLGVACTEAERHLIQVVASELLRSHQHINEIEQRIAREVQADATLTRMARITGKATSVVLEATLGSPLDYPNPGSYLKAMGLNLKERSSGKHKGQLKITKRGPSLARKYHYFVALRWLYKDPVIAGWYRNKVRRDGRLKGKAIVAIMRKLALALWHIARGEAFDSRKLFDTRSLGIA

SEQ ID NO: 102949 - protein, 340 aa, unidentified
MDATTYGLDVAKRVFQMYWVEVETGEIVNRRFGRDELIRFLAQRPPGRIALEACGSAHWWARKIKALGHEAVLLHARFIRPFVQTNKTDAADARAIWTAVQQPGMRTVAAKTEDQQAMLSLHRMRALLVKFRTMQVNQLRGLLYEFGATFRTGRAAGLAEIRARTAELEDALPGTMMCCLQDQLRRIEELQLDIDLLEKRIGVWQKQDAACHAITAIPGIGRLTATALVATMGDAKAFRSGREFAAFLGLVPRQSGTGGKVRLGPMSKRGDPYVRTLLIHGARSVMYNAKVPTPWQRDIQARRPANVAAVALASKIARTAWAILARGQEYQRDYVSARPA

SEQ ID NO: 102950 - protein, 353 aa, unidentified
MEIVSALDIHRSQITFKTLDLRSGEVRRGRVSPATREALGEWLEPFAGLDAHFALEGTTGWRFVVEEIERAGHRAHLADPAETAAKRGRKRRAKTDNADCDLQLKLLLAGELPESWIPPAHILELRTRVRMRKVLVDQRTAWQQRLQAQLFHQGIPSGLRLRTRAGREALARAELSPAGRQLVSLGLRMLEVIDLELVPLDRQLRAFARRQPGCRALIDQLYGVGPVSATAILAELGDCRRFARSNDAVRHSGMDVTVYQSDSKRAPGHLSHEGPELLRWALFEAAQCASRQASPDHAYYRQVAERIDHNRACLSVARKLCRRAYHILRELGEQALAPVEVAPTVKEVVRPAA

SEQ ID NO: 102951 - protein, 466 aa, unidentified
MRHNPKHQRVSKKDRPSVSLLERIQPDAAGIDCGQNSHFVAVPPDRDPQPVREFRTFTAELERLADWLAQSSIKTVAMESTGVFWIPLYEILEQRGFEVMLVNARDVHNVRGRKSDVMDCEWLRELHSVGLLRTSFRPAAAIVPLRSFMRQRATLVEEASTRIHRMQKALTQMNVMLHVVVTDITGQTGLRIVRGILAGERDPERLAAHRDPRCHASRAEIVAALTGNYRAEHLFALRQNFAAYEFLLRQIAECDGEIEALLTTLAAQQPPPSAPLPAPRKRGSKHQPQFEIRSPLHRLTGGADLSQIDSIGPHAALQLIAEIGTDMRRWPTEKHFASWLALAPNNKISGGRLLSSRTPPSANRAAAILRRCAMSLTRTSTALGAFYRRLAARAGKAKAITATARKLALLVYRVMSGQLVYTDPGATAYQQLHRTRELKSLRRRARLLGFQLIDQTTGEVLDATVS

SEQ ID NO: 102952 - protein, 332 aa, unidentified
MDLVSTLGIDLAKSTFALHGVNSNGEVVLRRTLSRAKLTELVAQLPPCLIGMEACSGAHEWARRFAASGHTVKLMAAKFVMPYRKSGKNDGNDAEAICEAVARPNMRFVPVKSLEQQSDLTLHRVRQGFVEERTATLNRLRGLLAEFGHVLPLRAVEVHRRVPQLLGKLPTRVASCARDLLEHAARLAAKTLEYEHEIRLHVRSNALACRTQTRMGIGPITASALVATIGNGRDFKNGRQFAAWLGLVPRQYSTGGKTRLGHITKRGDPYLRTLLVMGARAVLQRAPSLTDPLSQWALAVRERRGYHRACIAIAAKNARVAWALLAKEPAAA

SEQ ID NO: 102953 - protein, 344 aa, unidentified
MKKVLIGIDFSKEKFDVAIIVKSTSTQEHALFDNKVSGYRKMIKWVNSVVEDVPCSSWLFCGETTGGYSRMMSDWLYAQGYDVWIENALVIKRTFPLKRLKNDTVDAFMIAEYALRFEDRVQLYEPMSQALTELREIFLYRHHLVRHRCSFEVRRIEKRFTQQKSANKNVISQSARHIITEINKEIAKCDEKIKEYIESDDQLSSIFAIVTSMPGIGTINAVSLMVYTNNFTKFAYNPRKIACYYGIAPFGRDSGTSVHTDPRVGFIANKMLKSLLTQAALASVRTCPQIAKYYQRLIERGKKPMVALNNVKNKMIAIITAMVRTGCMYQPDNICLATQSVIVK

SEQ ID NO: 102954 - protein, 333 aa, unidentified
MGRFWVGIDVAKRKLDVALLDEVGKVKSKVLANDAAGFAALMTWLKERGADAASSHLCLESTGVYSEGCATFFADAGWTVSVVNPSLPKDFGRSELKRNKTDAIDAALLARYCSKMVPPAWQPPPLEYRKLRSLVERRQALQDMHQQEANRLEATVEAAARASITEHLGWLEARIAELEKDIDDHIDGNKETLGKDAALLSSIPGLGRTTAAKVLGLLGDLRRFDSGKALAAFIGVTPQRRESGDSVRGRSSISKAGHASVRHALFMPTLVATRHNPKIKAFRDRLVAAGKPKKSAILASMHKLVHLMYAVVCKGAEFNPRYGQLALDGQDGI

SEQ ID NO: 102955 - protein, 305 aa, unidentified
MITPTCFIGCDVGKKEIAVFHSNGGASYILPNQPEALARFVQTLDPGCLVLCEATGGYEAALLDALYSAGHACHRADARKVKAFIRSLGTLAKTDAIDARMLARYGQERHDRLARWKPWPAEQQKLHALVMARRDIVAAITAWNNRTKAPGAADIQPLIDPIVHSFRTQLKAIDGAIATLVRHSQIAARARTLLAIPGIGATTAYSLLALMPELGTLSRKQAASLAGLAPHPRQSGSKDAYRRVRGGRPAVRNAIFMAALAAVRSHPLIKPFYQRLIQNGKKPIVAITAVMRKLITFANAALKLS

SEQ ID NO: 102956 - protein, 347 aa, unidentified
MRFYTTQHPFYCGVDLHAKTMHVCIVNQAGETLVHRNLPTRPDHFLNAIGLYRRGLVVGVECMFAWYWLADLCTREKLDFVLGHALYMKAIHGGKTKNDKIDSHKIALLLRGGMMPMAYAYPHALRATRDLLRRRMQLMRVRSEAIAHIQNTVSQYNLPPLAKKLSFAANRQGVAERFPEESVRRSVQVDLSLIDHLDEQLQAVELYLVRHAKVDDPLTYQLLHTVPGIGKILALVLLYEIHDIRRFADVGNFASYCRLVRCAHESAGKKTVGKGKKIGNANLKWAFSEAACLMLRELPQAESLVARKEKKFGKAKALSILAAKIGRGVYWMLKRKEAFDVNRFFHH

SEQ ID NO: 102957 - protein, 391 aa, unidentified
MVCVGIDVAKDKHDCCILDSEGTTLVDCFTIPNNMDGFKSLLQTIQDCSQKSDKIKVGLEATGHYSYNILGFLLDNDLPVYVMNPLHTNLYRKSLSLRKTKTDRVDAKTIATMLLSDVDLKSYTDTAYHNEELKSLTRYRFDKVQERAKLKQSVSRLVTILFPELEQLVSSIHGTSIYALLSEYPGAKQISEAHLTRLANILVKTSRGHYRKDRATHIRDAARTSIGSVMPAKSLELKHTIKLIQELTSEINEIEDAIRKIMDELKPPILSIPGMGFYSAAMILAEVGDFSNFNSPDKVLAYAGCSPSTYQSGKLTNCYAHMEKRGSRYLRYALYTATKYVCYWNPVFTEYLTKKQAEGKHYNVALSHATKKLVRLIYALQKSGKAYLAVT

SEQ ID NO: 102958 - protein, 344 aa, unidentified
MEHYAGIDVSLEQSSVCVVDETGRIVRETKVPSEPEALVRFFGQLGVVVARIGLEAGPLSQWLHAGLTKAGFETVLLETRPVKAALSAMVVKTDRKDARGIAQLLRMGWFRPVHCKSPPAQEIRALLVGRKLLQGKLLDVELSIRGILRGFGLKVGVVSKGRFAPRIRELIGGQTMLERVIEPMLRAREALRAEYHALHRAVLGIVREDTTCRRLMTVPGVGALVAITFTSAVDEPGRFTRSRTVGAHFGLTPKKYQSGETDVTGGISKVGDAMVRSVLYEAANVMLTRASRFSSLKRWALEVAGRRGMKRAKVALARKLATILHRMWVDGTSFRFGKEVAAAA

SEQ ID NO: 102959 - protein, 406 aa, unidentified
MRYYIGVDWADAADAVWVEDEPATKILARSVPHTVEGFTEWGRWLDEQRALGVELWAAIEKPDGRVVDFLLDHGVVVFAINPKAVDRARDRFRASASKSDLFDARVLATFLRTDHHHLSPLRPSSEPAQELKGLTRDYARQVRQQTRLLNQLTATLKAYYPRALELSEDLTHEWVRAFLHDYPTPAALAALTERQWQRWARGRRLSAERIAALWDVLRAPQLPVPPHVVRVSARLVGAVLEQLDVTVRTVQAYREAITDFFARMPAATWATSLPGGRSGTTVPTLYAELGDAAGRWDSFRQLQAHAGSVPVTDRSGTYAAVFFRFACNQHLRQASHQFAANSLAHSEWAKAYYDRCRKRGHRHHHALRALAAKWLKILFVLWTRQVPYDETHHLATMARQHLRRAA

SEQ ID NO: 102960 - protein, 343 aa, unidentified
MQSISTIGLDIAKSVFQVHGVDAAGQVVDRRQLKRRHVLPFFAKLPPCLIGIEACASSHYWARELQAVGHTVRLIPPAYVKPYVKRQKNDAADAEAICEAVTRPNMRFVPIKTVGQQGCLVLHRTRHLLVRQQTATINSIRAHLAEFGIVAPVGRRGVEHLLGVIADADDTRVPEVARACIATLGVQLRQLKAQILELDRRILAWHRSSEASRRLNHIPGVGPLLATALAASIADPKAFQSGRDFSAWIGLVPKQNSSGGKDKLGNISKRGDRYLRSLFTAGALAVIRYAKIHGTKHRPWLVALLARRPTKVAAIALANKLARIAWALMTKGSRYRQPAELMV

SEQ ID NO: 102961 - protein, 375 aa, unidentified
MKEKLRFLGLDVHAETIAVAIAESDGEVRSLGTIPNRLESIRKLIKKLGPTEKLRACYEAGPTGYVLYWQLAELGVKCDVVAPTLVPVKAGDRVKTDRRDAEKLARSHRSGDLTAVWVPDEGSEALRDLVRTREAAKQDQLRARYRLSKFLLRSGQRPPTGIRPWTRPYLIWVAQLRFTQMAQEATRLDYLHEVEHMRERVERLERAITEAVKLASPALQQVINDLQALRGIADISAVTIAAELGQVSRFDGARQLMGYCGAVPSEDSSGKRTRRGSITKTGNAHLRRIVVEAAWSYHRPPCIWYGLRKRQESISEEVKEIAWKAQHRLHKRYMRLAAAGKDKRKITTAVARELLGFIWAIGTRAETTVRQRIAA

SEQ ID NO: 102962 - protein, 464 aa, unidentified
MAVLNIGVDLGVTAKHHAEVINSEGIKVCSSVIFPGTKEGFDMVSKHALEHAAEETKLRFICEPTSMSWFPLAVYAKRYGHEMMRVKAQKSHALRKYYSKHCKSDKLDARILAMMPIVDKESIEAVYLPDKVTNALDRRCRQREKIAKEIASIKTRIKSLYHWIMPGLTDCFEDPYGERAKSFYKKYTDPSRVKRLGISRLRKVLDKTGRQQPSELLAKQVYEAAVRGNELYDRSDEYIDFDELQKEVECELQLLESHEKVQKRVDEAINRLYKCVHPNKNLETIPGIGETLGPVFLGIIGNSDRFSSQSKARSYSGMVPKQNDSGESSKKGLNLTKDGPSRYRRALYLASDTARQWDPQLAKVYYDQMVYKGNCHTQAVCAVSTHMVGRIIRVLKDKRPYELRNLEGTLITKKEAKALITREFTVPEEVRKRTRSRRAKKGYKRDQNRGIAKMQSSGSAQYPS

SEQ ID NO: 102963 - protein, 349 aa, unidentified
MKKIVKQIVGIDVAQKELVVCLGRMTDEWSPGIYAHKAFANNTKGFNALESWVKKLVDPEVSVRFVMEATGVYHEPLAYWLSGRGYTISIVLPNKISNYFRTLEVKTITDQTASQAITFFGLERKLENWKQPDSVYKRLRQLVRERDQLVQERTMVKNQLHAEKSEAEPGGSSIIRMKKRIVLLDKQEMEIKEEIQAIVKKDKKTSDAVHIINTIPGIGLLTAVTVLAETNGFELIRNKRQLTSYAGLDVVQKQSGTSVQSKPRISKRGNKYLRKAMYLPALSAIRCDERFKGIFARVVAKNGIKMKAGVAVQRKLLEMTYTIFKTNQPYAKDYLKKEDEADKTRAVIN

SEQ ID NO: 102964 - protein, 345 aa, unidentified
MKKTIVGVDLAKKVIQVCVYTNKKVHSNTEMTPKEFTCWLVNSKPATIVFEACGTSNYWKQLASSHGHDARLISSRLVSAVRQNQKTDKNDALAIVQASLLPDVNFIQGKTAEQQQLQSIVRLRELSIRQKTASKNQLIALLSELNIQVSNRNGGLRSTIDETLEDADNGLSLPFRQAISTAWVQYSSLVEAIDIYDDCLEKSLSSQPECKKLLKIEGVGTLNAVNLYIALGCADIGAFSKGKAAAACIGLTPVQHSSGGRAKIGSIGRGFKNTLFRSQLITGAMSIVSKVANRPPRTKKEQWIKNLIERRGKKCAAVALANKNVRTAFALLTQGTEYKAEPLVS

SEQ ID NO: 102965 - protein, 328 aa, unidentified
MTGQVAFDVGARKHAYAAWVGGREEVGELDNTPEAIGRFVARQQARNGQLRVVMEATGIYYLDLAVQLVEAGAEVMVLNPKAAHHFARAMGQRSKTDALDARMLLAYLQRMDFVPWTPPTRCVLELRQLGRHLGRLAEQKVRLKNQLHALGSTQTSPRAVIEDVQEELAALERRIERLTAEAMGRVHGDPAIAERFEALDSITGVGPASALALLAELLVLPHTMNSRACVCHAGLDVRIHRSGSSVELAPRLSKHGNKYLRRALYMPAMAAIVHDPHARAFRDRLLARGKKKMQALAAVMRKLLTAAWTLVRNPATYDGSLLFPAQEG

SEQ ID NO: 102966 - protein, 351 aa, unidentified
MVVVGADVHKLSHTFVAVDDVGRKLGEKTVKATTAGHLQAIMWAREKFGIELIWGIEDCRNMSARLERDLLTADQKVVRVPTKLMAQIRASARTRGKSDPIDAIAVARAVLREPDLPIAAHDETSRELKLLTDHREVLVAQRTSTINRLRWRVHELAPERAPAPRSLNAAKHQQALRTWLDTQPGVVAEIARAELADIIRLTSEIDTLAKRLSTRVREVAPALLQIPGCAELTAAKIVGETAGVTRFKSPAAFACHAGVAPIPVWSGNTAGQMRLSRSGNRQLNSALHRIAVTQIRMTNSPGHAYCQRLQAANKTPRAARRCLKRRLAHTAFQALIADHHTRSRHPQTAAA

SEQ ID NO: 102967 - protein, 421 aa, unidentified
MSFGAFSAARRKGFKMPYRVAAIDVHKKVLVVVAEVREGEPEWTVRRFGTGAAELRRLAEWLEQEAVAEAVMESTAQYWKPVWLALEPQMRLHLAQAQSNRAPKGRKTDARDAERLWRRFVAGELMLSFVPDAGQRAWRMITRTRLSLVRERVQVRNQIESLLEEGGIKLAAVVSDLLGMSGRRILQALARGETDPETLAGLGEATLRCGRQALADALTGRMSPVHCALLAQHLERIALLDRQIEHLSRMAAEQMQPWEDALRRLVEVPGIGADAAQDILAEVGPTAAAFPTPGQMASWTGVCPGSQQSAGRNASGRSAKGNPNLRRVLTQAAHAAVRTKGSFFEHLFRRLVVRLGYAKALWAVAHKLCRIIWKILHEGVHYIERGDTLDPRTAQRRIQHHLRMLRKLGYPLPPNPSPAAQ

SEQ ID NO: 102968 - protein, 450 aa, unidentified
MAQGSGLTRGDRNRNRKIAGLREVVRPGRAVLAVDLGEDKQVAVVVDHDGRVLGRKVARAKAHQLGGLLGWAAGAAGKAGLDGLVVACEPTGHRWKALMGLADGAGHGFCCVQPLAVSRAREGDDYTRDKTDHRDAYLIGRLVIRLDCYLPERADEKWARLRHLAARRAGLARDVVACLQQAADLLGCAWPAPLSACKRPLESVTWLAGMTVITSRCCGDPRRVRKMGYEKFLAAVRRELPRWGGARAFHAIVRALWEALASEGGVAAQRPGALERLRLLLEDWRDLRGRLADAGERMTAALEDLGLAGLVASIPGVSVLTGALILAECGDPRRFASARALVKHAGLNPSERTSATINGQSRVSRRGRPGLRAAAWRAAWGAMPHNAVLAARHARLTGRDKRALADGQARTACAATLLRWIWAVTTTGRPWDAAIASGQATARPATAAAA

SEQ ID NO: 102969 - protein, 338 aa, unidentified
MEWTVAIGVDTHKEVHVAVALDRLGAQLDSREIPTTPAGYRRLLSWAQELGVPAFAIEGTGSYGAGLVRFLEQTGVAAYECERPRRQEHRRGKSDLIDAALAARRLLGDERLSLPRGGGRREDLRVLLLERRGAMQARTAALNQLSALVVTAPDQVRERLGGLSGERLARAAARLRPRPEVTNGVLRRLGQRVVRLSKEVAESERALGALLAEVAPDLLEECGVGPVCGAQLLVSSGDPSRMTSEASFAALAGTSPVDASSGKQRRHRLNRGGDRQLNWALHVVALARVRHHAETSAYYERLLAAGKTTREARRCVKRALARHFYRRLRETPRLPLTT

SEQ ID NO: 102970 - protein, 341 aa, unidentified
MEEYIGLDVSMKETAVSIRRAGERIWRGKCASDPSLIAELIRKRAPAVKRVVFETGPLSIWFYHSLRTEGLPAICIDARHAKAALDMATNKTDANDADGLAQLAEVGFFREVRVKGFDSMLTRTLVAARTRLVGITTELSNQIRGVMKTFGLLVPAGKGSTFEKNVRSLLADQDGLASIVLPMLEAWRGIRIRAAELGRQLVRDARQSQACRILMSIPGIGAITATAFTTAIERPDNFKKSRSVGAWIGLTTRRYQSGEVDYDGHISRRGDCHLRGLLYEAAAVILTRSSTDSTLRTWGLKLRERIGFKRAAVAVARKLAVIMHTMLKTGEFFNPNAGSTA

SEQ ID NO: 102971 - protein, 414 aa, unidentified
MEPQISFNQVVSRGCGIDVHQKVVVATIGGEGLTKATREFGTFTRSLTELKDWLLENGVTHVAMESTGIYWKPVYHVLEPTTLKVWIVNARHIKYVPGHKTDKQDSAWICKLLLAGLLKPSYIPAKEQRELRDLTRFRTKMIQDVASEKNRIVRILEDCNIKLSSVLSNTQGVVATKLIDKLCEEGTITMSDIEEVYHKRLEASKEDLYEACQGLIDKHHIYLLGLIRQDIASTEAVIKNLNGRIKEVLSGYDNVLENLKAIPGLSTKTVEDLVAEIGLDMSVFPTEKHLASWAGMCPGNNESAGKKKSGRTTHGNKQVKAVITEAAWAATRTKNTFCSARYHRVAARRGKKRALIAVGHSILKSVYHVINGMEGYKELGADYVTQRVEKRRKLYLKKELEKLGYAVQLIQPVP

SEQ ID NO: 102972 - protein, 410 aa, unidentified
MEILYPHCAGLDVHKDTVVACARHMAEGKVRTQVKTFKTTTEQLIALSDWLSSAGCTHIAMEATGVYWKPVWHILSDGEFELILANAAHVKNVPGRKTDANDAVWLADLMAHGLIRPSLVPDEPTQQMRDLLRTRKQMTRDRASHIQRLQKTLEDANIKLDSVVTDILGLSGRRILEALIDGQTVPQALASLAHRRIHASSDELEAALQGRVTRHHRFLLKLHLDQIDAIDAAIARIDQEVSANVEPFRAAIEQLIAIPGISPLAAQVLVAEIGIDMSRFKTAAHLISWAGLCPKNDESAGKRRSNRMKKGAPWLKTTLVQSAWAAARTKESYFQAQYHRLRSRRGSKKAVCAVAASLLTTAYHMLKNGSTYRDLGPHHFDQPDKQKQANRLLKRLQNLGYTVQIQPIAA

SEQ ID NO: 102973 - protein, 364 aa, unidentified
MKRKVYVGMDVHKETIRIANLTSNTKEIVKEQQIKHNEVQIKKFVNKLKSEWNEIHSCYEAGVTGYPLYRYLKSLGVNCILVAPGKIPRQSSDKIKTDKRDAIKLAKLLRSGELESIHVPSEEDEAVRDYLRSRDSLRLDLGRNRQRLMKFLLRKGITYSKTKYWTVSHNKWLNTLQFNNEILQETFNDYYSRVRVQEENLKAMDKRIQEIAESEPYREKVGILRCFRGVDYLTAMFLLCEVCDFKRFKTAGSFMSFLGLVPGEYSSGSKRKQTGITKTGSPRLRRILTEAAWQHRFPGTGSKIVTARRSGQPALVVALAEKASLRLHKKFRNLQQRGKTPQVIITAVSRELSGFLWAAMNLVA

SEQ ID NO: 102974 - protein, 364 aa, unidentified
MDEFTHIGLDVHKDTIAVAVLRPGASECDERVIPNTPEAVRKLLARFPDQAALRTCYEAGPTGYDTHRLITSQGIACEVIAPSLIPRRSGVRVKTDRSDARNLARLHRAGELTAVRVPTPAEEALRDLVRAREDLKNDRRIARQRIRSFLLRYGKRYPSPGARWSFRFEVWMRALRFDEPASQAAFDHLVSAYSVRDAQLAAIDKQIEEAASVDLLAGAVARLRAFRGIDTLTAVTLLTETCDFQRFATAGSFMAFTGLVPAEHSSGASRHQGSITKSGNAHVRRVLVEAAWAYRHRPAVRGAHAKRLEGQPPDVAAYSWAAQCRLNSTYRKLAARKGPNKAVVAVARELSGFVWGAMTERMAV

SEQ ID NO: 102975 - protein, 430 aa, unidentified
MKKRIYRKIPVNQFRPDAVFAADLGGRLVVAIDVAKVNMVAALATTTAQVAAIISWKAPFENAAVLGILRAFREQGLLVEAVMESSGTYGDVLRAQLEQDGFPVFRVSGKRTYDAQEVYDGVPSLHDAKSASIIAKLHVDGCSKLIVSEPPERRQLRAAVAIMDLHQERYLQLVHRLESWLARHWPELPSIIELTSSSLMALLARVGGPADVAAHPELAASVLHGISHGLIDRETIDTVIASAKSSLGIPLVGLERDALVAIATEAYHAHRAFASGKTAVDRLACQTPAAPLAPVIGHSTAAVIFTDVGDLRTYSCTRALLKAMGLNLKEKSSGFFQGQLKITKRGPSRVRQYLWLAAFRWIQTDPIARAWYTRKKQRDGGRASRAAVALMRKLVKALFHVARGEAFDSTKLFDVSRLSPTAPSSSTSAA

SEQ ID NO: 102976 - protein, 357 aa, unidentified
MYGLKHQKEKRSMDHFAGLDVSVKEISVCIVDDTGKIVREVKVASEPAALLAVLKNPAYRFKRIGLEAGPLSQWLFSALAEVGLPVICVETRHMRAALKAQINKTDRNDARGIAQMMRVGLYRPVHVKTLRSQKLRMLLTHRKLLQSKAIAIDNDLRGTLRNFGLKVGMVGTVRFEARIRELVENLPDLAALVEPLLVVRRTLREQFCILHRRLLAIVRDDEVCRRLMTAPGVGPVVSLTYRATVDVPARFRKSKSVGAVFGLTCAKYQSGEVDWSGRISRCGDDMMRVMLYEAAQSMMRSKKWSWLKAWAMQVARRCGMKKAIVALARRLAVIMHRMWVDGTEFRWTRDHAAAAAA

SEQ ID NO: 102977 - protein, 343 aa, unidentified
MQSISTIGLDIAKSVFQVHGVDAAGQVVDRRQLKRRHVLPFFAKLPPCLIGIEACASSHYWARELQAVGHTVRLIPPAYVKPYVKRQKNDAADAEAICEAVTRPNMRFVPIKTVEQQGCLVLHRTRHLLVRQQTATINSIRAHLAEFGIVAPVGRRGVEHLLGVIADADDTRVPEVARACIATLGVQLRQLKAQILELDRRILAWHRSSEASRRLNHIPVVGPLLATALAASIADPKAFQSGRDFSAWIGLVPKQNSSGGKDKLGNISKRGDRYLRSLFTAGALAVIRYAKIHGTKHRPWLVALLARRPTKVAAIALANKLARIAWALMTKGSRYRQPAALMV

SEQ ID NO: 102978 - protein, 408 aa, unidentified
MSQVIIGMDPHKRSATIEVMTSDETVVGGGRYGTDVAGYRAMLAEARQWPERTWAIEGCQGIGRHIANRLLAAGEHVVDVPPKLSARTRVFATGQGRKTDATDAHSVALAATRMTGLRQVVDDPQLAVLRILADRRRSLGEDHTRMVSQLHRLLLELIPGGAKKDLSAAQAKALLARVRPRDAAGKARRRVAAELISDLERSCQRKKEANKELNALLAATGTTLTDLHGIGPSGAARLLVEVGEVTRFPTKAHFASWDGTAPIDASSGDQVRHRLSRAGNRQINRVLHIMAVVQLRNPTEGRAYYDRKVAAGKTPREAMRALKRRLSDIVYHQMITDARRAATGPGGHLGAATGSSAAGFNPVAGTSEKSLPGPATNDPTPGKPAHSPGRSRHSPSAPDRRRRQAQSA

SEQ ID NO: 102979 - protein, 377 aa, unidentified
MKRILKIGMDVHSTNYTLCAMEPVFGADDRIYATIQVSPDYKNILMFIEKVKQKLDPYDTYDIECGYEAGCLGYSLYNQLTSAGVKCVILAPTTMLTQQGKRIKTDTRDAVMIAQCLSYGGYHPVYVPTEEDDSVKEYLRMRDDHVIALKRLKQQINAFCLRRGYHYQDSDWTQAHLKWLREIKLSPLYQETLDEYMATYYELTAKVDKYDARIKEIAAQAKYADKVNKLSCFIGIKAHTALSLIVETGDFCRFAKGSTYAAYLGLVPGEHSSSDKINRLRITKAGNSHLRMLLIEASVGICRGRIGYKSKELRKRQQGNSIQVISYADMANTRMRSKYYRLIRHGKKRNVAVTAIARELACFIWGMMTDNIEGKAA

SEQ ID NO: 102980 - protein, 351 aa, unidentified
MTTMTSARPLVTGGVDTHRDIHVAAALDQLGGVLGTAQFPTTKAGYRSALAWLAGFGQVVAVGVEGTGSYGAALARHLADAGIEVIEVGRPNRQVRRRHGKTDVVDAIAAARAVQSGDATATPKTHDGPVEALRALKVVQRSASKARTQALNQLRALVLTAPDELRAKLRDLPRRQLLATCAGFRVRADDDSLSAVLRLSMRELAQRVAYLDAQVTTVTTRMRAITTDLAPALVATKGVGPDTAATLLITAGDNPDRLRHEKSFAALAGVSPIPVNSGQIQDRFRLNRGGDRHANSALWRIAIVRLATDPDTRAYVERRQKQGKTKSEAIRCLKRYIAREVFNALPRTTLA

SEQ ID NO: 102981 - protein, 383 aa, unidentified
MEPTQGKHFTPSEELLAVSLELSKGSWKVALHDGKRDKPSIHTVASEQASKRLSEAAAVIEATKRKWGLPAQTRTVVIYEAGQDGFWIQRALQALGYEVLIVDPASIPVERRARRAKTDRLDAIKLVVSLLGWLRGECDRMHVIRVPAEDAEAQRHLARDRGELQKEIGQHRDRMRKLLRTVGCWDSVEGKFAERLKQGAVCSHDGQPLPTQLKARLERECARLELVTKQLAALEESLVEELPEAVRGRIEQLMRLKAIGRVGALRLVLELYWRDFDNRRQVGSCVGLAPQPYDSGESRVDQGISKQGNRRVRALLIEMAWFWLRYQPDSALAKWFVQRTQGSGTNKRGKRIAIVAVARRLAIALWRYLKDGVMPEGAALKAA

SEQ ID NO: 102982 - protein, 330 aa, unidentified
MKKYNYFFGVDISKKTVDITCIVNGKMIHCQFTNDPDGMQHLLQWLKELNISFEQTVFCMEATGLYCFPLTEFLTINEIDIWIEHAAQIKKSTALSRGKNDKVDSKRIAVYATKNLDRLRLWRPVGATLQKIKHLASMRERLVDTKKRLITPIKEFEDLGNLVMAKLLSKTIRSSLAALDKDLKNTEAKIIEIINEDDKLKQLYKLITSVVGIGFVTAVNLLIYTNGFTVMKDARKLACYCGVAPFEYSSGSSIRGRTKVHFMANKKLKCNLHMASLSAVKLDADLKTYYEKKVAEGKSKLSVLNAVKNKLLARVVAVVNKQEVYVKKVA

SEQ ID NO: 102983 - protein, 368 aa, unidentified
MEKIGVSEGVRQERLPAPKRPLDGTQVWMAIDISRSKAVYCLRWEGSEQRRLSTPLGIEHVRAVVEHYRDCQLHVAYEACGFGYELAWWLQEHGVAVNVIAPSRVERVPGLQVKTDRVDVGKLARKFEKGDLKAIYIPSRTVHEQRQIGRTYAQSLKERKRAQVRIRSLMQEQGRLGPLPAVGWRVYRAWLSEQHLPKPVRLCVQAHEQMRRVADQQAQRMKAELYKLARRAEYRPLVTALSAQAGVGWQSAIRLVLELGTIDRFRTTDALPHYLGLTPSQYSSGELDHRGHILKCGPGVLRALLLQCAWSAVRQGHDTELQERFANLAPRIGRKRAIIAVARKLAIKLRGRWRDHLLASEPTPAVAV

SEQ ID NO: 102984 - protein, 441 aa, unidentified
MFMTTLPVLNPKAAAVDVGSEQMHVSIAGDAPKVFGSTTAQLQALRDHLLERGVSSVAMEATGVYWLCLYAVLEQAGLEVVMVNGRHVKNLPGRKTDMKDCQWQATLHAHGLLRGGFVPKEHIRRLQDYQRLRADHITMAATHQLHMQKALERMNIKFHDVISHLTGVSGLKVIRAILAGERDPAALLALCDPLIQKKKAARVRESLVGTWKAEPLFALRQALAGWEFYQGQIAECDRALEQVLKEMAPGEPETPQAPGWGRRNGINAPQIEGLSGLLCRLCGGKNPTAIPGITDYTLLQLVAETGTDLAQHWRTEKHFTAWLGVAPGSRQSGKRRGNQKRSRNRAGRIFCVIARSVGRTVDKALGGFYRRLKSRRGGLVANVALARKLAQLYWRAMVHGIRYVEEGLKKYHDRVVQTEQRWLQKLAKKHGMILQPQIKTA

SEQ ID NO: 102985 - protein, 410 aa, unidentified
MEVLHPRCCGLDVHKETVVACVRLVIDGKLVKEVRTFSTTTAGLIELSEWLTETKCTHVAMEATGVYWKPVWHILADDGFQLVLANAAHIKNVPGRKSDVKDSDWISDLLAHGLIRPSFVPDGPTQEMRTFLRTRKQFVHEKGSHILRIQKTLEDANIKLDSVITDIIGVSGRKMIEALIAGERDPAKLASLADPRLKASQQTLRQVLRGRVTAQHRFLLRLHLDQINALDAAIARIDREVEASIAPFRTAVEQVRTVPGIKSLAAQTILSEIGIDMSRFPSSGHLISWACICPRSDESAGKRRSTRIRKGSPWLKTTLVQCAWAATRKKGSYLQAQYYRLRARRGPKKAIVAVAASILTAIYHMLKDGTMYQDLGPNHFDAHAKERQKNRFLKRLAELGYAVELTPLPN

SEQ ID NO: 102986 - protein, 458 aa, unidentified
MFLVGIDISKYKHDRCIIDSDGVVICEPYSFKNDADGFILFLDTLHSLPDSEDIRIGFETTAHYALNLKLFLEKAHYAFMEFNPLRLAKFNKSQSLRKTKTDAIDCYSIARWLAAVEFKPHTTGFYHIYSLKSLTRLRDSLVRQRSFYLVKITNVLDVTFPEFKPFFNNRFDATALYLLENYGTVEKMSHMNSTSYENLRKLSRGKFSIQKFMKLKELASNTVGESNEVFIIQLNSLLSLYRKCVSEIKSIEAQITKLISDINPRFMTIPGIGPLSAAVIYAEFDDLSKFNSHAQMLFFAGLESGYYHSGISEHRGHMVKRGSSHLRYTLMNLCIPLIQYNYVFAAYYDKKRSEGKPHRVACSHLVKKLIRIIFNLEKNGIDVDSLHTFIIAFIIHFICPKQPLHSTLQAVLPQADQSDKYHDKITTSRIPQNISSYIQQKSHSNECFPVLHSESEMR

SEQ ID NO: 102987 - protein, 374 aa, unidentified
MKKKNITSSAPRMQKPAAVSKKVAVTKVTVGIDLGDRNSAYCVLDPEGDVLAEGTVRTSETGFSQQFQKMSPCRIALETGTHSPWVSRLLQSYGHDVIVANARQVRVIYESDRKNDKVDARTLARLARIDKDLLHPIRHRSEKAQADLTMLRARDALVQVRTKLINCVRGMVKSVGGRLPGASGEYFSKKVREHIPAAIQDALAPLLDQIEQISTQLRDYDKRIEQMAKTEYPSTKLMRQIPGVGAITSLAFTLTIDDPHRFDKSRNIAGYLGLLPRQGDSGDCKPQLSITKSGDRMMRCLLISCAHYILGHFGPDSDLRRWGLSLMVRGGKNAKKRAIVAVARKLVVLMHKLWVTGEVYEPLREANSAKTAAA

SEQ ID NO: 102988 - protein, 391 aa, unidentified
MIYIGIDVAKDKHDCFITNSDSEVLFKAFTIFNNLDGFNDLYQKIESVMDDVTKVKVGLEATGHYSYNLLGYLIDKGLAAYVINPLHTNLYRKSLSLRQTKTDKVDARTIASMLMSDVNLKSYSDISYHNEELKSLTRYRFDKAKERAKLKSSVSRLVCILFPELEKLVPTLHMASVYSMLSEFPGAKHVASAHLTRLTNLLSEASKGRYSKDTAITFREAARASIGSNMPAKSLELKHTIKLIQELDSEIDEIENEIKVIMDEINSPILSIPGINYRMGAMIIAEIGDFSRFDSPDKILAYAGFSPSTYQSGQLDGAYAHMEKRGSRYLRYALYNAAKYVCHWDPTFAGYLAKKRAEGKHYNVAISHAVKKLVRVIYHLEKTKQQYIKVA

SEQ ID NO: 102989 - protein, 336 aa, unidentified
MNIKRIGLDLAKQVFQLHAVDHQERVVLRKTLRRARMLTFFTRLEPCLIGIEACGSSHYWARELTRLGHTVRIIPPQFVKPYLKGNKNDANDAEAICEAVSRPGMRYVAIKSEAQQSMQAEHRVRARLIHDRTALSNEIRGMLGEFGFVLPAGLSALRKALPEILSQQEKWDNRFIRLLSELTEELQALDERLNRYDRRLNQLAQEDERIRRLQEIGGIGPVTASALVAAVGDAKQFKSGREMAAWLGLVPRQHSSGGKTKMGHISKRGDSYLRTLLIHGARAVLNACDHKEDRRSRWLQSVAERRNRNIATVAMANKNARIAWSVLSRGEEYRVM

SEQ ID NO: 102990 - protein, 345 aa, unidentified
MEIHTIGIDLGKTVFHLVGLDARGEVVVRKKCSRNQILGFTANLHVSLIGMEACGGAHFLARALREQGHDARLMPAQYVKPYVKTNKNDYIDAEAIAEAVGRPRMRFVSIKTDDQLDLQSLHRVRERWVSGRTAVINQIRGLLLERGITIRKGRHHIEESLPGILEDADNKLSGALRVLLTQLRLEMQYLQGQIDESDKLIQRIAGELEDCRRMVSVPGIGPLTATATIAAIGNGSAFKKGRGFAAWLGVVPGEHSTGGKQTLTDTSRRGNRYLRKLFVQGAHAVLQQRMKQSNGLNTWLAQLTSRKRIQVAAVALANKMARMVWAVLSKGEAYRPPLWIETAAV

SEQ ID NO: 102991 - protein, 335 aa, unidentified
MKYIGLDVHKINTAACVVNAGGKEVKSFSVRTLGGLQEIIEHMGEEEYMVLMESSSYSIPVYRFFQDRGVPVHAAHARYLKMITQSDKKTDKYDASALARYLRFWHRDEMPLSMSYIPSREEMALKDLCRLREELSDSIGDEVRRIRAHMARNEQDMPHTFHDIKTRKSRAHISERFGDDQVLMRRIAKLSELLGHTKELDRELDALARGNEDVELLISIPGVGARSAVQIMSMIIDIDRFPDTEKLCSYFGLVPRVRSTGGKEIHGRLTKAGDPMMRRILDRVTYVHIMHCDSSLTAFYERKAGESKKKALTSASRKMLCLMHAVLKRRTPFTA

SEQ ID NO: 102992 - protein, 395 aa, unidentified
MRIIGCDLHARQQTLAMLDTETGEVVNLTLMHEGNNVREFYSKLPRPVLVGIEATGSMHWFLNLMEELGIECRVGHPAQIRAAEPRKQKHDRRDADLILKLLAQNRFPAIWLPSKELLDLRALLLHRHQWVRMRVRMQNALQAIALANGLRRGPALWSYDGQAKIAFLPLLPHAAYRRSALQAMYKNMQSEIENLTRRVAEQAGNRCGARLLMTHPGVGPVTALATEVFLGDPQRFTDSKRLASYVGIIPREYSSGEHQRLGGVTKQGSPLLRFLWGEAGAHAARRDPELKRFYRRKLVQKGLGKARVAVARKLGIRLWIMLRDEIDYQEFCRRGQIQQKTVRPVVGMPETGNGAKSHRPVDEATRLPESLIAGRSNSSSWSHNDRRDGWWATLK

SEQ ID NO: 102993 - protein, 340 aa, unidentified
MKTCSKFFIGIDVSKPYFDASLLCVIDQQKQQIQTLRFENSIQGLKEFHKWLKKHKVTMNKNTLLVIENTGIYHRLLWAFCCEKNLPIHIGNAAHIKWSFGIARGKSDRVDSIRLCQYAYRNAEELKSSSILDPVLLQIQDLMASRRRLVSQLKSNEVYLNEMKNISNIDNRLILERLHRDAIKGISNSISKIETLLKKIVSENEKIKKNYDLLISVPGIGHLTAIYIICCTCNFACRRSGKQLASYAGVVPFEHSSGISIKGRNRVSNMANKELKKMLHLCALSAIQFYPEFKCYYERKTEEGKHKMSVINAIRNKIVLRAAAVVIKQMPYISKYNVVA

SEQ ID NO: 102994 - protein, 409 aa, unidentified
MERVLARCCGLDVHKETVAAGLIVPGAAGERTETIRTFGTMTEDLLALRDWLAEHGCTHVAMESTGVFWKPVYYLLEDDFEVLLVNAAHIKNVPGRKTDVSDCAWIAQLLEHGLLHPSFVPPPEIRELRDLTRYRKALILDRTREVNRVHKVLQDAGIKLSSVATDIMGISGRAMLSCLIEGQQDPERLADLAKGKLRSKMGPLRKALRGRFGSHHAFLLAEILSHIDYFDLSIERCSEQITEKLRPFTEAVALLVTIPGVDRKTVETIVAETGADMSRFPSAGHLASWAGMCPGNNESAGKRKSGKTRKGNRWLSIGLTEAALAASRSKDCYLRAQYYRIRTRRGHKKAVRAVAHSILVITYHLLSKRVSYKDLGGDYFIRRDPQVRIRYLVRQLEQMGQRVTVESAA

SEQ ID NO: 102995 - protein, 349 aa, unidentified
MLAGIDTHKDTLAVAVIDDAGRPVVVTELANTETGFDALEQLLAKHPVHRVGIEGSGNYGRGAAVRLVLAGGIEVVEVPPSLTSRERSAKPGQGKTDPIDAVAIARITAREPALPAVRLAVGQAADLRALADYRAQLVTERTALANRTHSELHGLLPGYQAEIPRLTAPTFITAATDLLAGQTGVRAQLTRRRLIRLAELTAEIKEVAELIAAAVAEVETGLTGLYGLGPVGAATILGEVADIRRYRSRHAFAAANGTAPLPASSGRTTRHRLNRSGNRTLNRVLYTMAITQIRADTEGRAYYLRKRAEGKTGREALRCLKRRLSDVVYRTLHEDLATTTQPVRTGSGR

SEQ ID NO: 102996 - protein, 493 aa, unidentified
MGACELESGDVALAAIPIRKMTIGIAQTLLLIIDWRIAMPKRTTGDRPELKPINVGAAAIDIGSRMHMAAVNPASTDVPVRSFGTFTQDLHDLADWFKACGVTSVAMESTGVYWIPVYEILEQRGFDVILVNARYAKNVPGRKTDVSDAAWLRELHSYGLLRGSFRPDAEIATLRAYLRQRERLVEYAAAHIQHMQKALMEMNLQLHHVVSDITGATGMRIIRAIVAGERNPDVLATYRDVRCHSSIETIRAALVGNDRHEHVFALTQSLELYDVYQAKMLDCDRKLEILIAALNNKGAKPVGKLSEPRIKTKQVNTPTFDVRTALYGVLGVDLTEIHGLGPSLALKLVGECGTDLKAWPSAKHFTSWLCLAPGNKISGGKVLSSRTRRSSSRAAALLRLAATTVGRSDTALGAFYRRLSSRAGKSKAVTATARKIAVLFYNTIRHGMSYRDPGADHYEQQYRNRVLANLQRRAKSLGFVLQAIPGNADPAVS

SEQ ID NO: 102997 - protein, 397 aa, unidentified
MESSEIGFEQVVKVGCGLDVHQAVIVATISKGQNDYQTKKFDAYTSSLTELRDWCKGHGVTHVAMESTGVYWKPVFNILEESFEIILVNARHVKNVPGHKTDKRDSSWISKLLLAGLMKGSFIPPRDIRELRDLVRYKKRQVEHVASEKNRLIRILEDANIKLSTVLTDVHGATGIKIINDIIDGKSNVDDLMKHIHGKVKANREDIRKALEGRLTPHHRFMLSIIKKSIEEKEAIIRELEQHIDQATAQYAVEIDLLQTIDGVGKDSAISIISEIGVDMDQFPNEHHLSSWAGVSPGNHESAGKKKSVKTVKGNRYLKSLLAECAWGATRKKDGYLKRKYQSLVARRGKKKALVAVGHKIIIAAYHILKTKSLTKSLHYTIVLNEIRSKSKGTWPN

SEQ ID NO: 102998 - protein, 412 aa, unidentified
MQTMVERGCGLDVHQATVVACLLVALNNGTVKKQIRTFNTTTRELVKLREWLLSEGCTHVAMESTGVYWKPVFAILEGPFELVVANAQHVKKVPGRKTDVKDAEWIAELLCHGLLRSSFVPPKPIRELRDLLRYRRKLVESQSAERNRLLKLLETANIKLSSVATDVFGVSGLLMLRALIEAKATPQEMAQLAKGRLRNKLQDLELALEGKIEEHHRFLLQLQLDRLQAVEKDLAKLEQHIQEKLQPYATQQALLQEIPGVDWTLAAVIIAELGVDMTVFQSVSQLASWAGVCPGNNESAGKRKSSRIPKGNVYLKTALVEAANAAARAKGTYLRDKFYRLKARRGYKRAAVAIAHKILVAIYHMLSQQVSYNDLGDLYLDTRNKNHLTRNLIHRLERLGYAVTLTPHQKAA

SEQ ID NO: 102999 - protein, 395 aa, unidentified
MEPIIERAAGLDVHQGSVAACVIIGAAGRRTSRETRTFGTMRRDLAALRDWLLEMGVTHVGMEATSIYWYPVHAALEDAFTVIVGNASHMRNVPGRKTDVKDAEWIADLVRHGLVRASFVPVPEVRALHELIRHRKAVVGNMASERNRTLQLLESANVKLASVMSDVFGVSGMLMLQALAEGRAAPVEMADLAKRRLRRKVDQLALALDGHLAEHQRLLLGLHIRRLSEIDRDLAEIEAAIKAAMRPFAAQQACLATIPGVDELTAASIIAEIGVDMSVFGTAQRLAAWAGVCPANHESAGKQKRRGTRKGNTYLKATLVTAAVSASQAKGTYLRDKFHRLKARMGTKKAAMAMAHKILVAIFHMLQRGVIFADLGGDYLDRVNKHSTAKRKRQR

SEQ ID NO: 103000 - protein, 438 aa, unidentified
MNSQSLEVKRHFVNGKTIIGIDPAKRKHQVVIIDPIGVPIGSTFKFSNNFYGFHTELFDNLNARITGFSSKNVVFAIEASINLWQKLCYFLNNKGYSVLTVSPLFTHHERPKINNNFSRTDPKDALAIANCARQGYFNFYQDYPSNVNAMHNLSITYYKLIKHIAQVKQRIGSMIDLIFPEFKDALDHDTDTARYLLSKYLSASDFRAMNLFLEAPVIMKLSGRQHGEDTLKRIKQAAKQTIGIKLNDEEIITARITLNCWLGQYGFLKEQIGSVLEQLITLAEKTPYFNIISSLKGISDITAARFIAELRDISYFNHHKKIEAISGMNLKLSQSGQYTGYRRITHLGNHRLRAIIYKMAEETKNHVPEVRIRYLKRQMKQPRYRKNVIASSSNLLKLIFSLVKENRKYEYREEKLTELKQLEKQYTEFKKKKYKKSA

SEQ ID NO: 103001 - protein, 346 aa, unidentified
MMIIGCDFHPSWQQVSWLDTETGETGEQKLVTAAGDAERFYRQVPAPALIGMEATGNCHWLVDLLAELGHELWAGDAAQIRASYVRQQKTDRRDAEHILKLLVEGRFPRIWMPSSEGRDLRQLLLHRYKLVIIRARVKNELQHLCLNKGVQRKHKLWSKAGQQMLRELPLKLWAARRREDLLQLMAMLDQQIAPLDQAVKVEAQRDKMALLLQTQPGVGAITALAYVLTMGDVNRFPRGKQVASYLGLIPREHSSGGRQKLGAITKQGNRMLRMLLVEAAQSAVRLDPQFRKEYLHRCHRKPKAVAKVAAARKLAVRLYWMLRTQTAYPEVVRIESSPRVPLVGAS

SEQ ID NO: 103002 - protein, 421 aa, unidentified
MNFTNPRAEKSRSQSKNNQETQFRISYTATGQELIYGYVPVGIDLAGRKFQVCFYNEDNELVNTTLDKYELKRFIADSHQKLLISMEGCTGSSYWANYAIAHGHKAVVLDARAIKNRKAQKDDFNDAFFIREALFTQHQTCRIRTQEEIDLKSFYAQREQYIKSLNAVCSNVRQRLIEAGAYEHIVKGADSALVAIKCYKNQIINKAEVGFSSLTLRALDSFVEDINYLTQKIDRINQDIIDVKARESQVAKLLMTIPGIGPQLAVLLSLDIADIERFKTARALQAYFGLFTAHSGSGGKIEMGKMSRNGDPVVKRMLYQAVLTLLHCGNKLQISPRSEYIQRMYSRHTVAFKRGVISMCAKIIRVVFGVLHHGTAYDPQIDSSLGNKKARIHAYSNKCLNKVSADALLQEQYGYTEAALD

SEQ ID NO: 103003 - protein, 316 aa, unidentified
MDETTMEKFVGIDVSKSTLDVCIEPVTQTFHVVYDEAGIRRTVSRLEEVKPTLIVIEATGGLEVRIATELAGKGLPVAVINPRQARDFAKATGQLAKTDRVDAAVLAAFARAIRPQARPLQDADTRILNDLVNRRRQLIDMRVQETLRLNTAASKPLEKSLKKHIAWLDKRITEVDNDLTRRLRKSEVWRTKDDLLRGIPGVGAVTALTMLAKCPELGTLNRREIAALTGVAPLANDSGKHRGKRFIWGGRADVRAVLYMATISAIRCNDTIKTFAQRLKKAGKPPKVVIVACMRKLLTIMNAMLKNNTPWNPKTT

SEQ ID NO: 103004 - protein, 359 aa, unidentified
MNPLYVGIDVSSKTNVVYLMKPDSPKINNFSVDNSLDGSKKLVKIILSALENHSLDKVIIGLEATSIYGDNLVYFLREDCSLSKHLTKIHILNPKQVKKFKDAYNDLPKNDFVDSFVIADCLRFGRINKEVYLSDYRYAALKTLTRARFYAVQNLVKEKQRLINIIFKKYSSLTQDKVFSDIFGTTALAVYTEFDSVDTLVNMDLHELTEFIQKKGKNRFSDPDSVAKAIQKATRSSYRLPKTVNDSVNQVLSISINSIKSIEAQIKALEKAIAEQMDLIPNTLTSVNSIGPVYSVGIIAEIGDINRFDNQAALAKYAGPVWKQHQSGGFESENTHLIHSGNRILKYFLANGVSTYRGL

SEQ ID NO: 103005 - protein, 418 aa, unidentified
MKKHSKTLQRSEPSLKRTKARGPVQRDAKEVLAEVLGKLTGKLDAPAVSTSAKENRRRNTVGPNRDRLTVGVDLGDRWSQYCILGLAGETLAEGQLRTTQEDVREFFQALTVARVVIEVGTHSAWVQDVISEWGHEVLVANPRLMEGSKRRKRKSDRIDANKLARLGRVDPQSLYPIRHRSREVRQDLVVLRARDALVSVRTELINTTRGLVKSMGTRLPRCSSPSFADKVKNEIPVEVREALLPLVQLTETVNDCIARYDQKIEELGQKKYGHTTLLRQVKGVGPITSLAYVLTLEDPQRFSSSREVGPYLGLVPKQEDSGDSQPQLGISKTGDRMLRRLLVGSSQYMLGAFGPDTDLRRYGQRLCERGGKNAKKRAVVAVARKLAVLLHHLWVTGDVYEPLHHTGAETRTAQATAA

SEQ ID NO: 103006 - protein, 407 aa, unidentified
MDSLKTVFGIDVSSRKSNVCIMVNGRKVNDYAISNDMVGFNQLLDDLKQVTNPQIIFEATGVYSRRLQAFLDMHDLRYVMMNPLEAKRKTKDDLHQNKTDKLDAMYLAKMQSEHPQRLAYVQSEEYQELMANNRIYEQASHDLITNKNRLPKAIQLTFPEIEHLLANPRGKNYWSIVLKFPHPNIVLETKEADIIDFLKSLSGIGEKRANDLAQRLIRLAKLACPAVKKSSAHIRGLEMAINNILSAEETCQTALKEMAKLAPKRDLEILKSIPGIAENTALRIISELGDIRRFNKPNQLNAFVGVDPQVYESGNLTAHLSISKRGTAIGRKVLYLAINQIQSAKKAGNPCHIADYYEKRKRSSETASHKKAAIASIHKLLRTIFALITNDQLYSYDIAKHNQRLLS

SEQ ID NO: 103007 - protein, 437 aa, unidentified
MNKEKMVFNKGLLKGKNAILGVDPSKKRMDCRLIDMDGIPLGRSFSFSVSARGFAEAFPGKLRQQLGRDYSPGEVVIAIEHSFSYWKTFAHHCHRQGFLVVLVNPVSTYHSRPLEDADYSKTDPRDAFLVGGNALNGRFRVYSIADDVYGRAHRLSIHYFKLVKDLARFRQRLGSRLNEIFPELEGVTDPASKTGAYLLGRYTYPGDFAAMDQEAEYREVRKVSGGNIERDKLEELVKCARTSVGVNIPAYQADDRLIIDNMLYMIKTLAAESGKIMERLLALLSDNPYFKILYSIKGIGETTAALFVAEAGDLRRFKNASELEKYAGSNLRLCESGVFKGRRRLAKHGNKRLLHLIYLICDQLRRYVPSVRQKFIRRRMHGGGNFTQDVMSLSSVCLRLIMSLIRRGACYEESAVEQEALKAVESAYEEYRRKKAA

SEQ ID NO: 103008 - protein, 339 aa, unidentified
MKKVFIGIDFSKLKFDAAIYSVDTKAIVSSEVFENEQSGYADFLQWVKENTRCQKSGMLFCGEHTGYYSGNLSVFLYESGYDMWLVSGLEMKLTQGIKRTKTDRVDACKIAEHAYRYQDKVVLFQPVSKALDEIRELLSYRERLVETRKVLTTSAKEMKRVKDNASCDYIYRDSIEYIKTLNASVRDCEKRIEALLKQDISLKTNYKLVSSVVGIGLVNAALILVATDNFTKFENPRKFGCYCGVVPFEHSSGTSVRGKTRVSKMANRHLKTKLTLAAQNAVRFDPELKEYYQRKRSEGKNNWLVLNNVKNKLIHRIFAVVRDGQMYEKQYVHPLKQAA

SEQ ID NO: 103009 - protein, 410 aa, unidentified
MEVFLERCAGLDVHQASVVCCVLLGVPGRKPQKLLRTFGTTTRELEALRAWLAEHGVTHVGMESTGVYWKPVYAVLEGHFELIVGNAHHIKNVPGRKTDVKDAEWIAQLVRHGLVARSFVPPPAIRDLRELVRHRRTLIETRTAVRNRVLKLLEAANIKLSGVASDVFGVSGMAMLEALAVGTNNASEMAGLARGRMRRKHAALEAALEGRMREPQCFLLSMQLRTLGTIDQDLQTLDARIEAQLEPYQAQHRLLTQIPGVDWVTAAAIIAEIGTDMDVFASARRLAAWAGVAPGNYESAGKPKGAGTRRGNVFLKSALFAAASAAVRTKGSYYRDKYNRLRARRGPVRAIMAIAHKLLIAAFHMLSTGEDFRDLGESYLDQVARKRSTAKLVQRLSNLGYDVMLAPKAA

SEQ ID NO: 103010 - protein, 417 aa, unidentified
MIRKVMEVIHQSVGGLDVHKKTVMACRRRLMGDGQVESEVREFGTSTLQMCALSKWLSEWGCTHVAMESTGVLWIPVWNVLEANFKLLLTNARQLKKVSGRKRDVGDAEWIAQLMQCGLLKPSFVPSREVRHWRTLTRQRMKLIDQRTGVVNRLHKVLQQGNIKLSSVATDVMGVSGRAMILAMIEGESDPERLACLAKGRLKSKREELVESLEGRLSQDDRWVMKELWEQMEYLEEEIARYDEQIKEKMSPYEESLKRLMTIDLIERRSAENILAEIGPDMSYFPSDDNLVSWAGLCPGSEESAKKNRSGKTPKGDQWLRRALVEPAWGAARRKDGYLGAMYRGIAVRRGEKRAVIAVARTILQTAWHVLSKGVEYKERGGDYFDRQNSEQTKNKLIRRLERLGYEVEIKPKQAAV

SEQ ID NO: 103011 - protein, 452 aa, unidentified
MATKRKKRVQDLPVLHLDAAGIDVGASEVYVAVPADRDTEPVRSFATFTRDLHTLADWLQRCGIKSIAMESTSVYWIPLHQILEERGFEVCLVNAQHVKNVPGRKTDVSDCQWLQYLHSVGLLRSSFRPSAEICAIRSLWRHRASLIQMAAEHVMHIQKALDQMNLQVHRVLSDITGLSGLRILDAILAGERDPVTLARLCHSRVKTSHNTVAKSLEGDYRSEHVFALRQSLAGYRYYQGLIADVDKEIQRHLADLKTVADTDAEPQQRTKKTAYQRRHYEPKTFDLRGELYRIFGVDLTDIPGISAVTAHTILCEIGTDVSQFRNASAFASWMGLCPDRQISGGRVLYTKSRRVRNRIALALRLGANSLHHAHNYLGEFFRRISRRLGKPQAITATAHKLARIVFHLLSVREPYNESIFHQCDRDAQRRAEIRLRKHAAQLGFQVVAATNT

SEQ ID NO: 103012 - protein, 368 aa, unidentified
MGRKSSKLYVGMDVHKESIDLAVAEEGGEVRHHGRIGGDMNALGRAVRKLESSGRALVFVYEAGPCGFGIYRNLTARGHACWVVAPSNTPRRVRDRIKTDRRDSLKLAGLARAGELTPIYVPDVADEAMRDLVRSREDALVMQRQGRQRLTALLLRNDVRYSGKTAWTTAHRCWIARVTLPQPAQRLAFEEYVQTVEEASTRVQRLTHCIEQELAHWRWRSVVAALQACRGIQLIHAVRIVAELGDLSRFGHARQLMSYLGLIPTEDSSGEHRHQGSITKAGNSSARRALVEAAWAYRHPAKVSHFIARRQAQVPKAARDIGWKAQVRLCTRFRRLSARGVNRNKIVVAIARELAGFVWAIARQIKPV

SEQ ID NO: 103013 - protein, 335 aa, unidentified
MKVFYLGVDVSKKKLDLCLRSNGKDILYDVIPNDLSSIKSWLTRTFEKFFLSEDSLVVCAEHTGQYTYPLVCATKSIGVYLCLEDAAKIKYCHGMPRGKNDKIDACRIAMYAERYNDCLQPYTASELIIQKLKNLSTERSMLVADRAKYQSQLKDQVDYMEHSIYIAKCNRVEGIINTFTDYIAQIDLEIKELINQAPVIAHQMDLLMSVDGVGERVALKMIMETDAFTSFTDPRKFCCHAGVVPFVYVSGSSQRSKNRVSNRADKSIKHLLHMAALSVSQVKNSPLKKYYDRKVEEGKNKMSVLNAVRAKLVTIMFAVIRADAFFSRNYQNSLA

SEQ ID NO: 103014 - protein, 358 aa, unidentified
MNFHQLTTQFVAGIDLHKSNLTICIMNKQGEILCQQVFKRQKSVRLKKILSPYGSDITVGVETTYNWYWLYDWCLENEFPVVVGHALYIKQKIIGKNKTDKIDAKEIANLLRINDFPLSFSCPLKHRTMRDLIRRRIKFTQMHTSIVNHISCLHDQYNLEEFQEEILNSSDKDYYENFWLSMDTDTEIAKLLKQKIKLIEKQIENYGNRDFKKEYKLLRSIRGIGPVIAGTLVYEIQDLERFPTVQQFSSYCRVVNPACESGGKRVGRGNTKMGNPYLCYVLHELVESSRKYNPEIQKKFQKLKKRRGIHHAHRILAHEWAITIYQILKNDSTFSLEQFCGTRYVDEPSQSTGLPAAA

SEQ ID NO: 103015 - protein, 364 aa, unidentified
MYDSTTTVTVGLDVHARSVRLAAVRADELLEERTLPYDEDAVERVLRRWPGVRCCYEAGPTGFGLYRHLIGRGIDCSVVAPGLVPQRPGDRVKTDPRDARKLARLLAGGLLEPIHVPSRELEAARDLVRAREDARLDRMRDRHRLSKFCLRHGRVLPTSSWTVMRRKWLGEQRFEFAAQQITFDSYVHTVDLVDARIEQLERAIRETAEQEPWCGLVARLRCLRGIETLTALALVTEIGDFDRFKTAEEFMAFVGLVPSEHSSGEKRRQGSITKVGNSHVRRLLVESAWHARRRPKVGYELARRQRGQDAVVVERAWRCQQRLYQRWQRMAGRGKPQQKIVVACARELAGFVWAIATEQPLRNT

SEQ ID NO: 103016 - protein, 383 aa, unidentified
MKKTKGTPRKEVSIREKVLHLAFELSQNKWKLGFSNGEKIRTITIAARNLEQVQEEIEKAQVRFKMRGDVRILSCYEAGRDGFWLHRYLLSCGIENVVVDSSSIEVNRRKRRMKTDRVDARKLLMMLMRYHGGERKLWSVVRVPSVEAEDGRQLNRELEALNKERTMHRGRIRGLLIQQGLEVSNPSGKRFLQELASLCTWEGKKLPEDLKERVVREYERLRVVEEQMKLLRKERERRVQSADKSSYRQVAQLRTLYGIGVTSSWDFVMEMFAWREFRNRKEVGAFAGLTPTPYDSGGSQREQGISKTGRGRLRALIIQIAWSWLRFQPRSKLSKWFWQRFGHGGKRMRKIGIVAVARKLLIDLWRYLEYGLIPEGARVRSAI

SEQ ID NO: 103017 - protein, 333 aa, unidentified
MRDESGKVVLRATMATEARVILAFVKNAGPRVHVAFEEGTQAQWLHDLVIDHAERVIVCNVRGRSETGNKSDRIDGDALSELLRLGALKPVFHGAPKILTLKELVRCYTALVEDSTRVMLRIKAIFRARAIPTSGVSVYRVSQRKQWLARLEGGARFRATSLLTQLDMLLELRPKAKAAMIGAARQQPGWKTLRTIPFLGPVRAALILVIMRTPFRFRTKRNIWPYAGLAVVKRSSADQEFKNGKLQRSKKAPITRGLNRNHNPLLKSVFKGAATAAAARPGPLREYYEASLARGVKEELAKVTLARKIAAVVLRLWKKGELWDPKKLTMQAT

SEQ ID NO: 103018 - protein, 427 aa, unidentified
MGLITATPMPPEQDEQPISYDWFVGIDWGSQKHQVCMLDGNRQVVGERVVDHDGASLAQLVTWLLTVSQGQPQRVSVGIEVPRGPIVEGLIERGFHVFAINPKQLDRFRDRHSVAGAKDDRRDAFVLADSLRTDRPSFRRLRLDAPQLFMLRELSRAEETLLEEFRRTTNRLREQLHRFYPQMLQLSAAADEAWLWDLIELVPTPAHATAVTAEQVHQVLPAHRMRRVTADEVLVCLQAQALPAAPGVREAAQVHCAFLLPCLRVLAAQLRSCAQQVEALLNTLAAEPGEAGGPSDVAIVQSLPGVGRKITAWLFAEAAQPVAERDYQVLRTQGGVAPVTKQSGKRRQVVMRRGCNPRLRHALYHMARVAAQRDPHFSRVYEALRAKGQRHGQALRNVGDRLLRILMAMLRDGACYDIARCRREPVV

SEQ ID NO: 103019 - protein, 367 aa, unidentified
MMGWMAPLRHRRAKLVFSENHQEREPSMSEITTIGLDLGKHVFQVHGVDAEGTTVLRRQLRRGQVLAFFSRLPRCVIGLEACATAHYWARELAALGHEVRLMPAQYVKAYIKRNKNDAADAEAICEAVQRPTMRFVPVKTAEQQASQLLHRGREQLVRQRTMLVNALRAHLAEFGIVAAQGLRNVGQLIAMVRDDDDRRLPDLARQVLQVLADQIEQIEAAITALERQLLSWHKSNAVSQRLASIPGIGPIIATAIATTVADPNVFRSGREFAAWLGLVPRQNSTGGKTRLGGITKRGNRYLRRLLINGASANLLRSKATKADPWVIGLRRRRPPLVVAVALANKTARIAWAVMLRQKEYQPRAVAA

SEQ ID NO: 103020 - protein, 333 aa, unidentified
MDVVHPRCAGMDISKRDAKVCVRIQGQGNRRTTSTVTTWGAMTGQILALREHLLEQNVTCVVMEATGDYWKPFFYLLEDALTVMLVNAHDARNMPGRKTDVSDAAWLADLGAHGLLRGSLVPPEPIRRLRDLTRARTTLTRDRARQVQRIEKVLEDAGIKLSTVATDIMGVSGRAMLEALIDGRAEPAALADLAKRRLRSKIGALTEALTGAFTAHHGFLIRMHLNLIDEYAKALDELDARIEEAMAPLRAARELLCSIPGFSTTVAEVFLAETGADMTVFPTAGHLASWAGTAPGSNESAGRVKSTKTRPGNRYLKGALGTASLAASRSKGT

SEQ ID NO: 103021 - protein, 360 aa, unidentified
MGQVRTWAGLDVHAAKVVAAVVDADSGELRVQRLPGATRQVARFCAALPGPVVVSYEAGPTGFGLARALEAAGVRCVVAAPGKIERAAQDKVKTDRRDAERLVRLLMVGGLHAVRVPSPHEEALRDLVRAREDVRGDLMRARHRVAKLLLRHDHRFEGNNWTTRHRDWLARVELDDSVAQAVLLDGVGAIDALVVRRDALEAQMTAVVPGSPWAQTVARLRCMHGIDTLTALGLCAEIGDFRRFRRPGQLMSYLGLVPSESSTGDRRRQGPITKSGSEHARRLLVEAAWHYRRPPRKGRELSRRQQGQPQHVCAISWKAQQRLHRTWRRLDQERGKRRTVVAVAVARELAGFCWAVAIAD

SEQ ID NO: 103022 - protein, 429 aa, unidentified
MQESSSSASAEGVAAYVGMDWADQKHDVILRTASEPAKVEYRRLAQQPEALMEWVAELQQRFAEKGKILVALEQSRGALIYHLMGYEFLELYPINPSQLASFRQTFSPGGAKDDRPDAELICELLYCHRDRLKAWKPDDELTRKLTFLNEGRRKAVDQRTQLANEMKSQLKVYFPLALQVLDNDCSTALAADLLLQWPTLDSLQKPSAHKLRKFFYAHNCRQEQKLLERLELIKAAKPLTRDLAVIEPTALRVQLLAQQLKSLLPYIARYEKQIAELFDAHPDSFLFRDLPGAGSAMAPRLLTAFGTDRERFEHSMEISSLSGIGPVRRASGKKSGKHATVHFRSACPKFLRQSFHEFAACSIRYCSWAEACYQTQRNRGKGHHAAVRAVAFKWIRILFACWKQRVPYDPQRYQQTLQTRGSEYAKITA

SEQ ID NO: 103023 - protein, 419 aa, unidentified
MNAQWSDYSHFAALDWASDHHDVTVVDRLGQIVLEFRFEHTAAGWAEFAQKMQPYQGSPLALETSSGPAVDQLLQRGWTLYPVNPKAAQRYRDRKAPSGVKSDQHDAWSLADALRGDGHAWHALVPQDEATATLRALCRDEISLIEQRTALVNQLRAALAEYYPAALQAFEDWTAPGPWAFLKQFPTPQILLKAGKRRWEKFLHSHRLWRGENGTERIQIFAQANALPASPAIVNAKSLLAVSLAALLQTLHGQLEQYRQRIQQAFKEHPDHDIFGSLPGAGEKLAPRLLGELGVQREIFPDAQSLQCHAGVSPVRYQSGQIDKAHIRWACNTVLRATVHLWVDLSRKRCPWAQAYYTGKRAEGQSHANALRCLGKRWLKVLWRLWQDRKIYDENLHLESLQEHGSWVHSKLNPTLLSV

SEQ ID NO: 103024 - protein, 387 aa, unidentified
MSSSTNVAVSAVAAVHSIIYLGMDVHKESITIAVLPEGAKTPTRLDRLPNDLPKLKKWLDRIARDGEIRACYEASGAGYVIHRAMKEWGYSSEVIAPSLIPKRPGVQRKHDKRDAADLARFYRAGELTTVRIPSESDERVRDVVRCRETFQREILKSRHYILKFLARRGFVFREGTNWCGPHLKWLQHLTTDNSPLALHDRLVYREYHALLLYKLERRDELDRQIEQLALLPNLAPMVERLQCFRGISLHSAMVLATEIVDWRRFERPGQLACYLGLVSREDSSGDRTRLGSITKAGNSHCRHVLVQAAWSYRHRPQTGFELKRRQQGQNPGVIVHAWKAQQRLHQRFNHLSYRKRPQIAAVAVARELVGFLWAVMQEVVPVEHQAA

SEQ ID NO: 103025 - protein, 420 aa, unidentified
MVEDVRWFVGIDWATQSHRVCLLDSEGGRMGEREFAHGGAGLTELRDWLLQKTGAAPGQIAVAIEMPHGPVVEMLLEHGFVVFAINPKQLDRFRDRFTVAGAKDDSRDAHVLGDSLRTDWRAFRRLATDDPVVIELREWSRLVDELQQERTRLANRLRQQLWRYYPQATELTDDVGADWFLALWRKVPTPAAAAKASEKTIASILKEHRIRRLDAATVLQTLRKTALFVAPGTTEAACVHIRSLAARMHLVNQQIKEAHNALDGLCVRLAAPDEETPSGQSGEQCDVAILRSWPGIGRIVLATLLTEAAQPLQARDYHALRALAGVAPVTRQSGKQRFVIRRHACNRRLQTAVHHWSRVAIQHDAAARRRYDALRQRGHGHARALRSVGDRLLSALCSTLKSRTLYDAANRGSSQISVKQ

SEQ ID NO: 103026 - protein, 457 aa, unidentified
MYRELLPLRQALSVELKANLPPAVPGIDSEHLLQSYLDRLTMYVGCDVADQILTFFAVDTAGEELGHLSAANDPQGFEQIWDWLENLRSQHSLRIILLAMESTGVYYWACWDSLAQRPNLARVLYNPRTTEHMTEVLSKKVRNELVDAYALAEQVRLGSTPEVVLSEDADLLTARFCSRAARDLAGQLNRKKNQLRALLRAYNPAISQVFPGAKFHHQAVYALLQQVVFPDECVDAGVEAITAILEAHCRTAFDRQHAQRLVTLCRDTLSRPIGREEIRQRVHHLIDDITTCQKRKTYFNKAGYRLIENRPETPLLRNATGAGPSNTLALVSEIGDVQRFKSGEHLASFLGLTTSKHISGTTIFVSKHITKQGSPNGRYAAVNVAQHLSLRVPKYQQMYERIKNRKPPRKGHFVALVAIARDFVTNVLYDMWRYQRPFFQEVEDYRAYRRKNPRSDE

SEQ ID NO: 103027 - protein, 465 aa, unidentified
MPSAQKSSRAVVSKAGKPKARRSAPVTALASRDGDGLPTAKRRAGSRSQQKVADLPTLDVATSKASPLQPTEAEGRSTVRHVALDLGAKKTTYCEVAGGEVVQRTTVSQVSSLSVLLGPDQSTARVAIEACREAWHVHDLLAEWGNEVVVVDTTRSRQLGIGQHQRKTDRIDAEVLARALERGGIPVAHVLSPARRELREVLGVRRTLVQMRADLVTTIRGLVRAHGNTLPACRTSGFAQKVRATKLDPSLAVLIEPLLVAVETADAGLEQTETQLAELCAQEPIVALLTTAPGVGSVIAASVVSVLDEAKRFRNAHQVESYLGLVPSENTTGGKRRLGAISKRGNSYLRSLLVEGAWTILRTSDKSDPLYLWGRAVAERRGKRIAVVALARRLLGVLWAMWRDGTVYDAPHLSAQGTRGLRRAAQTLEQREAALAMAAKKPSVKKVSAPSTSRRSQQTLAVTAA

SEQ ID NO: 103028 - protein, 318 aa, unidentified
MNTNTLQNINVGVDTGKSQLDIYVRPLDIYFTVQNTDKGISDAIKIIKKHKPQRVVIEATGRLEMPFILACDKAKLPYVVANPLRIKRFAEAIGQRAKNDRLDAELIAHYAERVQPELTKLKSENIRLMSDLVTRRNQLLTMQTMERNRLQILPKNISSTITPILTALKNQLEKVEAKIEKLIESCPEYQAKSTILQSMPGVGKILAASLISNVPELGFITNKQASSLIGVAPITRESGRFKGKRMIKGGRPQVRTVMYMAMMSAIQCNPVFKATYERLLAAGKPKKVAIVACMRKMVVTLNSMLRDGAMWDKDCVKN

SEQ ID NO: 103029 - protein, 378 aa, unidentified
MPDVISTAPADVRLWVALDVHKLSIVAATLPPSGGQPELSRIETTEKAIRRFIGKLGGPEGLAVSYEAGPGGFALHRLLSSMGVACDVIAPSLIPVRSGDRVKTDKRDAKKLVTLFRAGLLRFVAPPTVETEGLRDLLRCRDDLRCARTAARNRVLKQLLRHHRIYRDGTAWTKKHRAWVNSQCLEDPLSNLALAQSLTHLDGIERQLDLLDQELGKIARQDRWAGQVQTLCQFRGISTLTALGLIAEIGDFARFSHPRELACWLGITPTEYSSGESQHRGHITKAGNTHARRLLVEAAWHYRHPPRRPSTGPAPDERAWQAQVRLHHRYRHLTRAGKRTTVTNIAIARELTGFLWAAMTNQPLRATDSASNEEAAAA

SEQ ID NO: 103030 - protein, 342 aa, unidentified
MEQVTIIGIDLAKRVFQVHGAASDGKVVFRKKLSRAQLLPFLAGQPRCTVAMEACATAHEWGRAISALGHAVRLLPPVYVKPFVKRQKNDVADAEAIAEAACRPTMRFVAVKTEEQQARSMIFRTRDLLVRPRTQLINALRGHLAEHGVVAPQGPAHVKRLADAIEDEESLIQPIVRDVGRLYLQQIAIYSEKIAELEKTLHREAARSETTARLQTMPGIGPITAIAIETYAPPLEIFRRGRDFAAWLGLVPLQKSTGGKQKLGRTSKMGQRDIRRLLIVGAMAVVRWAARKGQPEGSWLARMLARKPPMLVAIALANKMARSAWAMLTKRENYRDPAAASA

SEQ ID NO: 103031 - protein, 352 aa, unidentified
MDRYIGLDVHSASCTACVLSAKGKRLSSMVLETNGKVLVDYLLTIPGTRHLVVEEGTHAAWLYEILSPHVHEMVVMGAPKSINNGQKSDKLDAFGQAEKLRVGSIERRVYKGIGEFSALSSLSKAYSKVMSDSVRVMSRLKSVYRSRGVATGEGHVFCQDTKDEWLRELPTKMRPLASTYYTELAALLEIREQASKDMVKEARRHRIFHILKTIPGMGDMRVSEMLPIVVTPYRFPSKRMFWAYCGLGVVTRSSSDWVRTANGSWVRANIMQTRGLNFNHNHTLKKIFKGAATCVAGQKRQEEPIYQHYLSLLDNGTKPNLAKLTIARQIASVTLSLWRTGEEYDGKKMKRK

SEQ ID NO: 103032 - protein, 397 aa, unidentified
MRIVDPTLPRDGTDVMKEVPPSVSAKLTDQSRSVAQDMRLKGGAMNTIYIGVDFHARQQTICYLKIETGELVTCELKHQDKEQVRAFYKQFQGHVIIGLEASGYSPWFEAMLEQLGCEVWLGHATEIRRRARWRQKNDRRDAELILDLMLHNEFPRLHRPTVQSREVLRMLRYRQKLIKVRTMSKNSLQAIALQAGLAKGSRLFTTAGQQELRTAEMSPVLQWQRDHWFELLKPLNQQLLETMVWFKAQSKGDVCIQRLRTHPGIGLLTSLCILHTLQPVSRFRNARKVAAYAGFDPVERSSAERQHFLGISKAGSRLLRYLFVEATHTAVRHDEDLKRFYKRLAERRGRPKAKVAAARKLLIRAYIMLRDEIDYAEFRRRAVAARLARRGHRPECA

SEQ ID NO: 103033 - protein, 353 aa, unidentified
MTSQQNSFANVATIGIDIGKTTFHLIGQDRRGAIIMRAKLSRTQLMRRLVNVPQCVIGMEPCAGAHHIARRLAELGHDVRLVPAQYVKPFLKGHKNDYRDAEAIAEAVQRPTMDFVAIKTPEQCDLLSLHRVRSRLVRQRTGTINQIRGLLLERGITAPRGPAPLRKTLNEIFAEPPADLSSRMLCLIGDLALDWRTLDARVEAVSREIEMLAENDEACQRLMTIPGIGVIISSAVVGAIGNGGAFKQGRDFAAWLGLVPKQDSTGGKTKLGGLSKRGNKYLRTLFVQAAHIVLIRKPAAAQRALWSWIERASQRLPHRNLLAIALANKLARIAWAVLARDHDYHPTANTDAA

SEQ ID NO: 103034 - protein, 400 aa, unidentified
MLSIGIDVSKGKSTVCGMKPGGEIVYTPFEVQHTREGMSELVSLLRGSGEEVRVVLESTGSYHCPVVAALLENGIFVSVVNSLRMKRFCSQSIRKVKTDRIDAMQIALYGLAYWQELQPTRPPEDTYRELQLLARQYYQMTSLLIKAKVDFNALCDQVLPGMQELMSDHAGRHKLSDFVLRYCHTTHILEMGETRFRKDYCKWAEKKGYRNCERMAALIFATAQNGIPVLPNAPSTQIVITEAIRVLHTVEASRDAILTQMQALAKTLPEYSLVREMPCIGDTLAPRLIAEIGDVRRFHSKRALIAYAGIDAPPYQSGKFCANNRHISKRGNRYLRKTGYEVMQSYVMHKPANDPIFTFIEKKRGEGKSGKLAMVAGLNKFLRVYYGKVTELYRSLPAIE

SEQ ID NO: 103035 - protein, 460 aa, unidentified
MSKLSQPNPSLTEARPFASMSWVNPHAAGVDIGAQEIMVCVSGDENTLLVRSFGTYTADLHAIAAWLKEHHIESVAMESTGVHWIPLFETLEAAGFRCHLISARALRRIPGRKSDVLDCQWIQTLHSYGLLESSFRPEADLVALRTLLRHRAQLLEHRAPHILHIQKALLQMNIQLPQVLSDVTGQTGLTILRAIVAGERDPRKLAALRNYRCQKDEEEIAKALIGTWQEEHLFVLKQSLEMYDFYTRQIEACDAEIERTYGHVRPKEDGSDDDDPPPLPDHKRKSHSKNAPKDPQRIRRHLKRICGVDVTAIHGLGVSLAEQAVMETGTDMSKFPSEKHFCSWLGPAPKHEITGGKIVRNATLKTRNRAGQVFCKAAASVMRSECVFGVFYRRLKARIGPAQAAVATAHFIARVYYRMLKYKVEYQPLSVEQYEAKYRQQQVRRLQKKAARLGFQLAPV

SEQ ID NO: 103036 - protein, 331 aa, unidentified
MRKPTAYVGIDTHKSFSYVTAIDSKGKVIKQGKLRNFKFEEFFKELSKYKVKIAIESTEMIMPLIRALESYGEIKVAHPGKLRLIAESKIKTDKIDSLVIAQLLRTNFMPESYIPSKEIRELRELCREHYSLKVMSTKIKNQIRHHLLAQGIITNENIFTKERRLWLRRISRVANRKLDILEFLENKIKEVDREIKEKTRSIEVVRLLTSIPGIGWYSASLVYAEISNIERFSSFCKLNAYFGLNPSVHQSGKRKYYGSITKRGNRMVRWVLIQCAYVAIKYDRKLREFYLRKKAEKGNNKAIVAVARKLLKRIYAVWKRRGAYEREPNLI

SEQ ID NO: 103037 - protein, 354 aa, unidentified
MKRTTKYVAFDVHQATTVASVREEGGRVIARSVLPTDGGALTEFVRGMRGARHVTFEEGTQAQWLYDLLAPLVDRVVVCDRRGAPHQGNKGDQVDADQLSELLRRGALRAVYHGSADRATLKELTRTYQNLVEDATRVMLRLKALFRARAIPTRGTNVYQARARGQWLAQLADRGAHFRAEALYAELDVLRQLRPKAKAAMVTEARRDPAWHMLGTIPFLGPVRVALLLATMQTPWRFRTKRHLWAYAGLAVVTRSSADYTLRAGAPVRRRRAPMTRGLNRNHNRVLKDVFKGAATAATARPGPLQDFYHRVLAGGTREELARLTLTRKLAALTLRLWKTGERYDPTKLTMPAR

SEQ ID NO: 103038 - protein, 336 aa, unidentified
MEHLAIDLGGRESQICVRNSEGQILDERRWPTAALGRYLATRPISRVIVETCSGAFAVADAALALGHEVRVVPTTLVRSLGVGARRLKTDRRDARALSEVSCRIDVPSVHVPSQESRARKTLCGMREALVGARTTLVNTVRGWLRTEGRRPRSGALATFSARVRALSPDTPLPSHVERQLRMIDVLNDEINEADREQAAAAQADLVARRLMTAPGGGPATSLRFIAALDEISRFPNAHAVESYVGLVPGEDSSSERTRRTHITKAGPTALRWCLVQAAWAARRMRRKDPMHRWADEVEKRRGTRVAVLALARKLAGILFAIWRDGTVYEPRRSGAV

SEQ ID NO: 103039 - protein, 317 aa, unidentified
MMDTVNSFVGIDISKDSLDVHVLDAGAAFRCHSNAEGRQKLIAQLPQPQSCLIVLEATGGYERHLVCDLAQAGHLVAVVNPSQIRAYANALGVKSKSDKVDARVIARFAQAVKPRPKAEGHERQAELDELVARRRQLLELRTAEFNRRETSMTKPVKQSLQRSINSINKDLEKIDRAILELVASYDDWQGRLQQLTSVPGVGTVTAVTLVAELPELGQLNRKEIAALVGVAPFDRESGQWRGQRKIWGGRGSVRCALYMAALAAKKFNPDIREFAQRLHDRGKKGKLVLVACMRKLLTILNTMVRDNTMWSPRLAAA

SEQ ID NO: 103040 - protein, 337 aa, unidentified
MRYIGVDLHSNSITVCYLNKKGQESLATHDLSKLAVFQKELRRTDRVAVEATGNTRWFVGQIKELVAQVVIVNPNQFEVIRKSVKKTDRHDARALAQFLSKEMLPEARMKDEPASQINSLAETRDKLVKLRTTFVNKLHALHRGRGINSRKSQFLSQKGLKAALDLEWETTTRVELEVIIDQIRSINEGIARLDTQLVGSGRQLKGHRSLVSIKGIGPRAAAVLLSVIGDVNDFESDDKLFSYFGIVPRVSNSNETVQHGRITKRGSKLGRTTLVQCTLAAKRYSRYLNSFYERIKAKKGGGKAIIATARKFLGVIYRTLKHNWVFADFPNFVLAED

SEQ ID NO: 103041 - protein, 342 aa, unidentified
MSVMIGIDPHKGSHTAVVIDADEVVVDRIRVRASASQVVKLCEWASGYEDRTWAVESARGLGYLLSQQLVAAGERVVDVPATMASRVRVLSTGKSQKSDPNDARSVAITAFRHPNLTVVTADDHTRVLGLLGKRHRDLARLKNKAACRLHALLAELKAGGLSSEMTVTKAVSMLSSVEAVDEVTRQRIMIATELVEDIARFDTQMRASQKRITTAVAASGTSLCDIRGIGPIGAAIILGSVRDIERFPSKGHFASYNATAPIEASSGNKTRHRLNPRGNRKLNHVLHVAAVSQLRYPSEGRDYYRKKLAEGKTSKEAIRALKRRISDAVYQQLKEDAHRITS

SEQ ID NO: 103042 - protein, 412 aa, unidentified
MSPMLIGIDVSLKSHHVQFMDGTGTSLASFAVPNDQAGADSLIHKMLDTASKAGAQELRIGMEATSNLGWHLAHYLKTELQGYEPNVRSQIYVLNARKVSRFKKGYEALPKNDRVDAWVIADHLRFGRLPHEMKDIIQYEALQRLTRTRFYLINNIKRDKTYFLNQVFLKFSGMRQDNPFSNTFGSTSLAVIQELEPEQIVSMSLEELIAFLQDKGKNRFDNPEEISTYLKKIARSSYRLDKTMADPVNISMATTLSVIKHLESEVKKLDKEIAKIMKGIPQTLTSVKGIGPVFAAGILAEIGGIDRFADHHALAKYAGLVWSQHQSGEFEADETSRLRTGNKYLRYYLVQAADSMRKHDAEYAAFYKKKFDEVPKHKHKRALVLSARKLVRLVFMLLKTNTLYTPPERRNP

SEQ ID NO: 103043 - protein, 317 aa, unidentified
MASSLDVYVGIDVSKKQLDLAFEPDNGAKQFSNDDVGITALVAQLTSQAPRLVVLEATGGLELSVTAALAVAGVPVVVVNPRQVRDFAKAIGRLAKTDQLDARALAMFGKAVQPEPRPVRDAESQAIEDFVVRRRQIVEMITAEKNRLSMSRRTTGKDIEVHIRWLEKRLAKVDNDLHDRLKQSPVWRAKDELLRSVPGVGPVLSVTLLASLPELGKLDRKQIAALVGVAPLNRDSGGRRGTRTIWGGRADVRRGLYMASVTAIRCNPVIRDFWERLRKAGKKPKLALVACMRKLLVTLNAMLRSGIPWRKCQPAIA

SEQ ID NO: 103044 - protein, 397 aa, unidentified
MYIVGIDIAKRKHEAAVIDGEGAVIIKPFSFTNNCSGYNRLLAMLAKAKLPLDEVSFAMEATGHYWLALFTRLQKEGFRVQVINPVQTNSIRSFYIRQSKTDPRDALLIAEVIRFGHFSESTLHPENIYELRELCRGRHAIVSMQADVKRKVVALLDQVFPEYETAFTNMFSDTSMAILQTCPTPKELSEMPLEELCHLIEVSSHKRFRMAKAQELQALARNSFGFAMAGDVFSTMVRLYAKHLDFLKQQVREMDRKIAEIMDTLDTPITTITGIGPTLGAYILSEIGDISRFSSAAKLAAYAGIDPTMRQSGEYNGIRNRMSKRGSPYLRHAIWLAASSTVLHDPALKLYFQKKRDEGKPYMASVGHACRKMVSIIYAVMRDNKAYTPCIPNEISA

SEQ ID NO: 103045 - protein, 367 aa, unidentified
MAMIIGMDVHSKKTVYVAQNEEGKVIKEGAVTTGVEGMEQMLAALNAPEQTRIGLETGTQATWISRLLASMGMNPVVIDAREVRAKARRIGQKSDRRDAFEICDGLRRGIYTTIVFVPDAPTQRLRQILSRRRHFVKLCTGQVNAAKFLLRAVGLSGQASYLRTEAAWQKLLAKPALASLHDHLAMHAEVWKVAHQHVQRLEKELKEAVVFAEKERQRLMTVPGVGPITASSFIAVLANTDRFPTSSHAASYIGLVPSTYDSGETERHGRITKRGSGELRTLLCEAAHHAARPAHPLNPYWRRIAAKAGYQKAVVAVAHRLARILFQMWRNGEDFDVRKLNVVYDGKALVRKRYYKIATAAEAALRS

SEQ ID NO: 103046 - protein, 341 aa, unidentified
METTRHIGIDLHRNCFTTCIRLENGRNYVTEWKLEQLPKFVAKLRPSDEVAVEVTGNTRLFHDAVAPHVKRVVAVNPNQFKVITHSVKKTDPNDARNLALYLAKDLLPEVRMKDKTRAQIASLTQTRDTMVKLRTALKNKINNIFSAHGINLSKESLASEKGLKAVLDTQFDVLVDLELKILVDQIRSLNKSIAELEETICRESQRLEGHKNLTSIKGIGGLSAGILLSIIGDIRDFADEGKLAAYFDIVPRIHNSNETEHSGRITKRGTKLGRTTLVQCALIAQRFSPYLKQYYERKKSRGTGKAIIALARKFLGIIYRTLKNNWVFDDFPNFVLAEETA

SEQ ID NO: 103047 - protein, 341 aa, unidentified
MTSFVGLDVSLAETSVCVLGGDGRIRFEGKVKTRPDDLIACLRKLAGDAERVGMETGQTAGVLFRALKAAELPILCLETRHAHRALSARTNKTDRNDARGLAELMRVDWYREAWIRGESANAIRSLLLGRRLLLQTKRTLENTLRGGVKRFGLITNKTAGRTFTHRAASVVDKDPAYAAFAMPILTVLRSVLVQIREYDRQLRALARHDATVTRLMTVPGTGYLTALAFYSTVPDPARFKRSEDIGPYLGLTPRVHQSGEIDRTGRITKTGDAMTRSYLFEATNVLLTRIQRPTPLRLWGLRLRDRAGLKKAQVAVARKLAVMMHAIWTDGTEFEWRAAPM

SEQ ID NO: 103048 - protein, 419 aa, unidentified
MNRIETKKQRIVNAKTLIVAIDVSKTTDMGYCRCPSGKELKSFEFGNNIEGFTKLWDRICWMKMSHHLDEVVVGFESTGSYGEPLVHYLRQKPVKLVQVNPMHTKRIKELQGNSPGKTDRKDPRVIADIIALGHALSVVVPEGAAAELRRLTLARERSIGRRAALYNQLQDLVSLLFPEFLQVIKDVKSKTAHYLLRHYPTPQDITKCGLAPLSSILKRVSRGKLGSTQAQALYEAAVESVGLREGTQGIVLEIEEILSSLEACNRFIDKLEAEMLAHLEQIPYHDSLLSVKGIGVITVAGLVGEVGDFRHFHTLREVMKLAGLDLFEISSGNHTGNRHISKRGRPLLRKLLYFAAINTVRKGGVMHTSYQRYLERGMPKMKALIAIARKLLRVLFALVRDHSQYVENYSKKEALKLAA

SEQ ID NO: 103049 - protein, 339 aa, unidentified
MTKATTIGLDIAKQVFQVHGADKAGRAVLRRKLRRSEVSRFFSEQPPCLVGIEASGSAHNWARVLGGLGHSVRLMAPQFVKPYVKSQKNDANDAEAICEAVTRPTMRFVPQKSIEQQDLQCLHRVRSRLVANRTQLINQIRGLLAEYGVVLPQHPGQVRRGLPAVLEDAESQLTGFGRELFQNLYEELAQLDEKIGDADARIQTAFQSTPDCRRIAAVEGVGPLIATAIVAAISNGHAFENGRQFSAWLGLVPRQNSSGGKSRLLGISKRGDPYLRTLLIHGARSVVYRAKAKTDKRSLWINDKQQRLGTSKACVAVANKNARIIWSLIAREQEYQRAA

SEQ ID NO: 103050 - protein, 460 aa, unidentified
MSKSKKPRSTMDFPVINYDAAGVDIGAECIYIAVPPDRSEREVRSFRTFTPDLREAASWMLQCGVKTVAMESTGVYWIPFFQILEDNGITVFLVNARQVKNVPAAFKTDRRDSKWLRNLHAVGLLSTSFRPEQAVCTIRSITRHRDALVKSGSRHVLHMQKALSQMNVLVHEVLTDITGVSGLAVLDAILAGERDSEHLLRLFSKRVKASEEEIKKALIGDWREEHLFTLKQSLASWRHFQQQIAECDDQILHLLSEYEPAPLPPQDPPVSSGPGEPKQPRTARQAMHDRDRNKVNRLKLIFGVDLTAIPAIAVGLAERIFTEVGPDLSRFPTANHFASWLGLAPNNSESGGKVLSRKTRRLANRLAMQLRLAATSLSRGVSYLAAYLRKMKARLGAPKAITATAHKLARIIYTIITTKQPYDESVFAKQQIRYQEQRLNHLKREAAAFGYEFVQKGFVS

SEQ ID NO: 103051 - protein, 385 aa, unidentified
MHASASAPATIHVDLCAIFVSLELSRSTWLITSLSPSGGEKMSKHSVRGGDVAGLLDQFARLRTKAQARTGKTFPIIVIQEAGLDGFWIHRVLEQEGIESHVVDAASILTSRRRRRAKTDRIDGEALLRTLLAYKRGEPRVCAMVRAPTSEEEDRRRLCRERKTLVAERVKHVNRIKGLLFAQGISDYEPLHRNRRQQLKDLTTGDGRSLPAHLKAQIDRELDRLELLLGQIKAVEAERDALLAPVGDAAPTPAAALAGLRGIGPQFGAVLWLECFFRSFSNRRQVAAYAGLAPTPWQSGSVQHEQGVSKAGNPKLRTTMIQLAWLWLQHQPTSELSLWFKERVQRDGGRGKKTTIVALARKLLVALWKFVSSGVIIEGAVMKAA

SEQ ID NO: 103052 - protein, 394 aa, unidentified
MKLIGIDIGKNKHFFCIMDQQTGEIISQPVSFSNDKEGFDFLVQKIKSYPKDSILIGMEDTGHYHFALLKYLLDLQYTVALINPKTTDFNRKIQGGITKNDKLDTINICDVLDTPERKKQYRITKVNSFDLYEQKQLTRHHHNLKEEENVYKNRLQKCIDIVFPEFNKLFNSKYGIVYMNILKMFGSAENIANTDIRTIRKCFEIEGRGNRISLTPERLKECAGSSIGISSSAEVIQIKHLTAQIELIEEQLTEIDKKIEEFSIQNNSPILSIPGISHFSGTSILAELGDISNYSKPSQIIKFAGVAPLHYESSQFNAQHTSITKKGSKYLRKTLYQIILPVIRHNPVFNKYYQLKISQGKGHRCAQGHCVRKLLRIIYHLLKTNQQFDPQLLR

SEQ ID NO: 103053 - protein, 423 aa, unidentified
MTQFAAYLGIDWADKKHDLCLVDVATGHQTKLVLAHTPQAIAAYFTNLRAQYPGQLIAVALEQSRGPLLFALLQYDFLVLYPLNPTTLAKYREAFTPSRAKDDPTDADYAAELLMKHNDRLKAWHPDDPQTRTLRYLVEHRRRLGGDRTRLTNRMTSLLKCYFPQVLSWFPDLATVLVADFLLRWPALEQLRGVKRTTLLNFFRAHHSVRTDTLEKRLAAIKESVPLTTDRAIIDSSVLMISALAAQLKTTIAALQQFDDEIAKLCVAHPDFPLFASLPGAGAVYASRLLAVMGTQRDRWTTAAELACLSGIAPVMERSGQSVWIRWRYFCPKFMRQSFHEYAGESVKHSFWARAYYEQQIGKGKSRQAAVRALAYKWIRIIWKCWQTRSPYNEVKYLEALRRKGSPLLAHAVKNTACVNKSS

SEQ ID NO: 103054 - protein, 334 aa, unidentified
MKYIGLDIHKKDTQASVLDEKGKFVHGERIRTDVKDIGHFFEKIERMNDDDLSVVIEATGFYFWIYDAIVERGHQAKVVHPTRVKPLMRARTKNDRNDALMLAELLRMGCLEGIYVPDREVREMRELTRHRESLVRKKGDLKREIISALDQRGVKVPEEHRTNFSQKYNDWLRSLNDMIVSDKLDVLELVINKIKGIEQVIEERYGQDDDVKLMMTVPGVGLVTAAVIKAEIGDIARFSSPEKLAAYVGVSPTTYQSGEKEWGGPTRRGNNRAKHVLIEATLFHYHFCRDSKISSYYERKRDSIGRKKAVVASSRKLLEAMYFMVTRKESFHAH

SEQ ID NO: 103055 - protein, 438 aa, unidentified
MSDTVSNERDGAWAAFAAIDWADQKHCWKLIPGGSEQSEQGELDNTPEAVDDWAQALNQRFEGRPIAVCLEESRGALLYMLAKYSHLVLFLAHPTTAARYRQTFSPSGAKADPSDTASLLDLLLRHREHLRQWQPDTVETRLLQLLSEHRRRMVNEKTRQSLRLMACLKIYFPQILKWFADVSSPLVGDLLERWPSLSELQRSHPGTLRKFFRQHNCRTEERLEERITAIYQATPATQDPAVLAAGALAARGLIALLATLRDHIAELERRIEQLVVSHPDAALFASFPGAGKALVPRLLVAFGTRRDRYDNALQMQCYSGIAPVKEASGKSQWVHSRWTCPKFLRQTFHEYAGHSIAQSEWARTYYRLQREHGKSHHAAVRALAYKWIRIIFRCWKNGTPYDEQTYLHSLQKRNSPLSATAMAWNQISGFQKFSKHPS

SEQ ID NO: 103056 - protein, 416 aa, unidentified
MSSRTQSRRQIKADILVVGIDVAKRTHVAAIRKPDGTKEKPFPFRNDRSGFERLRARSERTRGRLGLNGVVFALEATGHYGHALRQYLGLKGYAVLGINPAHTKKAKEFEDNSPEKSDPKDARLIADLAAEGRGRLVRPVKGVFAELRRLGKLRERHVVERTRLANRYSCLVDLVFPELVQEVRKLTIRSIRRLLAEYPTAREIAGLELEELEDRLGRWSQRRLRPDKIARIHRLARESIGVVEGLETARMEMRQLLESLELVEQRLQEVEAAQRAALEKVPYAELLLTVPQLGSVTVATILGETGDRRHYKNAEMVIKMAGYNLYTISSGMFRGKTRITKRGRPMLRRYLFLAACRLSKKGAPLREFHERLTARKAKPQVLVGSCRKLLRLLVAMVRDGKPYEPGRLAMRFGEAA

SEQ ID NO: 103057 - protein, 356 aa, unidentified
MQQLQQYKYHIGIDLHRRTSYWTVMDDERKVLWKKNIPTSKEAALSAIKEIGLPVADMQSAIEPVSGWGWYGEVLEEAGLKVHLVNVYKAKLISGTKLKNDKVDSKILAEMLRSDFLPTAYLAPRATRDLRAFIRGRSFLVRLRTRVRSRVHAILTKHGLLCPWTDLFGKQGLLWLKAQQLLSPHKEELLQLLAVYQELSANIDTSNRACAEALATSKEAQLLVTIPGVGPVTALMIVAEVGDFHRFPSPEKLACFAGLIPSSHSSGERDRFGHITHRGSVWLRSALVESTGKVSPKWGYLKTLYDTIKEKKGTNIARVALARKILMLSWHLVTKNQTWNAKGGGDSVKTETSHIS

SEQ ID NO: 103058 - protein, 366 aa, unidentified
MKKTNTVRVDGNMIFKGHKLMIGLDLGDRWSFYCVLDEAGKIILEQKVATTPEAMKQTFERIPRSLIALETGTHSPWVSRLLKELGHEVLVAHAQKVQLITKSNRKDDRHDARTLARLARIDPELLGPVRHRSAKAQIHLTVIRARAELVSARTALVNAARGLAKSYGQRLPKCGTQQVSRELAAELHAELREVLEPLLKEIESLNERIQEYDVRMEKIAKEVYPEVCLLKQVKGVGTQIALTYVLTLEDPHRFPKSREVGCFLGLRPGRRDSGESQPEMHISKEGDRYLRTMLVQGAHYILGPFGADSDLRRWGLKLAARGGKNAKKRAVVAVARKLAILLHRLWVSGEVYEPLRNSDKALRAVA

SEQ ID NO: 103059 - protein, 338 aa, unidentified
MNSMNRQTAGVSGDVNVGVDVSQTDLVIAIAGTPGTWSTTNDAAGHAALIARVAPLHPTRIVLEATGGYERLVTAALAAAALPAIVVNARQVRDYARATGQLAKTDALDAHVLARFAAQVQPAVRPLPDVAQDELDAAVLRRRQLVEMLTAERLRRAQATGRARYAMRKAIEKHIRFLERELAETDTTLAALIEASPVWRVKDDLLQSVPGIGPATAHTLLAELPELGTLSRQAIAKLVGIAPLNADSGRWRGQRRIWGGRAAARTALYMAALVASRYNPTIRAFYQRLLARGKPKKLALIACARKLLTVLNQLLRTGQRWVAPVMAPPLNPSVSSHV

SEQ ID NO: 103060 - protein, 444 aa, unidentified
MNIINQDAAGIDIGSRSHFVAVGQALEDVKEFGVYAEDLTAICIHLKEYGITSVAMESTGDYWQNLFTELIKHNFDVILCNGKFTKHAKGKKTDVKDSRWIQKLHSLGLLTSSFLPDETTEILRTYCRQRINLIHQASAASRKMQKYLKFLNFRLDVVVKDVCGLTGLRIIEDICKGNLEPESLAEHRHFNCRKSKEEIAKALHANNREDFLFGLKQEFESYQFFQKQIKACDRKIQKFVNTALKKTPNKLKLRTSDKPYKRLNKNAVDIKNFNQVAFQYFNGVDLLAIEGVSYATILSIMSEIGPEGFSKFKTSKEFVSWLRLAPNNKISGGKILSSRVPKGSNRLKIALRQAANAIGNLKDTDLSDFFRRIAYRKGRQAAVSATARKLGVIIWTMITKKVPYKPSREYLFLDQKRKLGIVKRIQKQITKFELSKENFEFTTD

SEQ ID NO: 103061 - protein, 369 aa, unidentified
MSSVAAPAEAVHLGMDTSRKTIVIATLMPGEQIPVTERIANEEAAIRRFIGRLGDPSQLRACYEAGPGGYDLYRLLTSMGVACDVVAPSLIPKGGSDKVKTDKRDACRQARLHRAGELTPVRVPTRAEEAVRDLVRVRAGLLADRKRAQQRLTAVLMRHGCIWCHGSYWTAAHRAWIAAQRFSEPALAAAIAHYRGALDTREAELAAIEAELGPWARREPLAGPVARLGCYRGIAELGALTLVSEITDWRRFAAARAFMSYTGLVPAEYSSGERTRRGHITKAGSEPVRTTLIEAAWAYQHAPAIGATLRRRQAGADPGTLARSWKAQRRLHARYRHLTSHGKAPGEAVTAVARELAGFVWAEMTSDPA

SEQ ID NO: 103062 - protein, 360 aa, unidentified
MKKHNTERREQKGKGRKTIGLDLGDRTSRYCVVDEQGEVILEGSVATTESALRSWVEEMGPCVVAMEVGTHSPWVSRLLKESGQQVIVANARRVRLIIESSRKNDRLDARTLARLARMDAALLAPIRHRSAQAQQHLIMIRARAALVETRTKLVNTVRGMVKATGKRLRKCSARSMGPAAARQIDDALAQVIKPLLASIESISGQIQQYDRQIVEVAKQYPEVARLDQVWGVGTLIALTYVLTIEDPGRFERSRDVGCYLGLRPRQRQSGARSPELGISKEGDRYLRTLLVQAAHYILGPFGPDTDLRRWGLRLAGHGGKNAKKRAVVAVARKLAILLHRLWVSGERYQPLRDAEIATAA

SEQ ID NO: 103063 - protein, 424 aa, unidentified
MATRRRTNKVDINALVDLYERCAGIDVHKETVTVCVIRPGTDGSAQGEMATYGTTTRELRQLSQWLQECGVTHAVMESTGVYWRPVWQILETGGFRLFLANAKQVRNMPGRKTDQADAVWLATLLRKGLIKGSFIAPPQIRALRDLCRSRASLVHDRTRVVQRIEKVLEEANIKLDTVASDLMGVGSRMMLEELIQGETDTTKIAELALGRMRSKIPQLVGALEGYFRPHQTFLLKQLLSQFDDLYRRIERFEQQIEEYSRPFDKQVARLDSVPGIDRLSAAAILSETGVDMDPFPTPQQFCRWATIAPGNNKTAGKQRSGKIGRGNRWLRGSLTQCAWAATHDKNSYFAAQYHRLLHRGKRRALVGVGHSMIAAIWHMLRRDVEYRELGADYFEKQNLEGLKKTYLKKLERLGFKVSLEPVAA

SEQ ID NO: 103064 - protein, 338 aa, unidentified
MQLYAGIDLHSSNNYLGIIDTNDKRVFSKRLPNCIKAISMALKPFRKKISGIAVESTYNWYWLVDGLQDKGYKMHLANPSAIQQYEGLKHTDDKWDSFWLAHMLKLGILPQGYIYPKKQRPMRDLMRRRLRYVSQRTSHVLSLQSMLNRHLAMQLNSNDIKKLKLTDADKLFKDPFSTSAAKHSISAISFLDATAKKIEKQIMASAKLKKNFQVITSMPGVGHILGLTVMLEADDFSRFESPGNYASYCRCVKSERTSNKKKKGEGNRKNGNKYLAWAYVEAAHLIIRFCPEANAFYQQKKAKTNGAIATKALANKLARATFCMMSDQTMFDVKKIFR

SEQ ID NO: 103065 - protein, 415 aa, unidentified
MDAVYTHCAGLDVHKKTVVACVITPGGSSGWQRETHTFGTMTADLLALSDWLSGHGCTHVAMESTGEYWRPVFNILEGNFEVLLVNAQHIKAVPGRKTDVKDAEWIAQLLQHGLLRASFIPPVAQRDLRDLTRHRSNFIRERATLVNRVQKVLEGANIKLGSVASNVMGVSGRAMLDAIVAGEANPEVLADLAQGRLREKREQLSQALTGRVKPHHRFVLTELLCQIDSLDETIARFDLEIEAYCAPFEMAVVLLDTIPGVGRETAEVMVAEMGADMTHFPSADHLASWAGLVPGNHESAGKRLSVKTRKGNRTLCTALVQAAHGAAHTKNTYLAAQYHRLAARRGNKKAIIAVAHSILVIAYHLIQRQEPYRELGADYFDKRRPEATAKRLVKRLEHLGFDVQLSRPTSVAATA

SEQ ID NO: 103066 - protein, 351 aa, unidentified
MNIMGCDLHSRYQVVAWVKEETGEIVTRRLEHENGEARTFYADLPRGARVGIEATFPSHGFERLLGECGHELWVGDAAKIRASAVRRQKTDTRDTEHILDLLLAGRFPRIWVPSMEERDLRQLLVHRMKMVRTRTAVKNQLHALAMGQGLCRKSKLWSAQGRAELESLRLLPWAARRREELLKLLEQLDGSVEELDRAVEEAARSRADVALLRAQPGVGAVVGLAFVLTLGPVERFPNSRKLVSYLGLNPSEHSSGGRQRLGAISKEGNSMLRWLLVEAAQTAARYDPELRRAYQRLKFRRASGVAKVAIARRLAVRLYWMLRAQRDNAQPVRMSGSPSSGVVPLQTGSRV

SEQ ID NO: 103067 - protein, 476 aa, unidentified
MEILYARVGGIDVHKKQVTVTARTPEEQGRVRWETTRTFRTFYGELLEMASWLVVQRGITHVAMESTGPYWWPVYSALREVGGPDLVIEVVNAAHVKAVPGRKTDVKDSQWLAQLMEVGLLRGSFLPPEQVRAMRDFTRYQTKLTEERSREKQRLLKVLEAAGIKLDNVASDTFGVSGRAMLAALVAGERDPVVLAALARGVLRNKTEDLRLALAGRFTAHHGQMVALHLARIDHLDQMLTQVTDTIGHTGDPAAGLIGPFTAQIELLMTIPGIGERVASVVISEIGVDMSRFPTAKHLAAWAGLAPGNNESAGKRRSGRRRKGNTHLCSILIEAALAASRTRTRIGARYHRLHRRFGGRQHPGAAKKAAFAVAHTLIKVIWTVLATGQPYTDLGPDYYTRRINPETHTKKLIAQLVLQGLINFGVPRLAGHRPVDWSPLAASSQVTGRSVPVVLEALSGKKIIFVDDEGGEPPAA

SEQ ID NO: 103068 - protein, 346 aa, unidentified
MTIFAALDVSKRDTTIHVADSKGKCLWRGKVLTNPEAIAEALKPFSGRLEKVGLETGCWTTWLWHELTQLGFPMTCMCARQAHAALSVTMNKTDTNDARGLAHLLRTGLYREVRIKSWDDMRKRALLRARATMLRCALDLANAIRGALRTFGLPLATGTGNGGAKAFEQRVLGHLSGRSDLGVIVFPLLEAWRAARVQVARHERTIRAIVRADARCRLLMTVPGVGYLTAVGFVGAIGDPSSFNSSRTAAAWIGLTPRRYQSGTIGIQGRISRQGDKLLRAYLYEAAAHILTRSKADCALRRWGLCLRERIGFKRANVAVARKLAVILHAMWRSGKPFEPAGLVAG

SEQ ID NO: 103069 - protein, 368 aa, unidentified
MKKLSVVGIDIAKQGFPLVGMDEHGTILVRKRLYRAQVMACIAPLPPTLMGMEACGGAHSWARRFRAHGHEVKLMAPQFVKPYVKANQNDLRDAEAIAEAVTRPTMRFVPITDVAQQDLQALHRVRERLRGRRTALVNAVHGLMHEYGMVLPKGVARFRHAVVEKLESEQDTLTPLSREMFGKLVEEFVALEEQLAYDHEQLEALAKTHPECQRLTTIPGIGPVSATALVAAVSDASAFKNGRQFAAWLGLVPRQHSTGGKERLLGISKRGDSYVRTLLIHGARVTLRWVGLTTDRRSQWMRQRLERRGKNRTAVAVANKNARIVWALLTSHQDYQPVQGERRGRAWESRCCCSPHGGRRPGDERCQA

SEQ ID NO: 103070 - protein, 325 aa, unidentified
MQGKDRSEQETKTKSTVGIDVCKLWLDIHILPSEESFRVPNTKAGSKEISRRLQHYDVQLIAIEATGKWHRDLHRNLADNGYPVRVVNPLRARLFAEAMGLLAKTDRLDARMLAIFAASLTEARPPAPEIIEALKELVQARCSAVEEQTSLTNQLKSATIAFLRRQLKLRLTHIAKQIKALETEALKRIKADPGLARRYDILVSIPGFGDIVAMTLLAWLSELGSCNDKQIATLCGLAPWPDESSDRVGARHIRGGRELIRKILYLAALTAKSFNQPMKAFFRRLTANGKAKKLALVAVARKLVVLANTLVRADRLWQIEAPKCA

SEQ ID NO: 103071 - protein, 366 aa, unidentified
MIAVIEMSLSSWLVAGIVPGVERQPLKKLAVDESALLKLLNRWREEAEKAGRKIERIAVAFEAGRDGFWLARWLRARGIEAHVIHASSVAVSREHRRAKTDRLDTELLKRAFLGWLRGERDHCKMVAIPTTKDEDAKRPNRERQSLVGEQTRIVNRMKAALIRLGIRGFNPKLKKAAGRLEDLRTPEGEPIPPNTLAELRRDMERRRLLSDHIRQIEEARLERMEQAPGDGPHAMVRLLARVIGIGIETSDMLVHEVLSRRLRDRRAVARYAGLTGAPDESGSKRREKGLAKAGNARVRRGMIQLAWRFLLFQKDSALAQWYRTRTEGAGKKRKTMIVALARKLLIALWRLVTTGEVPAGVVLRAA

SEQ ID NO: 103072 - protein, 369 aa, unidentified
MECLAQPLQKGTPFMTITKYIGMDVHKESISIAVMNAAGKLVMECVIETKGSMLLQFIDGLRGDVHVTFEEGTWAAWLYDLLKPHVSEVVVCNPRKNALLKDGSKSDRIDARKLAELLRGNHLKPVYHGEQGLRTLKELARSYLNISKDVTRVMNRLKALYRSWGIACAGTKVYAPRHRSEWLGKISEAGVQRRAEHCYQQLDALRLLHQQVRRDLLLESKKHQAWRLLGLIPGIGPIRAALLIALIQTPHRFRTKRQLWTYSGLGLETHDSAQYRVVEGQLQRSKKPVTLRGLNQDHNHDLKDIFKGAATRVSSSSGPLHDFYEHLLAQGRKPTMAHLTLARKIAAITLIVWKKEVRFDASYLKSQAA

SEQ ID NO: 103073 - protein, 391 aa, unidentified
MVCVGSDVAKDKHDCCILDSEGTTLVDCFTIPNNMDGFKSLLQTIQDCSQKSDKIKVGLEATGHYSYNILGFLLDNDLPVYVMNPLHTNLYRKSLSLRKTKTDRVDAKTIATMLLSDVDLKSYTDTAYHNEELKSLTRYRFDKVQERAKLKQSVSRLVTILFPELEQLVSSIHGTSIYALLSEYPGAKQISEAHLTRLANILVKTSRGHYRKDKATHIRDAARTSIGSVMPAKSLELKHTIKLIQELTSEINEIEDAIRKIMDELKPPILSIPGMGFHSAAMILAEVGDFSNFNSPDKVLAYAGCSPSTYQSGKLTNCYAHMEKRGSRYLRYALYTATKYVCYWNPVFTEYLTKKQAEGKHYNVALSHATKKLVRLIYALQKSGKAYLAVT

SEQ ID NO: 103074 - protein, 343 aa, unidentified
MAEYVGLDVSMKETAVSVRRDGKRVWRGKCPSDPKVLADLLRRRASEAACIVFETGPLSIWFYHMLSAEGLPVVCIDARHAKAALDMAANKTDANDADGLAHLAEVGFFRAVRVKGFDSMVARTLVSARTKLVMVTTDLSNQIRGLMKTFGLIVPAGKGSRFEANVRTLLAEQDLIAPVILPLLEAWRAVRLRATELSRQLIACARQSRACRLLMSVPGVGALTATCFATAIEDPANFSRSRSVGAWLGLTTRRYQSGEVDYDGHISRRGDAYLRGLLYEAATVILTRSSAESALRTWGLRLREKTGFKRAAVAVARKLAVIMHAMLRSGQLFDRTAGALAAN

SEQ ID NO: 103075 - protein, 455 aa, unidentified
MYFEKRDLPQYNSIVLVRARKAQIPIGECLYMKRTQNEKILQIKNETLIVGVDIAKKIHHARAFDNRGVELGKLLKFENSAQGFAAFDAWLAKIQQKHGMTEAVVGFEPTGHYWFNLGDHLAECGHKLAILNPYHVKCARELDDNSPSKSDQKDPKTIAMLVKDGRYRDVYIPDGDYQELREMVRERERLQERLGSLSSQIIRWLDIYFPEFVTVLKDWRGKAAWIALRRFSTPKRMAEVGAQEILLAWREEMKRPSLKKAEALCSTAEQSIGRTQGSGAAVRSLQNIMTEYELLTMQMEQLEEEMQECLFRIPHAAELLAIKGVGMVAVAVFVSEIGDIRRFKDPRQLIKYAGLNLRTNSSGEFKGKTKISKRGRRRLRHALYKAMIPILATNEEFRSLHQRNLTRTQNPLTKMQSIIALCGKLLRVIFALLTKGVEYEPSKIKVVTTDVAQAA

SEQ ID NO: 103076 - protein, 342 aa, unidentified
MRIRKVTPSCDRGKSAICLTYDHYVAIDWSLQNMAIGHMSRHDDRPRVFERPTELKELKEYLASLKGRTILTLEESGTAHWLYLELLDCVERIVVCDPFHNRLLCHGPKTDKIDAGKLCELLRAGLLKEVYHSDNGLYELRTLVSAYQNVVCAGVRTLNQKKALTLGHRDRGKSALFIGGILQENIDLYRRSKQTYERRFDDVARRNQLVRFQREINGIGTIGAVKIVATVVDAKRFPSAGKYLSYCGLVKHEKLSGGRCYGRRKPRYSRVLKSVYKTAAMVALQGASPIREYYDHLLSQGVTEHNARNAVARYIARISYGMLKSGTRYEPYRWRGRVQEAM

SEQ ID NO: 103077 - protein, 482 aa, unidentified
MKPKPQEKTKKATDHPTERHWREMNRKQRRETMRKIQSEDLRLEVVHPDAGGIDIGNESHYVAVPPSRDSQPVRRFGCTTAELKAMADWLKQCGIRTVAMQSTGVYWIAVYDILEQAGLEVYLVNARETKNLPGRKSDVQESQWLMKLHTYGLLRNSFRPSQEIRRMRTYWRQRNDLVRAAGRHIQRMQKALTQMNIQLANVLSDVSGVTGQAIIKAILTGERHPHKLAAFRDCRVKASEEEIARSLEGNWQEDLLFVLKQEQAGYEFCQKQMAECDRQIEQYLQQREDRSRGASLPEEKRKERFKKKKGNKPQFDLRAELFRISGTDLTRIDGIDVMTAMTILSEAGWDMSKWKTEHHFVSWLRLCPDNKVSGDKVIGKGRLPTNNRVTIALKMAASTLWASNTYLGAQFRRLKTKLGAAVATKAMAAKLARLVYRMLRYGMPYVDRGAEFYQAQHRQLQIKYLKWKATSLGFQIIQVPAA

SEQ ID NO: 103078 - protein, 415 aa, unidentified
MALKIVYKICCGIDVHKTFVVACIASTNDKGVTSYESHRFSTYTSGLKTLLQWLIDRNCKDVCMESTGKYWIPVYNILEKGCSIVLAHPKYVKAIRGKKTDKKDAKWIADLFKHNLVAGSFMPPSDIRQLRDLMRYRFKLTCFKSSEKNRLQNCLTVSNIQLGNVVSDTFGKSAQAILDKILENPADTSFDLEPLVFKSLKKKLPELRDAIDGYITPEQAGKLKVIKTHYEDLESRKAELEELILALAAPYQQELAILQTAPGIRSDFTAIGIISEIGTNMEAFPSAKHLCSWAGLTPTNNESAGKKKSVRVSKAGCYIKPLLVQCANAVIKSTKHPEMRNRYLRLKKRRGHKKAIIAIARMLLTALYHMLKNGENYNPELYRKTDLPPAGREITIEQALMLIRNQGYKIKSATT

SEQ ID NO: 103079 - protein, 388 aa, unidentified
MYLIGIDISKYKHDCFIATEAGESIKAFSFDNNRLGFDTFLETLKSIDQSKEIRIGLESTGHYGSNLKQFICASGYTYLEFNPYLTHMFSKALSLRKTKTDKVDAKTISSMLGSVDYKTLHTRFYHINELKQLVRYRHSQMVNRSKTLIELTNILDRIFPEFKPFFNERLVGSAMFILKRFKSRARISKISTKDYEAIRSYSKGKITYVRIQKLKSLAVSSVGYETKSDLLLLKHSIKHYEDLTEVIESVEHETIKLMKHFNQTLTTIPGLNIISAAIIIAELGDFKNFTNPAQIVSFAGLDTSVNQSGTMETRGHLVKRGSGLLRMTIWQITFSSLRLNPKLYDYYLKKRAEGKHHKVAMVHCARKMIRVIYYLSVNQLTFDYSQFR

SEQ ID NO: 103080 - protein, 429 aa, unidentified
MQNTAANKRKQVPEGYLVIGVDPHKKRHAAVAITQDFTTHAKFKFDNTREGLEAMLDRAKAEMVKTDCRGVMFAIETGGHYWRNMAYFLDVQGIPFRFINQFTLKRRREGKDLNRRKNDYRDSEVAAQLLCTGEFTESKLPQGVYAELRTSHNAYRRLVKERTRITNLLKGLLDALFPEFTQVFKNPCALTALSVLSICPIPRVIAGMAEDEFEATIEARHAGRRLMRRKLRALHYLAKTSIGIEAGACSLASEIAFLVDKLELMRQQICVMEETLVRLVDETEEGKYLLSIRGLNYIAVAGLLAEIGCFKAYRSAKQMIKMAGSNPTESESAGKKRSRTPMSKQGRPVLRYCAWTSVIPMLRLNADFRAWAKQRRERPVHANPLNGREVVGAALNRLFRLAFALVKNQTFYQIPKPTAAIKRELVAAI

SEQ ID NO: 103081 - protein, 410 aa, unidentified
MEVLHPHCAGLDVHKESVVACMRHMVDGKVSSEVKTFGSTTQELMALSDWLSDEGCTHIAMEATGVYWKPVWHILCDGEFELVLANAAHVKNVPGRKTDVNDATWLADLMAHGLIRASFVPDELTQQMRDLLRTRKQFVRERSSHTQRLQKTLEDANIKLDSVVTDILGLSGRRIIEALIDGQAVPQTLTTLAHRNIKATTAELEASLRGRVTAHHRFMLRLHLDHLDAVDAAIARIDKEVDGNVEPFRAAIEMLSTIPGIGSLTAEVIVSEIGIDMGRFPTAEHLISWAGLCPKNDESAGKRRSTRMKKGAPWLKTTLIQCAWAATRTKQSYLRAQYLRLRSRRGAKKAIGAVAASILTAAYHMLKNGTLYQDLGADHFDNRTKGRQVLRLVKRLQNLGFEVQIMPQAA

SEQ ID NO: 103082 - protein, 521 aa, unidentified
MVSRTKSTRKNSNKSSKRRYIGKPGGVIQERVLKVGPQRFGIVAVDCAKRRSKWMLCDFYGRVIIEPTEVDHERGTLDAMVMRVLEACQAEGIQDSIVAVEMTGIYHKPVQRAFRKAGFDTRTVHPFASAHYRGALHPDNKTDDNDLEAIFLAAAAGYGLSVFPVDETYRSLQRLARHRRNLVKQRSRLNVQIRVLMHQTMPGYADLWEEDKLFSHSVAMLIAKNFSSAESIKKAKQAGLAKYLRRSKTRFQERTLDKIYAWSLQAAEPDPLIELLTEQWKQLLELRDMLSAQITQTERQSASFLAKTPYILLLSIKGINVVSASEYAGEAGPIEHYASATAINGRAGLYPSRYQSDEVDRTDTVAKNCNRRLRAACILLAKNLIKCHPYYRGLSAVWATRNIKTQDRNCRMANRANRMVFQIVSGRQVWRGRGIDCEAILFKLREFHHAHATPLDQTVAHMNEAYQWLPKSVHQTEGKPLAELAGKKRRGTSSIGELLIPLLIRLGVREASELESKTSEA

SEQ ID NO: 103083 - protein, 366 aa, unidentified
MEQFIGCDTHKHYSVFVAMDERGNFSPAWRVSHDGDEVGRLLGALPAGSRIAVEATGSCYWLIDRMRAQGHNPCMAHPLESKRRMGKTKKTDKLDARGLAMLLRNGTLPEVWIPPAEVRDRREPMRLRMALSKMRTVLKNRIHGALTRCNIRIPVSDLFGVQGRKDLEGQMHALPEHTRGGVARALRALDFLECEIEDAGKAVAAMLEEDQAVRLLDTLPCVGPILSAVMALEIGDIRRFQTAGQLASYAGLTPSVHSSGGHTRMGPVRRDVNRTLKWTFVEAANLIAMQQRRWPARHTVRLYRRVKERKNHQKAVVAVARHLAEAAWHILTDNKGYREPKIAVRTSSKHPASLTHEQARPTPVRQ

SEQ ID NO: 103084 - protein, 338 aa, unidentified
MIVIGVDVHKRSVTAVAVDELGRQLDERTVQVGSEELLEWVVGLGEERLWAIEDCRRLMRWLERQLIRAGEALVRVPPKLMAPERRHGRARGKSDPIDALAIARAAVREPDLSRPREDEEPFRELKLLVDHRDAIVDERRRVHQRLRWHLYQLDPTYEVPLRMLARSSHLEGVARWLARQQHDLQVRLARELVVRCRSLNRGIAELDRELEQRTEALAPALLDLPGCGPITAAKLLAEIGPVERFQTDAQPPRHSGVAPLEASSGRIQRHRLDRSGNRQLNAALYRIAITQARVHEPARAYLERKRAEGKSRREAIRCLKRLLVRVVFQTLKASPALT

SEQ ID NO: 103085 - protein, 485 aa, unidentified
MSAFLRRSGQNPHRWATKGMKSKKELLAKKKHIKRKSAKAKHNRVLGIHNPHAAGADIGATEIYIAVPPDRLEMNVRCFGTFTQDLRAIVQWLREYKVTSVAMESTGVYWIPLYELLEQEGFEIYLVNARHVKNVPGRKSDVQDCQWLQYLHSVGLLRGSYRPAQDICAMRAISRYRDNLVHFGAQHLQHMQAALDQMNLRLHHVIADLSGLTGMAIIEAILAGERDPRQLAKLRDPRIKASQETIAKALEGNWRVEHLFVLGQALQSWKQVQQQLGQCDQKLGELSSQLEGKIDLANSPLPPSAKYCGREPRSKNQPNGPWREELYRHFGVDLTEVPGLSLGVVQTLFVELGADLSAFPTPRHFAAWMGLCPDNAITGGKVIRRGTRRNRQRIRLALRLAATSLHHNKTQLGECFRRLRARLGAPKAITAMAHKLARIIWHLVTHRVGYDESIFAEREEQLLRRKQRQLRNLAHSLGFTLVSNP

SEQ ID NO: 103086 - protein, 356 aa, unidentified
MGKDITTGSRLTIGLDLGDKHTVGCILTGLGEVEETFRVVTTMSALGRTMAGFESSRVVLEVGTHSPWVSRLVEQAGHEVIIANPRRVRLIAENDSKTDEVDAELLARLGRADPGLLKPIVHRGERAQHDRILLLARDGLVRSRTQLVNQVRSFAKSLGHRMPSSSTEAFPRRVREQFGKELFPGQSVMLEMIDRLTQEIRRMDREAEKLCQDRYPETGVLRQVKGVGALTALGFVLTLEDPSRFAKSRTVGAYLGLRPRSRQSGERQPQLRITKAGDELLRRYLVGAAQYILGPFGPDTELRRFGQKLAERGGKAAKKRAAVAVARKLSVLLHRLWVTGEEYQAIGYGQSTQEAA

SEQ ID NO: 103087 - protein, 311 aa, unidentified
MTYCGIDVSAGTLDTASASGATWQHPNTPAGIAAVVATLAPLAPTLIVLEATGAYHASVTGALVAAGLPVAVVNPRQVRRFAESVGQLAKTDRLDAALLARFAATVQPPVRVLPDVATQELAALVDRRRQLTEMLTMERNRLAVARRSVQASVRQTIRALERALAALEDETDRWIKDSPVWRAREDLLTSFPGIGPQTARALIARLDELGRVSGRQIAALVGVAPFAQESGRWKGQRHIRGGRAEVRALLYMATLTAARWNPVIRTLYRRLKAAGKPTKVALTACMRHVLLILNAMVKNNQRWQAPRPTTA

SEQ ID NO: 103088 - protein, 370 aa, unidentified
MGNRSMFVGLDVHKETIDVSLAEGDRHGEVRHYGVIASDLEPLDKVVRALRAPDRELHFVYEAGPCGFGIYRHLTKRGEQCVVVSPSMIPKRSGDRVKTDRRDSQMLARLHRAGELRAIYVPDDTDEALRDLVRAREDAVVVGMQAKYRLKAFLLRQGRRYPGREGWTLPYRRWLTDLSFPSAPQHIALQEYRDAIAETEQRIDRLTEQLRQLAPTWRWAPMVAALQALRGVSFITAMALVAELGDLTRFGHPRELMAYLGLVPSEYSSGPSVRRGAITKAGNPHARRLLAEAAWAYQGIPRIGRQHAYRQEALPKVVCDIAWKAQLRLTTRFRRLVARGKAKPKVATAIARELTGFIWAIAQEVSPASQ

SEQ ID NO: 103089 - protein, 351 aa, unidentified
MSRVYIDIDLAAKCCWGATRNQEGGFLNSEKFKTSEENLIAYVKAQGGEATVLLEECDLAGWAQRVLAPHTQKVAVCEPRANLWIHRDAVKTDKIDAAKLSDIARLGNYKEVYHTTDESIYELQVAVRAYDRLVGRVKALKNQIKAELRGAGVIAEGAGVYGKKGRQRALALVASPLLREIIACEYEHLDFLVRSQAEAKRRFVRLGQEVGIVLAWQEMPGVGPVGAAKFCAYIKCPHRFANKGQISRYSRLGVTQSETGGRSLRRQHLDPSGNGALKDISNKAFRAAMRTREDNLIKRAYARSLAVTGKEDHARLNVQRKILAIMWAMWRDGTAYDDDIDMKNGACGARL

SEQ ID NO: 103090 - protein, 358 aa, unidentified
METQTSNLSFKGQHFYVGIDVHKKQWTTTIRSVNKELKTFSMNPAAKELAQYMQRHYPEGHYHSAYEAGFSGFHIHESLTSLGFKNQVIHPADIPTMDKEKRNKDDVRDSRKIARELENRSLKGIYVPNRFHQEFRSLCRLRERSVSHQTRLKNRITSYFAFYGITIPSREELPHWSKRFIGWLANQALQYSCGNQTLALMIDELTYQRTLLLKILRQIRKEVRKSPEVLDIIRLLETVPGVGFIAALTFYSEIMDMTRFGSLDHLKSFVGLAPESESSDETTFEHGLTNRHNRHVRYVLVEAAWVAIRKDPALLNTYQGLTRRMKPQKAIIRITVKLLSRIRHVWITKEPYCLSVVK

SEQ ID NO: 103091 - protein, 429 aa, unidentified
MRNESTPGARGPVFCGVDTHADSHWLCVLDWRGRKVLSRRFPADAAGYEALAGAIAAAGEPACVAMEGTSSYGAGLTRHLASLGMPVREALSPARMQRRRPGQGKCDESDAERAARAAMSGSKLGTPKSQDGWVDGVRCMLAARSGAVKARTSAINTARSLLTTAPEGLRSRFRGMAGPRLMEELPSVRAEGALGAALGALADLWAAARDAALDMERAIEASLEENCPALLAMYGCGPVSAAKLAVAAGDNPGRLRSEASFAAICGACPIPASSGKTVRHRLNRGGDRQANSALHEIARQRVMRDPETAEYAERARARGKSDREVMRCLKRYVAREAYRALMRPHEVRRPEDASGLVAARRAARVSQVRAASILGTSEKYISMLERGQRELKPIRRAYEAWVEAGLPLDWDRQAFEAERKMDSKKHLAK

SEQ ID NO: 103092 - protein, 343 aa, unidentified
MTRFVGLDVSQKMTAICIIDNAGRRLWRGQCSSVPEQICDVVLQHAGDNVRIGIETGAMTPWLVHELRNLGFEVVCLDARHARAALKMQINKTDQNDAEGLAQIVRTGWYRSVHVKSLDSHRARALLGARTQLVGMTTGLSNHIRGILKTFGLLPGSMRGLPFDRKVEALLLDRSDVALIVRPMLVAWRQLREQIAAFDKAIRVLVKSSCACRLLMSVPGIGVLSALVYVSTVEDPARFIRSRSVGAHLGLTPRQYQSGEIDRSGRISKCGDTLARTLMYEAAGVVLTRLKRASSLKDWAQAIAKRSGNGKARVALARKLSVILHSIWRSGQRFRWPEQANPA

SEQ ID NO: 103093 - protein, 320 aa, unidentified
MKTSDNVSVTVGIDVSKLHLDLHVSSGLYDSFRNDGSGFSDIKKLLSKFTVSLILLESTGGYENGIVCYLQRLGYDVVVVNPRFARDFARSLGRLAKTDKVDAELLSQFATVINSRVDRARFVRPLTDETRRHLADMVSRRRQLVDLITVERQRKSVSSQYASESIDAVISYLRSQLERVDADISAHVSLYYSDLSDLLTSFKGVGSATVGVLLGEVPELGKLNRRQISALIGVAPFNRDSGQMRGRRRISGGRSLVRNSLYMPTLSAIRFNPVIRDFYERLLKSGKSRKVAQVACMRRMVCILNAMLRDGSRFEPVMGN

SEQ ID NO: 103094 - protein, 401 aa, unidentified
MISVGIDVSKETSTVCILKPYGEVVASPYDIEHTEASVNELITRILSVEGEVRIVMEATGAYHLPLLVTLKEAGLFVSVINPLTMKRYASTALRKGKTDKMDSVRIANYGIDSWFKLVDYSSPEEIYTQLKLLGRQYAHYIRMRVESKLGLTSLLDRTMPGIKKLFGGTRSEAPTKDKLSDFIEEYWHFDLITKKSETRFVSDYCRWAKKKGYHASEAKAKNIYALACNGIPTLSSSAASTKMLTLEAVRVLKEVNRTLETILTQMQELASTLPEYGVVRVMGGVGEVLAPRLIAEIGDVRRFHSGSALVAFAGIDSPPYQSGSFTGTQRRISKRGSSLLRKTGYEVMKCLKTVKPTEDSAVYLYMLKKEAEGKAKKVAKIAALNKFLRIYYARVVEVYST

SEQ ID NO: 103095 - protein, 391 aa, unidentified
MTYFIGIDIAKYKHDCFIMDQYGSVIRDSFSFSNDSAGFSSLLSVLDSLEPSYEKRIGFESTGHYGLNLKCFLEEHDLSFMEINPILIKRFSSATTLRRTKTDKADAALIASYLTTVEYITYPTQSYHIRNLKSLTRSRDALVKLRSGQLVMITNVLDKIFPEFKPFFNKSLKSATALYLLRNYTVPSRMASMNSESYRKMASKLRRTISYAQFTKLRELAKHTVGREDACLTFELHTYLDIYWSLDSKVKEMETYIEEEFKKIRSHIQTIRGIGWISAASIYSEYGDIGNFQTPNQMLAYAGLDPSRNESGEHAYNGHMVKHGSSHLRYVLLNCAEMVIVHDPVFYDYYRKKREEGKPHRVALSHVARKLIRIIFFLEKNNIDYDPKKMR

SEQ ID NO: 103096 - protein, 351 aa, unidentified
MMIIGVDYHPSDQYIAFADAETGEIGERRLNHRDGEAEKFYRELKQRGVSVRVGMEATGYSRWFERLLAELGIEVWIGDAAKIKTKRVRKQKTDRNDAQLLLKLLLENNFPRVWVPSPENRDLRQLLWHRHRLVQMRTRIMNQLQALAMNEGQRRKKKLWSDQGRAQLEKLPLATWASRRRQDLLELLDRMNPPIEELTRAAEQEAKKWPEALRLMTHPGVGPLTALAFVLIIGTPERFHCGKQIGSYVGLIPSEDSSAGHQRLGHITKQGSSLLRFLLGEAAQAAARCDADWRRRYVHLAMRRQRNIAKVAMARRLAVRLYWMWRNGWAYSQWLEFGSHAGQLATGHGVN

SEQ ID NO: 103097 - protein, 412 aa, unidentified
MEVVYECCCGLDVHAKTVVACLVTKGRKEIRTFATMTDELLQLGDWLRSAGCTHVAIESTGVYWKPVFNLLESLLTVILVNARHIKAVPGRKTDVRDCEWLADLLRHGLLKASFIPPLEIRELRELIRYRQTLVKEHTAVANRIQKLIESANIKLGQVASEVLGLSGRLMLRALAEGVQDATQLAELAQGKLKSKKSELRRALDGRLTQVQRWVLAEFLTRVEELEAALTRVEARIGEEVTACADSFVPQAVELLESIPGVGVRTAQTIVAEIGVDMSRFPSAKHLASWAGVCPGNHESAGKRKSGQPTKGNQSLRTILVEAAWAATNAKGTFLRAKYQRLVKRMPKQKALGAIAHRLLVISYHLLSRRVPYAELGNVPRDHQQVERQRRRLVEQLKTLGVTVTIEEAASAA

SEQ ID NO: 103098 - protein, 414 aa, unidentified
MSVQDTPGTRRAVTAGVDWAKDNHAVCVLDTDGEPIERFTIPHTKAGLARLNTILDRHHIDDVGIERGDGPVVDALLAAGRTVFVIPPSQVKALRRRYGSAGNKDDRFDAYVLADTVRTDRRRLTPLLLDSPATVALRKLCRARKDLVAHRVAVTNQLRAHLQTALPAVVDLFADLDSTISLRFITRFTSQDALDWLSPKRLSAWLSSVGYSGRTDPAVLHARITAAARGADGDHGRALAGITHAYLATVQTITAQIEAIAQQITEALTVHPDRQIFTSLPKSGTVRAARLLAEIGDARGRFPTPASLACLAGVAPSTRESGKIRVVAFRWAVDKQLRDAVCDFAGDSRHANPWAADLYRRARARGLDHPHAVRILAKAWLDIIWKCWTTNTAYDPARHRALQRLLNQDQKMAG

SEQ ID NO: 103099 - protein, 374 aa, unidentified
MADYNEVFVGIDTSKLRNAVAVAEGGRNGEVRYHGEIENTEAATRKLVKKLAAQHRQLTFCYEAGPTGYGLHRLIKALGHECVVVAPSLIPKKPGDRVKTNRRDALNLAKLLRAGELTAVWVPDARHEAMRDLVRSREAAVDDLKSKRQQVLSLLLRLGRHFAGKRTWTKAHMNWLVSQKLAHREQRIAFEEMLLAVRQADERVIRLEKAIAAAVPEWSLAKVVTALMAVRGLDLISATIFLAEIGDLSRFASPRQLMAYLGLVPGEASTGDRVWRGGITKAGNHRARRILVECSWSYRHPPRVGKKKLAKVEAAPPAVREIAWKAQARLTARYRALARRGKRPTLVVTAIARELSGFIWAVSRAVGAPATPAV

SEQ ID NO: 103100 - protein, 379 aa, unidentified
MDHAITDTSAETVLRGALELSKNSWLLALQLPDRAQPSLYPIRGGDTEGLMAKLTAARDRWAKVSGKAPSIVLCYEAGYDAFWLARFLKARGIECLVVDAASMQVNRRARRAKTDRIDVGMLLRALIAWGQGDRHVWSVVRVPSVDEEDLRRSHRERDRLVRERTAHINRIKGLLFGQGIRDINVKSKYKTLQIDKLVTGDGRPLPPRLASEITREIARLALIQEQITALERERDQAPTPCKITERKRVQLMCLTGIGPAIAAVMTREVYYRQFDNRQQVAGFLGLATSPHDSGDVERSQGISRAGRGQVRGIMIQAAWLWLKHQPKSAITRWFVQRTAGQSGRIRRIMLIAVARKLAIALWRFVEQGLVPQGAMLATR

SEQ ID NO: 103101 - protein, 410 aa, unidentified
MNLTTLFVGIDVSKTTNAVRFMDGGGDTLSLFSVPNNHDGAVKLQEKLRYTLLHTDYSKVTIGMESTSVYADHVAAYLQNDKFLQKWECKIYIINAKQIRNFKKSYPDIPKTDSVDTLIIADYLRFGRLPKTIFRDEKYLALRNLTRARFQAAQSLSREKTRFVETLFQKFSTLDSSKVFSNTFGATALAAACDFLSVDEITYMPVDELADFINRKGKGKFANPTDVAKALQAAARSSYRIPKTVNDSLGQLLAIRLVGIRSIETQIKSLDKAIESYMGAFQNVLISIPGIGKVYSAGIMAEIGDVKRFEGQASLAKYAGLMWRRYQSGDYEAANTKLINSGNKYLKYYLLEAANKVRMHDTVFESYYRSKFREVPKHQHKRALALTARKLVRLIYSLLSNNRLYIQPTM

SEQ ID NO: 103102 - protein, 317 aa, unidentified
MATTGGYVGIDVAKRHLDLAIHATGQPWQVANDAAGVKQIVKHLRTVAPTLIVLEATGGLETRVVSALAAVQLPVVVVNPRQVRAFAQATGTLAKTDRLDAQVLAHFAAAMQPTPRPLPDAATQQLSAVLTRRQQLVDMMTAESNRLGAQPNAALRKRVRVHLTWLTKELGRTEKELTQLIQQSPVWRVQDDLLQSAKGVGPVLSQTLLAEVPELGHLHHKQMAALIGVAPFNRDSGGTRGKRRIWGGRARVRAVLYMGALVATRHNPVIKAFYERLLAAGKEKKVALTACMRKLLRILNAMMKHQTKWQDLSVNTP

SEQ ID NO: 103103 - protein, 354 aa, unidentified
MTISQKREETEMQVTIVGLDLAKNTFHVVCFNERFKELRKRMLRRHQVLLFFANLPSCCIGMEACSSSHYWGRELSKLGHEVKLIPPQHVKAFLRGNKNDYNDARAIAEAATRPGISGVAVKTVEEQDMQALHRMRSQCLRDRTALVNSTRGLLSEYGIVVPKGIASLRKSIPELLEDADNGLSILFRRLLAQRYDQLKELDSHIKFYTNELERSVQQDDACQRLQTIPGFGPVVASAFRSAIGNGSAYSQGRDVAASLGLVPRQHSTGGKNILLGISKRGDQYIRSLLVHGARAVIIQAVRKKDRLSNWLNRIREERGLNKAVVAMANKMARMGWAILRHNSSYRVLSAASGS

SEQ ID NO: 103104 - protein, 352 aa, unidentified
MEYMGLDVHKQYSVACVFNEESGGTEHYRLMNSRAEFQKLFSLHPEAKVVMEAGRSSYMVYDTIEDLVSDIQMANPLKVKAIAWAVVKNDKVDAETLSKLRRADVVPQSYLRNKENRELLYLLRQRMFFVKVRTMVKNRIHSLVDRQPEGVRASKPEVSDLFGNKGKQWLRSLKLSPAEARMLNEMLAMLDFLDAEIASSNRLLYKVIKEDPIAKRLATIPGIGIFYALLIRAEIGDINRFPDDSKLIAYAGLAPSLDESGGKSFHGRLPHQCNHWLKWALIEAVYPAIRKELWLKNRHSRIARQKDYNTAKVATARLLMTLVYRIWKSERVYSQEKPLQGKSKKRMALSHS

SEQ ID NO: 103105 - protein, 365 aa, unidentified
MQKISTMRTSEKNIFQGQLTIGLDLGDRSSAYCVLNEAGEIVLEHKLATTPEAMKQVFGSMPRCRIAMETGTHSPWVSRLLTALGHEVIVGHAQKVRLITKSRRKDDRLDARTLARLARIDPELLSPVQHRSAQAQLHLTEIRARAGLVSARTALVNAARGLVKSYGERLRKCGTQQFRRETTSGLSAGLREALEPLLREVESLNERIREYDRRVEAMAKETYPETTLLKQVKGVGDLIATAYVLTIEDPQRFRKSRDAGCFVGLQPGRRNSGESEPQMHISKEGDEYLRTLLVQGAHYILGPFGEDSDLRRWGQKLAARGGKNAKKRAVVAVARKLAVLLHRLWMSGEVYEPLRNSQRAMSTAA

SEQ ID NO: 103106 - protein, 398 aa, unidentified
MTESSDYESVQVFIGVDVGKDTHHAVAINRSGKRLFNKALPNDENKLRSLISGLKQHGQILLVVDQPATIGALPVAVARSEGVLVGYLPGLAMRRIADLYAGEAKTDARDAAIIAEAARILPHALRTLKLADEQIAELSMLYGFDDDLAAQTTQASNRICGLLTQIHPALERVLGPRLDHPAVLDLLQRYPSPEKLASLGEKKLAAQLCKLAPRLGKRLAADIAQALAEQTVVVPGTNAAAVVLPRLALQLITLRKQRDEVALEVEQRVLAHPLYPVLTSMPGVGVRPAARLLTEVACRAFASAAHLAAYAGLAPVTRRSGSSIRGEYPSRRGNKALKRALFLSAFAALRDPISRAYYTRKMSQGKRHNQALIALARRRCDVLFAMMRDGTFYTPQAS

SEQ ID NO: 103107 - protein, 394 aa, unidentified
MCQQYKTEASMVKHNILFIGLDTHKTFTEVAFIEDHRGAKSIHLGKILSNKAAFKKLARQLQSKYPDATLHFVYEAGPCGYWIYRLLTSLHHCCYVIAPSLIPKKPGERIKTDKRDALKLAKLLKSEELTPIYVPEPEDEAVRDLSRSRETAMKDLKDAKYQLKALLLRNNINGKIKDNWSQQHLRWLAELVLPHPCQQIVLQEAVSTITERLKRLKRLDNELTHQVKNWRYYPVVKAVQALRGVRLLVATGVIAELGDLTRFDHPRKLMSYLGLVPSEHSSGGKRHLGAITKCGNSRARRLLVEGAHSYKHNANISKEMQLRQEGLSKEIIDMAWQAQLRLCRRYNRLMHKGKHRNVVVTAIAREMIAYIWAISREVVLPVVDVKLRLARMPA

SEQ ID NO: 103108 - protein, 425 aa, unidentified
MRFIALDVHRDFCEVAIAEGGRVRRAGRVETTPATLELFAQSLAADDQVVLEATGNALAIARIIEPHVGRVVLANPKAVKSATQTAKTDKLDARTLAKLLAAGFLPEVWTPDEQTRVLRRRISRRAQLVRQRTREKNQVHAILIRNLKQRSPAADLFGAAGRRWLATQQLPADEREMVEACLRGIDFLDQEVVAIDRALAELVLASPELRRLLTLPGVNFVTACALLAAIGDVRRFPTARHLVSYLGLDPRVRQSGSEPARHGRISKQGPGETRHVLVEAAWHAARTTGPLRAFHQRVASRRGRNIATVAVARKLAVIAWHMLSRGEDYAFARPSLTREKLRRLELMTGAERRQGKRNPVRVFATSEQHQLDKQLAAQAELAYRRLVQDWRPAINKGTGAAPGRASRRPSSGQAARQETAPPPAL

SEQ ID NO: 103109 - protein, 349 aa, unidentified
MYYVGVDYHKRYSVATVLDAAGTMLARKRLDNRLDAFRDFLEPYDKDETKAVVEATRSWNIPVDILEQLVDKVILANPGEVKLIAKARISTDKVDSLSLAKLLRVGWVPEAYLRPKTNREQQLILRIRCFLVQLRTRVKNRIHDLIDRQDEAVRSTATGFSDLFGKKGMTWLRSLELGHPVDALLCQLLAVYDALAKEVRRSDRLVVKLFAADNDCKLLVKTPGIGVFFAVLIKTEIGSIERFASSSRFCSYAGVVPSTQSSGGKVWHGRIIKESNRWLRWTLVEAVRPATVASAGLRAFYEYYRRTKGNRVAKVVTARRLGCIVYRVLRERTPYFERPVQSHGRRQAG

SEQ ID NO: 103110 - protein, 387 aa, unidentified
MSDRFDVRKSNSPFDQNRTLLDVIELSQTSWLVGGIVPGLKRRPLKKLDCEKEELLGLLVRWRDEAVKAGHEIDRIVVACECGRDGFWLVRWLTARGLEAYAIHAASIAVSREHRRAKTDRLDTELLKRAFLGWLRGEAGHCSMVTIPTCEEEDAKRPSRERETLMKERTRLINAMKGDLTRLGINNFNPKLRDAPTKLEALRTPEGTPIPRNTLAKLLRDLERLRLVVAQVKAIEAARLERLESSPRDKPHAMVLQLARVVGIGIETADMLVREILSRKLRDRRAVARYAGLTGAPDESGSKRREKGLAKAGNARVRRGMIQLAWRLLKFQKDSALVQWYRERTSDCRGGTRKTMIVALARKLLVALWRLVTSGEIPQGFILRPAL

SEQ ID NO: 103111 - protein, 410 aa, unidentified
METVVERPAALDVHKEQVTACARTPAAGGRREQHVAEFKTTVQGLLALRDWLKAHAVTQVAMEASGVYWKPPWAILEDEFECLLVNARHVKQVPGRKTDVSDAAWLCQLLEAGLLRASFVPPKPIRTLRNLTRYRKAQVGERQREANRLHKILQDTGIKLDCVATDILGASGRAMLDALVAGTTDPAVLAELAQGKLRQKLPALREALEGRFDVEHGIVVGAILAHIDFLDEQISLLSEAIEEQIRPFAPAVELLCTIPGVQRRTAEVVIAEIGADMSVFPTAGHLASWAGLCPGNDESAGKRRSGRTRKGSRWLGIALTEAAQANTRSRDTYLSAQYRRLKPRRGHRKAIGAVRHSIIVACWHMLTTGETYRDAGGDYFTRLDPDKQTRRLVAQLQRLGHTVTLEEAAA

SEQ ID NO: 103112 - protein, 412 aa, unidentified
MVEIVYPRCCGIDVHKASVCCCISIKESGQIEKQKRRFDTTTGQLQEMAGWLQRWKVTKVAMEATGVYWKPVWNLLEKEFELLLVNPQHLKSIPGKKTDFKDGERIADLLQHGLLRGSLVPPQEIRELRDLTRMRASLAQERSSVINRIEKTLEDTNLKLGVVASDVVGASGRAMLAAIVRGETDPAVLAELAKGTLRNKIPQLKLALEGRITGHHRFLLQQWLDMLDFLDHKIALLEERIVENSRPFEATVVAWMQVPGLRRINAYSLLAEIGADLKQFPSAAHLASWAAVCPGNRESAGKQTSGRIRPGNPWLRRTLCEAAWAASRTKKSYFRALYQRLVRTRGKNRALIAVAHSLLVTVYSFTIAGELYRDLGLDYFDKLNKEHLQRSLVKRLEKLGHRVTLEPKASAA

SEQ ID NO: 103113 - protein, 427 aa, unidentified
MKEQSGTIVGIDWSADSHTCYELKADKSFKIPDSVKGYERLLNDYPEAVFVIEEANNRIGDYLLINNREVYVLPPCRSKEARKYHFSSGAKSDSLDAKAIALTFKEHPSYCLKARYSGVGAKITKLVTMYNIVSKTHSQQCNRLYSVLLRYFPEYLHIMDKQYRSNTSLRILSICPTLTELGKVSNEELRKILNKENHRMTSGLRKKLDRIRSEGISWGDTSCEGNLIMFLANQILTLREEEERLRGEMGETLENSPYRIILSIPGVKAAIGSYIVKAYLTHDFRSYQEMQKYAGTIPFLFQSGRKSIMLMRKKCDNDLKNIIHMAAFASLKTCGWARNYYKRKRKEGKTYGHALRALGNIILKIAFSMLSKMKKYDETLFLNAKGIKITQPNNTIIPETFTNPEYSQDAHPSLAATKDVVENLNVT

SEQ ID NO: 103114 - protein, 371 aa, unidentified
MTDEERTIYVGIDVSKAKLAIAIADGMNRDEVLSLGTIENAPASVAKLLKNLSNRTSRVAVCYEAGPTGYGLYRQARAFGFECLVVAPSLIPVRAGERVKTDRLDAMRLARLFRAGELTPIWVPDETHEAMRDLVRARESAAEDQRHKRQLVSAFLLRHARVYHRTKPWTMRYRRWLQCQNFEHPAHQIALQEMLQAERNAAERLDRLTGHIEALVPEWPLAPAVNALQALRGVALISAVTFMAEIGDVRRFDTPVKLMAYQGLVPSEYSTGKTTRRGGITRAGNAHVRHKLIEGAWTYRLPVRPGARKLYILREQPPEIQDISWKAQSRLTARYRKLSQRGKRSTVITTAIAREMAAFMWDIARRTMPTS

SEQ ID NO: 103115 - protein, 366 aa, unidentified
MKKTSTVRVNGNMIFKGHKLTIGLDLGDRWSYYCVLDEAGEVLLEQKLATTPEAMKQTFERIPRSLIALETGTHSPWLSRLLKELGHAVLVAHAQKVELISKSNRKDDRHDARTLARLARIDPELLGPVRHRSAKAQIHLTVIRARAELVSARTALVNGARGLVKSYGQRLPKCGTEQVSRELAAELSAELREVLEPLLKEIESLNERIKEYDARMEKIARESYPQVALLKQVKGVGTQIALTYVLTLDDPHRFAKSREVGCFLGLKPGRRDSGESQPQMRISKEGDRYLRTMLVQGAHYILGPFGEDSDLRRWGLRLAERGGKNAKKRAVVAVARKLAVLLHRLWVSAEVYEPLRNSHKAMRAAA

SEQ ID NO: 103116 - protein, 341 aa, unidentified
MSDYSYFCGIDLAKNHFSLHAVDQNGKVILHKSVTRSKLLTTIANMPLMRIGVEACGGAHYWARTLNKLGHDARIMAIKYVIPYRTKGKNDLNDAVAICEAVQRPSTRFVPVKSPEQQAILSVHRMREHWVRERTALMNRMRALLSEFGLTIPVGRSSLMKQVPLMLEDAENELPHLARTVIADAYRHLGELNQRIADTEQVFDSFAKVSTNVQRVMKVRGIGPQTATAILASIGNGTQFDKSRDFSAWLGLVPKQYSTGGKPRLGRITKHGDKYLRTLLVHGARTVIANLGDKQDKLSQWCRGVLERRGMNRAIVALAAKNARIIWSLLHNQTEYENYAA

SEQ ID NO: 103117 - protein, 317 aa, unidentified
MTNSNKTFVGIDVAKDKFDVAYSNLPKGKTFAYTKIGLKQFLLSLKDSEDVFICLEATGGLERELVRTLQENGYPVAVVNPRQIRDFARASNQLAKTDQIDARVIAQFAAKMEPRITQPLTVPQQKLRDLTARRRQVSNMLVQEKNRLGSTPDQEIRKMIQKIIKLCEKQLETIQAKQQRLIEEDEQMQAKARIITSVPGLGPASVSVLISELPELGNLNRQQIARLVGVAPTNRDSGTMRGKRTTGGGRTAIRNALYMPTIVAKLHNSKIKTFYDRLVENGKPKMVAIIASMRKLLTILNTMIKEGKNWNKNHKTT

SEQ ID NO: 103118 - protein, 343 aa, unidentified
MDHFAGLDVAVKETSVCIVDDTGRIVREVKVASEPEALLAVLTNPTYHFKRIGLEAGPLSQWLYSALAEAGLPVICVETRHMRAVLKAQINKTDRNDARGIAQMMRAGLYRPVHVKTLRSQKLRMLLTHRKLLQSKAIAIDNDLRGTLRNFGLKVGMVGTMKFEARIKELVENLPDLAVLVEPLLIVRRVLREQLGILHRRLLAIVRDDEVCRRLMTVPGVGPVVALTYRATVDVPARFRNSKAVGAVFGLTPSKYQSGEINRTGAISKCGDEMMRVMLYEAAQIVLVRSVKWSWLKAWAMQIARHRGMKKAIVALARRLAVIMHRIWVDGTEFRWTREVAAA

SEQ ID NO: 103119 - protein, 358 aa, unidentified
MVDKVTEAAVVGGVDTHKDLHVAAVVDQNNKVLGTQYFSTTRQGYRQMLAWMTSFGTLKRIGVECTGIYGSGLLRYFQNTGLEVLEVTAPDRMERRKRGKSDTIDAECAAHAAFSGIRTVTPKTRDGMIESLRVLKTCRKTAISARRVALQIIHSNIISAPDELREQLRNMTRMQLIRTLGSWRPDASEYRNVTNVYRISLKSLARRYLELHDEIADLDVMIAAIVDELAPELIKRNAIGYESASQLLITAGDNPQRLRSESGFAALCGVSPVPVSSGKTNRYRLNRGGDRAANSALHIIAIGRLRTDAKTKEYVARRVAEGHTKMEAIRCLKRYISREVYTLLRNQNRRINSIPITA

SEQ ID NO: 103120 - protein, 374 aa, unidentified
MKKGSSSQQSPKRAAKAFRNQRSRTIGMDLGDKHSCYCVLDEHGEVVQEGGVSTSQKAMAKVFGPIGRCRIAIEVGTHSPWVSRILQTFGHEVVVANARQVKLISESSRKDDRLDAQTLARLARVDPQLLRPIRHRSAKAQRDLMVVRVRSALVEARTGLINTARGLVKSLGERLPICDSDDMGVEQTESLPTEVQQVLEPLLKEVVSLTEKIKEMNRRVEQIAGEDYPETRLLQQVKGVGPLIALTFVLTLEDKARFQKSRDVGCYVGLRPRRSDSGESQPQLRITKEGDAYLRKMLVQGAHYILGYRGPDTDLRRWGLKLAARGGKRAKKAAVVAVARKLGVLLHRLWVTGEVYEPLRNVSMQQRHKVAAAA

SEQ ID NO: 103121 - protein, 384 aa, unidentified
MPDVSSNAPGVVRMRAALDVHKRTIMCASQPDDPRAGELRLQEIPNTERALRALIRRLGGAEGLVVCYEAGPCGYEPYRLLSEMGVACDIVAPALVPVAPGARVKTDRRDAKRLLVLHRAGALKFVHPPTPAQEGLRDLVRCREDLVCARRAARHRVAKQLLRHGHIFREGKKSWTKIHQAWVRRQRLADPLAQSALEHMLAHLDALDAQIAVLDHQLDKIAQREPWSDPVRWLSCFRGITTLTALALLAELGDFRRFGTARELMGFLGLTPSEYSSGEQRHRGHITLAGNTHARRLLIEAAWHYQHAPRVSQRIAAVQPHVPPDVAARAHSAQVRLHHRHRSLTGRGKRSTVTNVAVARELAGFIWAAMTRQPLRDPEVNAAA

SEQ ID NO: 103122 - protein, 312 aa, unidentified
MDNFVGIDLSKTHLDVAVEPGGQGWRLSNDLQGRQTLLRRLHRLQPALVVLEASGGLERAVAQCLRQAGLPVTVVNPRRVRDFAKALGLLAKTDQLDAKVLAQFAASVRPPVRDWADASTQQLQALLTRRRQLLDMVAAEKNRLPLAHPSVQPQIQAHIAHLEEQLRQLDEQAQQLQQGNAAWQTRIQLLQSVPGVGPVLTSTLLGCLPELGSLNRRQIAALAGLAPFNCDSGQFQGQRHIWGGRPLVRWALYMATVSALRCNQVIQRFYRHLKAQGKASKVALVACMRKLLSILNAMLKHQSPWQPRPLTP

SEQ ID NO: 103123 - protein, 463 aa, unidentified
MARNNKGKKNKKHVRSLKAIQPDAAGIDLGSREHWVAGPPLEDNTPNVQRFGTTTPELLRLADWLKEQKVKTVAMESTGVYWIPLFEILDSRGFEVILANARQVSHVPGRKTDMLDCQWLQLLHACGLLRGSFRPSDDICRLRALFRERNTMIDQRSDWVRRMQKSLDQMNVCVHHAVSDITGVTGMAIIRAIVDGERDPRTLAQMRDRRCQKSEEQIAEELTGNWRPEHLFNLRQALKMYDQFCQIVTEYDTEIFAYIKTLQPGVDDDQTAPPPASKSKARNIAKKGQEPMRQALYQLTGFDMTIINGIGVDTASVVLSELGFDYSAFPDEGHFVSFLRLAPNLSISAGKKVPSKLKGTTTSRVATALRMAALAHRNSKTALGAFYRRISRRKGASVAVFATARKLAQIIYRFVCHGQAYIDIGAKAYEAQFNNRQLKYYTKALKDMGYKVKPLAAATVLAA

SEQ ID NO: 103124 - protein, 403 aa, unidentified
MNNVAGIDVSKGKSMVSVLRPFGEVVAKPFSVGHTGSELKELADYLKSLDGETRVVMEHTGRYYEPVARFLHDEGVFVSAVNPKLIKDYGNNTLRKVKTDKADSRKIARYGLDNWAELRQHTPMDTIRMQLKTLNRQQSLYTKTKTMMKNNLIALLDQTYPGVNALFDSPVREDGSQKWVDFAMTFWHVDCVRNMSLTAFAERYRKWCKRHGYNFSQSKAVEVHAGAQDLIAMLPKDALTKTMVRQAIDALNAVSASLERLKAEMCTLAAQLPEYPVVMAMHGVGDSLGPQLMAELGDVTRFTHRNAITAFAGVDPGADQSGTHEAKSTRVSKSGAPELRRALFLVMDCLLKTQPQDDPVYRFMDKKRAEGKPYLVYMTAGANKFLRIYYGRVKEYLASLEGN

SEQ ID NO: 103125 - protein, 348 aa, unidentified
MKYVGLDAHKSQWTICMLDENGKKLWTTTIRGTWKDLVAAMAKIEGPLSVCFEASGGAGFLYDQLKKVAQKVVVAHPSKLRLIYAVKRKNDELDAERLAKLLFLDAVPEVHIPKMAVRSWRALIEYRRRLMGKRTAVKNTIRALLRSTGKLAPDRLWTQAGLSWLKAETFQIAGDALRRDLFIEELSDLNGKVRAVTKELDRIGRSDVNVQFLMTVPGVGIRTAEAFAAYIDEAKRFSKLKTVGSYLGLVPTQDQSSTTNHLGHITRQGPSVVRWLLVEAAWEGVRRSPRIRAFFARVQRNDPKRNKIAVVATAHYLARIMLTMLKSGEVWRAETVEVQKAPERRKAS

SEQ ID NO: 103126 - protein, 306 aa, unidentified
MKAVGIDVGKAALDVAVHGEPAVRRFANTTAGIRRLMKELMGLGEVRIVLEATGGYEEALLSACTQHGLWIARVNPHQARSFAKALGQLAKTDALDAHVLAEMAHALHARMRAHVPQAAWQVELRGWLRRRHQITEAIQRTRQQCAMTLPAIRALMQKTLAALRREQALIDRALRELLQSHATPAMRSAKGLGPQFQASLLALLPELGQLTRRQIAKLVGIAPLNRDSGQSQGVRRIHGGRAEVRVALYMATLSAVRWEPMMKAHYQQLRARGKVAKVALVACMRKLLTIVNARRRDETLVASSAT

SEQ ID NO: 103127 - protein, 403 aa, unidentified
MAGPDRWWVGVDVGKEFHWVAVCDDAGKVVSSRKVVNDEAAIATVIAEVDGRGGTVSWTVDLISPYATLLLTMLAAAGHSVRYLTGRAVWQASVVYRGGEAKSDAKDARVIADQGRMRGDDLPLLTPADGLVTELAMLTAHRSDLVADRTRTINRLRQQLVSVSPALERAAEPTADRGWVRLLARYQRPKVLRRTGVVRLTRMLSDAGVRNAGKIAEAAVEAAKAQTVALPGEDVAAALVAELAQGVIDLDTRIKNVDAAIEERFRRHPLAEAIVSLPGMGFRLGAEFLAAVGDPSRIVSADHLAAWAGLAPVSKDSGKRTGRLCTPKRYHRGLRRVMYMSAVTATRCDPESRAYYQRKRSQGKKHIPATICLARKRVNVLYALIRDNRTWQPTAPQITASAA

SEQ ID NO: 103128 - protein, 352 aa, unidentified
MTVTIVETRLQARAITGGVDTHADVHVAAALDPIGGLLGVAEFPATPAGYAQLLGWLGGFGTVCLVGVEGTGSYGAGLARHIAAAGVRVVEVDRSDRQDRRRAGKSDPLDAVSAARAALSGRARGAPKGRDGQVEAIRALMVAKRSARSERTQTINQARALIVTGPDELRARFARHTPADLVAELASLRPRPGSMIRYHTLLALRELGRRAQYLDDQLARLDQLIVPLVTARAPGLLALYGIGPDTAAMLLVAAGDHPERLRSEAAWAHLCATAPLSASSGKVTRYRLNPGGDRQANHALYRIVITRMSSHPPTRAYAGRRTNEGLSKKEIIRCLKRYVAREVYPHLRPPAG

SEQ ID NO: 103129 - protein, 349 aa, unidentified
MRFYTNSHMHYCGIDLHAKTMYLCILDREGQILLHQNVRSRPEAFLAAVAPYREDLVVAVECLCTWYWLADLCAREGIAFVLGHALYMKAIHGAKAKNDKVDAFKIAALLRGGTLPKAYVYPPEMRATRDLLRRRLHLVRRRGNLLAHIQNTHHQYNLPVPVARVAYRANRAGVAEAFAEPDVRKSLEVDLQLIEQYDQIIRELDLHLVRQAKQHDPQVFDRLRSVPGIGRILALTILYEIHEIERFPRVQDFLSYARLVKCDHTAAGKRLGTGDAKIGNVHLKWAFSEAAALFLRNNPDGQKHLRRLAGRHGKAKALSILAAKLGRAVYFMLSKERAFDRERFLARSQ

SEQ ID NO: 103130 - protein, 363 aa, unidentified
MIDGKGSVARNAADVKSSAFQGAIIVGFDVHLRQITFDCLDSATGEVLRGRIASEPAAVREWMTQFVGREVHVAVEACTGWLFVAQAVGACGGTAHLAETVETRALRGRKRRAKTDRQDALWLRELLAEGRLPESWIAPEHVRQWRSRLHLRKALIDERTQWLLRIRSVLYHHGISGGAPARIAAAGGRQFLDGLDLPADAHERITVALFMISTLEQQIHQIERELRKIARRQTGCQALMTQFGVGELIALTFLSELGDATRMTSSRKVVRFAGLDIGVHRSDQTSRVGRLTRQGSSPLRWALYEAAQSATRHQSPDYAHYHALRASGMTHTRASLTIARKIARRSYHLLNNLGQDALAPVTP

SEQ ID NO: 103131 - protein, 429 aa, unidentified
MATLTTQYFAAFVGIDWGDTKHDFCLQASGADRVESGCIPHRVECIDEWARALHQRFGGPIALALELAKGPIVSALQKYDFFTLFPINPSTLAKYRQAFRPGRAKDDPSDAELALDLLLRHPERFAPLRPQSAAMRSLTSLNEQRRELVGDRIRFTNRLRSALKQYFPQTLDWFEHIDTMLFCDFLTRWPTLPALRRASSKTLEAFFRAHHCGRARLIDQRLKSIRSAVALTDDPGIVMPYRLQAVALVAQLRATLAAIDMLDEEIAALARTLPDFALFDSLPGAGPHLAPRLLAAFGEQRERFRSALEVQQYTGIAPVTERSGKKSWVHWRWQCPTFLRQTFVEWAGQTINKSFWAGAYYRQQRAKGSSYQAAVRALAFKWIRILYRCWQTGQPYNESAYLNALRRRGSPLLGSATLPGSVALSAETT

SEQ ID NO: 103132 - protein, 316 aa, unidentified
MLKVINPVVCGLDVHKDSVKACLLKAKDSQKYKDTLKTFKTMTSDLEKLKAWLLEEGCTKVAMESTGKHWIPIYNVLEDSFEITLANARYVKNLPGRKTDDNDARWIAKLLALGLIDGSFIPPKDIRELRDLTRRRQKLVNMRSSEKSRLIDILRSNNIMISSVASDVFGVSGMAIIRELISDDEPDTQSIANLAKRKLRKKIPELIESLNGHLGNHQKILIKEILEHLDFLDSQIAKLEEMIDEKCEPFKELVDIIDSHPGIDKISAQSIIAEIGTDMEVFHSAAHLASWCGLSPGNNESAGKKKALTLPQETNI

SEQ ID NO: 103133 - protein, 382 aa, unidentified
MSEFITQYVGLDVHKASIEVAVADGGREGEVRHVSSIGGDLASLDKALRKLISKGGKLHVVYEAGPCGFVIWRHLLAQGIRCDVVAPSSIAKPPGERIKTDRRDAMLLARLARSNDLTCVRVPDAADEAVRDLVRSREDAVRECRNARHRLKALLLRNGVTYAGKSAWSAAHLRWLASLKMEHEAQQIAFQEYLHSITEATARIGRLEQAMRQTLQGWSLKPLVQALQALRGVQLIAAMTVVAELQNFERFVSPRQLMAYVGLVPGEHSSGPKRRQGSITKAGNSAARRMLVEIAWHYQHAARVSPIIAARQADLPKAITDIAWAAQLRLHAKFKRLVARRVMKNKAVVAVARELVGFIWAIEREVRTSGWRGIEAAATAVH

SEQ ID NO: 103134 - protein, 395 aa, unidentified
MHAGIDTHKDTLAVAVIDPAGRPVIVTEVANTEAGFDALQHLLERHAVTRVGIEGSGSYGRGAAVRLVLAGGLQVVEVPTLLTSRERSSRPAQGKTDPVDALAIARITAREPGLPPVRLAVGAAADLRALCDYRTQLIGERTALANRTHAELHGLLPGYHTQVPRLTAPTFIAAAQALLAGDQRIRAEVTRRRLTRLAELTAEIKDVTALIAAAVQQQDTGLTGLYGVGPVTAATILGEVVDIRRYRSRHAFAAANGTAPVPASSGRTARHRLNRSGNRTLNRVLYTMAITQIRADTEGRAYYQRKRAEGKTAREALRCLKRRLSDLIYKTLQQDLAATSAGAGGECGSGKRDASLRPQPAARQACSPEPALRSGHSTAPTAPERYAPPASPDRR

SEQ ID NO: 103135 - protein, 368 aa, unidentified
MEKIITFVGLDVHKNSIDVALADAGRNAEVRHYGTIGGGLDDLDRLVKKLSLPGKKLHFVYEAGPCGYEIFRSLTDKGFDCAVVSPAHIPKSPAGRIKTDRRDAMTLARLHRAGELTYVFVPRTDDEAMRDLTRAREDAKKAQRVAQQQLGGMLLRLGFRYSGNNWSLPHFRWLANQKMPTPAQQVVFQEYINAINDTTARVDRLTKQIESLVLDWRMASVVNALQALRGVSLIVAATMVAEIGDLTRFDHPKKLMAYLGLVPSEHSSGEKKKQGKITKTGNGHARRVLVEAGQAYRHPARITRPLLKRQEALSQEVRDIAWKCQVRLCARFRRMTAKGKNHNTIVTATARELAAFMWAIANQMPIVV

SEQ ID NO: 103136 - protein, 343 aa, unidentified
MHIASIGIDIGKTTFHVVALDEHGTTVVRRKFSRKQLLAYTANLPASLIGIETCGGAHCLARVVGGQGHQVRLIPGQFVKPFRKSNKNDYLDAEAIAEAVTSHNMRFVPIKTEDQLDLQSLHRVRERLVHNRTAIINQIRGFLLERGISFNRGPMNLWKEMPLLLEDAEQSLTPSLRRLLDHLWQEWQYVDEQIDRLADEIEAVAESDAACRRLRKIPGVGPLVSTATVAAVGNGAAFQRGRDFAAWLGLVPKQHSTGGKAKLLGITKRGNPYLRKLFVHGARAVLLRVKYDTGGFGQWVHRLAARAPRNQVIVAIANKLARIAWVVLSSGNEYQHPPLAAVA

SEQ ID NO: 103137 - protein, 343 aa, unidentified
MTKIITIGVDLAKNVFQVHGVDASGAVVLRRQLRRGAVEKFFAQLPPCLVGMEACGSAHHWARVIGRYGHEVKLMPPAYVKPYVKRNKNDGRDAEGICEAVTRPTMRFVPVKSVEQQAALAVHSTRALLVRQRTMAANSMRAALSELGIVAPQGYEGLRELMARLEEPSEEISQMMRDALLVLARHWQALDADERVLERQIAKAARCDGEARRLMEVPSVGPMIASTILAKVPDPKVFRSGRDFAAWIGLTGKDHGTGGKHRPGRISKQGDRVLRALLISGASAHLRQQKARGITDPWLRDLLARRPYKVAMVAFAAKTARIIWAMLVKGEHYRDRTSVSAAA

SEQ ID NO: 103138 - protein, 461 aa, unidentified
MSKKESLTKLRNPNLPLINLSAAGIDIGADRHWVSVPVDRDKDSVRSFGCFTADLYAIADWLKHCRIETVAMESTGVYWLPVFQILESRGFEVKLVNAHYVKTVPGRKTDVLDCQWLQQLHTYGLLAGSFRPEDQICTLRSYIRQRDNLIKSASVHVLRMQKALTEMNVQLHRVISDITGITGMAIINAIVSGERNPQKLATLKDEHIKASSTNIAAALTGDYRPELVFVLSQELALYKFYQTQITECDAQIEQCLTGFADKINVKANPIGKPKRRGKKQPGNAPQFDLRTHLYRITGVDFTQINGFGALTVLIILSEVGLDPSRFPTVKHFVSWLGLCPGSRITGGKAKSSKTRPVINRAANAFRMAAQTLCRSYSALGGFYRRMQSRMGAPKAITAAAHKLARIFYRLWTSGAAFADPGVDAYEQRYQERIVNNLKKKAHALGFDLVAQPTIEQEQCAS

SEQ ID NO: 103139 - protein, 414 aa, unidentified
MEDILDCCCGLDVHKESIVACLLAGPVKSKLKPQSEIKEFGTQLRDLLALRQWLEEHQCNYVAMESSGIYWQPVYAVLETSLSDEMHLLVVNARHMKNVPGKKTDMRDAEWIATLLRAGLLKGSFVPERDIRDLRQFTRYRKALIRDITSQKNRIEKLMQSNGFRLSSFLSDSFGSSGLAIMHQLVQDGFMTNQSLDRCLKAQAWKKAHEILSSLNGTLSMPQRKLLKMQLAHLAELQANLREVEEEIHDGFSQFQGPIELLDSIPGIDQTAAYTILAEIGAEMSAFPTAQHICAWAGLAPGNHKSANKQKKQRITPGNNYLKTMLCEVAWVIASHKILYLSSWYWRLKQQTDAKRAIVALARKLLVIIYTMLKTDQLYNEQKFLERKKASEQRKVNRMVYELSRLGYAVSLPA

SEQ ID NO: 103140 - protein, 342 aa, unidentified
MDYYAGIDVSLECSSICVVDATGKIVREDKVASEPEALTVWFRSLGFELGRIGLEAGPLSQWLYAAMKQAGLAVELLETRHVRDAFKAMPVKSDRNDARGIAQLMRLGWFRAVHCKSIGAQETRAVLTARKLVQSKLRDVENSLRGILRGFGLKVGKTTERSFAGRIRELVANHASLETIAEALLSVHAVLLREFKVFEKQVRSLARSDAKARLLMSTPAVGPIVALTYASAIDDPARFKSSKRAGSHFGLTPKKHQSGETDYTGRISKIGDASVRTALYEAAHIMLIKPVKGCSQLKSWAMRIARRAGMKKAKVALARKLAVILHRMLANATPFNAAAAAA

SEQ ID NO: 103141 - protein, 325 aa, unidentified
MRYLGVDVAKDTLEVADASGKQRRSFPNTGAGIEALLHRLVQDFCSGELHLVLEPTSTYHHPLVVALAAQQVPYTLINPAHTAAFARVQGKRAKTDRVDARLLASLGESQQPEPTQPPQEDQEELRATRRHLEWLEQELQRAHNRLEAARFSPWTPQAVLQSLERTIQQLEEEVRQVHEALETQQQARPDWTVQMKLLTSIPGVGKKTALLVLSELPPVTSCSSAKSWVAFCGLNPEPRDSGKAHHSRLSRMGTARVRAGLYLPAVSALRCNPLVKALGDRLKARGKIGRVRVVAAMHKLLRLCFGVLKSGRPFDLAHHQSALPT

SEQ ID NO: 103142 - protein, 408 aa, unidentified
MRVVGLDIHRVFAEAVMLDDGRITRLGRVGMTRDHLAAFAQTLTHDDDVVIEATGNASAVAEVLRPHVGRVVIANPRQVRLIAEARIKTDVIDATVLARLHASGFLPEVWIPDEHTLGLRRQVTRRTQIVRQRARLKTIVQSILHAHLIPQCPHADLFGPRGRAWLLRQPLPADESDAVERHLREYDRLTDDLRVVERELARDALTNPKVKRLMTIPGVDMVVAVGLMAAIGPAERFPGPDRLVAYLGLNPTVHQSGEGRPRHGRISKQGRTHARTMLVEAAWQAVRGPGPLRAFYQRVARRRGNHIAAVAVARKLAVIIWHLLRREEDYAWVRPALHAKKLRDLELRSGEPARRGQRGAAYAYNLSRTRVEEKRRAEQAETAYRRLTEGWSRRGRRVPTGPAKEERP

SEQ ID NO: 103143 - protein, 331 aa, unidentified
MDNQIDLKYYIWRYSHALCGIDVAKNKHDVTALNVSGKTVLKPLTFSNNKAGFELLDLSLRQLNQDYLIALEDTGHYAFNLLNFLHEQGYKVYTYNPLLIKKFAKSLLLRKTKTDKKDAHGIALKLLSDPNREQFQHDNRQVELKILARHIHRLKKKQSDWKVQYTRCLDIIFPELDKIVGKHSEYTYQLLTCYPNPQKRLEAGFDKLIEIKRLTASKIQDILSVAPRSIGTTSPAREFEIIENIKHYKRLIDKAEKCVNDLMAELNSVITTVTGIGNRLGAVILAEIQNIHAFDNPAQLQAFAGLDSSIYQSGQIDLAGRMVKRGSPHLR

SEQ ID NO: 103144 - protein, 347 aa, unidentified
MLVVGVDAHKRTHTAVVVDGLGRQVGQRTVKALTADHLELLRWAERLGAERLWAVEDCRHVSRRLERDLLVAGERIVRVPPQLMAGARRQVRAAGKSDPIDALAVARAALREPDLPVAGLDGAAREVRLLVDHRDDLVGERTRIINRLRWHLHELDPSWDPPAGSLDRYCTLDRIAVRLNQHDGTVARIAGDLTVRARALTVDINRLEREITALITPLAPTLLAVCGVGALTAAKIVGEVADVRRFRSKDAFARHTGTAPQPAWSGQSDRHRLSRGGNRQLNAALHRVTITQGRYHPDAVAYLARRRTGGDTKAEARRALKRRLCDVIYRCLVADTALVDQTLATAA

SEQ ID NO: 103145 - protein, 368 aa, unidentified
MKEDSVIFIGLDTSKLKISVAIADGSRNGEVRFFGDISSEPASVASMVSKLSKRGAKLHFCYEAGPTGYGLYRQIVELGHDCVVVAPSLVPKRAGDRVKTNRRDAMSLARLHRAGELTAVWVPDEGHEAIRDLVRAREALKQARQQLQSFLLRHGRIYAGREPWTRAHRRWLTCQAFDHPAHQILLAEYCQAVADASVRLDRLTKLVVETAASWSMAPVVAAYQAMRGVAFMTAVTFVVEIGDVRRFDNPRQLMAYLGLVPSESSTGERVKRGGITKAGNTRARRVLIEGAWTYRFPARVSPKIQARLDDLPRTVREIAWKAQVRLCARYRKLLAAGKPKVVAVTAIAREMAAFLWAIGQEIAPTAKA

SEQ ID NO: 103146 - protein, 321 aa, unidentified
MQSTPNGPFVGIDVSKAKLDVSIAEEKPFVVARTAEGVADLVARLAPLRPELVVMEATGGLESMVAAALVTAQVPVIVINPKRARAFAQAEGVLAKTDAIDARLLAMFGRKINPERKPLPDETSRELDGLLDRRRQLIGIRVMEQSRLDSARGEKVRGDVEAHISWLDERIEQIDREMGQAIESSPVWKVQDELLRTVPGIGPVLSRTLLAAVPELGKVGGRTISALVGLAPIPDDSGPRKGQRHILGGRAAVRAVLFMAAHAASRYNPAIKPFADRLKAAGKRPKVVLVAVARKLLVIANAILKSGKPWDAKLAMVGKNA

SEQ ID NO: 103147 - protein, 409 aa, unidentified
MKLFVGIDVSSQDMKACIMSFDGETLASLTVDNNLIGASYLRDQIVDIAQKHVIQEIVIGMEATSVYSWHPAMFFHEDESLKRFQTKVLTINPKLIKKFKESYVDLDKTDHIDAWIIADRLRFGRLRQSVVMQNQFIALQRLTRMRYHLVHNLTREKQYFLEHLFYKCSSFTTEVESSVFGNAIMELLLEQYSLDEISAMDIQDLAEFLRIKGKNRFTDAEYVAKSIQKAARSSYRLSKCVEDSIDLLLGTSIESIRSVTKQIKELDKAIKKLLDGIPNTIQTIPGIGPVYSAGILAEIGQIERFDNQASVAKYAGLTWNKHQSGLFEAEETKMIRSGNRYLRYYLVEAANSVQRNEPEYRAYYLKKYHEVPKHQHKRALVLTARKLVRLIDTLLRNDQIYTPRRKVNK

SEQ ID NO: 103148 - protein, 337 aa, unidentified
MDYFAGLDVSMAETHICVVARTGGVIHKAKVPSTPADIAAELAKFPSCRRILFETGRMAPALYHGLSQLGLPVVCVESRQAHQALKSLATHKTDRNDARGLAHLARTGFFKPVYVKSLPAHAVRSLIIARKKLVGHRVTLENQIRGLAVVFGVRLPRALSPAFIEQALQASDGIPGLSAATRGLIGARAAVLTAIVAIDADIRRMVRASDACRRLMSIPGVGQLTALAFTAAVDDPQRFRRSRDIGAYLGLVPRRYQSGEIDYTGGISKCGDRRIRTLLHEAANVLLTRYKGPLKLKEWAFAIAKRSTMRKAKIALARRLAVIMHAMLRHGTEFEPA

SEQ ID NO: 103149 - protein, 377 aa, unidentified
MSKVRFLGLDVHANTISAAIAEPNGEVRSLGTIRNTPGEIRKLVKRLQPASSLRACYEAGPTGYTLYWQLTGLKVRCEVIAPSLIPVKASDRIKTDRRDALKLARCYRAGDLTAVWVPDAEHEALRDLVRAREDARLDQTRARHRLGKFLLRHGCRPPEDIKHNWTAKHMRWIKSHVVFQQPALQAAFLDYVHEVEHAVQRIEHLEKALDDAIAAAPPEIREVVEALQALRGVGKLVAAGVVAEIGSFSRFTTPSQLMSYCGLVPSEHSSGSRVARGGITKTGNAHVRRLIVESAWAYQHKPWIGGWLEKRLRSLEPEIKDISWKAQWRLHTRYKKLSARGKNKPLIVAALGRELLGFLWAIAVRVETRHRQVQRAA

SEQ ID NO: 103150 - protein, 327 aa, unidentified
MMFIGIDISKEKIDLSWLRDQLTNKIKTKVFKNKRQDFVTIEKWLLNTTKSAANELVITLEPTGVYHEALMYFLYEQGFNIILANPGKAKKYADALNIIHKTDKSDATMLAHYGCAKHAVVNYWQPEALAIRELKALIRRLDALESNRQREANRLEASEFSNVSARVCQSIKVTIAFLDDEIKQLKSDIDNHIDNEPDLKRNRKLLESIPGIGPVLSRELTYLFAAKKFNKAKEAAAYCGLIPRHNESGKLKGRTSISKLGPARIRCKLYMAAVVAGQWNKTIKRHKLTLINNGKTPMQAVCANMRKLIHICFDVIKNQEAFKLQES

SEQ ID NO: 103151 - protein, 316 aa, unidentified
MDGDKVFIGVDISQDRLDMVAYPTGQIWQYKNSKGGITKAIAKLRGLELKLIVMEATGGLEKPLCEALFQAGLPAAIVNPRRIRDFGRSMGILAKTDKLDAKVMAYFAAKIEPAPRPVQDEDGQKLENLLTRRSQISDMIIAEKHRLTRGSDKIVRKHIQVHVNWLESELKDLEKELKYSIRQNPKFTEEVKLYKSMPGVGDNLSYNLVANLGELGHLNQREIAALVGVAPLNRDSGKQRGRRMIWGGRATVRKALYMPALSAIRCNPVIRDLYQRLIAKGKLKKVALVACMHKMLTILNSMAKNNTPWNYVNVKC

SEQ ID NO: 103152 - protein, 371 aa, unidentified
MKQNTVSELVWDNGQGQASAERRSKGVLQLGLDVHYRQVTVAMQEEAGAIKAVGRMGHDGFGNWVEKKLKEGWELYSCYEAGASGYWLHRELVKLGVKNLVVAPKAMGQDKRQKTDRRDSAELVDQLDRYLRGNRKALSPVAIPTTEQEEKRALIRYHRQIMADRTRYEARGKGLLCAQGIEVQGRWWQPEAWKELKTHGRFQGWMETQLKGWRRKLLSAEQEQQKLRKKIESLAPALLPKGVGAYSAVALEYELKGLARFKTARALSSYTGLCPGIHSSNGRGKEGSINRCGNAAVRWNLVEMVWRLLQWQPDYQPVRQLAAGLVRSKRARKRLVVKAARQLAIDLWRLETRQVTAQELGLVMQPTFKTK

SEQ ID NO: 103153 - protein, 320 aa, unidentified
MRVPLSDKQLFCMLKFRSHLTLFDLFEFEQNVRNTAKQSIQNIQSGVKTKRDFSLFFKLNIEMKQILKQVAGIDVSQKELVVSLGRMYHDLATEIYAFKVFSNSAKGFLALTTWIKKLTDQVLEIRFVMEATGVYHEALVFYLDDKGFAVSVVLPNKISNYYRTLQVKTVTDKTASEVIAQFGLERNLDKWKRPKEIYKRLRQLTRERDQIVAERTTVKNQLHAENSEAEPNKTSITRINKRIKLLNGQEKEVQAEIAQLIRKDTEVSKKVAIIKTLPGVGLLTAAIVLAETNGFELIRNKRQLTSYAGLDVSEKQSGRQ

SEQ ID NO: 103154 - protein, 474 aa, unidentified
MARTRNRPASPPVPGDAGAEVTDEPVQVISRAAAIDVAKGSGMVCMRLPHESRAGRRTQKVREVTATFAAVVALMDHLVCQGVERLVLESASDYWRIWCYLAEAAGLEVWLVNARDVKHLPGRSKSDRLDCVWLCKLNEWGMLRRSFVPPEPVRDLRALTRLRANLTHDRVRHQNRIEKILEDALLKVSSVISDLMGGSGRRFLQALVDGERSPAALAALGDYRLHASKAELAEALTGRFRDIHGFEIGMLLELIDDLSAKITELDERIEAQLENVPGLGGVCPSCGQPGPDGPCTGCGEPVLGVIARLDEITGIGRGAAQVIVAELGTDMTQFPTPGHAASWAKLTPRAIQSGATSKAGRTGKGNPYLRGATGVAVMTAARTETFPGARYRRHARRRGKQKAIVAGCRTIIEIAWRVIADPGFRYIELGPDYHDQLDPRRKTRDKIRQLEKLNPGMTVTLTPRPEPGGQAPAA

SEQ ID NO: 103155 - protein, 419 aa, unidentified
MSFKILKNNCCGLDVHKTWIFACIGITDSNKRTVYKQARFSSFTKGLQELCHWLAKYDCTDVCMESTGKYWIPVFNILEKNNIWVTLSHPKYTKPQKGNKTDRKDAKWICDLYMCGMVKPSFIPPADIRELRDLVRYRFKLTCMITGEKNRAHNCLTVSNLKLDDVFSDIFGRSSRSITEQILQHPGETFDVAPFVHGRCKTPIEEIQAAVDGAVSKEQAVKLRQCLNHIDELEMHKSEIEREIFRLSDKYEDILTLIRTVPGFDKNPMTAIQVLSEIGDDMSVFPTAKNLVSWAGCCPHNDQSNHKIKSTRISRAGSYFKPVLVQVANALIKSKKHPEFSTRYRRIKARRGHKKAIIAICRMILTAIWHILTDLKPYTAKGFLEPRPVSKEKVLTASQALNLLKQRGYVIKDEPIFIS

SEQ ID NO: 103156 - protein, 332 aa, unidentified
MDPICVWLGIDVSKATMDAALPKGVGFARTKLPRDQAGARKLLGWAHEQAGEAGLACVMEATGGYSKQLACWLLQAQADLHVAIAQPFQVNHYTKALGQRNKTDALDAVVLARFGAAFQPRAFHPMPAAYERLKALERERDALVRTATAMENRQEIESADRTAQRVRVRMLRHARKAIEELDEAILVLIRSEEALAKDYRRLQTIPGVGPVLAATLMGELGDLRAFEHPKQLSHFVGVAPVLHTSGTSVGARPHMSKRGNGRVRRMLYMGALAAIRTDTPFKRTYQHLCHEGKAPMSALGAIMRKLLIVARGVLVHDEDYNPNRVSTPVEPD

SEQ ID NO: 103157 - protein, 326 aa, unidentified
MAQYDQLLPKPARRLAPSEFVPWVRQLLRAGHVVHVVYEACGFGFNLYRELKALGVHCYVIAPRKLDEGYTRVKTDPRDATTLCQRLSRYVEGNTRERAVIRVPTEAEEQARHVSRQREQLVRHRQKLEAQGRSLLVSHSLPAPAHWWKNQTWSRLSKLLPSWICLRLEVHRPALLTLEQQISALSTELEAAAPGDVPAGVGKLTTVVMTREICSWERFRNRRAISSYTGLCPGEHSSGTKRIPGSVTKRGNPRLRAALVECAWRMVRFQPNYAPVKKRLSVLAKGARATGAQRKKAIVAVARHLAVDLWRVHTGRNTAAQLGLTI

SEQ ID NO: 103158 - protein, 338 aa, unidentified
MKLYGAIDLHSNNNVTVVIDEQDQIVYQKRLPNELPMIVQQLSVYQSSLQGIVVESTYNWYWLVDGLMERGHKVHLANTAAIQQYEGLKYTDDNSDARWLAHILRLGVLPQGYIYPKEERAVRDLLRKRSQLVHHRTAHLLSIQNLVTRNTGSSISANRIKALDDPQVDELLPNEDLALAVKANLAVMCTADKQTQILERTVTERVKLRPQFSFLKTVPGIGQILALTIMLETGDIRRFPSVGNYASYCRCVGSQKISNGKRKGSGNTENGNKYLAWAFIEAANFAVRYQPRIKSFYQKKKAKSHGVLAIKAVAHKLCRACYYIIKDRVVFDVTKAFA

SEQ ID NO: 103159 - protein, 335 aa, unidentified
METVYFFGVDIAKKKFDGALTVDGKAFHQVESGNTGREIKAFFKDLKKKFSISYSQLVVCMEHTGIYCRPLLEFLTENHIKVCVESSIQIKRSQGMVRGKTDKIDAQRISSYAYRNREHLRFWTPQRLIIQKLKAMLVTRERLIRVKTELHVPINECEEFIEESIHQMMNKACQNTINRIERDLDNIEKMIDDLVKEDAQLNHQYQIATSVTGIGKITALNMIVSTGEFTQIQEAKKFACYSGVAPFEHSSGSSIRGKTRVSKMANMTIKKLLHLGAMAAARYDHELQAYYQRKVLEGKNKMSVINAVRNKLISRVFACINNNRKYQKIYKHALA

SEQ ID NO: 103160 - protein, 314 aa, unidentified
MCWVGIDVSKACLDVCILETTGELQQMRVANDDVGFKQLVKRVAQGNTHIVVEATGVYHLQLQQALQEDGFTLSVINPRQIVGFAKSYNRRNKTDKVDASLLAHFARERQPPASPKLSTTRAKSILRELQALNDDLTRLNNRLAAASAGLAHSAVKDSLKRRIDQLQSEKESLEQQLEQALAEQAADIELLTTIPGIGRRTACSLLAEIGDVRRFDAAGQLVAWAGLTPQHRQSGQFKGYTAISRMGSSILRRLLYMPTLAALRFNPRIATFYTRLVNNAKPKMVALVAAMAKLLRIVFGVLTASKPFDATLPS

SEQ ID NO: 103161 - protein, 377 aa, unidentified
MKDCSLYLGLDVHAETIAAVVVDGEGRERNLGVLANRRSSIEKLLKKVGAKERVHAVYEAGPTGYRLYWELSYLGVECQVAAPSLIPKKPGERVKTDRRDARKLARYHRSGDLSYVWVPDETHEALRELVRAREAAKRDERRARQRVKSLLLRHGVQRPAGVRSWTTKYKEWLKGLKFGLAALEETLTDYVHEVDRQELRVVRLDGAIDEAVEQAPAPFREVVQALQSLRGVRKATAVGVAAEVGPFSRFRHPQELMGYSGTVPSEYSTGGPGKAKRGAITKTGNALLRRLVVESAWSYRHRPSLRGDLKKRQEGQRAEVVEIAWRAQVRLCGRYRRLVASGKTKQKVVTAVARELLGFMWNIGTEVERQLDVEAAA

SEQ ID NO: 103162 - protein, 346 aa, unidentified
MLYAGLDLSRKRLDVCLLDEHGERVAVTAAPPDGDGLRSLAERLATHGTPVRAAIESMNGARFIHDTLELCGWEVAVADAQRVKGMAPLACKTDRIDAWVLAELTRLDLVPAIWLPSPEVRGERERARFRLHLVHHVGALKNRIHATLFAFGRPCPVSDLFGESGRKLLARLELPEPWNSTTLASLRLIEELEEQISDCERELRALGADHAYVPLLMTVPGIAWVLAYTIAAEIGEIERFAAPKKLVSYTGLCPRVYQSGGKDYRGPLARNGPAYLRWALIEATLHACRHPAYSAHYEHTKRRLGRQRGTRVAGVEIARRLAEAIWYMLTRNQPFAPAGPAKPLVA

SEQ ID NO: 103163 - protein, 394 aa, unidentified
MRFVGIDVGAERHVVASVDAAQAVVLKPTGFTEDAAGYQHLLTLLGPATETLVAMEATGHYWKNLFAVLVTQGFAVALLNPLRTRRFAAEELQRTKTDAIDALGIARFAAQKRPAARRLPDPATEELRELLRYRDRLSQDFGDRERQLHRLLDLGFPEFPRYVRDVGSELATTILRAYPTAAAFQGVTVRRLGGLRYAGQQKVGVAVAAALLAAAATSVGPHHGAAYRVQVQDICEDLNVLRRRLRTLDRDIEGLLERHEVGTLLTTIDGIGPQTAARLVATFGDFSGMRSGAALACYVGVIPGLRQSGKRLSSRASLTPIGAARLRAKLYMPVLSAVRYNPWLRAYYEGLIARGKLPKVALIAAMRKLLHAVYSVATHRRPFVPHVVAQEVRP

SEQ ID NO: 103164 - protein, 349 aa, unidentified
MRFYTKTHTHYCGIDLHAKTMYLCILDREGQVLFHKNARSCPEAFLVAIAPYREDLVVAVECMFTWYWLADLCRREGIEFVLGHALYMKAIHGGKAKNDKVDAFKIATLLRGGNFPKAYVYPPEMRATRDLLRRRLHLVRRRGNLLAHIQNTHHQYNLPVPSAKIAYKANREGVADAFAEPDARKSMEVDFMLIEHYDRVIRELQLHLERRAKQHDPQTYHRLRSVPGIGKILALTILYEIHDIRRFPRVQDFLSYSRLVKCEHSSAGKKLGTGGAKIGNVHLKWAFSEAAALFLRNNPEGQKHLRRLAGRHGKAKALSILAAKLGRATYFMLSKERVFDMERFLARNS

SEQ ID NO: 103165 - protein, 369 aa, unidentified
MPVVRGERAARFSFGTPSPRGSIWRAFATVLWKPEQLIDFNSHLQGWETENMPELIHVGIDVSKDALEVACGPESPTQCFTNDDAGHEALVNVLHVHRVDLIVVEATGGYEAPCACALQAAGLAVAVVNARQARDFAKAMGYLAKTDRIDAQVLAALAAVLANRADRPKLIKALASDEQQRLHALVLRRRQLVQMLVAERNRLPMSHQAARVSIEALIKAIRKQIVDIEADLSSHIAHHHADLAGLLRSAKGIGPHTSMALIADLPELGKLSNREISALVGLAPFNRDSGKMRGKRMIFGGRTQVRCALYMATIVAMRHNRVIQRFYQRLLAAGKPKKVAIVACMRKLLTILNAMVRTGKQWDETFHFA

SEQ ID NO: 103166 - protein, 339 aa, unidentified
MTIDPDKATHTAVAVDDDENVIGEFTLRSSNNHAERLTDWAEGFGNREWAVESANGLGYLIGQQLVGCGETVFDVPPVLASRVRLLGSGRSQKNDPNDARSVAIAVLRSDRPVTVQPDDHVVVLRLLVKRHRDMARLRSKHCSRLHALLLELEAGGIGVKMSVTNASRLLDAITVGDETTRYRVMIGREVVDDIARLDATLKASKKRITTAVTVSGTTLTDIVGVGPLGAATIIGYTKDIARFPTRGHYATYNATAPIEVSSAANTRHRLNLRGNRILNHAIHIAAVTQLRHDTTGRIYYRKKIAEGKTPKEAIRALKRRISDAVYKSLIADAAARTTN

SEQ ID NO: 103167 - protein, 357 aa, unidentified
MAIVAHSHPFVIGVDTHARNHAISILACPHGEILDEAEFPATSAGLARAVAWAGRRTGGDLDALWVIEGTGTYGARLARVAADAAYVVVEAPRMSARANRGIGKSDPLDARRIAAAALPLDVTHLRQPRADDGVRAAVRVLLASRDHMSTEHTATINALTALLRVSDLGIDARGPLTAVQITTVAAWRARQEDLATSTARWEATRLAKRVTALDEELKEITKRITDLLRLSPASALLEQPGIGPITAAVALTAWSHLGRIRSESAFASLAGVNPIPASSGNTVRHRINRGGDRRLNRALHMAVVTRMRMDPRTRAYVERRTAEGRTLREIRRCLKRYLAREIYRRLNSTAVLDQAAA

SEQ ID NO: 103168 - protein, 356 aa, unidentified
MMPVTRKRNYTWFVGIDVGKAKLDFAILNQSRLILHKEVANDKQSIREFITELKTMLGLTIAKSIFCLENIGVYAYHLLTELRSFKARIVQKGSLHLKRSMGLLRGKSDKTDSIRIAQYIAVNWESQVAWAPRRPVIDQLDALMKIRDRLQKCNKILSVPLKEVMSFNKKSRSQVQYCKNSIQCTKEDIKKIDKELIQLINSDDELKRLFAIITSVDFVGPQTAIQIIVCTNEFKWVKNPKQFACYAGIAPFPKSSGTFEGRKRTSVIGNSKLKSLLHICAMGTLRSSKGGYREYFLRKTDVQGKAKMSVVNVIRNKIILRIFACVNQGRMYEESYTSLKLPRCTVAEEVDLVERI

SEQ ID NO: 103169 - protein, 349 aa, unidentified
MRFYTKQHRHYCGIDLHARTMYVCILDAAGQVLVHQNLPAKPEGFLETIAPYREGLVVAVECIFTWYWLADLCAGEGIDFVLGHALYMKAIHGGKAKNDRIDALKIATLLRGGMLPQAYVYPAGMRATRDLLRRRLHIVRKRGQLLAHIQITSHQYNLPALGKRIAYPSNREGVAEHFEDRVVRKSISVDLALLERYDALVTDLESYLVRQAKQHDPQAFALLRSIPGIGKVLALTILYEIHDVRRFDRVQEFASYARRVKCAKESAGKKHGTSGAKMGNVHLKWAFSEAAVLFVRHSEPGKQLLAKLEKRFGKGKALSILAHKLGRAAYYILLRGKAFEIERFAATAS

SEQ ID NO: 103170 - protein, 468 aa, unidentified
MELILGIDLACRAAHQASLAGPDGTFVWTGRKFFTRPAELEKLWKQIGLGEHDTLRVVMEPTRNAWAPVASWFRRRGARISMVPTTQSADLRAYYSKHTKNDHLDSKLLARLPLLHPEGLREHTGDGPAEPLRRVVKIRSSIVKRRTAVFQRLDALLELLGPAWYDALGSNYGKAALALLARYADPHSLIRVGHARLTRFLIRHSRGAWREQHATMLLAAAQESLQLWGSGAEAAIDFAELAADIAVEAQQAQMLTEQIEDLDERCANLYAEADPTGIIASAPGVGPVTCAVIAGRIGDPHRFHSLAAIRSYSGLVPKLSQSGQAQHQHGLTKAGDPLLREALFAAADQARKTDPQLAAKYKRLMATERHHDSAICHIATTLLTRIATCWRTGEHYNLRDTDGRTITPEQGRQIVRTHHAVDKQTRIKAANTRQSQRRKGRTGREQKESPSAPVLRPDNTSINTVEVA

SEQ ID NO: 103171 - protein, 349 aa, unidentified
MLHVGLDLSRKRVDVCVISSEGELVEHFRAPCDRDGLYGLTRRVAVYQEPIRGVVESMNGARYVHDELVRYGWEVLVADAVRVKGLAPLACKTDKVDARVLAELSFRDLVPAIWLPTPELRAERERSRWRLHLVKHRAILKNRVHSSLIAYGHQVPMADLFGVAGRRLLASLDFPEPWLGHVQASLELIDDLERRIGEIENWLRRSGADHRYLPLLMTCPGIGWITGYTIAAEIGDINRFSSPVKLTGYTGLCPRVSQSGEIDCRGPISKHGPRYLRWGLMEAAIAASSHPLYRERYQRTRRRLGRQRGPKIAQIELARKLSEAIWYMLTRNQPFKPFVPAGAVLPLTA

SEQ ID NO: 103172 - protein, 387 aa, unidentified
MPQLNDLSRSLVALDQDSTIIAVVELSQSSWLVAGVLPGIERQPQKKLEPSAERLLGLLHRWRDEAVRAGKKITRIALAFEAGRDGFWLARWLNARGVEAHVIHPSSVAVSREHRRAKTDRLDTELLKRGFLGWLRGERGHCSMARVPTIAEEDAKRPNRERECLVGERTRIVNRMKATLARLGVRNFKPTLRKAAERLATVHTPEGTPLPRNVLAELQRDMARLGFVVSQIREIEQARQKRLEQETETGSHAMVRQVARVIGIGIETADMLVHEVLSRPMRDRKAVARYAGLTGSPDESGARRREQGLARAGNARVRRGMIQLAWRFLRFQKQSALAQWYRARTADSRRGTRKTMIVALVRKPLIALWRFVTTGETSEGVILRPAG

SEQ ID NO: 103173 - protein, 352 aa, unidentified
MKTYYVGMDVHKATIVIAVLDAKGKVVSQSIIETSTQAVRDYFKSWRGVHVTFEEGNQAAWLYDVVEPLVGHLVVCNPKHNHLLKQGSKNDRIDARKLADLLRLKALKPVYHGEHGTRTLKELVRCYECVVKDLSRVQNRLKALYNSQAIGNRGRELYQLSQRESWIQKQENAGRRMRAELCFRQMDELKVLKRGARKAMLAESRRHEAQRILSQVPELGLVRVAQIIATVDSPFRFRTKRPFWAYLGLAVETRSSADHELRNGRVSRRKVKIETRGLNEDYNRRLKSVFKSAATHACSCGVYKEYYDQLVAGGMRPEMARLSVARKLAAAVLAVWKKGQSFDERMIMSRAA

SEQ ID NO: 103174 - protein, 383 aa, unidentified
MNKVTMIGCDLHDRWMLLKVAVDSGKPVKKSFETSHSAEMIDWLKEFARRHDSCRIVFAYEASGMGFGLYDDLTDAGIECHVLAPTHLPHTTHRRKNKTDEKDAEMILDEVRASVLAGRKLPAVWVPDPETRDDREPLRLRLSLAKQRTQIKNQIRCLVKRSKLSLPDWFTKSGDWSKRSVAWLLAVAAGDEGNLLAGVRAVLARLVALYESFSEQLKALDEVIGKLAKNKRYAKAFRKLKLIKGVGTLTAMVFLTEIGDLNRFANRRQLAAYLGLAPAAFESGERDDRKGRITRQGPAQVRHVLCQAAWTAVRCTDKWKDAYERVKRGTQKRNKVAIVAVMRKLAITMWHTARSEEVDELLDEMDEIRAEQQQPADRKRKVA

SEQ ID NO: 103175 - protein, 338 aa, unidentified
MNKYIGIDLHSNNSVVVVTDEADRIIFQKRLANSLNEILPALAPHREETVGVVVESTYNWYWLVDGLMDAGYQVHLAHPSAIKKYEGLKYSGDFADAAYLAHLLRLGLLPEGYIFPRELRATRDLARKRMQLVRCRTTQILSIENIMTRETGARMSSRQIKAMTAEGVEALGLRDDVALAMESNRLIYQALQQQIEVLEKRLEAQVKLQPEYQLIKTVPGIGPILATTIMLEAGPMSRFAEVGNFSSYCRCVDSLRESNGKKKGSGNTKNGNKYLSWAFMEAANFALMFCPEAKRFYERKKSRTNRIVALKSVAHKLARACYYILREQQPFEVKRCFV

SEQ ID NO: 103176 - protein, 348 aa, unidentified
MVVLGADLHKRWHTVVAVSDTGRRLAEKTVRATPEGHLELRRWVAQWPERHWALEDCRHLSRRLEVDLLRSGEAVVRVPPKLMAGVRRSVREPGKSDPIDALAVARAALANPDLPVATLDGPERELRLLVDHREDLVAERTRHVQRLRWHLLDLGIPEPGPRSLDRVVVQADLEGRLAGRTEPAARLARDILGRVRDLTAAIHPLEREIEALVAALAPTLLALPGCGPLTAAKIVGETAGMTRFRSKEAFARHNGSAPVPVWSGNVTRFRLSRGGNRQINLALHRIAITQMRIDERGRAYLEHRRAAGDTKTEAIRALRRRISDEVFRRMLHDEAARAALPSGLAAAA

SEQ ID NO: 103177 - protein, 345 aa, unidentified
MTIVDTRPVTGGVDTHLDTHVAAALDANGGVLGVESFPTTPAGYHDLHAWLAGFGQLCRVGVEGTGAYGIGLSRFLQSAGVEVLEVDRPNRQARRRDGKSDPLDAIEAARAVLSGRAQVVAKAADGPIEAMRALLVARRSARDARITFLNQIRHLAFTAPDDLRERVRPVPRGRLGATAARLRPSLENDVVTFATKLAMRHLGQRVVLIDEQLAAVDEILAELVAEVAPGLVELPGVGTLTAAILLVTAGDNAGRIRSEAAFAHLCGVAPVPASSGKVTRHRLNRGGNRQANHALWRIVFTRMSHDARTRVYVQRRLDEGLTKAEVMRVLKRYVAREVYRYLPRD

SEQ ID NO: 103178 - protein, 338 aa, unidentified
MTIYAGLDVSDKQTHVCVVDVEGKVIRRDCVTSDPEVLAKWLNRHCAGLTRVVLETGPLSTFLYHGMVERAVPVICICARHAKKALSARVNKSDVNDAESLAQLARTGWFKAVHMKAGATHIDRAALKIRAQLITARNAMANQLRGMLKLFGLRMGSVTTPNKRRERLAALFTQRPDLKDVFKPLIEGIEALEVQLASSSRLLDARAAADPVCIRLMSVPGVGAITALTFKASIEDPGRFAKGADAGAYAGLAPRRSQSGERDYNGHISKAGDALLRHALYEAANSLLVRVKRPFALQTWGKKIAETKGPKRARIAVARKLAILLHKLWQSETEFCWN

SEQ ID NO: 103179 - protein, 409 aa, unidentified
MDQLIERCCGLDVHRDTVVACVRGPGPNGRRQHEVRTFGTTAVELLALRDWLEAHAVTDVAMESTGVYWKPVFYVLEEAFTCLLVNAAHIKQVPGRKTDVKDCMWIAQCLEHGLLRGSFVPPAPIRELRDLTRHRKVLIQERTRAANRLHKLLEDAGIKLASVATNILGVSGRAMLEALVHGTTDPAVLADLARGKLRKKLPALRQALAGRFRPHHAFLVSQLLAHVDYLDEAITTMSEEVEGRLAPFAAQLTQLDTIPGINTRTAEVIIAELGVDMSCFPSDRHLASWAGICPGNNESAGKHQSGKTRKGNRWLRMTLIEAAGAAIRTKDSALGARYRRVMRHRGHKKAVVAVAHAMLRAVYHLLAEGTTYREPGADYYDRHHTHRVTRRAIQLLERQGYRVVLEPAA

SEQ ID NO: 103180 - protein, 341 aa, unidentified
MEEYIGLDVSMKETAVSIRRAGERIWRGKCASDPSIVAELIRKRAPSVKRVVFETGPLSVWFYHSLRTEGLPAICIDARHAKAALDMATNKTDANDADGLAQLAEVGFFREVRVKGFDSMLTRTLVAARTRLVRITTELSNQIRGVMKTFGLLVPAGKGSTFEKNVRSLLADRDRLASIVLPMLEAWRGIRVRAAELGRQLVRDARQSRACRILMTIPGIGAITATSFTTAIEEPDNFRKSRSVGAWIGLTTRRYQSGEVDYDGHISRRGDRPLRGLLYEAAAVILTRSSTHSTLRTWGLQLRERIGFKRAAVAVARKLAVIMHTMLKTGQLFNPNAGAAA

SEQ ID NO: 103181 - protein, 341 aa, unidentified
MKRTLYCGIDLHSSNGMFVILDENDKVVFKKRLPNKLPTVLDALNPFRKKLAIVAVESTFNWYWLVDGLMDAGYPVCLANPAAIDQYDGIKQANDLTDATFIAHLARLGILPTGYIYPKDDRPVRDLLRRRILLVKYQTSTKLSLQNMFMRQTGQSFGYADICKLSDNELRLLLSDNDNLLFVTSQQLDLTRQLKKKIKQFEKMIQAKAELKPEYELLLTMPGVGVILALMIMYETGDIRRFAKVGNYTSYCRCVRAHCTSNGKVKGRNNSKNGNKYLSWAFVEAVHHAKRCCPRAKKFYDRKFSKRNGALATKALAAKWSKAAYHIMKNQEAFDLTKMFG

SEQ ID NO: 103182 - protein, 416 aa, unidentified
MIDLIDQTDQIEVAGYPVPTAGIDWASTEHAVAVVDPGGIQLERFRVAHTTPGLRRLVARLHRAGVCEVAIERPDGPVVDALLEAGLGVVVIAPNQLKNLRGRYGSAGNKDDAFDAYVLADVLRTDRRRLQLLTRDSEATVTLRMTVRARQDLVHARVAMANQLRAHLQTTLPGAVGLFSDIDSSITLRFLTRFPSQDKADWLSQARLGNWLRSVGYNHLANLERLWEHLDQATRGTTGPEAAARAEITVALVAALTSLRTQIKALEDQIANQLAHHPDAAIFTSLPKSGTVRAARLLAEIGDARGRFPTPEALICLAGAAPSTKQSGNVKVVTFRWAVDKQLRGAVIDFAGDSHHANPWAADLYQRARARHLDHPHATRVLARAWLHIIWRCWQDRVPYDPTKHRALQRVLTQTA

SEQ ID NO: 103183 - protein, 456 aa, unidentified
MGHARARKIPAQLVEDEEYQLRHERVAGIDIAKAKADVCTRLPPARDGRRRASRLEEVPATAREILALAGRLLADRVELVVMEATSDYWRIWYYLLEAAGLTVQLVNPAHARQLAGRPKTDRLDAQWIARLAEMGLLRPSFVPPPEIRALRDLTRTRVQMVRDRTREWQRLEKLLEGALIKLSSVVSRLARAKTARGILEALADGQRDPKTLAAMAAGQVKGGRAAVEQALEGMLLGDHHPRLIRVHLDHITFLDRAVAAIEDQIEAALDAIPAAWGISADGVPSPDPGPDAAALTAVQRLAEIPGVSPGLGMAIIAETGLDMTRFPTADCLVSWAGLAPVARQSGPRNRKPKKGQGDAYLKGYCTQAANGAARTETFLGERLRRLSRRLGGNRAKCAVGRSILVIIWHLLADPGARFTDLGPGWHERKTDRDRKIRTHLRQLRALGLDVTIAPAA

SEQ ID NO: 103184 - protein, 387 aa, unidentified
MESIDCTYRSQTSIPTEATTVFVSLELSRARWLVTSLSPNTSKISRHFVPGGDAAELLRLLSELRAKAERHVNAAVKITCIQEIGFDGFWIHRVLAANGIESHVVEAASIAVPRRHRRAKTDTIDGELLLRTLKAFKRGEPRVCAMVVVPTPEEEDRRRLSRERKTMVKERIEHINRIKGLMACQGIVGFEPRRAKARERLDELRTGDGRPIPGRMKAEIRRELERLELLRKQIAEIEAERDALLTPVEAAKPSPGAQLLKLRGIGPEFASVLWQEGLYRRFANRRQLAAYAGLAPSPWRSGDLSKEQGISKSGNARLRTTMIEAAWLWLRHQPKSALSLWFKNRVKADRGRHRRVAIVALARKLLIAFWRFATDGEIPEGAELKIA

SEQ ID NO: 103185 - protein, 430 aa, unidentified
MNESVSEQPLSPKVAAFVGIDWADLKHDVVLRSVGDPTKSEHQIIKSEINALADWIAQMHERFGAKGKVLVCLEQSRGALIYQLMAYELFELYPINPSQLANYRRTFFSSGAKDDRPDADLLSELVMCHRDRLKAWKPDDQLTRELASLNEGRRNAVDRRTDLANEIKSQLKLYFPVALQLLENDITTALAADLLVQWPTLAELQKVSPGKLRKFFYGHNSRQEKKILERLALIKEAKPLTTDLAILRPNALRVKLLAQQLKSLLPFIAEYERRIAEIFGSHPDRFLFDNLPGAGPALAPRLLTAFGTDRDRFEVAGDLLNLSGIGPVRIASGKKTGKNASVHCRRACPKFLRQSFHEFGECSIRYSPWAQACYQAQRGRGKGHHAAVRAVTFKWIRILFACWKQRTPYDPQRYFQALQTRGSDYAQTTA

SEQ ID NO: 103186 - protein, 340 aa, unidentified
MTAHVCGIDIGKTVFHLIGLSKEGQIATKKRFTRKQLITHTVNLPACLIGMEACPGAHFLARVLRAQGHEVKLMPAEYVRPFVKSNKNDYVDAEAIAEAVQRPTMRFVPIKSEAQLDLQALHRVRDRWMGRRTAVINQIRGFLLEHGITIAVGPAHLKRQIPSILEDADNLLSSRMRALLVELRDEWKKLERQIEEIDREFAQAAKKEENCRRLLTIPGIGPLTATALTAAIGNGQAFHKSRDLAAWLGLVPRQHSTGGKSRLLGISKRGNPYLRRLLIHGGRAVVARVKRKNHSFGTWLDHIEARSPRNVVVVAMANKLARIAWAVLTRGQVYCATACT

SEQ ID NO: 103187 - protein, 338 aa, unidentified
MTIVMGLDQHRAQITAEWIETSSGEVSRCRVAPADRNGVRRFAERFRGQELEVALEATTGWRFVVEELQAIGAQVHLAEPAETAARRGTKKRAKSDRADARHLRELVMVGRLPESWVPPAHLLDLRARVRLRHTLVDARREWQQRMQAVLYHHGVPSRSWLMTAQSRAWLAGLQLPAAAREQLTVALALIDALDAQLTPLDAELRDYAKHQPGCRALMRHYGIGPLTSITILAELGDARRFGSSREAVRYAGLDITVHQSDTRRAPGRLSRQGPPALRWALFEAAQCARRPGSPDHDYYLQTAARLGGNRACLAVARKLLKRSYHTLRELGQEALLPA

SEQ ID NO: 103188 - protein, 425 aa, unidentified
MGANGVRLTDEELAGRVVAGVDTHADTHWLCVLDERGRVRLSREFPADAGGYAAVAEAIGDPSGCAAVGVEGTCSYGAGLADELARRGFRVLEVLNRKKAGKRRRGEGKDDAIDAERAARDVLAADGTSVPKLRGGWVDDVRALLVAREQCVRAAVGAHAVALSLARCAPEAQRRRWDGMREEAMMSAALGLGADGGLTALERSMLALARSWEAARAEAEALESEMRALVEKNCPALLAMYCCGAVSAAALAVAAGENPGRLGSEASFAMLCGAAPIPASSGKTGGRVRLNRGGDRRANSALHSIVVRRARYDPATRGYIARRMGQGLSRAEAIRCLKRYVAREAYHALTHPRDVGERVDRSSLREARRAAGLSQQEVAAALGVAPSSISGVETGRNQCRRLAERYSRWVMDGMPLDVGGNEEKP

SEQ ID NO: 103189 - protein, 423 aa, unidentified
MDVMHERVAGLDVHKAMIVVCVRLVSDGKITRECQTFETTTAGLLSLLAWLTAADCSHVAMEATGVYWKPVWNILSDGAFELILANAAHIKNVPGRKTDVNDATWIADLVACGLIRASFVPGQATQELRSLLRARKQLTHEQTRHTQRIQKTLEEANIKLDSVISDIMGVSGRRMIEAMIGGVRNPTKLAALADRRIKATPKQLYDALHGRLTDHHRFMLKLYLEQYDAVDKSIGEIDHEVDAALAERDKEVAPGQATFRSLIGLLNTIPGISTLSATTILAETDTDMSRFATAGHFVAWAGLCPGQNESAGKRKSSRLRKGAPWLKTMLVQCAWSAVKKKDSYYKAQFNRLCRRRGPKKAICAVAAAMLTAIYHMLKNGVEHQDLGIDHFDRRSTEIRTKRLVAQLTNLGFQVELQPLAEAA

SEQ ID NO: 103190 - protein, 391 aa, unidentified
MTKCKTETVNDLSRCLDPLDMDATLIAVIEMSQSSWLVAGLVPGVERQPLKKLAIDERALLNLLSRWRAEAEKKGHRITRTAVAFEAGHDGFWLARWLAAQGVETHVIHASSVAVTREHRRAKTDRLDTELLKRGFLGWLRGERGHCKMVAVPTLAEEDAKRPSRERETLVGEASRIITRVKAAFIRLGIRSFNPKLKAAAARLGTLRTPEGEPIPPNTLAALKRDLERHQVVKQQIREIEQTRLELLEKAPAKGPHAMVRLLARVVGIGVETADMLVQEVLSRNMRDRRAVARYAGLTGSPDESGAKRREKGLARSGNARVRRGMIQLAWRFLMFQKDSALAEWYRQRTANAPSMRKTFVVALARKLLIALWRLARDGVVPDGVRLRPTA

SEQ ID NO: 103191 - protein, 443 aa, unidentified
MGRMRGVAEEIPDAEFEQILARVCAIDVAKESGMVCTRIAGPTGRRASRVWQVTATTNAVSDLAVDLVAAGVEKVTVESTSDYWRIWFYLLEAAGLDVQLVNARDVKNVPGRPKTDKLDAVWLAKLTEKGLLRPSFVPPTPIRVLRDYTRMRVDLIRDRTRYWSRLEKLLEDALIKVSSVASSLRTLSTRDMVEALIAGQRDPHALAELARGAMRGKRAALIEALTGRFDAHHGELARILLDQIDRLDTEIAKLTQRIGDLLDEIDAPPPPSTPTGDTPMTNARQRLAEIPGINTESAQLIIAEIGLDMTRFPTAAHLVSWAKLCPRTIQSGTSLTTAKTGKGNPYLKGALGLAAATNTRGKATFLSERYRRLVKRRGKGKALVAVARSILVIIWHLLADPSARFRDLGADFHDRHVNTTRKTNNLVRQLEALGHTVTLQPAA

SEQ ID NO: 103192 - protein, 380 aa, unidentified
MTHAFAQTTNGQSDILFVGLDVHKEKITVAFADEGRSGDVRCYGSIDNTPIAIARLLAKLGKDGRRLSFCYEASGCGYGVYRQIIEAGHRCDVVAPSRIPRPTSDRIKTDRRDAIMLAKLHRSGELTPVWVPDQDHEAMRDLIRSRCAAMMQRQMARQQLQAFLLRHGRTYKGMKAWSRTHFLWLSDVRFERPAQQAVFQDYVNAVRDTGERITRIEKQIQALIPSWSMCPVVTALCTLRGVSTIAAASVLASTGDLARFEHPQQLMAYFGLVPSERSSGNSVRRGGITKTGNNEVRRILLQSAWCYRFPARVARTKADAFAAGPTPVRQIAWKAQLRLTDRYRALLAKGKPVQVVVTAIARELLAFMWAIGQIEKPAPA

SEQ ID NO: 103193 - protein, 338 aa, unidentified
MLMISIINFHYKIMQNQMIIGIDVSAATLDICMSGKEQKSVVIKNEVADIRKFFNTYKSECLVIGMENTGRYNWALYEVLKDLDHQVYVISPLHLKKSMGLVRGKTDKIDAIRIAAFVSKDHTNLPRWKPSSPTVQKLKILLTERNARVKSKRQLLRHQYDYAKMKHLGLDKPLQKLNKQQLSMLDEQLRIIEKQIEQLIKQDEPMQKQANLMRSVPGVGKVLCWMILSKTENFTTITEPRKMACYSGVVPFSYQSGTSIRGKDRVSNYADKALKAVLHLAAMSAIRLHNDLRDYYLRKVAQGKNKMSTLNAVRNKIVHRVFAVIKKQMPYQLNLVSS

SEQ ID NO: 103194 - protein, 391 aa, unidentified
MVCVGIDVAKDKHDCCILDSDGMVRADCFTIPNNMDGFKQLLQTIRNCTKKSDKIKVGLEATGHYSYNILGFLLDNGLPTYVINPLHTNLYRKSLSLRKTKTDRVDARTIATMLLSDVDLKSYTDIAYHNEELKSLTRYRFDKVQECAKLKQSVSRLATILFPELEGLVSSIHGTSIYALLSEYPGAKQISEVHLTKLTNLLTTASKGRYGKEKAIQIREAARASIGSVIPAKSLELKHTIKLIQELASEIDEIEDSIQKIIDELNPPILSIPGIGVNSAAVILAEIGDFSNFSSPDKILAYAGCSPSTYQSGKLTNCYAHMEKRGSRYLRHALYNATKYVCYWNPVFAEYLAKKRAEGKHYNVALSHAMKKLVRLIYALQKSGKTYLTAA

SEQ ID NO: 103195 - protein, 346 aa, unidentified
MDHSAGLDVSVKETSVCIVDDTGKIVREVKVVSEPEMLLGVLKNPGYHFKRIGLEAGPLSQWLFSALAEAGLPVICVETRHMRAVLTAQINKTDRNDARGIAQMMRVGLYRPVHVKTLRSQKLRMLLTHRKLLQSKAIAIDNDLRGTLRNFGLKVGMVGKMKFEARIKELVENLPDLPDLAELVEPLLVVRRVLREQFVIQHRRLLAIVRGDEVCRRLMTVPGVGPVVALTYRATVDVPARFRRSKAVGAVFGLTCAKYQSGEVEWSGRISRCGDEMMRVMLYEAAQSMLRSNKWSWLKAWAMQIARRRGMKKAIVAMARRLAVILHRMWVDGTEFRWTREAAAAA

SEQ ID NO: 103196 - protein, 321 aa, unidentified
MLWIGIDVAKQSFTTAKRCSQRFAIETFPMTAAGWRSFCEWAPEDSFQVCLEATGPYWLRLAQWLEQAAIPYSVANPRKVRRFAQASEQRSKTDSIDAAILLRFAEAFQPDPVLPATGPSRALRALSRRILQLQMELDRERDRLEKSQADPATPEIVLSTHAILHNELKRLINELEFQAKKLILQHSTLEPAYQLLLSIPGIGDKTARTLMAEYGQQLLSASPKQMTRFAGLDVVLFESGSSVRKKPRISKQGNWRVRRALYLAALSAIRYNPTLAPYYQRKRQQGLQPKQALVAVMRRLLHLVYGVLKHQQPYNPDYKMT

SEQ ID NO: 103197 - protein, 355 aa, unidentified
MNDTKFIGLDVHKTGISAAVLDHDGRLVMQSVFATHAAAILSFMHGLRGTLRVTFEEGTHSTWLYDLLWPHVAEVLVCNPRKNALLKSGNKSDQIDARKLAELLRGGMLSAVYHGQTSTLTVKELGRTYTTLTQDTTRVMSRLKALYRSQAIATEGKKLYTRRRRESWLAQLPHVGQRYRAERMFQQLEALQGLRRQARRDLMVECRKHTATALLTSVPFLGPIRAALLLARVQTPFRFRGKRQFWAYCGLALETRSSADYHFVAGELRRSKKPVLIRGLNLNHNHDLKNIFKAAATTASALPGPFRAFYENLLGKGMKPEMARLTLARKIAAISLILWKKGERFDPEQLKSQAA

SEQ ID NO: 103198 - protein, 352 aa, unidentified
MAHLVDLVDHVVGVDPDRDRITAAVVCAKTQGELASKSFATSPRGYGQALRWVKEKTTDGRRAWSIESSGSYGAGLTATLVAKGEFVIEFDHPRTRPSKDGAKSDALDAVRAARETLGRKTWATPRSRGAREGLRALITARDSAKLARVAAINILKALVVTAPIDLREGLRGLPLGQLVARCQRLRPDSATEPEYAATKLSLRSTANRVRQLTDECRELEAAMAPLVRSLAPALLDEPGIGVLVAAQILVSWSHQGRCRNEAAFARLGGVAPLEATSRQTQTRHRLSRGGDRQLNRALHTVVMARAKMHPPTKAYIARRLSEGKTKREAMRCLKRYYARHLFRLLEAAPATT

SEQ ID NO: 103199 - protein, 341 aa, unidentified
MNKPSTICIDLAKNVFQVALFNQHGKLKSNQKMSQAKMVAFIAQYPASMIYMEACGSAHYWGRYFQNNKHHVHLLPAQIVRMYRAGNKNDANDALAIYEAAQRPDIHFVSVKTTEQQDIASVLHLRESYIKQRTAISNRIRGFALEYGIKFPQSITKLRALLPLELEDPNNGLTSSARFVLHKLLNQLIELDKPIQEVTDYLIAYAKQIPACQLLMTLRGVGWIVASALYARMGDASAYKCGRDASASIGLVPAHSGSGGHNKLLGISKKGDRTLRAVVVHGARSVVSNIKDKSDQLSCWLRALLERNHFNKVVIALANKTVRMACAMLKSNQPYQEKLPA

SEQ ID NO: 103200 - protein, 316 aa, unidentified
MSTNEEKTFVGIDVSKSTLDIRIEPASESMHVPYDEQGVKEVCQHLVKAAPTLIVMEATGGLETRLASILVAKGLPVAVVNPRQTRDFAKATGELAKTDRIDAAVLCRFAQAIRPAVRPFQDADTRDLEDLVNRRHQLVENRVQETLRLGTAASKALQRSLKSHIAWLDRQIATLDDDLGKRLRASDAWKAKDDLLRGIPGVGVVTSLTMTAKCPELGQLNRQRIAKLVGVAPLANDSGKHRGKRFVWGGRADVRAVLYMATVSAIRCNPVIKAFADRLKQAGKPAKVVIVACMRKLLTIMNAMVKDNAPWDPKRA

SEQ ID NO: 103201 - protein, 406 aa, unidentified
MTTNSQVQPTSCNGVLHVSFELSAKSWKLGFADRLGRRARVRTVRPGDLPELRVEIAKAKRAFGLQSDAKVISAYEAGRDGFWLHRCLIAMGIESYIVEPASIQVTRKSRRAKTDRIDAEKIVAALMRYLAGDRFACSMIRVPDEESEDIRNLNREMVTIKKERTALSNRIGSLLVTQGIPLGVVDRNFPKKLVEMRTPEGKPLGQHLRARLLREFERLVLATEQIRVLEMEQAKMLRVAAKDATKCESPKAVSIAEQFMNLVGIGPVTAWTLSSEIFAWRDIANRRQLAALAGLTPTPHDSGDDEKEQGISKSGRGQLRVLLIEIAWGWLIHQPTSALSKWYAERFNDGTKRNRKIGIVALARKLLVALGKYIRGGEIPLGAKVKEQRKFDYTPSLKPRPATATV

SEQ ID NO: 103202 - protein, 438 aa, unidentified
MRNIGIDVGRTWAEVAIVGEDGVTRSAGRIGATPEELTAFARALRPDDRVVLEATTNTWAIVELLETHAGEVVVSNPQRTRAIADAKKKTDTIDAATLAELLAADYLPLVWQPDVTTRALRRRVAARAVLVVERTRLRNRISAVLIRNLVRCPSSDTFGKRGRAWLATVALPDDERDLVDTTLRLLDGLEVEIRGAEAGIAGVVTDDVRVRHLLTIPGVGLQTAVGLVATIGDVHRFSRPDKLVGYLGLDPIVRQSGGKPAWTGHISRSGAGHMRMLLVEAAHAAVRTPGPLRAFYARVAARRGPAIAAVATARKIAVLAWHLLSEDTDYRWAPTYLTATKVRAMELAAGSPSRRGHVPGPGGSAERARQARAADRALLERAEADYVALVAERVARDAAATTGERLSGRSLAAPRSRSPHSAVRLGVDRVRAEDTLGA

SEQ ID NO: 103203 - protein, 344 aa, unidentified
MDNHTQYSGFAGVDLAKKVMQIHFVSGDGEITDKQVKRAEFLDFFRNRTKCLIGMEACGASQDWARKLEAMGHEVHLMSPKAVKPFVSGQKNDYNDAIGIYKAMFNGVRRVPVKSTEIRDLQTLRRIRSQVTKDRVKEINHVRGLLAEYGIVMGKSITAFNKGISSALESLKERGDVSSLVAEELRTTAEAIKTKIERQKKLDREIEQLARGCKNYENFLKTPGVGPFTAAMLCVLLCDPSIFANGRRFAAYIGLAPRSRGSGGKNFVTSIPLKFNCDSESRAVFVECAQAIARYKNKSFWVEDILRRKPKKVALIAIANKLARQAWAMANKGESFKQMATLTA

SEQ ID NO: 103204 - protein, 375 aa, unidentified
MFTPTGLGPKQTEMQIIGCDLHARQQTLAMLDTGTGEVVNRTLTHEGDNVREFYSTLPGPVRVGIEATGSMKWFLHLMEELGIDCQVGHPATIRAAEPRRQKHDQRDAELLLKLLVENRFPSIWQPSQELLDLRGLLLHRHQWVRLRTRIQNALQAIALANGLRRGSSLWSQSGQRAIASLPLATHTAQRRSELQAMYARFEAEIEQLNQQVLEQAGQRPTAELLMTHPGVGPITALATDVFLGDPKRFSDGKALASYIGIIPREHSSGGRQRLGGLSKQGNPLLRFLWCEAAVHAVRRDPELGRFYRRKLVQKGLGKARVAAARKLGIRLWIMLRDRIDYHEFCRRGQMRQKSGGACAGMPGPRYGAKSHRLID

SEQ ID NO: 103205 - protein, 361 aa, unidentified
MKLFVGIDVSLKDFKARMFDVEGEETAKRLRAKNDDPGAESLVKYLVEICSTNAVDSLRIGMEATSVYGWHLQMHLAGEPSLVPFHPQVYVFNPKIIANFRKQYVDISKDDWFDCLVIADRLRFGRLPESCQVDFRYLPLQRLTRFRHHLIQTITREKNYFLTNLFFKFNTICQDKVLSNTFGAASEAILTEFLSPEEIAARPLDELIDILMEKGKSHFSDPEATAKALKHAANCAYRLHGSLLEPVNLILATSLQTIRTLEQQVKSIDKAIEKELSHFQNTLQSMPGIGPVCAAGLIAEIGDIHRFDNEAALAKYAGLTWRKHQSGEFEADDTPLTKTGNSYLRSYFVLVERFLNNVAIC

SEQ ID NO: 103206 - protein, 343 aa, unidentified
MKLTRVGVDLAKQVFQVHGVDRAERPAWCKRLKRARWIADLERDVEPGCEIGMEACGGAHHWARVLCAKGYRVKLIAPQFVKPYVKTNKTDANDAEAICEAMSRPSMRFVAMKTVEQQDLQAVHRVRSSLIRERTAKANQLRGLVYEYGLVAPREISSLRRALPEWLEDAENGLTVRFRALLAGLYRDLQQLDERVRELDREIATIAREHEPIGRLQQLTGIGPLTASALYALVGDARQYRNGRELAVALGLTPRQHSSGGKEKLLGISKRGDKYVRTLLIHGARSALRVAPNKTDRISCWAVALAERSHPNVATAALANKLARIAWAMLRHGTNYEAEHVAA

SEQ ID NO: 103207 - protein, 418 aa, unidentified
MNVKARRTKKQVNVENQAINLLSKEELNKKIEVVEKELRSYTWRELETNGKFAKNDKLSFITDDMLIVGCDIGSENHYIRAIDVRGRELSRGAFEFSNTSEGFENAKAWVLALAAKHDKKQIVLGLEPTGHYWFALAAWMISNGISVVRVNPYAVKQSKEIEDNSQLKDDRKDPKLIANLVKDGNYGMPYFPEKVYADMRRLSMFRDQLTEDRIRNINRLHRELKIYFPEYMDAFGKIDGAFTLEVLKVSAIPSDITALGAEGIKNIWHNEKLRGRGYSRANEIVSYAEKSVGLTDGIDAGREAVKWYAEQILKLVACSSGKHKGQTKISHRGRKRLRYWLFQAAKSAVSHADEFKQLHEYYTTRTNNPLKKMQSLVVIACKILRVIYTILKTGTTYDPQKLLEDIKRPTASHAPMAA

SEQ ID NO: 103208 - protein, 328 aa, unidentified
MFYLGMDVAKAKLDCCLLLDEAAGRRKTKVVNNTKSGIAELLAWVAKLNVSAGELHVIMEGTGVYHEQAALALADAGVTVSIVNPAQIKDFGRGLAVRTKNDGMDSFVLARYGALVKPAAWTPPAPEARLLQALLARRDAIAQDLQRERNRQEKAEATDTPELIRQSLADSIEFLVKQLKQLQADIDQHIDRHPGLKDDLALLQSIPAVGPQVGSNMLSVLHCHDFGSAEQLAAYLGLVPVERQSGSSVLGRARLSKAGPARIRAVLYMAAVVATRCNPHVKAVYERLLERGKSKMSALGAAMRKLVHLCFGVLKTRQPYQANYAKID

SEQ ID NO: 103209 - protein, 417 aa, unidentified
MSKSNDQEILSIVNPVCCGLDVHKAKISACLITVDGAGKQQHEIREYSTFTRELLKLRDWLGENSCPVVAMESTGVYWRPVHNVLEGYMEVILVNARHVKNLPGRKTDISDSKWLASLLRMGLLKGSYIPGKELRQCRELVILRKKYTESLGDYKRRVHKVFETANIKIDSVVSDLFGVTGRNLIDLLCTKEKISRTEVEECVRGSLKDKVAELYQSIQGFFESHHRFEITLLMKTIGHLEATIMKISQQLDTMTKCHKELLDHLDEIPGVNKSGAQSIISFVGTTMKEFKSDSHLVSWGGLCPGNNESAGKRKSGRSPVVKNPFKTHMIELSWAAIKKKGSYYKDKYYRLKARRGAKKAIVAIANRITRAIYHMIKYGVSYVELGESYLSARNKTTSLNHLQKQAKLHGLLLIPNK

SEQ ID NO: 103210 - protein, 392 aa, unidentified
MIYVGIDVAKDKHDCFITNSDGEILFHTFTISNNHEGFDTLFQRIESVSDDFTKVKVGLEATGHYSYNLLGFLLDKGLPTYVINPLHTNLYRKSLSLRKTKTDKVDSRTIATMIMSDMNLKSYSDISYHNEELKSLTRYRFDKVKERAKLKTSVSRLVNILFPELEKLVPSLHLSSVYALLSEFPGAAQIAASHLTKLSNLLSQASKGRYGKETAILFRETARSSIGSVMPAKSLELKHTIKLIQELTAEIDEIEAAIKQIMDEEIHSPILTIPGISYRMGAMILAEIGDFNRFDSADQILAYAGMSPSTYQSGQLNNCYSHMEKRGSRYLRYALYNATKYVCHWDNSFGAYLQKKRSEGKHYNVALSHAAKKLVRLIFAMEKSGRTYQPAA

SEQ ID NO: 103211 - protein, 410 aa, unidentified
MEVFLERCAGLDIHQASVVCCVLIGAPGRKLQKLLRSFGTITRELEALRAWLVEHGVTHVGMESTGVYWKPVYAVLEGHVDLIVGNAHHIKNVPGRKTDVKDAEWIAQLVRHGLVAKSFVPPPAIRDLRELVRHRRTLIETRTAMRNRVLKLLEGANIKLSGVASDVFGVSGMAMLEALAAGTNTASEIASLARGRMRRKHAALEAALDGRMREHQRFLLGMQLRSLEAVDRDLDALDARIEAQLEPFQAQHRLLMQIPGVDWVTAASIIAEIGTDMDVFATPQHLAAWAGVAPGNYESAGKPKGAGTRRGNVFLKSALFAAASAAVRTKGSYYQDKYNRLRARRGPVRALMAIAHKLLIAAFHMLATGEAFRDLGESYLDLVARKRSTAKLVQRLSNLGYDVILAPKTA

SEQ ID NO: 103212 - protein, 427 aa, unidentified
MTVFCGIDWAERHHDVALVDEAGTLLAKARITDDVAGYHKLLDLLAEYDDSPDVPVPVAIETSHGLLVASLRAGSRRVFAINPLAAARYRDRHGVSRKKSDPGDALVLANILRTDMHAHRPLPADSELAQAITVLARAQQDAVWTRQQVAYQVRSLLREYYPAALLAFQSKQGGLTKAEARVILTLAPTPAKAAKLTLAQLRAALKRSGRLRGCDTEAERLRDVFRAEYAHQLPGVEDAFGHQLLALLKQLDASCQAADDLAEAATAAFHQHADSEILLSFPGLGPMLGARVLAELGDDRTRFTDARALKSYAGSAPITRASGKKRFVGRRFVKNNRLINAGFLWAFAALTASPGANAHYRRRREHGDWHAAAQRHLLNRFLGQLYHCLKTRQQFDEQHAFATLLQAPAGPGARAAGMSVQPSRVRA

SEQ ID NO: 103213 - protein, 343 aa, unidentified
MDQYIGLDVSLKDTAISIRQEGKRIWRGKCPSDPKLLAEMIRKHAPYARRVVFETGPLSTWFYHALTAEGVPAICIEARHAQKVLGETLNKTDANDADGLAQLAEAGFYKAVRVKSFDNMLTRTLVGARNQLLSISTQLNNQIRGLMKTFGLIVPKGKGRVFDDNVRELIDGNDGLARIILPLLEAWGGIRKRAADLDHQLLAVARESQATKLLMTIPGIGAVTAVSYVAAIEDPDNFRTSRSVGAWLGLTTRRYQSGEVDYDGHISRRGDNHLRGLLYEAATVILTRTSTKNESSLKSWGLKLRERLGFKRAAVAVARKLAVIMHSMLKTGEVFNASAGATA

SEQ ID NO: 103214 - protein, 397 aa, unidentified
MYIVGIDIAKRKHEAAVIDGEGAVIIKPFSFTNNCSGYNRLLAMLTKAKLPLDEVSFAMEATGHYWLALFTRLQKEGFRVQVINPVQTNSIRSFYIRQAKTDPRDALLIAEVIRFGHFSESTLHPENIYELRELCRGRHAIVSMQADVKRKVVALLDQVFPEYETAFTNLFGDTSMAILQTCPTPKELSEMPLEELCHLIEVSSHKRFRMAKAQELQALARNSFGFAMAGDVFSTMIRLYAKHLDFLKQQVREMDRKIAEIMDTLDTPITTITGIGPTLGAYILSEIGDISRFSSAAKLAAYAGIDPTMRQSGEYNGVRNRMSKRGSPYLRHAIWLAASSAVLHDPALKFYFQKKRDEGKPYMASVGHACRKMVSIIYAVMRDNKAYTPCIPNEISA

SEQ ID NO: 103215 - protein, 345 aa, unidentified
MVTLGADAHKRTHALVAVDETGRQLGMRTVAATSAGHLDALRWTQCWPERRWAIEDCRHVSRGLEKDLLSAGEVVVRVPPHVAAESRRRMRERGKSDALDALGVARAALREVHLPRAYLDERCREVKLLIDHREDLVGERTRIQNRLQWLLHELEPEFQVGSGALSRRPAMKRVEELLKGRRGVVAELARELTVRTRQLSARIDQLERQLSEMMPAVAPSLLALYGCGVLTAAKLVGETAGARRFRSSAAFAMHNGTAPIPASSGNVQRHRLNRGGNRQINAALHRIAVSQIRGTGRSHQYFQHRLAVGNTKREAYRALRRRLSDEVFRLMLRDQLTPEGRLGVA

SEQ ID NO: 103216 - protein, 338 aa, unidentified
MVVIGIDPHKGSHTAVAIDEDETKLDEVRVSADRRQLEALRSWATAFPERSWAIESANGLGALLSQQLVSAGEEVFDVPPTLSARVRVLGTGKSQKNDPNDALSVAIAALRSDRLRLVVAEDHLAVLRLLWNRHKNLTSLHTQAVCRLHALLAVIVPGGTRRRLSAEKAAAGLSGFRAKTAVEKARKPQAHDLVGGVRRLDALLKASKRTIVEALAAVPTSLGELSGVGPVATCIILAHTGDVGRFGSEDNYASYNATAPIDTSSGPRKRHRLNPRGNRQLNHAMHIIAFSQLSHAGPGRDYYERKIAEGKTQKEAVRALKRQISDVVYRQLVRDAQR

SEQ ID NO: 103217 - protein, 461 aa, unidentified
MATIKSRKPSSPPQRPPTVLGLPVIDPDTAGIDIGATALSAAVGPDRDPQPVRTFGTFTTDLQALADWLRACRVQRVALEATGVYWIPVFQFLAAAGLEVCVVNPRHVRHVRGRKSDVSDAQWLQHLHAVGLLQPSFRPEDAICALRTLFRPREGLIAQAAQQVQLMQKALDQMNLHLHHVLSDLVGVSGQRILAAILAGERDARTLAKLRERGCQADEETVIAALTGDWRSEHLFTLRQAYATFAHFQELVRGGDAEIETWLQQHPAPGPEPPTPPAPPKPSGGRNAVQLPTLDLRAELHRRFGVDVTAIPSLGVSTACALFTELGTDLSAFGTAARFCSWLGLCPNPKKSNQRVLQSGTRKIKHRVAALFRQAAQTTHRSEHHLGVFYRRMRAKLGAPQAVTATAHKLARIFYHVVTQKEPYDASIYEQKDEVTEQRRLTRLKREAKSMGFDLQPLVVS

SEQ ID NO: 103218 - protein, 407 aa, unidentified
MNAVGIDISKGKSMMAARRPMGEIILRPKEYPHTEVGLEQMALAILALGEDTRVVMEATGRYHEPVAAALHEYGIRVTVINPLFIKQSGGGSIRKVKTDKADAMKIAKYALDNWVDLREYTPMEAIREQLKLCSRQYNLYMKNVVALQNNLISLTDKTFPGVNELFTSPDRADGSQKWIDFVTTFWHCECICLVSEAAFTERYRKWCKRKGYHFSTQKAAELYMDSMGHITTLPRNSNTKLLITTAAKELASAKATLAVLRTEMTRLAQQLPEYETVRAMYGVGKTTAVQLMAEIGDVRRFPRRSSIVSFAGVDPAVDDSGKHISKSNPTTKRGSPHLRKTLYQIVCTYLRKAPADEPVYQFLDKKRAEGKPYFVYMTAAQNKFLRIYYARVKECLIAADTKELSAD

SEQ ID NO: 103219 - protein, 458 aa, unidentified
MVVEGSHGNRGLLPVSTSLRLLIFPALPGMSTQPMVLMSRKEAAMDVVHPRCAGVDISKRDAKVCVRVPGSGRAKVKSTVTTWKAVTNQILALRDHLVAEQVTLVVMEATSDYWKPFYYLLEDGPFEVMLVNARHVKNLPGRKSDVSDAAWLAQLGAHGLVRGSFVPPEPIRQLRDLTRTRSTLVRARAMEIQRLEKLLEDAGIKLSSVASDITGVSGRAMLAALIDGQRDPEVLADLAKRRMRSKIPELTEALTGRFSEHHGFLAQLHLDLIDNHTQAIDELTGRIEVVVEPFRHVRDLLVTVPGISTLVADVIIAETGGDMSRFPTAGHLASWAGTCPGSNESAGKVKSTRTRPGNPYLKGALGIAALSASHGKDTYFAAKYRRIASRRGPVKAIVALEHAMLIAIWHMITNDVPYGDPGGDYFTRLNPDKAKHRAIHQLQQMGYSVTLEPLAVAG

SEQ ID NO: 103220 - protein, 349 aa, unidentified
MQIKSQIRSIGIDLGKTTFHLVALGVHAQVLVRKKFSRPQLLAYTANLPSSLIGMEAGVGSYFLGRALREQGHQVRLIPAQFVRPFVKSNKNDYCDAEAIAEAVERENMRFVPIKTEDQLDLQAVHRVRDRLVARRTSVINQIRAFLLERGISFRKGPASLRRQMPEILENAEAKLSTSMRRLLDFLWQEWKGLQAQIESLNADLEHIASSDPSCVRLQQIPGVGPLVSTAVVSAIGNGAAFKKGREFAAWLGLVPRQWSTGGKAKLLGISKRGNPYLRKMFIHGARAAVLRVKREGSTLGKWMSGLETRAARNVVIVATANKLARISWAVLASGNDYHPMHKAAVFSN

SEQ ID NO: 103221 - protein, 482 aa, unidentified
MKPKPKEKTQKATDHPTQGHWHEMNRKQRREMMRKMQSEDISLEVVHPDAAGIDIGNESHYVAVPPSRDSQPVRRFGCTTAELKAMAAWLKRCEIRTVAMQSTGVYWVAVFDILEQAGFEVYLVNARDTKNLPGRKSDVQESQWLMKLHTYGLLRNSFRPSQEIRTMRTYWRQRNDLVQSAGRHILRMQKALTQMNIQLANVLSDVSGMTGQTIIKAILGGERDPHKLATFRDCRVKASEEEIARSLEGNWQEDLLFVLKQEQDGYEFCQQQMAECDRQLAQYLQQQEDRSHGASLPEEKRKGRLKKKRANKPRFDLREALFRITGTDLTRIDSIDVTTAMTVISEAGWDMSKWETEDHFVSWLRLCPDNRISGNKIIGKGRLPTNNPISIALKLAASTLRLSNTYLGAQFRRFRTRLGAPIAIKAMAAKLARLVYRILRYGMKYVDQGTAFYQAQHRNLQIKHLKSKAASLGYQLIQVPAA

SEQ ID NO: 103222 - protein, 314 aa, unidentified
MAQFITAAGIDVSKGWLDVALWPADAAVPHIERSEAGCFDRLAAWLREQGVSRVGLEASGGYETEVMDALQARGFEVIRYNAYRIRMFAKANGRLAKNDRADAVVLAHAAAVLPVRHATARQPQLDPLVELLNYRRRLHDWIGDCTNQLEHLRDKVLRRHTTARRARLHREVTAIDKKLAAALASSGASGELVRRLRNVPGVGPVLSAALVALLPELGTLSRRKVASLVGVAPFDNDSGNRRCERHIQGGRARLRRVLYMATLSATQHNPVIAAFAKRLAGKEPKVIITACMRKLLVILNAMVRDAKDWSPKAA

SEQ ID NO: 103223 - protein, 374 aa, unidentified
MAKRAKDLGTSSGREGPSANTLGPATATPSRRKKEAPVERQYVGIDLHRRRSVIVRKNAAGEVLGKVRIDNSAMALAEAVAAAGPEPEVVIEATFGWYWAADVLEEMGARVHLAHPLGNNWGNRRVKNDERDANDLIDLLRLGRLAESWIAPPEVRELREVVRYRLKLVRLRAGLKAQVHAVMGKHGVLPTRCDMFGLGGNAQLDALDLPEAYMARLDSLRDLIEIYNREIDQLDKRIPTMLAGHQGYHAIQAIPGVGPLLAAVFVAEIGDVTRFDSPHRLTSWAGLTPKHRESDTKVTRLGITKQGSRHVRWAAIEAVSRNHGGGRIKADFRRIAERRGRNVGRVAAARKVLVLVYYGLRDGEIRCLARVDQG

SEQ ID NO: 103224 - protein, 335 aa, unidentified
MQIYGIDLAKEKFDVSFFDLTSKKVSNQPSHKVVTNYFKNIGRFLEALPSNAVLVAEHTGVYGDTLLKCCMDSNVKIAFVGGYVIHRYRATPDRAKTDVLDCALLRDFGERYPDKLKYKTFPEEALYELRQLARHREMLVEQRKQLITADKSEDCRPIRSLAVKRSMDRIKEMLDTEIAETEKEMLKVINGHESIHHNYELVKSVDGVGLITAVELLVKTENFTKITTARQYAAYAGTAPYEKSSGKMDKGAHISKIGNRRSKTLLYICAESARLHNKEIKLYYERRTLIDKKPRHYVLNAIANKLLRIIFTLVEKGEYYDANFIRQDPRVVKYN

SEQ ID NO: 103225 - protein, 349 aa, unidentified
MADKLIVGIDISKDWLDLCASNAAGVERIANTPEVVAAWLERVGAGLIAFEPTGGYERTLIAAVRERGIAFVRVHPNDVVAFRKSRGIKAKTDAIDARLILAFVCDKAARAELRTSLIGDDRLRALAARRRQLADALQAERCRLDAAALPAVRASLEAVIAVLRHSLGVLEAELADAVAAHPQTAELAKLLQTIFGIGPVVAITLIADLPELGLLSAKQIAALVGLAPHTKRSGKTRYRETTGHGRPGVRRVLFNAARAAVRHPSRFKDFYDRLVTANRRPGKVALTAVMRKILITANAVARDCQPWRGRPAAGTPCRPHAEQTAHRAGRVKAAAAPRAVARSASLEAA

SEQ ID NO: 103226 - protein, 341 aa, unidentified
MKHEMHVLGIDIAKRVFHAVGMDDRGNIVYRKRLSRHDLLPCIAKLPPVLIGIEACGGAHYWARRFREHGHEVKLMAPQFVKPYVKSNKNDSRDAEAIAEAVTRPTMRFVPIKDVDQQDIQALHRVRERLIGERTALVNEVHGLMHEYGIVLPKGVAKFRQAVVGKLEAEKDKLTPLSQELFWKLVEEFAALEAQLAYYQEKLDTLAQTHPECQRLMTIPGIGPFTATALVAAVSDATAFKNGRQFAAWLGLVPRQHTTGGKERLLGISKRGDTYLRKLLVHGARATIRWVGRKTDRRSQWIRHLLERRGKNRTAVAVANKNARIVWALLTSHEDYQPAKG

SEQ ID NO: 103227 - protein, 381 aa, unidentified
MTTKATRNTQAKTSEGPLFMSFELSEKTWKLGFTTGPGQKPRERNVTARNQERVLDEITQAKRRLGLPETAPVVSCYEAGREGFWLHRFLEAHKITNHVVDSSAIEVSRRQRRAKSDGLDVRKLLSMLIRYHEGERQVWQVVHVPSVEAEDQRHLHRDLETLKQERGDTTRRIKGLLSSQGLRVKNLTRLPEQLDALRLWDGSPIPPGLRQRVLRVYAHHQFLSEQIAAVEAERGTQLQDSNDTSIEKVRQLMLLKGIGINGAWLLVMEFFAWRGFKNRREVGGLAGLTPTTYQSGESAREQGITKSGNPHVRWMITELAWGWLRLQPQSALSVWFRERYGSGGKRLRRIGIVAVARKVLIALWRFLEMGALPEGAALKTR

SEQ ID NO: 103228 - protein, 345 aa, unidentified
MQVTTMGIDLAKNVFQVHGVDASGKVVVRKALRRSQLLPFFEDLAPCLIGMEACSSAHHWARELNALGHTVKLMPPSYVKPYVKRGKNDVADAEAICEAVTRPTMRFVPVKSTDQQAVLMLHRTRALLMRQRTMAVNALRGHLAEFGLVAAQGAKSLAELIESVFEGSGTDDDAVPPLARRALAPLVAQLRQLQAQIKAIEVELLAWHRATDASRRLETIPGVGFITATAIAATVTDPSHFTSGRQFAAWLGLVPRQNSSGGKERLGSISKMGDRYLRTLLVVGATSVMRYARSKNAAGAQWVNALLARRPARLVSVALANKTARIIWAVLVRGETYRAPASAAV

SEQ ID NO: 103229 - protein, 410 aa, unidentified
MLFVGDDWAEAHHDIEIEDESGRVLARRRVPEGLAGITTLHELVAEHLDPTGELDQVLIGIETDRGPWVQALLAAGYVVFAINPLQVARYRERHSPSGAKSDPGDAHLLAEIIRLDRAHHRRIAGDSQIAEHVKIAARAHQTMIWSRVRQVNTLRSLLREYYPAALAAFGTDLAGRDALAVLTAAPSPDLGRRLSQARIETLLRRAGRQRNVSATAAKIRAALRSEQLAARPGVIGAYTASASALLAVLTAVAAQTEVLAGQVEQGFGQHPDAEIYRSQPGLGDILGARVLAEFGDDPGRYADAKARKNYSGMSPITKASGTKRVVLARYARNRRLGDALFLQAYSALRTSPGARALYDHQRARGATHYQALRTLANRLVGILHGCLRSHTLYDEHLAWHSEPDKLSPAA

SEQ ID NO: 103230 - protein, 358 aa, unidentified
MKIIGCDLHARQQTIAMLDTDTGELEEKTLEHQGETVREFYSTLRGPILVGIEATGSMQWFLELLEELGIECRVGHPAKIRKAETRKQKHDRRDARLLLTLLAENRFPTIWMPSSEQRDLRTLLRHRDQWVRLRSRVQHTLQSMALNHGLRRGRSLWSQAGQDELRALPLAPHASERRKALMTLYPGLQESIDELDRQVSQQVQQHPPARRLMTHPGVGPITALATEVFLGDPLRFSDGKALASYIGMIPSEHSSGRRQRLGAMSKQGNTLLRYLWCEAAMHAVERDPELKRFYRRKLVQKGLGKARVAAARKLGIRLWIMMRDQIDYQEFCRRGKARQESGSVRAGMPDRNSGPAQQ

SEQ ID NO: 103231 - protein, 410 aa, unidentified
MERVYERCCGLDVHKETVVACLRVPGERGRRRIEVRTFGTTTPELLAFGDWLTEHRCTHVAMESTGVYWKPVFNLLESVCEVLLVNARHIKMVPGRKTDVKDCEWIAELLELGLLKSSFIPPEPIRDLRDVTRYRKTLIQQRAAEANRVQKLLELANIKLGNVATDVLGVSGRAMLEALIGGERDGEALARLARGTLKRKRDVLGPALTGRFTQHHAFLLGQLLAHIDELDQHIAQCDRKVDEYLRPFAREAELLDTIPGVARRTAEVILAEVGVEMDRFSSAAHLASWAALCPGNNESAGKRKSGKTRKGNQWLRRALIEAAWSASRTRDTYLSSLYSRVVRRRGSKKAAVAVAHSTLVAVWHILKHHVPYQDLGPSHFDKLHSERLARHYLRRLEDLGLKVTVQSEAA

SEQ ID NO: 103232 - protein, 384 aa, unidentified
MQADRTDAPAGQEYCTVHVVFELSKSKWLVGVLLPGAAKESRYWIKGGDLPALSGLLARARAKAEELGKPVRILSCYEAGFDGHWLHRWLSQNGVTSYQVDASSIEVSRRARRAKTDRIDLAQLMRIFLAYLRGDSGVCSMVRAPTPEEEDRKRRTRERERLVNERTAHTNRIKGLLHGQGIRDAMPLKPGFLSGLDKVRTGDGRPLSPHLKDEIRREHDRLLLVHKQIKALEAQNLAAHRAPEPGSVEAKVVQLAQLKSIGPQIAQVLTNEVYYRDFKNRRQVGSCFGLTDMPYNSGSSRREQGISKAGNHRARTTAIELAWLWLRHQPDSALSRWFRERVGNIKGRIRKIAIVALARKLVVALWRYLETGLIPTGAVMRPSL

SEQ ID NO: 103233 - protein, 343 aa, unidentified
MTHFVGLDVSQKMTSICVVDNAGRRLWRGQCPSVPEQIGILVHRHAGEDARIGIETGAMTPWLVHELRNLGLEVVCLDARHARAALEMQINKTDQNDAEGLAQIVRTGWYRSVYVKSFDSHRARSLLGARAQLVGMTTRLSNHIRGVLKTFGLLPGSMRGLPFDRRVEALLLDRSDVALIVRPMLVAWRQLREQVVAFDKAIRVLVRSNSACRLLMSVPGIGVLSALVYVSTVEDPARFGRSRSVGAHLGLTPRQYQSGEVDRSGRISKCGDTLARTLMYEAAGVVLTRLKRASSLKDWAQAIAKRSGAGKARVALARKLSVILHSIWRSGQPFRWSEHASAT

SEQ ID NO: 103234 - protein, 344 aa, unidentified
MEITTVGLDLAKNVFQVHAIGSTGGVVVRRSLRRAQVIPFFSKLPPCLIGMEACGTSHHWARELVALGHEVRLMPPAYVKPYVKRGKTDAGDAEAICEAVTRPTMRFVPIKSVEQQAALALHRTRDLLVRQRTQLVNMIRGLLAEFGIAIPKGITNALAFVRRAAAGEANEVPDLATKVIAALAEQAIEVQCRIRQLERDLLASFRSNDLARRIATVPGVGLLGATAIAATVTDPTQFRSGRQFAAWLGLTPLNNSTGGKERLGRISKMGDQYLRRLLVTGMTSLVRRNKHHPNSADPRINALLARKPPRLVTVAMANRAARAIWAIMVRGEIYRVPALGSAVA

SEQ ID NO: 103235 - protein, 340 aa, unidentified
MFTNFVGIDVSKSKFDLALIKGQDKDHVIQGVFDNTHKGIKTMSKFLEKEHHVQLSETIFCMEFTGVYCRPLTNFFVEQDCHVWIEMPVNIIRSLGLQRGKNDRVDAHRIALYAYKNRDDIKLWKPQRDIILQLRDLLALRERLITSQKALTNPIEELIAMGAKSAAANVRKNCQKTLSAIENEIGQIEKNLDDIIKDDPQLKELFRLATSVPGVGKLTALFMICFTNEFSMYTNPKQLACYCGVAPFEHSSGSSIRGRTRVSHMANKVLKRMLHMGAMSVISRDPELRDYYLRKVAQGKNKMLVINAVRNKIIHRLCAVIKRGYGYQSEIIFKERLVLS

SEQ ID NO: 103236 - protein, 347 aa, unidentified
MLYAGLDLSRQRLDVCVLDSEGRTIEVTAATPEVFGLRELVARIARHGDEVTAVIESMNGARFVHDQLELYGWDVEIADALRVKGLAPLAAKTDRIDARVLAELARRDLVPAIWLPDPSVRAGRERARFRLHLVRHRTALKNRIHATLIAFGHPVPVSDLFGTKGRELLASLAIPEPWTTTLATSLRFVDELDAEIDACERELRAMGADHPYLPLLRTVPGIAWVLGYTIAAELGDIGRFASAKKLAGYTGLCPIVRQSGRRDDRGPLAKNGPKYLRWALIEAATHAARHPVYKDRYERTKQRLGRQRGSKVARVDIARELSTAIWHMLSKNEPFAPGRSPATPLVA

SEQ ID NO: 103237 - protein, 405 aa, unidentified
MEVIYERCCGLDIHKKSITACVIVGRAKEIRTFGTMTDDLLQMTAFLKERGVQMTAMESTGSLWKPIFNIMEVEEVPAILVNAAHIKNVPGRKTDVKDAEWIANCLKHGLLKASFVKPRDQRELCELVRYRVSMIEERAREYNRMDKVLQGANIKLTSVASSISTVSGMNMVRALCDGVENPTVLASMAKGKMRSKIDELERALNGLVAPHQKMILKAMLDHIDQLSRLINDLDAEIEKRMSQDVELIEALDGITGVGKITAQTIIAEIGTDMSRFPTADHLASWACMCPETKESAGKKKPGKTKKANTTLKKTLVQAGRAAANSKDTYLNAQYRRIAARRGANRAAVAVGHSILVICYHMIKDRTQYNDLGTDFFQNRNRESLIKQSIKRLQSLGLIVTVEEAA

SEQ ID NO: 103238 - protein, 342 aa, unidentified
MSTIQTIGVDLAKNVFSIHGVDAYGKCVLRKTVKRNKLLDTFAKLPPCLIGMEACSGAHHWARELLKLGHNPKIMASKFVIPYRQNEKNDANDAEAICEAVSRPKTRFVSIKSEEQQAVLCLHRIRQGLIKTRTATINQLRGLLSEFGIVMPQGRYSAQNTIGSVLEDAENGLPILARELLQDLSNKIQHLNLDVLQYDRRVSALVREMASAKALMDIPGVGEHSASAIVATVNDAKQFGSSRQFAAWIGLVPRQYSTGGHVYLGRISKRGEKHIRTLLIHGARAVIARCKEKTDRNSIWLNQLVERRGYKRAAVALAAKNARIIWALLTTGKEYKINYVNG

SEQ ID NO: 103239 - protein, 405 aa, unidentified
MHDSTTAGYAGVDWATDAHAACVVDGQGRVIVEFDVAHSAEGLGELCRRVERAGARRVAIERPDGPVVDALLDAGLEVVVVSSRSVKALRERYGTSGNKSDRSDAYVLADCLRTDGHRWRSLEPDQPATVTLRAHVRARKDLVETRVAVTNQLRAYLRIVFPGVVGLFADLDSPISLRFLERFPSATRAAWLSEKRLGAWMRANGYCGRKTPAEIYARLVAAPAGLTGDEGDARGAVTIAYVATLKTLRTQIDELETRLEELLDAHPDASIFRSLPRCATIRAATLLAEIGDCRDKFPDPDSLTCLAGVAPSTRTSGRHRAVTFRWSSDKKLRDAICDFAGDSWRGNTWAAHRYRQLRDDGKTHPHATRILARTWTHIIWRCWQDHTTYDPALHGGHQRLNDAAA

SEQ ID NO: 103240 - protein, 321 aa, unidentified
MDSPPSRASYVGIDVSKARLDVALLPSGKSFAVGNDEEGFDELLGRLEGPSDSALVVLEASGGFERPVAAALAASGIAVCVLNPRQTRDFARATGKLAKTDQLDAKALARFAEAVRPAPRTLPDAEAEEFRNILARRRQLIQMMTAEKNRLGATTSEAVARRIRAHVRWLEKELSRTDRDLDETIENSPTLKENEALLRSVPGVGPVLCRTLLAELPELGSLSPKELSALVGVAPLNRDSGTLRGRRAVWGGRGRLREALYMGALIASRFNPHIKGFYERLVEAGKPKKVALVACMRKLLTILNAVMRERTPWRYPHALNS

SEQ ID NO: 103241 - protein, 391 aa, unidentified
MIYVGIDVAKDKHDCFITNSDGEALFKSFTIPNNREGFENLFQKIQSVSDDLNKVKVGLEATGHYSYNLLGFLLDNGLPTFVINPLHTNLYRKSLSLRKTKTDKVDSHTIASMIMSDVNLKSYSDTSYHNEKLKSLTRYRFDKVKERAKLKSSVSRLVCILFPELEKLVPQLHIASVYALLSEFPSAHAVASAHLTRLTHLLSESSKGRYGKDMAIIFREAARNSIGSNMPAKSLELKHTIKLIRELTSEIDEIEIEIKSIMDDINSPILTIPGISYRMGAMIIAEIGDFNRFNSADKILAYAGMSPSTYQSGQLDNCYSHMEKRGSRYLRYALYNATKYVCHWDESFGAYLTRKRAEGKHYNVALSHAAKKLVRTIYAMEKSGQAYKHVA

SEQ ID NO: 103242 - protein, 411 aa, unidentified
MENIFPCCAGLDVHKESVEACVRRIEPNGRWHQQTRHWGTMTRDLLAMADWMAAQGVTQVAMESTGVFWKPIYNILESRFTMLLVNARHLKQVPGRKSDVRDCQWIAQLLQYGLLKGSFIPPRSQRELRDLTRHRTQLVEEKTRTANRIHKVLQDTNIKLSSVATDVLGVSGRAMLEALITGEEDPVKLAHLAQRKLRSKIPELEKALEGHLTEHHRFMLQLLWKQLAQQEELIAELDRKIEEQTRPFAAEIDRLDAVPGVDRRVAEVVLAEVGADMKPFSAHENLAWWAGMCPGNEESAGKRRRRRITPGNPWLKPTLAQAAWAASHTKNSYLASQYRRLAGHRGRKRALIAVGHSILVIFYHMLKTGTSYTDLGGDFFDRLQPERLTRYYVKRLERLGHKVTLESRAAA

SEQ ID NO: 103243 - protein, 364 aa, unidentified
MMSDQHVHVIAGVDTHGQTHHAAVIDSLGRHLADREFPATGSGYRQLLSWLGGHGTVQAVGVEGTGAYGAELSRVLARAGLPVVEVDRPDRKTRRMKGKSDPIDAYAAATAVASGRATGVPKTRDGIVEAVRALRVPRRSAVKARTQAINQARQLVITAPEELRAQLRGLPARELAAVCARFRPSDLASPLGATKAALRILSRRILALSEEIADLDVELKALTAQTAPTLMNRMGVGPDVAGQLLATAGDNPDRLRSEAAFAHLCGVAPIPASSGRRDRHRLNRGGDRAANHALHTIALSRMRWDERTRSYVDRRTAQGLSKKDIMRCLKRHIAREIYHALINDLQARDPATKAPTTADLDKAA

SEQ ID NO: 103244 - protein, 342 aa, unidentified
MKHYAGLDVSLEETFICVVDESGKRVWRGATKSDPQTISRVIRKRAPKLVELGFEAGPLCRWFWHEFKEMGLPVVCLDARHAKAALSMQVNKTDANDAYGLARIVRTGWYRAVEVKSIESHVVRSLLAVRSQLVGIRTRLSNQLRGILKTFGLVVGKVSGRSLESRVRELTAGNLMLKDVVESILNVWRTIYDQLAVIDKKLRQFSHSNEVCRRLMSVPGAGPVTAAAFMAAIDDPDRFKRSSSVGAYFGLTPKRYQSGEVDRSGKISKCGDSRVRSYLYEAAGVLLTRVKKWSKLKAWGVRLATRVGLRKAKVAVARKLAVILYRIWVDNSKFQWGDAPSL

SEQ ID NO: 103245 - protein, 344 aa, unidentified
MQIAVIGLDLAKNVFQVHGIDDSGHAVLKRKLRRSEVPPFFAGLAPALVGIEACHTAHYWGREIAALGHDVRLMPPQFVKPYVKSQKNDAADAEAIAEAVQRPTMRFVPIKSADQQAVLMLHRTRDLLIRQRSSLISAIRAHFAEFGIVVGQGIRNVERLLALLETAGDQRLPALAAEMLSILAAQLRYVAAQVKEVEVKLLAWHRANETSRRLQSVPGLGPITASAIVATVGDPKQFKSGRQFAAWLGLVPQQRSSGSKERLGGISKRGDGYIRRLLVHGARAIVGWRKRSATHKTPWIERLLARRPTNVATVAYANKLARIAWAIMMHGNRYNPALAFATMP

SEQ ID NO: 103246 - protein, 370 aa, unidentified
MLDTTTFIGLDVHARSIKAVSLDVMTGEVRAATFGYDAGAVAEWVRSVDPKARCVYESGVTGFDLQKRLTGLGVDCVVGAVSKMIKPSADRRRKNDRNDAEFLARMLSVGNVVEVWVPDDECEAARDLTRALEDARDDLSRAKQRLSKFLLRHGLVFDERTPTGRRKGNWTRAHWSWIESIGFAEGADNDVLAYYVDAVRRAAEEKARLEGLVEAEARKPRWRKRVDSLRCLKGVDTATAADLVFEAGEFSRFGNARSFASWVGLTPSEHSSGESDRRGAITKAGNKHLRKALVEAAWHYLTCSARPKDLARGQDPDRGARRHAAKGVRRLVERREALLARGVHNNKANVATARELACWVWAVGLMAEGA

SEQ ID NO: 103247 - protein, 341 aa, unidentified
MNLTTLGIDLAKTSFSLVGMDQHGKVVLRKTLKRAQLLPFIAQCPTCLIGMEACSGAHFWGREFIKLGHKVGIIASKFIAPFRKGGKNDNNDAEAICEAVGRSTIWFVPVKTAEQQAQLCVHRVRQGLVSERTALINQLRGLLSEFGIVMPKGRYPAQREIPLILEDANNGLPMLARQMIGNLWDRIKIANEQILFYDRELHKQAHHHTVAKRLLTIPGVGEQVASSVVASVPDPMLFKNSRQFAAWLGLVPRQYTTGGNIRLGRITKQGDQYLRMCLVHGARSVLANLKEKQDKVSCWARELIARRGYLRAVVAMAARNARLIWTLMVKQEDYKTLPANR

SEQ ID NO: 103248 - protein, 436 aa, unidentified
MRGCRCSMIMGFTKPVEHFNLQRKKVIIMNTLYVGIDVSSKSNVVYLMLPNGDKHSNFSVANSREGSTQLVKRIHSALISHSLDTVLIGLEATSVYGDSLVYFLREDATLASFNRRIHVLNPKQVKKFHDTYNDLPKNDYVDSFVIADCLRFGRINKEVYLGDYRYKALQNLTRARFFAVQNLVKEKQRFMNVLFKKYSTMTQEKVFSDAFSTTALAVYDEFESAEALANMDLHELTDFIMEKGKNRFPNPDAVAKAIQKAARSSYRLPKTVNDSVNQVLSISITSMKALESQIKEFDKAIKAQMELLPNVLISIPGIGPVYSAGIMAEIGDINRFNSQAALAKYAGLAWKQHQSGGFESEVTRLIPSGNRFLKYYLCEAAFSLVRCDKEYSDFYRLKYKEVNRCQHKRALALTARKFVRLVFRLLKDNRLYRPAK

SEQ ID NO: 103249 - protein, 349 aa, unidentified
MEVLKQVLGIDVAQKELVVTLGRMVEDLSIDLYAYKVFRNNEKGFLSLLEWVKKLTKDKSKVRYVMEATGVYHQKFAYFLDEKDHEVCVILPNKISNYMRTLDNKTVTDKTCSEAIAQFGLERKLDLWHRPKRIYRNLQQLTRERDQIVFERVMVKNHLHAEQSEAEPNESSVLRISARIKFLNGQEKEIKNEIEKWVNKDIVLKNEIENICTIPGIGELTAVIILAETNGFELIRSKRQLTSYAGLDVKEKQSGTSIKGKPRISKSGNRHLRKAMHLPALTAIRWDDNFRDLYARVVSKQGIKMKALVAVQRKLLEMVYTIFENKCPYDKEYETKRVEQKNSVHTQTA

SEQ ID NO: 103250 - protein, 464 aa, unidentified
MKTRLQNQKKKKTKINLDSLPLLEPNAAGIDIAHREHWCAVPSDRCPKPVRPFGTFTADLEKMADWLQECGIKTVAMESTGVYWIPAFQVLEGRGFKVVLVNARHVKNVSGRKSDVLDCQWIQRLHSYGLLNASFRPADAMCVLRSYLRYRDDLVCARSVQCQHMQKALQQMNVQLHQVLSDVTGLSGLRIIQAILAGERDAKKMAALADRRVQASQATIQKALRGDYRAEHLFVLQSALDLYQAYERKIHLCDEQIIAQLAQLPPRVDVAQRPLPPRKPGRSWLQDMVAGTDLREELYRCTGVDLTAIEGLGVLTAQVVISEVGLDMARWPSEKHFCSWVGLCPDNRISGGKVLSSHTPHVLNRVADALRIAAATLERSKTALGAFYRRMRARLGAASAITATAHKLARIIYRLLKHGELYVRQGMEAYENKYRERLLHNLKKTAATFGFELTPAQQLPPSVS

SEQ ID NO: 103251 - protein, 482 aa, unidentified
MPTKQNPKNNSRKPERAKGPSRKKRQKGMCLEDRPLLEPNAAGVDIGAREIFVAIPPNRDGHAVRVCATFTEDLQQLADWLVACGITTVAMESTGVYWIPLYDILEAQGIKVCLVNARHMKNVPGRRTDWHECQWLQYLHSVGLLRAAFRPEATVTAVRTIMRHRHELVQMSSQHVLHMHKALTQMNLQIHHVIDDITGLTGLSIVDAILAGQRDPVELAKLRNWRIKADEETIRRSLVGNWREEHLFTLRQSRELYRSYQEQISKCDREIEKLIGGFEPRVDPEIKPLPPDQKRYRTDKKRAKKAGCKKLGFDLRTEAYKLFGVDVTQIPGLETTAFSLFGEVGRDMSKWPTADHFASWLGLCPDNDISGGRVLWKGTRKHQNQAGRMFRQAAYSLHHNLTPMGDYLRRMKTKLGPAAAITATAHKIAVIFYTIVKNQLEYDDTIWATRDSKRQQRIQAKLERQAHQLGYRLVPLEKQPAA

SEQ ID NO: 103252 - protein, 320 aa, unidentified
MAQDRFIGIDVSKAWLDVAGRPGPAPRRVANDPDGIAALVADLRALAPALVLLEATGGLELPVVAALQVAGLPVSVVNPRQVRDFARATGQLAKTDRLDAALLARFAEAIRPARQAPVPEDVRHLDALLTRRNQLIGMRVMETNRLDRVSDKEVRSEVRKHVAWLAKAIDRAAAALAAAVKASPVWRAKDALLRSIPGVGPVATLTLLAGLPELGTTTGGRLAALVGLAPFADDSGARQGGRHIRGGRAPVRRALYLAALSAVVHNPALRAFKERLAARGKRPKVILTAVARKLLVVANAIIRSGQPWRSAVVGPVGISA

SEQ ID NO: 103253 - protein, 403 aa, unidentified
MEHGTIRFGSVDWGSEGHAACVVDAEGTAIDKFQVAHTGAGLTELCRRFRRAGVQRVAIERPDGPVVDALMDAGLEVVVVSSRAVKGLRTRYGLAGNKDDRSDAFMLADCLRTDGHRWASLQPDQPQTLALRAAVRTRKDLVTTRIATANQLRAHLQLVFPGAVGLFADIDSAVSLDFLERFSTAAKAAWLSERRLAAWLAANAYSGRTGVGTLLQRLQGAPAGLHGAAAQAQAAVTLALVRVLRTLLTEIASLEAQIREQLALHPDGFIFQSLPRSGCIRAASLLAEIGDCRARFPSPESLAALAGAVPSTRSSGKLHVVTFRWSCDKKLRDAILDFAQDSMRANAWADRLYHQHRARGHTHPHASRVLARAWIYVIWRCWQDRVAYQPERHRALQALRVAA

SEQ ID NO: 103254 - protein, 341 aa, unidentified
MENKYILGVVVGKIRLEFCLLFGDKVLKQVEVMNETTAIRQAFSLLLNEFHISNDQLLICAEHAGQYNYPLIYTCESGLYKLWLENPGRMKYYCSGLQPAKNYKLNCKQIAVYASRNADKIAMCQPPDSEVEHLKQAYNELNMLEGDSAKLQSQLFEMKNYMSEEVFDVNAKRLVDLIKGLEAAIITVENEIKCIFAGNSHLARQLELLISIEAIGNDVALKMIVETDAFTRFENSRQFCSHAGMAPVHKDLKAVQHLQPNGVVTRDKSIRLLLNPAVESILKKDDSELKNYYFRKLKEGKDEKVVINAIRVKLVARMFAVIKNNQVYQPVIQEELQCHQQ

SEQ ID NO: 103255 - protein, 328 aa, unidentified
MGFDIAKASVDFCLLSRCGALLWRGRFDNEPQAIKEFLALVRRRGWKLSQIHFALESSGVYGKRLIAALHEAGLAVSVLNPAQVKFFAISVLRRTKNDRVDAEIIARFCLERKPLSTRPLRPVEEQLKLLVHERDSRVAEQTRERNRAKKDPFQIELPPLISRQRQHRIKQLQKEIAQMDEANNALIASDEYLSTQSKLLSSIPGIAQNTAAKILSEIAGKEFDSARQLVAYAGLTPSEFRSGARCYGKTHLSKIGNAFLRKALYLPAAVARRWCKPIKPWVSLLEERKLSDLAIRGAIMRKLLHIAFGVLKHQKPFDPSLVFMPKTV

SEQ ID NO: 103256 - protein, 411 aa, unidentified
MDKVYDKCCGIDVHKKLIVACFKKGNTQEIREFGATTRELLEMADWLKDGGCEMVAMESTASYWKPLYNIFESSDLNAIVVNARHMKAVPGRKTDVKDAEWIAELLQHGLLKASYIPDKQQRELRELVRYRKSLVSERTRELNRLQKMLEGANIKLSGTVSDINCMSARNILEYLLTGEFFDEAKYDEMYKQKIIAHNLKASKEQLIDDLNGVMTPLQRRMMKELLSHLDELNVHINNLEDEIDNFMKPEEKQATQAIQDVTGIGKNSSQAIISVIGTDMSRFPTAGHLAAWAGLCPGNNESAQKRKTGKMRKGNALLRSTLVVCAHSATRNKNSYFYAQFMRISSHRGKKRAYVAVAHSMLIAIYHILKDGVVFKDLGADYYNQFNMERKINAYLKKLKALGWEVPVVAA

SEQ ID NO: 103257 - protein, 372 aa, unidentified
MKKDSRKSNVVGCQSATKVAKQPPEITIGIDVGDLHSHFCWLDADGEIVKRGRVASTQAGLEKEFGKIRPGRVALETGTHCHWMCEVLSGLGHAVVVADARELKSISGSHRKNDPRDAEQLARLARVDVRLLHPVSLRKRKTQQDRGVLRARDVLVASRTQMICAIRGMVKADGTRLAGCSTEAFPEQVGASIPEGMRRALAPLMETLDVLNEKIRYYDQLVTHIAGEEYPETSLLTQVAGVGPVTALYYRLTIEEAERFEHSRDVGAYFGLAPKQHDSGESTPQLRISKAGDEGARRLLVGCAHYILGPFGPDSDLRRWGLKLAARGGKNAKKRAIVAVARKLAVLLHRLLVSGEVYEPLRNSRAAQAAAA

SEQ ID NO: 103258 - protein, 400 aa, unidentified
MLSIGIDVSKGKSTVCGMKPGGEIVYAPFEVQHTREGMSELVSLLRSSGEEVRAVLESTGSYHCPVVAALLENGIFVSVINSLRMKRFCSQSIRKVKTDRIDAMQIALYGLAYWQELQPTKLPEDTYRELQLLARQYYQMTSLLIKAKVDFNALCDQVLPGMQELMNDHAGRHKLSDFVLRYCHTTHILEMGETRFRKDYCKWAEKKGYRNCERMAALIFATAQNGIPVLPNAPSTQIVITEAIRVLHTVEASRDAILTQMQALAKTLPEYSLVREMPCIGDTLAPRLIAEIGDVRRFHSKRALIAYAGIDAPPYQSGKFSANNRHISKRGNRYLRKTGYEVMQSYVMHKPANDPIFTFIEKKRGEGKSGKLAMVAGLNKFLRVYYGKVTELYRSLSAIE

SEQ ID NO: 103259 - protein, 356 aa, unidentified
METAYDGRQVVGMDLHRRRSVLVRMTEDGRRLGTAKITNSPQELRKVIARAGKSPRVVLEATYGWYWAADVLEAAGAEVHLAHPLGVKAFTYRRVKNDERDSADLADLLRMGRLPEAWIAPHEVRELRELTRYRIKLVRLRTSCKDQVHGVLAKLGVTVTCTDIFGRAGSAWLDGLRLPQPYAGKVTSLRHLAGELTTEITMLSEVIASLLAGDRGYQVIQQLPGIGPVLAAVIIAEIGDVTRFSSAGQLCSWAGLTPRHRESDTKVARGHVTKQGSRLLRWALIEAIQRIPKDSVIGGAKDAIIARRGKEAKNIAKVAAARKLLTLVFYGMRDGQIRCLSQPREDPPATQTARAA

SEQ ID NO: 103260 - protein, 267 aa, unidentified
MTFRPHALHLKAELFVKSSRVHVRDDGFTRCNFHLKFFIMVYRGIDISKSSFVAAYPSTNGNPTKTFPNTTARMRELIGTLAVAEHHCVMEATSNYGCCCTCYIRTVLPPPPKKKQIKHFSRMMMPVTKTDEKDAYMIAMYGEKMNPPIYKMPSQATIRILTTEGFTYFDNAKQLSRFIGICPTYQQSRTSVNIREHINRNDDERLRSLLYIAFWTALRYNSRECYIRLKANEKPFKVALIAVTNKLVRPVLTITTINSIYRWICPG

SEQ ID NO: 103261 - protein, 351 aa, unidentified
MKDLMAGIDLHSNNIMVGIVDREGKRLAQQKLPCELKRIGEFLSPYKDRLEKLAVESTYNWYWLVDGLQAQGYPVVLANPARITQYSGIKHADDKNDAFFLAELLRLGILPTGYVYDAERRPVRDLLRRRMSLVHQRTALMLSFKSLFTRTTGEQMSLSRLKALEVKEAQKLYEHPANQLIAGLQIQHIEQLTASIERLEKAVLSVARHLPCYPKLKTLPGVGIILGLTITMEIGDIKRFAGPGQFASYCRTVAAQCTSNGKLKGENNRKCGNKYLAWAFVEAANFARRYDEPCRKWYERKAAKTSKVVATKALACKLAKAAWYLASEETDYEPGRVFPQMATTKNQTMKA

SEQ ID NO: 103262 - protein, 412 aa, unidentified
MNLVYARCAGLDVHKKTVVAGVRVPGPEPGERRGEVQTFPTTMAGLTALADWLTAHEVTHVAMESTGVYWRPVYAVLEGLMTVLLVNARHVKMVPGRKTDVRDCEWLAQLLECGLLRSSFVPPRPIRDLRDLTRLRKTLIRERGHHVNRIEKTLELANIKLGSVVTDLMGNTGRAILEALSLGIDDPDKLAACAQGLLRKKQAALREALVGQLTPHYAFLLQQHLSLIDALDAHIATLDARIAEAMAPFADAAALAQTMPGVATRAAQAILAETGVDMAAFPTADNFASWARLCPGNNESAGKRRPATTGQGATWLRATLQEVAWAAAKTKKSYYRALFHRLKARSDSKTAIVAVQHAMLVALWHMLKHRVPHQDLGADYFTRRDTERTRRHHVRRLEKLGYQVLLVKEEAA

SEQ ID NO: 103263 - protein, 339 aa, unidentified
MNRIVVGVDIAKRVFQLHWVEPETGEIVALQLKREKFLEHFANRSTCLIGMEACGGSQHWARSLQKLGHEVKLLSARMVKPFVGGNKNDAADARGIWTAMQQPGIKAVAVKSEEQQAVLALHRMREQLVKFRTAQINGLRGLLTEYGEVMPQGRAGIKRDIPGALGRLSDRLPAMVIETLREQYARLGELDEQIGQIERRLRHWQREDSATQRIAAIPGVGLLSATAAVATMGDAKAFKSGREFAAWLGLVPGQTGTGGRVRLLGISKRGDKYLRTLLIHGARSVLTHSKSPSEWLSELMKRRPKNVAVVAMANKMARTIWALLAHERAYQSGYVSRSA

SEQ ID NO: 103264 - protein, 411 aa, unidentified
MEKIYDKCCGIDVHKKLIVACFRCGRKQEVRDFGATTRELLELADWLREGGCEMVAMESTASYWKPLYNILESSGLNAMVVNARHMKAVPGRKTDVKDAEWIADLLQHGLLQPSYIPDKDQRELRELVCYRKSLVGERTRELNRLQKMLEGANIKLSGTVSDINGKSARSILEYLLTGESIDGAKYDEMYERKIIAHNLKATKEQIIDDLNGVMSPLQRRMMKELLAHLDELNDHIKNLDDEIANFMKPEEKQASQVIRDVTGIGNTSAQAIISVIGTDMARFPTDKHISSWAGLCPGDNESARKRKSGKTRKGNSLLRTTLITCAHAAVKNKKSYFHAQFMRISAHRGSKRAYVAVAHSMLIAIYHILKDGVIFKDLGADYYNQFNKERKINAYLKKLKALGWEAPVVAA

SEQ ID NO: 103265 - protein, 324 aa, unidentified
MEEPRTPVYVGIDVAKATLDVAWLPDGLAARTFDNDLTGHEAVVAELANLNPQLVILEATGGFEVALAATLQAAGIPTAIVNPRQARDFAKATGRLAKTDAIDAGVLARLAHFLVTTPESGFTLKSLPDEATRRLQALVARRRQLVGMLTAERNRLGFAHASVRPDIEEVVLFLKKRMAEIEAEMESALVKEPGWADRLNQLLSVKGIGHTTAAVLIADIPELGTLNRRQISALIGVAPFNRDSGVLRGKRAIFGGRAHVRAALYMATLVASRHNDVIRAFYQRLVNAGKPKKLALVAAMRKLLTILNAMAKSGKSWDESLHVA

SEQ ID NO: 103266 - protein, 400 aa, unidentified
MISVGIDVSKGKSTVCILKPYGEIVSKPFNITHTQKDLSELSSMLFRLNDEVKIVMEATGIYHLPVLTYLQEKGFFVSVINPYLMKSYRNESLRKAKTDKIDSRIIANYGIDHWFKMKEFQTSGEIYEELKLLGQQYRHYMKLHLLSLAELTHLLDLTMPGIKNLLASWNETTRKDKRSDFVERFWHYDVITSMSEQEFTEEYILWAKEKKYVPSQEKAKVIYTLAQESIPTLPSETSSVKMLVTEAVRVLKEVDATLGLILSRMQEIAKTLPEYSVVREMGGVGNTLAPKLIAEIGDVRRFRNGKALVAFAGIDPPPYESGQFVGCNRKISKRGSASLRKVGYETMRSLKMRSRPEDPVYRYVVKKESEGKSKKSAKIAGLNKFLRIYYARVTELYKNI

SEQ ID NO: 103267 - protein, 345 aa, unidentified
MTEAYDGRQVVGMDLHRRRSVLVRMSMDGRKLETVRIENSPAALRRVLARCGQRPLVVLEATYGWYWAADVLAAAGAEVHLAHPLGVKAFSYRRVKNDERDAADLADLARMGRLPEAWIAPPGVRALREVVRYRHKLVRQRTSCKDQVHAVLAKLGIPVTHSDIFGRGGGLWLGQLVLPEPYAAKVASLRALIGVLDGEIARLGEQAAGVLAADPGYAAVRELDGIGPVLAAVIIAEIGDVTRFRHAGQLCSWAGLTPRHYESDTKVIRGHVSKQGSKMLRWALVEAIQHQPAGTRPRAAREAIIARRGKEARNIAKTAAARVLLTQVFCALRDGHVRRAQDPAA

SEQ ID NO: 103268 - protein, 341 aa, unidentified
MKKTEYVVGVDIGGESISIAALKGPDGAGLAELSVTNDPEGFEELKSWLTKHSLTVENAVFCLEATGVYGEALCYYLCSRTFRVAVEPPLKVKRAFQQSAHKNDTVDARQIAEYGHRFFDELSWWTPPAAVLEQVRVLLTAREQFTGQKIANVNALKALERKTITTRIAIQAYEQAIARLTQNIKEIDQEIKRLVKQDDSFNRMITAITSTPGIGMLLAANLVVMTSGFARTRNHKKIASYTGISPIEHTSGTSVYRRPRSRRYGPSRMRKLLYLAAMSVSTHDPAFRRYYLRKVAEGKPKRLVLNNIANKLLKVVCALVRSESIYIHNYRSVQPFLLKTA

SEQ ID NO: 103269 - protein, 354 aa, unidentified
MKRTGKYAALDVHQTTTTASVREEGGRVIARAILPTEELAIVEFFRGMRGAVRVAFEEGTQAQWLHDLLEPVVDRVVVCDRRGKSRGGNKGDQVDADELSELLRQGALRAVYHGSQDRATLKEFARTYQNVVEDATRVMLRLKALFRARAIQVQGPSVYHPKNRAEWLGKLRERGVRYRAEALYAELDVLRELRPKVKAAMVAEARRDPAWSVLRSIPYLGPVRVAQLMATMRTPWRFRTKRNLWAYSGLAVVTVSSSDYVIEGGRAVRKRRAPMTRGLNRNHNRVLKDVFKGAATAATGRPGPLKDLYQGMIARGMRAELARVTLTRKLAALTLRLWKTGERYDPTKLTKQAH

SEQ ID NO: 103270 - protein, 334 aa, unidentified
MSESQSTVSYSLFVGVDIAAATATVSWMYPGEKACRPVTIEQTPEGYASLERKLQATGKAPADILVVMEATGAYWITLATQLVHTGFQVSVINPAQAHHFAKALLQRAKTDAIDVQTLAQLALLLQPAPWTPPPQIYYELQQRLAQRDTLLDLQQQVRNQLHALDQLPEVIETVRQRFEHMLTTFATQLAAVEAEMMEVWQQDTAWATAGQRLQSIKGIGWVTAAWTLVATLNFTPCNTVEALTAYAGLAPMPRQSGTSVWHRPSIGHTGHGRLRTALYMATLSAAQHNPMIKAFYTRLHAAGKPEKVARCAAARKLLHIAWAVAKKAQWFDPN

SEQ ID NO: 103271 - protein, 355 aa, unidentified
MDREKYIAMDVHQASISVAVRDAAGKLIVESIIETKAATILAFIRGIQGSLWITFEEGTSAAWLYDLLKPHVTKVIVCDPRKNALLHAGNKNDRVDARKLSDLLRAGLLTPVYHGESGVRTLRELCRGYLTINKDLTRVMNRLKALYRSWAIPCAGDKVYSPRHRNTWLEKLSEAGVRRRAEQLYQQLDALVQIRREARRELLAESQKHSATPLLRQIPRLGPIRVALLIALIQTPHRFRTKRQLWAYCGLALQTRASGEYRFTGGELQHSKRLPALRGLNVNHNHDLKNVFKSAATHVSTSTDPLGDFYRSLLAKGMKPTMARLTLARKMAAIVLSVWKKGARFDPGELKQQAA

SEQ ID NO: 103272 - protein, 359 aa, unidentified
MKAQVKQIDFTGQNIYAGFDAHLKSWKVTVMAEDIVYKTFTQPPNPEVLFNYLKNNFPGGTYHSAYEAGFCGYWIHDKLMSFGIKSMVVNPADVPTTDKERVQKEDKRDSRKIARSLSSGTLTPIYVPSIQTQRDRSLLRTRAMLVKDLARYKNRIKSFLFFYGISISDPFSKPQSHWSNRFIRWLESIEIDGGSGKEALLVLISECKNLRTSILKITKQIRELSQTATYQEQVTLLQSIPGIGLITSMTILTELETIDRFTNLDKMCGYIGLVPSTKSSGEKERTGDITPRGHGVLRSAIVESSWTAIKYDPALMKSYIIYCKRMDTNKAIVKIAKKLLNRIRFVLANKKPYECLIEK

SEQ ID NO: 103273 - protein, 411 aa, unidentified
MIEQVTVGVDVGCHRHRVAIAAPDGKFVEEFDIPADSEGFKYFFGRLDFYRKSFDVPVVVAMEGHGGYGRPLDSSVKRSGYTLLNVNNLKLCRFKEIFSSPAKTDAIDARKIALLARMQDVLSPSREVLQEVRDVPQEHQILKRLSRRRRQLVDEKVVVLNRMQADLQAVSPGLAEMVEYKDGVAFLNLLTCRSNLEDLSRLDKKELLSIGGIGEAFAGRVIKWQKKAYFSREVAYVGPMIIEDAKRIIEIKRSINELEEKIEDILKSSKLAETIGSIPGFGAVCTAELVAEIGTMERFSSERSLALYLGMAPLDKSSGKCQGTRTPTQINKRGKAAMMTAVAHNIRKVEESKRYYQKKRDEGKSHNQAVRALGRHMIRVIWSMTKRNEVYQIREGGNKTCSDETSAAIPA

SEQ ID NO: 103274 - protein, 391 aa, unidentified
MIYIGIDVAKDKHDCFITNSDSEVLFKAFTIFNNLDGFNDLYQKIESVMDDVTKVKVGLEATGHYSYNLLGYLIDKGLPTYVINPLHTNLYRKSLSLRQTKTDKVDARTIASMLMSDVNLKSYSDISYHNEELKSLTRYRFDKVKERAKLKTSVSRLVCILFPELEKLVPTLHMASVYALLSEFPSAKHVATAHLTRLTNLLSKSSKGRYGKDTAITFRDSARASIGSNMPAKSLELKHTIKLIQELDSEIDEIENEIKIIMDEINSPILSIPGINYRMGAMIIAEIGDFNRFDSPDKILAYAGFSPSTYQSGQLDGAYAHMEKRGSRYLRYALYNATKYVCHWNPTFAAYLAKKRAEGKHYNVAISHAVKKLVRVIYHLEKTKQQYIKAA

SEQ ID NO: 103275 - protein, 346 aa, unidentified
MQYYTERHGYTCGADLHGRNLYLCVLDPDRKILLHRRVDCDEEKLLRALAPYREDLVVGVECMFKWYWLADFCDEHGIPFVLGHALEMKAVHGRKSGNDRLDAERIARLLGSGMFPVAYVYPKEMRSTRDVMRRRSFLVNQRSSLISHIQVTNLQYNLPEIGKISRADQREGIETRFEDPAVRASIEADMTVIDILDVVIPRLERTIIKAARGHDGHAFALLKSVHGIGDVIGLTLLYEIHDIHRFDSLGGFLSYCRLIKCIKTSDNKPKGSGKQKQGNHHLKWAFSEAAALFLRANPEGQKLHSRLVKKHGKAKALGILAAKLARSVYYMLHRNTPFDMDRFIRA

SEQ ID NO: 103276 - protein, 415 aa, unidentified
MDTIYDRVAGLDVHQKFITVGVRCRLETGKLFAEVRTFGTMTRDLRALADYLEALGVTHVAMESTGVLWKPVWNILESRRFTLLLVNPRHVKQVPGRKSDVSDAEWIAQLLQCGLLQSSFVPRRELRELRDLTRYRAQLVSEQTRVANRIHKMLEDANIKLGAVASDILGKSGRAMLGALVGGQQDPEKLADLAEGRLRAKIPHLKLALEGHFSEHHKFLVEHLLRHLDDLERQTEQISQRTAERLRPILDDKRLERLDAISGVNRTTIENVVAEIGADMSQFPDEHHLSSWAGISPANEESAGKRLRNRTTKKNRWLRRAITEAAWAAARTKNSYLSAQYRRLAPRRGKKRALIAVGHSLLVIFYHMLKYDVEYQDLGVDYFDERDPEHLRHYLVKRLERLGYRVSLTPQTEAA

SEQ ID NO: 103277 - protein, 404 aa, unidentified
MIFVGDDWSEDHHDVCLMDQAGKRLASRRLPEGLTGIRQLHELIAEHAEEPDQVVIGIETDRGLWAGALAAAGYQVFAVNPLAVARYRDRHHVSGGKSDASDAKLLADLVRTDRHNHRPIAGDSLDAEAIKVLARAHQSLIWARTRHTNAMRSALREYYPAALLAFEDLAHGDALGVLGRAPTPEQGAHLDLPAIQSALKRGGRKRNIAARARQIRAALRSEQLAAPAPVAAAFGATTRAAVGIIVELNRQIAELEAELATHFEAHPDADIYRSLPGLGVILGARVLGEFGDDPNRYTSAKSRRNYAGTSPLTVASGKKRAVLARHVRNRRLYDAIDHWALCALTSSPGARAYYDHHRAAGDVHHQALRALGNRLVGILHGCLRHHTTYSEHTAWAHRQITQAA

SEQ ID NO: 103278 - protein, 312 aa, unidentified
MADMVRLAGIDVSKEKLDVHVTPSGESRMVGYDRRGLAGLRRWLVGLGVAVVAVEASGGYQREVSEVLEEAGLVVHRLNPLRVRRFAQLKGRLAKTDRLDARTIAEFARAHPQEHQLRRDPRRERLAEHLLVRRHTQDAILDCINQLEHLRDGRLRRLVAARKASMERTRARLDRCLVELIAEHDDLAELSERLRSVPAVGPVLAATLIALLPELGSLTRRQVASLVGVAPFDRSSGRKIGSKSIQAGRVFVRNTLYMAALTASQHNPAIAAFAERLAGKPGKVRLVACMRKLIVMLNAVVRDRSQWQPRTA

SEQ ID NO: 103279 - protein, 335 aa, unidentified
MIGLDIAKNVFEVHGRNAAGEVVLRRTVKRASMEKRFGELSPALIGMEACGSAHHWARVLGKLGHEVRLMPPAYVKPFVKRNKSDAIDAMACCKAVVDPDMRFVPVKTVDQQAALSLHRSRELLVRQRTQLGNALRAVLSEFGIVAGQGKAGLAQLVEQLRAGTLELPEDALFSATMLANQHADTDTAAVELQRRIKAQAKADKTARMLQTAPTVGPMIAHAVRATLPDPSRFKSGRDFAAFLGLAPSNSGTGGKMRTGHITKKGDPTLRRLLVLGATSWVRRVSKCLEKASPWLRGMLARRPKKVVAVALAARTARILWAMLTHNQPYRAAANA

SEQ ID NO: 103280 - protein, 344 aa, unidentified
MSKYKVIGIDLAKTKYHIAAFDASNTVVFKKKMSRTDFFNQVVLMFPEQEKFAIEACGGSNYVGQQLSKLGHEVLILKPKDVKPYAKSRQKNDLNDAIGICKTACDPEIKHVNLKTPAQQVTCYLHKSRQNTIQQRIQYSNSLITSLYEFGFVVDCGKSKFAKDSKNYVEEAFANGYIESDVKEEMLKDSSEIDGLLLREKHLDKTIVKRNKNNKSARLLETIPGIGPINASILSNKPMSSYEKARDFAASLGLVPKQNTTGGNIKLGSITKQGDRYARTMLIQAGRTIVMRANKPKCPDSPLYRLVERLKKAGKGYNVICVAVANKLARIAHACVMKQEEYMS

SEQ ID NO: 103281 - protein, 393 aa, unidentified
MICVGIDVAKDKHDCFILSSEGEVLADVFTIPNNRDGFETLLQRIRSCAFPADKIKVGLEATGHYSYNILGFLLDCGLATYVINPLHTNLYRKSLSLRKTKTDRIDARTIAAMLMSDVDLKSYTDTAYHNEELKSLTRYRFDKVRQRAKLKQSVSRLVNILFPELETIVPTLHMASVYALLSEFPGAQQIADTHLTHLKTLLNDASKGRYDREKAVEIREAARRSIGSRMPAKSLELRHTIQLIRELDKEIAEVEDSIEEIMNSIQSPITTIPGMGLRMGAMILAEVGDFTNFDSPDKILAYAGLSPSTYESGKLSLAGSYSHMEKRGSRYLRYAIFNATKYVCHWDSTFAAYLAKKRAEGKHYNVAISHAAKKLVRVIYSLQKSGQAYQTAA

SEQ ID NO: 103282 - protein, 342 aa, unidentified
MAIVTVGLDLAKHVFQVHGVDEGGRAAVRCQLRRADVEAFFGGLPPCVVGMEACASAHHWARCISALGHEVRLIAPSRVKAYVQRGKKNDATDAAAIAEAVTRPHMAFVPVKSEEQQAVLMLHRTRNLLVRQRTMLVNALRAHLAEFGIVAAQGWSKVKDLMTGLDETPVPELARAALRQVAEQITECNDRVEALERKIVAWHRTDEASCNLATIPGIGPITASAIAASVPDPTTFKSGRHLAAWLGLVPRQNSSGGKDRLGGITKTGDSYIRRLLVIGATSVIRYARGKAPGQGEWLKKLLDHKPPRLASVALANKMARIAWSVLTRGEVYRETFPVSNPA

SEQ ID NO: 103283 - protein, 298 aa, unidentified
MGLSGRKQTKTFTHHPKGIQQAVEYLQKSANVDLIVLESTGGLEIPLAKALYRADFPVVIANPHQTHLFSLSKSLAKTDAKDAKMLASYAQMLVLYGEVDTRLYTPPTPEQAQLEALVLRRTQLVAMRVAEKNRLAIIHASQKASVEQLIAHFDRLIAELENAIAQATLAFDDKAKKFKDIKGIGPITTATLVSMLPELGQLKYKQIASLVGVAPHPKESGNTKWKSRCSGGRKAVRNVLYQAANVARQHEPKFNAFYEHLRAKGKPFKVALNACMRKLLTVINAIIRDGSQWQPPAV

SEQ ID NO: 103284 - protein, 349 aa, unidentified
MEYYAGIDVSLELSSVCVVDTKGKIVKEAKVGSDPGAVVTFLRGLGMPIDRIGLEAGPLSQWLHAGLTRAGFETVLLETRHVKAALSAMTVKTDRKDARGIAQLLRMGWFRPVHCKSIGSQEVRALLVARKLLLGKLLDVEFSIRGILRGFGLKMGLVTRKSFEPRVRELCAGQTMLEQVFSAMLAARSALQAEYTRLHKEMLAIVRKDEVCRRLMTTPGVGPLVAITFKTAVDDPTRIGKSKAVGALFGLTPKKYQSGETDVTGGISRVGDQMVRTALYEAANILLSRVTRFSVLKRWGMDLVKRRGTKRAKVALARKIGVILHRMWIDGTDFRWTREAPKAQQFVRA

SEQ ID NO: 103285 - protein, 356 aa, unidentified
MKQFSKEPVATIGIDLAKNSVHVFGVDAQGEVVFSRKLARHALSAFIAQQPPCRVAMEACGSAHHWARTFQGFGHEVVLIAPQHVKPFVKTNKNDAADAEAICEAAQRPRQRFVPIKSVEQQDIQAIHRLRSQVIGQRTALVNQARGLLAEYGIVMPQGRAAAMRRLPEILEDAENGLSERFRAELQGLLEELRHLDARVVHYDAQIKTTADTSESAQLLMSIPGIGPLVATALLATLGDQWGLFHNGRALAAWLGLVPRQHSTGGKARLLGISKRGDVYLRQLLIHGARAMMRWVENKEDALSHWARHLKQRRHANVASVAMANKLARIAWAVMTTGKPFDPARGALAKPTTVAA

SEQ ID NO: 103286 - protein, 399 aa, unidentified
MIHVGVDIGKSKHAAAAVNDAGACVMRPRFFTQDAGGFASLFGALEGQGGAASVVVGMEATGHYWKVLRHALVARQYRVDVINPLITSREASADVRGRKSDKLDALAIANVLRKGGYSPAPGELAATDTLKVLARHRKALVARGSDAKRRLISALDVAFPEAAKTLGDLFGAASLAVVRAFPSARLGAAADIRTLTSLFAKASGGQLGREAAEAYREAARHSLSLAMDTKGEEFVITQIVDEIRAAAGQIDEVERRILAEPQPIIARLLGSIKGAGKIQPMAVAAELGDPSRFAGPDMAKKVLAYAGCDPRVRESGKWKGRAKMSKRGSPTLRNALYLLAGTIRLHTPYFNAVYKRQIARGKHHNVALSHVVRKIVEVMCGMYKTNTPFVPPQADPTPC

SEQ ID NO: 103287 - protein, 341 aa, unidentified
MYSIKAIGIDLAKLVFSIHGVDKYDKCKLRKTVKRNNLLAEIAKYPPCIIGMEACSGAHYWAREFTKLGHDVRIMASKFVIPYRQNEKNDANDAEAICEAVTRPKTRFVSIKSEEQQAVLCLHRIRQGAIKDRTALINRLRGLLAEFGIIMPKGRYPAQKAITGILEDAENNLPFLARELLHDLWQSIQHLNQEILKHDRKLYQLANQMKDAKRLMTIPGIGEITATAVVATVNDAKHFDTSRSFAAWIGLVPRQYTTGGQVKLGRISKRGEKHIRTSLIHGARAVIANCKHKTDKTSLWVKELVERRGFKRATVALAAKNARLIWALLHSDKEYQIDYVK

SEQ ID NO: 103288 - protein, 348 aa, unidentified
MNQRYEKSRLYVGIDLHRRRSVIVRMDGEGEVLDCVRIENSVPALVEQVSKAGPGAPVAIEATYGWYWAVDALREAGFEVTLAHPRGVASMQGRRAKTDKLDATELADLLRLGRLATAWIAPPEIRELRELVRYRHKLVGDRAAVKASIHAVLGKCGVIPEISDIFGPVGSKMLDALVLPEPYGSRVASQRRIMATLSTEIAGLEVETVRRLRDNPEYRALLTINGVGPVMAAIFVAEIGDVHRFATADQLACWAGLTTRVDSSDKKTRYGHVSKQGSRLLRWAAVEGCQRAREPYLAGKRRDIIARRGKRAQHIATVAAARHMMKVVYYTMRDGHARCLDAPLPVAS

SEQ ID NO: 103289 - protein, 367 aa, unidentified
MIVNEVAKNVEKIISIDTAKNSFQVLVVNQKTGKKKNTKVQRSKFVEYILKQGPCLIFMESCSASQHWARLFESFGFTVKLIAAQHVKAFLRNRRVKNDERDAEAIYKCGIQPDTKFVRIKTVEEQTVALLHTLRKAAVSQRVELSNRIRGILAEFGIVVARGRGSFNSEIEAMFNECEKIHDVNLRVAISSLFEDYHRLEQREKELSEKIEALNKDNELVKIALTCPGVGSLTASAIVAEVGDASQFRNGREMAAWNGVVPSQHSTGGRSTLGGITKTGNRYLRTLLAQCACAVIQNASRHLEQGKDTHLDRFALRLKLNGKPVKKIMIAIANKIIRILWAMLTQRKTFENKANEISDTSAKLQLA

SEQ ID NO: 103290 - protein, 442 aa, unidentified
MTTDKETRLERRSDRRLLVMPRVVTTHTRGRWESVLLVGIDWADKEHVYCLMDDAGTTLATGTVEHTAEGLERFMNAVRARVQTPHDILIALETSHGPLVGALLDQGFTVYPINPKAVERHRERFRVAGAKSDLRDAWVLAALLRTDRALYHPLTPDSDVAQELRALTRDRADLVRTRTMLSNQLTACVKAYFPEFLTLFSDPDRPVALALLQAFPTREHLQAAPRAELETFLRRHRCPHSRKRAAAIHERMQAPGFHIASPIVRAKARLAATLVAQLQTLGEYVDAYEREIQRVLRLHPDGELYLSLPGAADVLAARMVGELGDNRDRYRDPNIAQCEAGTAPVTKKSGSTRTVHFRRACIHPLRETLWQFAFSSLRRCGWAHAYYNQARKRGKNHAEAIRMLGNVWLRIIIAIRRNRRPYDEEVLQKARLRHGTPGLCFA

SEQ ID NO: 103291 - protein, 346 aa, unidentified
MEWIALDVHKNYTWARVESPQGERLYESRLAHSHGTIKNFVQRWSAGSVVAVETVGNWYWVVDEIESGGGKPQLVNARLAKLMMGNANKSDKLDCKGMNRLQRTGTLPMVWIPPSGVRDARELPRTRMVLRAQRTQLKNRVHATLGKYGYRVQEVSDAFGKRGRQIVEQLVSKLPPHTEQALRRILDQLDHVSENLKGIEGQMIEVFSPCPQAQWLKSLPGVGDILAVVIWTEIGTIERFGSAEQFASYCGLVPRENSSGGKIRFGAVRRDVNVYLKWAFVEAANSSVLNRERCGYGHISRLYQRIKSRRGHGKAKVAVARHLSEACFWMLKKGESYREPMSSTQR

SEQ ID NO: 103292 - protein, 410 aa, unidentified
MEVLYAHCAGLDVHKETVVACVRHMSDGVVRREVRTFKTLTSDLLTLSDWLASEGCTHVVMEATGVYWKPVWHILSDGDVALTLANAAHVKNVPGRKTDVNDATWLADLLAHGLIRGSFVPDAATQEQRGLLRTRKQLVRERASHVLRLQRTLEDANIKLDSAISDITGVSGRAMIQALIDGETDPARLAELAHRRLRAAPETLREALRGRVTKHHRFLLALHIKQIDVLDEAIVAIDREVDTHVEPFRAAIAQLTTIPGIGDLAACVILAEIGYDMSRFPTQGHLISWAGLCPKNDESAGKRRSNRMRKGAPWLKTTLIQCAWAAARKKGSYLQAQFHRLRARRGAKKAIGAVAASMLTAAYHMLKDGTLYHDLGADHFDLRAKGAATKRLIAKLEGLGYDVQITPAAA

SEQ ID NO: 103293 - protein, 345 aa, unidentified
MEQITRIGMDTSKHIFQLHGVTAAEEPALRKKLRRKEMVTFFEKLAPTVIAIEACGASHHWARLLQSFGHSVKLIAPQLVKPYVKRGKNDAADAEALCEATSRPTMRFVPVKTAEEQAALMLVGVRDRLIRNRTQLANAIRGYAAEFGLTAAKGKAHLDPLLERIQADESLPALARELFAAQAKEYTQLQAQIDEVDARLMGWHRADECSRRLAKIPGVGPIGAVLLKMKTPEAELFRSGRQFAAWIGLTPKDYSTAGKVRLGVITRAGDEGLRSVLVVGATAVIRHVRRGGRASPWLTELLKRKSPKLAAVALANKMARIAWKLMVTGENYAAKSAPAALAGAA

SEQ ID NO: 103294 - protein, 452 aa, unidentified
MSRRKQQKKFKVTDLPEHLQQVNLNAAGIDVGSDRHVVAVPSGRDEVSVREFGAFTTDLHALADWLTKCGITTVAMESTGVYWIPLFEILEQRGFEVKLVDARQVKNVSGRKSDVLDCQWLQQLHTYGLLAGAFRPTDQICVLRGYMRQREMLVQASSMHIQHMQKALQQMNLLLHNVVSDITGLTGMKIIKAIIAGERDAKVLAKHRNYRCQSSAATIAKSLVGNYREEHLFALSQAVSLYETYQAKIAECQAAIASYLQSQAKRTDEEPPPEDKASRNRDRLRGGVDVRSQLYRMTGVDLFNLPGLGADTLLTLAGEAGFDMTPWPSEKHFTSWLALCPGTKKSNGKVLSRKTKRSANRAAAAFRLAAASLSRSKTALGAFYRRIRVRVGKAEAVTATARKLAVLYYSLLKYGSAYVESGQAVYEQKYQQRRLHSIQKQALAMGYQLIPT

SEQ ID NO: 103295 - protein, 342 aa, unidentified
MEHYAGIDVSLERSSVCVVDSSGRIIREAKVASEPEALVGFFGQLGLPVVRIGLEAGPLSQWLHAGLTAAGFEAVLLETRHVKAALSAMIVKTDRKDARGIAQLLRMGWFRPVHRKFSDAQEVRALLVGRKLLQAKLRDVELSIRGILRGFGLKVGEVSKGRFAARINELVAGHEMLETVIGAMLQAREGLQREFMRLHRRMLAIVRGDAVCRRLMTAPGVGALVAVTFKTAVDDPERFRTAKAVGAHFGLTPKRYQSGETDVSGGISKVGDGMVRTALYEAANAMLTRTVRVSALKRWALEVARRRGTKRAKVALARKLAGVLHRMWANGTDFRWGKEVAA

SEQ ID NO: 103296 - protein, 345 aa, unidentified
MTIVGGLDIHRKQITFDYVDTVTGRVRRGRIAPADREHLAGWLAQRFPGRTDVEFALEGCTGWRYVAEELAAAGLIAHVGEPADTAALRGGRRHAKTDKTDSRHLRELLADDRLPQCWIPPAQVLECRALLELYRDLRVEHTAWVQRIHAVLFHQGAGALTVPALRSQAGLVELSEQAADLSSAGKMQVVTALEMLAVLDAQLTQVRRQLLDAARHLRGARVLTARLYGVGPITALALCCWLAGAGRFSSARKAVRFAGLDVTVHSSDGKRSPGHLSRQGPSVLRWCLYEAGKTHARGSAPDHAYYAQVKDRIDGKRAALSEGRKIVRQACHLLSELGDDALTQV

SEQ ID NO: 103297 - protein, 400 aa, unidentified
MRTVFGIDVSKASSEVAILVNGERVHSYTMPNDIIGFSHLLKDLKTVSNPEIIFEATGVYSRRLQAFLEENSYDYTRLNPLEAKKQLDSLRVRKTDKIDAEKLASSQFVLNRKPTYVQEEVYQNLHDLSRFYQNLTEDIVRTKNRLHKVLQVAFPEIENLLSTPTGEQYWNLVSIFPTKHWVLELSEVELKETIRNSTSKRISENRVGNLAEKLVGLAKQSYSAISKTSPMIEEVKYNAQELIRLTNRREQVLQQLIALAEPLPEYEIVLSIPGIAETTATSIIGELGDIRRFKSANQINAFIGIDLKHYESGDFLGQEHITKRGNPYARKIMYKCIHNIASASHTNPCHIADFYEKRKRQSQTTSTKPHTIASIHRLIRTMYYLIMHNKLYDYTLAKSH

SEQ ID NO: 103298 - protein, 521 aa, unidentified
MPGQALVQVPRSVALTSAAHRLVWLSFGLRGRGAAKSQERLKRGLPCSKQRCPPGSTPLLERMLEERMGQVIIGMDPHKRSATIEVMAGDETVLGGGRYATDLAGYRTMLAYAKRFPQRTWAIEGCRGIGRHIANRLLADGEQVVDVPPKLSARARVFATGQGRKTDATDAHSVALVGTRMSGLRSVIDDEQLTVLRVLVDRRRSLDEDHTRMVSQLHRLLLELIPGGAKKDLSAAQAKALLAKVRPRDVAGKTRRRVAAELIADLERIYARKKAANKELNELLKATGTTLTNLHGVGPSGAARLLVEVGDITRFPSKAHFASWNGTAPIDASSGDQVRHRLSRKGNRQINRVLHIMATVQLRNPAEGRAYYDRKKAAGKTSMEAMRCLKRRLSDVVYRQLLADALRPCTTGPGGHSGTTLQSSVADSHPDMTLRISHFPDPPNPSLEPPSSPCLDTEGCHVPAIRRRIPAFKTAGRARNSRWPGVHLLTCGRRLPNSSQSSVSWLNARRTAAADAATTIG

SEQ ID NO: 103299 - protein, 402 aa, unidentified
MNAVGIDVSKGKSMVAVMRPFGEVVLSPFEVSHSSGELSKLARLLKSLDGESRVIMESTGNYHAPIAKVLYDAGLYVSVVNAMLIHDYGNNSLRRAKTDKKDAVKLANYGLDHWLSLPQYVPEEDTRFLLKCCYRQYQQYAKLHTMLKNNLISLLDMIFPAVNRLFNGSARADGSEKWVDFIDVFWHVQCVASLSLNAFREKYLKWCKKHGYNFKEEKALEIHKTAREHVAVMPKNATTKLLVKQAVAQLRTVSSAKVALQNEMDTLASSLPEYPVVMNMFGVGPKLGPQLMAEIGDVRRFHSKKALVAYAGIDAPPYQSGQINVHSRSISKRGSPALRRTLFLVMGVYLQCSPVDEPVYQYMAMKRAEGKPYLVYMMASANKFLRRYYATVKACLNNLESG

SEQ ID NO: 103300 - protein, 340 aa, unidentified
MQPYFVGLDVHKQVIAFCVKTAEGGIVAEGTIPATRSALDEWVQTVPGPWQGALEATMFSHWIYQHLKPHAARLQMGHAARMKAISAGKKKSDKIDARTIADLLRCNLFPECFVIAPELGALRQQMRFRRLMIEQEVMLKNKTAGLLMGAGVEYERRRLHGKRYFAELLRQNQWIGEQMRPLLAFNRSQIESLQAMDRRLMRMLQQHPQLEARIQFLRRIDGVGPVTALTWALEVGTPQRFGSAKQAMSYCGLTSALRESAGQQKRAPISKQRNRHLQCVLIEAAKIGPLHNEKLKEIYRKACEKGAHRNRATLVVARKLVAYLLAADRAFFLQRAAAPA

SEQ ID NO: 103301 - protein, 343 aa, unidentified
MQAITTIGLDIAKSVFQVHGVDAQGNVTLRRQLKRRHVLAFFQKLPSCLVGIEACASSHHWSRELQALGHTVRLMPPAYVKPYVKRHKNDSTDAEAICEAVTRPNMRFVATKTPEQQSCLTLHRSRHLFIRQQTSVINVIRAHLAEFGIVAPVGRNGVEQLLGVVANASDNRLPEVARACVAALGTQLQTLKAQILEFDRMITAWHRSSEASRRLDDIPGVGPVLATALVASVADPKMFRSGRDFSAWIGLVPKQNSSGGKDRLGHISKRGDRYLRSLFTTGALAVIRYAKIHGTKHRPWLTALLARRPTKVAAIALANKIARMAWAIMAKGERYKEPAALAA

SEQ ID NO: 103302 - protein, 375 aa, unidentified
MEHHSEAFVALDTAKLRNAVAIADAGRNGEIRYLGEFDNTEAATRKLVTKLASKHARLTFCYEAGPTGYGLYRLIKSIGHDCIVVAPSLIPSKPGDRVKTNRRDAVNLVKLLRAGELTAVWVPDERHEAMRDLVRARDAAVKDYRIKRQNVSSLLLRLGRHYPGKKTWGRAHINWLTSLTLEHREQRIAFEEMLVAVRQVRERNERLEQAMREAVAEWTLAPVIEAVQALRGIDMVGAVVFLAELGDLSRFENPRQLMAYLGLTPSERSTGESVKRGGITKAGNTRARRLLIEAAWSYRFPPRVSKDMQARIGAAPQTAREIAWKAQMRLCGRFRTLTRKGKRPTIVVTAIARELSAFIWAINREVAGSHATANQ

SEQ ID NO: 103303 - protein, 332 aa, unidentified
MSIIGCDLHSRYQVIAMLETGTGEVITRRLEHEDGEAKGFYAGLGKPVLIGIEATGYTQWFERLAAELGHELWVGDPAEIRARAVRRQKTDTRDAEHLLDLLLSKRFPRVWVPRPEERDFRQLLKHRDKLVKMQTSVRNQLHFLAMSQGVCRKQKLWSVRGRQELEGLELGPWASRRRQELLELLDRLGPRIEELEAAVKAEAARRPEAVLLMEQKGVGPVMALAFVLTVGPVERFATSRKLTSYLGLNPREDSSGGHQRLGHISKQGNEMLRWLLVEAGHTAARLDPELRRVYQRLKFRRGGKVAKVAIARRLAVRLYWSLRRYAAGSHVQ

SEQ ID NO: 103304 - protein, 376 aa, unidentified
MKKDTRFVGLDVHKDTIAVAVAEAERGGEVRSLGTIPNERDAIRRLIRKLEGPEGLHVCYEAGPCGYVLYWQLAKLGVRCDVVAPTLIPVKAGDRVKTDRRDAEKLARSLRAGDLTPVWVPDADHEALRDLVRAREAAKADQRRARQRLLKFLLRRGCTAPIKMRSWTDKHREWVMQLKFEQRALEETLTDYATEVDHQRERVARLERAIDEAVDKVPASMRAVIDALQSLRGVSKLTATTIVAEVGELSRFDRAAQLMGYSGTVPSEHSSGGKTRRGAITKTGNSHLRRVLIEAAWTYRHRPRIYGALRARQENIEEPVKAIAWKAQHRLHRRYRRLAERGLPHQKVVTAVGRELLGFIWAIGVHAEREHRAASS

SEQ ID NO: 103305 - protein, 464 aa, unidentified
MTASKKLWRNRKERKEWARRLQSEDPGLEVVHPHAAGIDVGNSAHYVAVRPDRDAAPVRRFECFTADLHRLADWLQSCGVKTVAMQSTGVYWIPLYEILEERGLEVYLVNARHTKNLPGRKSDVQESQWLLKLHTYGLLNNSFQPVSEIRVLRTYWRQRGEHVREAATCIQRMQKALTQMNVQLANVISDISGLTGQAIIRAIVAGERNPLKLAALSDPRVHASQEEIAKSLEGNWRSELLFVLQQEVDMYDTYQKRIAECDQRLQKHLASLTHPLQVQPPTQKPTTKKPAAKNAPRFDLSSELQRVTGVDLTRIDGIDVMVAQTLLSEVGLDMSRWKTESHFASWLGLCPDNRISGDKVLNRGTRRVVNRAATALRQAANTLMRSRSYLGAQYRRLRTKLGAPKAITAMAHRLARLVYRMLKYGQTYVDKGTDYYEERSRQQQIQLLRKRAAKLGLQVAEIHA

SEQ ID NO: 103306 - protein, 343 aa, unidentified
MDHFAGLDVSVKETSVCIVDDTGRIVREVKVASEPEALLQVLANPTYHFKRIGLEAGPLSQWLFSALAEAGLPVICVETRHMRAVLKAQINKTDRNDARGMAQMMRAGLYRPVHVKTLRSQKLRMLLTHRKLLQSKTIAIDNDLRGTLRNFGLKVGVVGKVRFEARIKELVENLPDLAAMVEPLLIVRRTLREQFCVLHRRLLAIVRDDEVCRRLMTTPGVGPVVSLTYRATVDVPARFHKSKSVGAVFGLTCAKYQSGEVDWSGRISRCGDEMMRVMLYEAAQAMLRSKKWSWLKAWAMQIARRRGMKKAIVALARRLAVIMHRIWVDGTEFRWTREQAAAA

SEQ ID NO: 103307 - protein, 329 aa, unidentified
MSAFVCGLDVHKDSTYATILNPEGKIVNQTRMNNERVLSYLSHFKVERVAMESSNQVAPLYRQLTKEGYSVMVSHPKKTRYIAEAKIKSDRVDSKAIAELARLDALPLAYMPDKETAILREKVRRRAFLVRERVKLRVKIKSLLTYEGLKWPSDHGLFTVKGEAWLHGLNLESVESYLRVLKPLDDEIRLVSRQLKGVAEEDEDVKLLMTVPGIGYYSALLVKSEIGDVNRFPFGERLCSYAGLVPSTHASGNTVKHGGITKEGSRWLRWVMVEAAQAHVRMYDTAMTQAYHRIAERRGKRVAVVAVARRLLMCCYSVLKNRRPYQDQI

SEQ ID NO: 103308 - protein, 417 aa, unidentified
MPVQERDSIVAEQPLPAVFVGLDVGKSDHHAVAVTSTGKTVYDKALPNDETRLRAILEELAAEHGPVLMVVDQPATIGALPVAVAEATDQVEVAYLPGLAMRRIADLHPGTAKTDARDALIIAEAARTMPHTLRDIRVDEAQIAELAVLAGFDDDLAAQITATSNRLRGMLTQIHPALERVLGPRVTHPAVADLLTRYPTPAKLAAAGRGHVRARLKKHAPRLAEALTEEIFDALGQQSVVVAGTEAAATVVPILAGQLAALIHQRATVATQVEALVEAHPLSAVLTSMPGVGVRTAARILTEVVGKDFRDAGHLASYAGIAPVTRRSGTSIRGEHAAKGGNKRLKRALFLSAFASLNHPPSRAYYDRKRAQGKRHNQAVIALARRRTDVLFAMLRDGTLYQDPTEPRDPSPVALAA

SEQ ID NO: 103309 - protein, 345 aa, unidentified
MTQYRRIGIDTSKAVFTLHGIDQHDRPVLRINLRRAQMIPFLKKLAPTVIALEACGSSHHWGREVTVLGHMVRLVPPQYVKPYVKRGRNDRNDAEAICEAAGRPGMHFVPVKSVTQQAQGMVLKVRETLIGQRTALINTVRGHAAEFGIIAGKGAGQIVPLLSAIEQEAAIPPGAREMFALLGQQIDAIDARIKDIDAKLSAAHKASELSRRLVTIPGVGPIIALTLAVEIDPAMFESGRHLAAWAGLTPKERSTGGKQRMGCISRAGNERLRVLLVSGATSVINAAMRPGSRQMTDWLRALLLRKPRKRVAVALANKMARTVWAMMKSGETYRRPSIAAGAVAA

SEQ ID NO: 103310 - protein, 412 aa, unidentified
MMDAIRECCAGLDVHQANVVACVLKGPLEERPQMFMREFPTVLSGLLELSDWLAELGCTEVAMESTGVYWKPVFNVLEATCKITLANASHIKNLPGRKTDKKDAQWIAELHRCGLVSNSFIAPREIRELRDLTRYRRKLKGYETSERNRILKILEDANIKISTFVSDVFGKSGRLMLSALINGEVIDPEQVADLAIGRLRSKIPELTKALNGRVNLHHRKMLQRCLEHLEFLEKSIAELEADMEQYFAPYQKQEELLQTIPGVGIHVARVILAEIGTDMSVFPSASHLSSWAGMSPGNHESAGKKKRVKTTPGNQGLKSVLLEAAWAASKTRTFLGAKFWSVAGRKGKKRATMVVAHKILVIAYFVLKEGQPYSELGHDYLERRKPISTEEMMIRRLEKQGYVVTRPSDTTA

SEQ ID NO: 103311 - protein, 350 aa, unidentified
MLIIGVDFHSRFQQIAMVDRETGELIERRLDHSNGEAKKFYAELQKPVRVGMEATGYAQWFERMLAKLGHELWIGDAAEIRAAMVRKQKTDVRDARHILDLLLADRFPRIWIPSPAERDVRQLLRHRHKMVCLRTSVRNQLQALAMGQGVYRKRKLWSAGGRAELEALGLDPWASRRRQELLQILDRLDPCLAELDRAVGKEAEQRPDARCLMEQPGVGPVTALMFVLTIGPVERFRRSKQVVSYLGLNPRENSSGGRQRLGAISKQGNSMARFLLVEAAQTAARYDEELRRDYQRLKFRRGVAVAKVAIARKLAVRLYWKLRKHSSLVPSTRMQGSSEHPVVGASLSSN

SEQ ID NO: 103312 - protein, 371 aa, unidentified
MRSPARAAVRLDVMRGASTSRVTFAAHLPNRREARWPCCTQRSIFHKRMFQAAVLDVETGETVERRFGATREELDEWAMPLQGRLAAVAIEATNGWRWVWRELSARGFDVRLVDPAQAKALRGRIKRAKTDRLDARWLCVLLAKEMLPESWLPPAEIQTLRDQTRLRKALAEDRTRWAQRLHALLTHEGWPCQRARLLTVEGRRWVASLSLSPAARAQVERLLRLIEAVETELRSLETELRRFARSDRRCIALQTIYGVGPILACHLLAELGEAARFRRARQAVRAAGLDPVVDESGDTRRRGHLAKHGAPVLRWALVEAAQHAQRANSPDRALYTQAATRVGSKRAVLTVARKIGRRAYHVLHELEAQAA

SEQ ID NO: 103313 - protein, 362 aa, unidentified
MNKISKPARRMEATKDQPEMTMGIDVGDRYSHLCLVDDQGEVVERDRVRSTEAAFRGHFEGAPRLRIAVECGTHSPWMSRLLKQLGHQVIVANARKIPTITESESKNDGRDAEQLALMAAFNPKLLSPLEHRSQARQQDLNLIQARAVLVKARTMIVNALRGLVKSAGGRLPACSTESLPARAPQAVPPALAAVAGPLIEQIGLLNAQIEAMDEQIEKLVAKYPEIATLRSVPGVGALVAAAYVLTLDHPHAVAGNRSAGAFLGLRPGQSQSGESDPQKRITRTGNTYLRCLLVQSAQYLLGRFGPDCALRRWGLKLAQSGGKRAKKRAIVAVARKLAVLLHSMWRSGQRFQPFPPPAQARA

SEQ ID NO: 103314 - protein, 359 aa, unidentified
MDVRDPAKRHVVGGVDTHKDLHVAAVVDERDRVLGSQSFATTRQGYRQMLAWMRSFGEVQRIGIESTGSYGAGLLRFVQTAGIEVLEVTTPDRHDRRRRGKNDDLDAQNAAHAAFAGQRTVTPRSRDGMVESLRVLSACRKTAVAARRVALQLIQNTIVCAPDGLQEVLRSMTRMQLIRTLAAWRPDLTAYRDVEAAYRITFKSLARRYLELHDEIADLDVMIGAIVDELAPDLVARNSIGHVGAAQLLLTAGDNPDRLRSEASFAALCGTSPVPASSGKTIRHRLNRGGDRHANSALHIIAIGRLRTDPKTKKYVAKRIAEGHSKLEAIRALKRYIAREVFTLIMRRHKTINQTQIAA

SEQ ID NO: 103315 - protein, 413 aa, unidentified
MNYEPITAVGIDVSKGKSTVAVRRPGGEVVLTPFQVEHDAAGLSGLVRTLRNLDGDVRIVMEHTGMYWHPIALALKEAGFFVSVVNAILIHDFSDNSLRKVKTDKADSMKIANYALSFWAELRDYSPEDETRQMLKMQNRLYLRTKKSSVVLRNGLISLLDQTFPGVNTLFDSQPKRSNGHFKWVDFVKRFCHKDCVADVSLAAFSDAYRKWCTRSGYRFSQSDAERLHAAARNSVATFPKNDSTKLLITQAVDSLNAVYDALYILRREMLRLASLLPEFDVVMEMQGAGEVTGPQLMAEIGDVRRFTHKGSLVAFAGMDAPPFQSGTFDSKSRRISKRGSPHLRKTLFMVASTILQHSDPANPIFQFMDKKRAEGKHFYVYTVAGAAKFLRIYYARVKAHLMALDTGTSTAA

SEQ ID NO: 103316 - protein, 344 aa, unidentified
MTNIQPKETAQEAKPDFFAGIDVGAEELILVIRKSGKPFDPQKFANTPADRDRLVKKLVKLPGIIVCLEATGIYHFDLSLALHDAGVLLMVVNPKASHNFAKVLMKNSKTDAVDANTLAEYAARMDFVAWTRPSDETIALRSFARRINALTGQKAAAKNHLHALNATSETPKAVLKDAKLAITQLEKRIDRLTAEALLLIGKHPELKRILALLISIKGVGETSAIALMGELLLLPPDLSHREWVKFAGLDPRAFDSGKSVHKKTRISKAGNRHIRAALYMPALSAKQHDKHVKAYFQHLMDNGKTPLQGVCAVMRKLLHAIHGMLKKNEPFDNTRFYAIPESIG

SEQ ID NO: 103317 - protein, 381 aa, unidentified
MSQTTHRAESKAVDRCLYFALDLGWTQWHLAFTTEVGQKPRLRAIPARDLSALQEEIRRAKERFDLPAQARVASCFEAGRDGFWLHRYLLSIGVESRVVDSASIEVNRRRRRAKTDRLDVIKLVALLLRHEAGEKVWSVVRVPSVAAEDLRQMGRELESLKKERTEHSNRIRALLAAQGVDLGSGASALRRSFDPLRLWDGSELPPVLRARLEREQQRLEFVDVQIRELEQQRTEQVKSPACRAEEQVGKLMELRAIGIKSAWLFVSEFFSWRDLRNRRQVGSLAGLAPTPYRSGKDLDHEQGISKAGNPRIRAMAIEISWGWLRWQPQSELSQWFWTRFGKAGGRSRKVGIVALARKLLVALWRFLATGILPAGAQLKPA

SEQ ID NO: 103318 - protein, 371 aa, unidentified
MTETVKYVGLDVHKETIAVAVADGERGGEVRFVGTVANEDDAIRKLVKRLTGPGVTLNVCYEAGPCGYGLHRLLSKLGQNCIVIAPSMMPRRPGDHVKTDRRDAMTLARLLRAGELTAIWIPDEAHEAVRDLIRARRSAQDDAIGAKQTVRSFLLRHDRRFGGKAAWTKMYWRWLSEQRFDFPHQQLAFEEMQKRVLEAQARVGRLEAALTEAVDAWCFAPLVRNLQVLRGIRLVSAATLVAEVGDLTRFDNPKQLMAYVGLVPSEHSSGARTKRGRITRAGNAQARTMLIEAGWSYRLPAREERRYRERVIDLSEDIQAIGWKAQVRLCQRYRRLAATGKPQPKVTTAIARELVGYAWDIARRVSPAIAG

SEQ ID NO: 103319 - protein, 412 aa, unidentified
MEVIVERCAGLDVGKDEVVACVRTPSPSGWGRSSELRTFLTFTSGLEELADWLSASGVVEVVMEATGQYWKPIWYVLEERGFDLRLVNVKHVKMVPGRKTDVADAAWLAQLLEHGLLGGSFVPPAPIRELRDLTRYRKRLIQTHTAEQQRVQKVLEDAGIKLDSVASDVLGVSGRAMLRALIAGERDPDTLAELARGVLRKKIPTLRLALRGRFRDHHATMLRVIVDHVEYLESAIADLDREIDRVIAPFSEARDRLDTITGVGKRSAECIIAEIGVDMTRFPTAAHLASWAGMCPGNNITGGKQRSSRTTNGNRWLGEILHQCADSARHTRDTYLAAQYWRLRRRMGHRKAVVAVGHSIIVISWPLLTDNCDYDDLGGDWFTRRTDTDKRRDHLIRQLHDLGYGVALTKVA

SEQ ID NO: 103320 - protein, 462 aa, unidentified
MVRSRDVIGREADRVPHAPPLQRLVEGRQGKRRVRADDDGLPLRAVPVNDGKEYVVPPVSTVDVARTELGREAVAVRVEDEREMVAHGLEVMGWSAPEAGCINRGRRGRHPAKRRPSMEIRAIGVDPGKSIFHLAAVDGRGQVVQRKKLSRFQLLRYTGTLRACLIGMEAGAGAHYLGRRLLAQGHDVRLMPARYVRPYMKSGNKNDTVDADGIVEAVQRPTMRFVPLKTPEQLDLQALHRVRDRLVARRTSVINQLRAFLLERGITVRQGRLHLERQLPAILEDADNDLSARMRALLRGLREEWKPLEVDIANIEKEIEQFAAHDDACQRLTEIPGVGPLVATALVAAVGNASTFAKGRDLAAWLGLVPRQYSTGCRTRLLGISKRGNPYVRRLLIHGARSVLMSPRHERHGFGRWLVALEASAHPNVVVVALANKLARIAWAVLARQERYRTTLLAGVSA

SEQ ID NO: 103321 - protein, 421 aa, unidentified
MPYRIAGVDVHKKMLAVVIADVTVEGEYQFVRRKVGTSPSALRELADWLGAQEVEEVVMESTAQYWRPVWETLERYWQPNRRPPGGRLHLAQAQSNQGARGRKRDFPDAERLVKRLVAHELTLSFVPDAEQRVWRTVMRRKHQVTSNRVQLQNRLESLLEEAHLKLSSLVSDLLGLSARRMLQALADGETDPQALAALADRRLRATPEQLGDALGACTTLHPVYRRLLALTLEELRVLEDHLDQLEQEFARLLRAHQAGVQRLAAVPGLGVDSAQQIIAEVGAAAATFPSPKHLASWVGACPGDEETAGVNHSHRSPKGNRQMRRLLNQAANAAVKTKGSIFEVVYRRLVPRLGHAQAIGAVAHRLCRLIWKILHQGVVYEERGPAVTKQRAQRRAAKMIRELRTLGYRVELVPAPSGSPA

SEQ ID NO: 103322 - protein, 355 aa, unidentified
MTITKYIGMDVHKESISIAVMNSAGKFVMECVIETKGSMLLQFIDGLRGDVRITFEEGTWAAWLYDLLKPHVSEVVVCNPRKNALLKDGSKSDRIDARKLAELLRGNHLKPVYHGEQGLRTLKELARSYLTISKDVTRVMNRLKALYRSWGIACAGTQVYAPRHRSEWLGRISEAGVRRRAEHCYQQLDALRLLHQQVRRDLLLESKKHQAWRLLGLIPGIGPIRAALLLALIQTPHRFRTKRQLWTYSGLGLETHDSAQYRVVEGQLQRSKKPVTLRGLNQDHNHDLKDIFKGAATRVSSSSGPLHDFYEHLLAQGRKPTMAHLTLARKIAAITLIVWKKEVRFDASYLKSQAA

SEQ ID NO: 103323 - protein, 335 aa, unidentified
MQIYGIDFAKDKFDVSFLAPTSKNVSNKPAHKVVRNNVSGVTKFIKTLPTDAVLVAEHTGVYGDRLLKHCTESHINIAYVGGYVIHTYKSAPDRAKTDMLDCAVLREFGERFADKLVYKTFPKKELYELKQLARHRTMLVEDRKRYVTANKGEDCRPYRSIQVKESMKRIMEILTEEIARTEKQMLDIIKAHEELSRNYDIITSVKGVGLVTAVELIVKTENFTTIKTARQYAAYAGTAPYEKSSGKMNKGAHISKIGNRRSKTLLYICAESARIHNKEIKLYYERRTIIDKKPHFYVLNAIVNKLLKIIFALVAKGQMFDYGFVRKDPRVIKYN

SEQ ID NO: 103324 - protein, 399 aa, unidentified
MNITHSIGLDVHKSSARFHIVDETAHRVARGPLKAATPAVQQLLKNLRTDPATVLVVAEATGMLHLDFCEAFEKSGCQVVAINPLYGRNRSARNAIRDNKTDRLDAESLAELGLSDHEELLKRFAYHCPVERFELQRYVSSSKILRKSLTNIIKHTATTVHTLFPELDELGLSINQVRVRRLLREHPSPVRIAALDLDELRAYVGNKAGELKQAATHSFAIRAMGVTCEDGLLGKLIDTIEHLTEQLKQMNQKIDQLLIPCAGKETIRLARSIPGFGAKTTPAILAFISAEHLKWGNKRTITRKLQALFGTDPRVKQSGRWKGTTKLSKRGIEIARTALFQAAFCGMKFDPQLRQYYDALKARGKHHKVAIVDLMRKQLARLVSVLVNQKSFTPIIPRL

SEQ ID NO: 103325 - protein, 338 aa, unidentified
MGEITTVGLDLAKNVFQVHAIDGEGKVVIRRRLRRVEVMPFFDQLPRCLVGLEACASAHHWARAIAALGHTVKLMPPAYVKAYVKRGKTDAADAEAICEAVTRPTMRFVAIKTQEQQATLMLHKTRDLLVRQRTMLINALRGHLTEYGIVSAQGAGGVRLAIEALHEAQQSLPVLARFALHGLVSQLRSIEAEIEKIEAEILKWHRSNEASRRLATIPGIGPITASAIAASVPDASLFRSGRQFAAWLGLTPKSHSSGGTERQLGISKQGDGYLRRLLVIGATAVLRFARQSNASRAWAARLLERKRPKVVAVALANKTARIAWALLARGTTYTAPTA

SEQ ID NO: 103326 - protein, 407 aa, unidentified
MHYTYFVGLDVSKNFFHACLIDSSQNVLFNQSYPLDYQGIKSFTKALPQGLKKSILIGIESSGCYHLNLITYLVNHNFTCVILNPILIKNFAKLSLRKTKTDAIDAKTIAIFLSQFHQKLPPQAFTSEEFKDLARERERISQEIAKRKNNLEKLVVVTFPELERTVNIYNTSILKLLEKFPSAKAIKKASLEEIENILSSQKGKKPAISAKEIKALAEYSIAQNWPAKEYILSRTIQELFFLQETLKEIEKLLKSACKEISACQDLDILLSIEGIGEITALHFLAEIQDIKRFQSYKQLIAYAGLDPAVYESGNFKGKSKISKRGNRHLRRVVWLMSINVIRHNPIFWSYFERRKRQGLPYKKAVLATAHKLLRIIYALLKYKKYFDPSTYHNIPSQGGFYYAYNFS

SEQ ID NO: 103327 - protein, 321 aa, unidentified
MFNSVGKVVVRKKCSREKLLHFTANLRVERIGMEACAGAHFLGRAPRAQGHDVRLMPAQYVKRYVMTNKNDYIDAEAIAEAVWRPKTRFVPIKADDQLDMQSLHRVREGWVHRRTSLVNQIRGLLLERGITIRKGRRHAEEALSEILEDPDTNLSWPLRTLLAQLQDELSQLQREIEGADAVILRTAGEHEACRRLMAIPGIGPVVATATIAAVGNGADFEKGRGFAAWLGLVPRQYSTGGKQKLLSISKRGNRYLRHLFVHGARAVLRYREKQSSGLSAWLGKLISRVHHNVAAVALANKLARMAGAVLAKGETYRPPRC

SEQ ID NO: 103328 - protein, 407 aa, unidentified
MVLFVGDDWAEDHHDVEVQDEQGRVLRRARLPEGITGMTGFGEIVGRFAPDDADPSQVLVCLETDRGPWVRALLAAGYRVFGVDPKQAARHREILGSSGAKSDKGDAHALADMIRTRHGQLRELTPDSDIAEAVKVVARAHQTLIWERTRHMLRLRVALREYFPAALAALQPFELTSRVTLTLLAKASTPAAAAKLTDRQIVGALHGYRDKDVKAAAIRQALRSQQLGQPDAVAAAYAVTVRSLVAILTTLNAQISLLEKEVKAHFGRHPDAEIILSQPGIGEILGARVLAEFGDAASRYASAKARKNYAGTSPITRQSGKMRVVAARFVHNDRLLDALHMQASCAILHDSEVRAYYDQIRRRDVGHNAALRQVGNRLVGILHGCLKTRTTYDQATAWSHRHDQAAA

SEQ ID NO: 103329 - protein, 370 aa, unidentified
MLDTTTFIGLDVHARSIKAVSLDVMTGEVRAATFGYDAGAVAEWVRSVDPRARCVYESGVTGFDLQKRLSGLGVDCVVGAVSKMIKPSADRRRKNDRNDAEFLARMLSVGNVVEVWVPDDECEAARDLTRALEDARDDLSRSKQRLSKFLLRHGLAFDERTPTGRRKGNWTRAHWSWIESIRFAEGADNDVLAYYVDAVRRAAEEKARLEGLVEAEARKPRWRRRVDSLRCLKGVDTATAADLVFEAGEFSRFRNARSFAAWVGLTPSEHSSGESDRRGAITKAGNKHLRKALVEAAWHYLTCSGRPKDLAKGQAPDRVARRHAAKGVRRLVERREALLARGVHGNKANVATARELACWVWAVGLMAEEA

SEQ ID NO: 103330 - protein, 426 aa, unidentified
MRVLYDRVAAIDVHKDMVKVAIRVPGAKRGTRKTDVLEFRTFYGVLQAMARELRGRGVTHVVMEASGVYTDPVYYALRELDFTEVMVINPAHAKALKGHKTDAKDAIRLLDLYECGLLSGSYIPDPDLREVRDLARYRMKTVQARTSEIQRLQKTLETAGIKLSSVVSDVTGGSATAMIEALISGERRGSVMAGLAQTRLRTAGKMADLSMALTGRFTDHHALMCRLHRDRITIFDDAVKDLDAKIAPLVARYAREAELLKTLPGFGDVIVAGWLGAIGPAPHQHFATASRLASWATLCPGNYMSARKSKGGRTGDGGAYIKPLLIQAAWAAVRVPGRLQARFRRLVRKFGGPRNMGAQKRAITAIAHTLLKIAYGVLKTGKPYADLGADFYTRRESPDARQDYLMRQLQKLNPGCVITITPAEAA

SEQ ID NO: 103331 - protein, 346 aa, unidentified
MYYMGIDHHMQYSQITVLEESGKKIKAEKVWNNQKQVKEFLSGLEGEMEGVVEAGRSHYTMVDLMESFGVKMKIAHPLLVKAIAKAKIKTDKRDSLTLAHLLRLDYIPEVYRRSNENRQAQRVLRHRSCYVQMRTKIKNRIRALLAQQREDVRQMVAMENNLFNAKGIKMLYQLDLPGKDQQMLESMLETIQHANEKIKHSDALVKQVYNSSEQARLISTVPGFGDFFSVLVATEIADIERFSSAAKLHSYAGVIPTTHASGGKVYHGKLVQQGNKWLRWAAVEAVWPAVKADFDISLYHQRIAKRKGSNPAKVAAARRLLTIIYRVLKEKRVYIPYKRRKQKAAF

SEQ ID NO: 103332 - protein, 368 aa, unidentified
MIVRIITYERSTLVNDEKYIGLDVHQATISVAVMDATGKVVMESILETKAATILEFFAGLRGTLWVTFEEGTWSVWLYDLLNLRVDKLVVCNPRTNALLKDGNKSDRIDARKLAELLRGNQLKPVYHGETGVRMLRELSRSYLTIVKDLSRVMNRLKAVYRSWAIPCAGRDVYYRRHRAQWLAKIREAGVRRRAERLYEQLDMLQHLRQQARRELLAEGRKHAITAKLRQIPYLGPIRSVLAVALMQTPHRFRTKRQLWAYSGLALETRTSADYRYVEGQLRRSKKVVSIRGLNKDHNHDLKGLFKGAATMASVRPGPFQDFYQAALAKGIKPTMARLTLARKMAAITLTLWKKGENFDAEKLKSQAA

SEQ ID NO: 103333 - protein, 393 aa, unidentified
MFIVGVDIAKRSHEAIVIDNSGNIVRKAFNFKNDSAGFSKLISVLDDISENTDDFVIGMESTSHYWLALYSNLQKLGYTVHVFNPIQSNALRNMYIRQIKSDEHDSFIIAEVIRFGRYTEGGLPPSELYELRELCRARFFVVDMTSDLKRKVIALLDQVFPEYETVFTDIFGRTSSELLLNCSTPEEILAMDTEKLAEIIEAPSRKRFSIPKAKEIKELAGNSFGIVAGFDTMGLLIKQHMEHIRYTEMQIAELDAKIEELFSRFNTCITTISGIGSTLGATIFSEIGDISRFSSPAKLAAFAGIDPTVKQSGEFVGTHNHMSKRGSPYLRRALWQASTIAVRCDPALKAFFQKKLAEGKPYMNAIGHVTRKLTNIIYAVLRDGKPYYSRLEG

SEQ ID NO: 103334 - protein, 330 aa, unidentified
MKKFIRIGVDLAKNYFQVHALVSDVGPRVTRKLRRSKMHEFFSQIEPSLIGMEACGSAHYWARELKAMGHEVLLMPPAYTKPYVKRGKNDAVDADACCEAMSRPGMRFVPVKSAEQQATLMLHKTRELLVKQRTMSVNALRGHLSEFGIIAAKGIGRVDELLDLVESDTTLPNAARASAKVLAQALEGLDKAIDDLEDEITNAQAQNEMTRLLYKVPGIGKIIASVIAASVPDPSVFKSGRDFTAWLGLTPRQNSSGGKQALGAITKQGNRYIRKLLVLGATSLLNVVGKRKGALRDWIVGLLAKKPARLVTVALANKLARILWAMIEDR

SEQ ID NO: 103335 - protein, 351 aa, unidentified
MKKIFIGIDFAKEKFDAAIIEACGLNEFGDRQFGTFTNNKKGYCQFMKWIKTQAGTYTEQEWLLCGEDTGSCSMGLSRWLYGKGLDIWIENAYVIKHSSGIQRIKTDRADASMIAEYAWRHQDKAKLFEPLSEALMQLCEVFLYRHKLVQQRVAMDARKQNKETSESSKAINFINRKSKHLMAEIDKAIKECDDMIDRIIDADAELKENYGIITSIKGVARQNGACLLIFTNNFKRFDMDARKIACYYGVAPFSKESGTSIHTPARTSHFANKLIKSLISQAAQIAKIYNPEIKDYYERLIKRGKKHSVALNNVKNKLLRIIVALVKKKVKYDPETYKFYRNRLEKQFAPG

SEQ ID NO: 103336 - protein, 385 aa, unidentified
MKKNNIARLQVAKAELRRMAAKQRLTVGLDLGDRSSRYCILNEAGEQASEDQLPTTKAGLDSLFGKMGACRIALEVGTHSPWVSRQLGAMGHEVIVANPRKVRLITQSVKKNDRMDAEQLARLARVDPKLLAPIRHRGPEAQADLAVIRARSELVDARTGLINAARGLAKPMGDRLKSCDADYVKESLADGLSEATQRAIRPLLKSVEEMTKQIGAYNQRIQEIEKRYPETKVLKQVNGVGTLIALTFILTLEDAERFEHSRDVGPYLGLTRKQRDSGESQPELGISKAGDVLMRRLLVQAAHCILRDGAPDSDLKAWGLTKVQAGAKTGSGKKGSKRRKKKAAVAVARKLAVLLHKLWVTGEVYDPQYNRKAAAAGKGKGKAAA

SEQ ID NO: 103337 - protein, 419 aa, unidentified
MTDNDITASAPVLAAIDISKERHEVLIEAPDKIRRRRVSVLNNLDEFDRLIGLLRSYQRPVRIAFEATGNYHRALAYQLGCAGFEVKLISSIALARTREALHNSWDKNDPKDAQVILHMMIIGVEQFYHDPLMHGTNDIQELSKTHDMVSRSKTELWHRILTHYLPLYFPEADRFHRSSRSDWFFAFLELFPSPHFIAAMSKDAFIKAAWDVVGRKVGKERLLADIYATSTRSIGLPVAPDSDAICMFRMILAEGRSLIAQRNQIEARAVAMLKDNADYQLLCTIPGIGPINALTILAEAGDLRRFQHHRQFLKFCGMDLATIQSGMFRGQTKLSKYGNARLRRTLWMAAQVAILQRANSFRDKFERYITKDRHNTHLRRKASTAIAAKMARTVHAVIKSGEPYRPFFEGTIHSGRTLL

SEQ ID NO: 103338 - protein, 346 aa, unidentified
MMIIGCDFHPSWQQVSWVDTETGETGEKKLVTAAGDAERFYRQVPAPALIGMEATGNCHWLVDLLAELGHELWVGDAAQIRASYVRQQKTDRRDAEHILKLLVEGRFPRIWMPSSEVRDLRQLLLHRYKLVIIRARVKNELQHLCLNKGVQRQHKLWSKAGQQMLHELPLKMWAARRREDLLQLLAMLDQQIAPLDQAVKAEAQRDKMALLLETQPGVGAITALAYVLTMGDVSRFPRGKQVASYLGLIPREHSSGGRQKLGAITKQGNRMLRMLLVEAAQSAVRLDPRFRKEYLHRCHQKPKAVAKVAAARKLAVRLYWMLRTQTAYPEVVRIESSPRVPLVGAS

SEQ ID NO: 103339 - protein, 423 aa, unidentified
METIETTKHDYAAWIGLDWGSEEHAIALQAADSEYVDRCLLEQKPELLHEWVGKLQACFPGRKLAVAIEQSKGAVINFLLGFDFVHVFRVNPKSLSSYRDALYPSGAKDDPTDAELLMDFLKLHANKMKPWVPDTSESRALLRLVEFRRGTVGRRTALTNALTQALKEYFPQALEWAGDLDTVMACDFLSKWPTLEKLQKTKPEKIRKFYTDHGSRRSELIDERLKQIRSAIPLTQDTAVVSTSVVIVETMLVQLRPLLEAIGRIDKEIEAIFRKHPDFEIFDSFPGAGAAMAPRLQAAMGSDRDRFDSADEVQEYSGIAPVTRHSGKKRLVSQRRACSRFVRQSFHEFAGHSIPQCEWARAYYDMQRDGGKGHHTAVRALAYKWIRIIFRCWKARVLYDDAKYMESLRRKQAPCLAFLPAAA

SEQ ID NO: 103340 - protein, 348 aa, unidentified
MDHYAGIDVSLEYSSICVVDATGKIVREDKVASEPAALIAWFGALGYGLTRIGLEAGPLSQWLYGGMTKAGLAVELLETRHAHAAFQVMPVKTDRKDARGIAQLMRLGWFRPVHCKSVGAQETRAMLTARKLVQSKLRDIENSLRGILRGFGLKVGKTTERRFAGRIQELVAGHPNLETIAQALLAVHAVLLREFNAFEKRVRSLARADAKASLLMSTPAVGPIVALTYASAVDDPGRFKSSKQAGAHFGLTPKKYQSGETDYTGRISKIGDAAVREALYLAAHVMLTKPLKGCSELKGWAMRIARRAGHNKAKVALARKLAVIMHRMLADGTPFNPTTKAKTMAAAA

SEQ ID NO: 103341 - protein, 346 aa, unidentified
MNKDIILAVDYHDENLEIRRFNCATGEERCENRPTTRAGILEVVDDAAAEAAAAGGQVVWIMESTTGWARVKDLIGSKAKMVLTNVLQMPLPPKAYRRKTDKIDTGRLLREYLNGSLPQAFQPSVWLRRVRRLADTRESLVRRQTALRNWTTRYLSHETWEDRRGLWSERGMRRLRRLADASEGPDRLVLTVKQAELEHLEPLLKTVEQEMIAVYQQWPEAQAVDAIRGIGVISAVSILAHIGPISRFRCPEALIAFAGLSPGVRQSDERTRSGHIGGGGTDTFLRHYLIEASVWARQIPRYRKTYERVKAKRGKKIARIVVARLILRSIYKMLRDGMAFNQAPAA

SEQ ID NO: 103342 - protein, 359 aa, unidentified
MRIIGCDLHARQQTVAMLDTTTGEVVRMTLTHEGDNVRKFYSSLPHPVQVGIEATGSMQWFVNLMEELGIECQVGHPAKIRAAEPRKQKHDRRDADLILKLLAENRFPSIWWPSKELLDLRALLLHRHQWVRMRTRLQNALQAIALANGLRRGPSLWSQAGQATIASLPLAPHTAYRRSELQAMYVKFEAEIEKLNQRVEEQAGERAGARLLMTHPGVGPITALATDAFLGDPTRFADGKALASYVGIIPSEYSSGGRQRLGGLSKQGNPLLRFLWCEAAAHAVRRDPELQRFYRRKLIQKGLGKARVAVARKLGIRLWIMLRDQIDYNEFCRRGQKNGDACAGMPETRYGANGHRPVD

SEQ ID NO: 103343 - protein, 325 aa, unidentified
MQEQAQPPVEPATACYVGIDVAKAWLDVAVRPSGVRWRTAHAEADLPPLVDQLRQLGPQLVVLEATGDYERVVVARLATAGIPIAVVNPRQVRDFAKATGRLAKTDQLDAGVLAHFAEAVRPQSRPLPDEQAQALGALVERRHQVVTMLAAEKNRRQQAAPLVRPLIAEHIAWLERALTELDRELDRLLRASPLWRERDDLLRSVPGIGPVVSLTLLADLPELGTLTHKQIAALVGVAPLNRDSGAARGKRVVWGGRARVRTVLYMGALAAMRCNPVIRAFWTRLRERGKPPKVALVACMHKLLTILNAMMRQRLAWQPPTVEAA

SEQ ID NO: 103344 - protein, 369 aa, unidentified
MKEKIVYSIGVDLHKDSMTIVVLDEKGGIAGRSKIATKCKNKVHDFFSSYGLQCQVAVESVGFYHWFWDLVHPLVGKMYLADPAGVRSFAGRKVKTDRNDAHLLALLAHENRLPTAYVPEEPIRSLRELVRLRHSVAKNLRSSRSALRWVSLKTNLPGPDKFTSDRAQKWILAQEDKFSKVNRLAARLHLDKIIDFERHLSDIERRIEKRILSFPELARTYKLLMSIPGVGPIVAATIIVETGDITRFDKSEQLAAYAGLCPRVSQSGETVRHGHISKMGPPLLRWVLQQAAWVAFRSDGNVRRIMLRIIRRSGKKIAATAMARKILTYALSVCRNKRPFQWPENMKCQVKEIRTAFENPVRRRRCQEA

SEQ ID NO: 103345 - protein, 373 aa, unidentified
MPKYSTAFGMDVHLRSTTVCALDADTGEAVTRRFPGNPWGEIAGWMDGFPGPSLAAYESGYLGFAPQRELAGLGVECVVAAVSKIPRSAADSASKNDRNDAARMAKAILAHDISPVWVPSPEIEGIRDLAGAYDGATARLATAKQRLLAFLARRGFVYGGTTPAGNPRKYWTYDFLRWLDKVRPEGDGGVRTLAALRNEVEAAAEARADLLSEYRAAVDASPIAAEVAALQSIKGCAFALAAAFSAEVGDFTRFRSGRQVTAYFGLAPSQRSSGGSVRLGGISGAGNALVRKLAVEGSWCYAAARHQPKLMPRDTGAPLEIRMHGRKGSERLLRRREEMLARGMPAAKANAATGAELVRWLWALGMMCREGAE

SEQ ID NO: 103346 - protein, 385 aa, unidentified
MRSEATREDETIVGDQVLYMALELSDRTWKVLFASPAGRRRERSVAARDVAALLEEIAAAKRRLGLSAQARVVSCYEAGRDGFWLDRALRANGIDNLVVDSSSIEVARRARRAKTDRVDLVKLMGLLLRWMAGERKVWSVVRVPGAEAEDIRQLSRSIERLKGEHGRHVTRIKALLATQGLKLARIGGPDWGSRVAELRRWDGSALGVWLQRDLVLEGERLAVVAEQLAALKADRDRLVAEGREAAAVKARELARLGAIASESSFVFATELFGWRTFSNRRQLAGSVGLTGTPYSSGESAREQGISKAGNKRMRTMLVEIAWCWLRYQPTSALARWWQGRFANTGGRARRIAIVALARKLLVALWRYLEHGVVPQGAQLKSRPAA

SEQ ID NO: 103347 - protein, 404 aa, unidentified
MYYVGIDVAKEKHYVSVLGEDRELATKPFWIYTDILGLQKLEKRLSDLSLNKDDFLIGVESTGAFSENLYEYLTDSDYKVVLLNSYQTAKFRDFSTMKKIKNDAIDALVIAELLATGKYKKSHISNDAYHSVKVLGRLKASLNKKIKSIKREISTVMATVNPEISKVFPNIFTKTALAIIKAYPTATEVQKATPKKLTRLFRHIRGNNFSEEKAKLLIELAKSSVYAGRACGARSLMITTNIRILELYCQEKKEIEAQIKELINSEIDAIDNTVENLKSIPGVSDKTIASLFGECGDIRRFDSAKAFIGYLGLYPTQYQSGNSLSVGKLAKRGIPIAKHALYMASVSSVLHNPQLNKLFRDKISVGKSKKEALIILSKKLATIIYSIIKHNTPYQPNRVFIPKK

SEQ ID NO: 103348 - protein, 343 aa, unidentified
MDVFIGLDVSLASTAICVLNGHGKVVKETTAASEPEVLVAFLRNLSGRVVVVGLEAGPLSQWLHRHLTESGFDTVLLETRQVKGALKAMPIKTDRRDAEGIARLLQMGWFRPVHCKSVSAQEMRAVLTARKSIQQAVINLELSIRGVLRNFGLKMGKIAKGHFEARIRELTDGNPMLEAAAAPILAARTALRSELAKLEKLVRNHAKSDPVCRLMMTMPGVGAIVALTVKSAIDDPERFHSSKEVGPWVGLTPRREQSGERDIIGQITRAGDVALRTALYRAATVMLNHGRPNWLTAWALRVAHRRGKKRATVALARRIGVVLNRMWRDTSEFRFTRAAAMTA

SEQ ID NO: 103349 - protein, 351 aa, unidentified
MTGTSSIVQAGGTALGVDTHKDMNVAFAIDHLGRRVDERSAPTTESGSNDLLRWARQLGPDRVWGIEGTGSYGAGLTRVLRAAGETVHEVSRPNRRVRRNRGKSDPIDAEVAARNVLAGQIQGAPRARTGVIESLRQLRATRRSALKARTQAANLLHALLLTAPADIRAELDQGSLKDIVQRCTRLRPGPVSQEREACKFALRSAARRWRHLAEEIAELDTPIAELTAQAAPALLDQFGVGPDVAAALLIAAGGNPERLGHEASFAALCGVSPIPASSGKTNRHRLNRGGDRQANCALHTVAMVRMRSDPRTRAYAARRTSEGLSSSEIKRCIKRYIARELYPLIVATLTG

SEQ ID NO: 103350 - protein, 408 aa, unidentified
MNAVGIDVSKGKSMVAALRPMGEVALLPQEFLHTEVGLEQMAYAIIALGEDTRVVMEATGRYHEPVAAALHEYGIYVCVLNPLFIKQSGGGSIRKVKTDKADAMKIAKYVLDNWVDLREYTPMDTIRQQLKLCSCQYNLYMKTVVSLQNNLISLTDKTFPGVNELFSSPERADGHQKWVDFVMTFWHCDCICRVSEKAFTERYQKWCKRKGYHFSAEKALDLYASSCGHFTTLPKNDNTKLLITTAAQQLLAGKMTLAALRAEMTRLAKQLAEYDTVLAMYGVGETTAAQLMAEIGDVRCFPRRSSIVGFAGVDPGVDDSGKHSAKSVPTTKRGSPHLRKTLYQIICTYLKKSPEDEPVYQLLNKKRTEGKPYFVYMTAAQNKFLRIYYARVKECLETFDAQQDIVQN

SEQ ID NO: 103351 - protein, 411 aa, unidentified
MYYVGIDIAKSFHVVSVIDDSETKVINKPFKINNDLKGFEKLLTILDSVTLDKDDFIIGIEATGIYGENLLEFLKSKGYSVKLLNPFQTSRYREQITMKKVKNDNIDSLVIALFLKDGKYSSGYVTDDEYQSLRTLYRNRASIESDMKEVKKRILTQITVTFPEFESFTNPFTISGLALLEKYPTAYHYKHSSVDRIMKIFAHIQGNNFNKDKALRLLELSRESIYSGKAKDARAIAIRSTIRLLKMYLSEIDIIEAEILSLLDKKGINSSTLDELPESNTLIDNLKTIPGVSDKTVAAVISECGDLTRFPSIPKFIGYLGLFPTENSSGNSKSVGHLSKRGSSLVKHALYLSAVSCLIHNKQMKQLYDTKRSQGKSKKEGLVAVSRKLATIIYSIFKYNTPYNPNRVFTN

SEQ ID NO: 103352 - protein, 417 aa, unidentified
MEDLGLRALYRRVAGIDVHRMLHVVTVLIEQPDGSMQRQTREFGGFRRGCRALAAWLSELGVELVVMESTGIYWKSVHAHLENAGIAAWVVNAHMIKHVPGRKTDMADSEWLAVLARFGLVRASFIPPKDLRELRLVSRYRRKLSAMRASEINRLHKILDDGGIKLGGVVSDINGVSARAMVSALIAQQPTEYMLSLARGKLKQKREDLSASLEGDLSARHLFVLGHIHAHIETLERELAEVDRYLLQAMQPYAWAHQLLQTIPGIDQIAAALILIEIGDDMARFGCAARLACWAALSPGNNESAGKRKSGRTRHGNSIIRFILCECANAARMTKSTLASKYRSLMVRKSHKKAIIAVAHKMIRLIFVLLSRRQPYLDQGIDYAAMSAKRNAPRWIKQLKTIGRWPAPKPAPASASA

SEQ ID NO: 103353 - protein, 350 aa, unidentified
MAKLARIGIDTSKSVFQLHGVDRRQQPVLRKQLRRRQFLEFFAKLERTTIGLEACGASHHWGRELMKLGHQVVLIPPQHVKGSYIGHNKNDKIDAEAVCDAMGRPKVQERFVPIKSIEQSAAQMLLGVRESLVKRRTQLTNTIRGHAAEFGLVAAKGLDKITPLLARIATDDSLPALAKEMFAVLGQEYVELGPRIAKIDKQMMAFHRSNEVTRRLMEVPTIGPTGACLLVTKIVDPHAFPSARRCAAWLGLTPKDHSTAGRQRQGGITRAGDERLRAVLVSGAMACIRHARNRPSTASPWLVELLKRKPPKVAAVALANKTARIAWKLMTSGERYDPNRSVAHRGLTAS

SEQ ID NO: 103354 - protein, 428 aa, unidentified
MDELNGNRLKEFRQLRQEIRHSEEYLVVGIDIAKDRHHAFFGTPTGKTLLRRLVFNNDYEGFRKLLDQSEALRVQHGLKKVVYGMEPTANYHKPLGEYLIGLGRAVVLVSGVTVARNRESLDGRWDKHDVKDSANVADLISQGKCLYYEHPSAELRGVRGLLSLKRRLKKQEQGYRVRIRNHLIAEYYPEMDRDYDRLGAEGLLVVRWCLPASEMAQLDMGPFIERVTTRRITTEKRRRLEAVWEKAGESIGCEGVPGLEHEAKVMVEGLREVRGMLKETEDRIEELCKRFPEYHYLLTIPGFGPDVSAKVLGAIGDPERFQNEKQVLKMGGLDLSADRSGKESDNAIPEISKRGKADLRFALYQAAFIASTKNRDIMVYYTNKIRGREREKGIQIKMRVKLAAKLLVIAWALMKKKEVFNPAYLNAE

SEQ ID NO: 103355 - protein, 435 aa, unidentified
MSKEDEETTMSARETTEPEFVAFVGIDWADQKHVWSLQKADSRQREAGELEHRPEAVEAWVGELCRRFGYGPIAVAVEQVKGALVYMLRKYECLHLYPVPSTMSASMRAALYPSGAKDDPRDADLLLELLVLHRDKLRRLTPDNEATRRVQNLVEERRKLVEEKTAQLNRLTGYLKVYFPQMLEWFAKLDTKLVCDFLERWPSLEELQKVPSAEVKKFFRHRRGRQGELTEWRVQRIGQAMPAIRDGAVIEAKRAVVQVIAQLLRTLLEGIATLDRKIAEAAEAHPDFFIFQSLPGAGAALAPRLLAALGSQRDRYGSAAEVQKYSGIAPVTERSGKKKWVHFRWACSKFLRQSFHEWAGHSIAQSVWARAYYQRQRERGKEHHAAVRALAFKWIRIVFRCWQDRVAYDETRYLAVLAKRGSHLTSAFAAAAVSV

SEQ ID NO: 103356 - protein, 422 aa, unidentified
MRVLYERCAAIDVHKDQVTVAVRTPGDGPGGRQTEVRKFRAFYGVLTEMARWLVSLQVTHVAMEATGIYTMPVYHALIEQGRFEQVLVCNAAHVKNVPGRKTDAVDAVWLAELLECGLLRGSFIPEPKIKAVRDITRYRKKIVGARTSELQRLGSVLQDAGIKLDSVASSIATVSGRAMIEALIDGERRPAVLADLALGRMRSKIPDLTRALEGRFGAHHALMCQLHLEHIDHLNEMINRLDTQVEQMMVPFARQHELLVTIPGIGPIAAAAIISEIGASPGEFFLSDAHLASWAGLCPGNHESAGKRKHGTPRKGNQHLKPILVEAAWSAVRTDGRLRARYHRLVLRFGGYRNPAAKKKAIVALAHTLIVIIWNVLASDSPYTDLGADFYDRHHNPERETRRLIAKLEALGHTVTIKPAAA

SEQ ID NO: 103357 - protein, 412 aa, unidentified
MQDILTCAMGLDVHRDIIVACLVKGAVDAEPEAETRTFSTLIPEMQKLREWVIEAECRNVAMESTGIYWQPIYEMLESCFDGEISILVVNARHMKNVPGRKTDMKDAQWIATLLRAGLLKGSFIPDKAFRELRHLTRYRKSVVHDITAQKNRIDKFLQSSGFRFTAFLSDTFGASGRNIIRHLIEHGSIDREALDKCLKTKTRNRIDEILVALNGSLSIHQRRFLNMVFQHLEDLEAHKHAVEDEITEEALKHTDALNLLCSIPGIDVTAAAAIIAEIGTDMSSFPDSQHICSWAGLSPGNNESAGKRKSVHINKGNPYLKSMLCEVAWIMASHRKLYLSGWYWKVKQRKGAKRATIALARKILSIIYTMLKTGTPYNEECFEQRRLRCERKRANRLVNELQKLGYVVVAPD

SEQ ID NO: 103358 - protein, 341 aa, unidentified
MPFLPIIFTNFSVQEGLFMSLKIVYKICCGIDVHKTFVVACIASTSKEGVTTYKSHRFSTYTKGLKDLLQWLLESDCKDICMESTGKYWIPVYNILEKGCSIVLAHPKYVKAIRGKKTDKKDAKWIADLFKHDLVAGSFMPPADIRQLRDLMRYRYKLTCFMSSEKNRLQNCLTVSNIQLGNVVSDTFGKSSKRILDRILENPLDTSFDIAPLIHGSIKDKIPELELAIDGYITPEQAGKLKIIKKHFEDLESRKTELEELILALASPNQQEIDLILTAPSFKNIFSAITVISEIGVNMESFPSAKHLCSWAGLTPTNNESAGKKKCLSGFPKPDAISSHF

SEQ ID NO: 103359 - protein, 384 aa, unidentified
MSEVIVAVDPAKRSHTVEVLDRDERVMATLRVENTTAGYRELRAFARRWRQRRWAVEGARGVGRQLAQRLVADGERVIDVPAKLSTRVRVLDTGHGRKNDPADAHAVGVAALRRRGLPEMTLDDETVALRLLSDRRRELVRTRTQTLNRIHQLLMELTPSGAPKRLSVTKAQQLVATVRPRDVAGRTRRAMVVEMIDDVVILDRKVKAITKQIRDAVAATGTSLTDIVGIGPVIAATILGEVGNVSRFPSRHHFASFTGTAPVEASSGEVVRHRLTRFGNRQLNGSLHTAAIVQLAHEPRGRAYYDRKKAAGKGSLGALRCLKRRLSDAVYRALVTDQAAKSPGGHLGATLTASAADPIPTVSTSDKPLTGLTADPTPGVIAAS

SEQ ID NO: 103360 - protein, 381 aa, unidentified
MEKAKNISGAGATGPPAPNPKRRAGGCRRRQIRDLESLDVSKEKLDFFIPGAGKSRQVPNTAGGCRQIVGMAEKLGLRVCCEPTGGYEQTLLRACWNGGVEVSLADAWRVRHFAKGRGILEKTDAIDARVIALFAAENGPRPFPRPSEAQRRLRDLTRAMESIDKQIQIAHGNLEHCGGDAEIATLWKRNLAFLERSRRDLEAKRLATVWDDERLRGLFERFQLVKGIGPATALAMLAEVPELGVVSDKAAAKLLGVAPIPDDSGKMNGKRVIQRGRFAARTALYMAAVVAMRFNPVLKAFHTRLVKERGKPQKVVIVAVMRKLVTLLNRMAADETFIPAEAGAKQRQKAATPHHKAVGTLAATPLPSSPASPPEPLFHPC

SEQ ID NO: 103361 - protein, 362 aa, unidentified
MHNHRTLVGLDVHAKATIAAGLALDTGELRFRRINGPPRSAVNYLEELPGPVMATYEAGPVGYGLAREAAARRIEVRVCAPGSIPRKPGERIKTDRRDAERLVRSLLAGELSFVRVPTVEEEQFRDLARCREAARADLMRARHRLSKFLLRREIEFPGPGASWSVAHRQWLRSIELADHPSRSVLNDYLAAVLALEQRRDGLDAQIEIAAPRSPWALTIANLRCLRGINTVTAYGLCCEVGAFHRFEHPATLTAYLGIVPSEHSSGEQVKRGPITKAGSPHARRLLVEAAHHYRHKPAIYKDLARRQRGQDPRACEIGWRCQQRLHRQWQRLRLERGKPGNVVVIALARELANFVWEVGQLK

SEQ ID NO: 103362 - protein, 359 aa, unidentified
MNDHHYIGLDVHKKWIFYCVENENGKVLDEGRFPAEKAEIVRWCETKKGPWDGLMEATMFSAWIYDVMKPFAADLKVGHPYVMKRTLAAKNKSDRKDAKRFADLCRCKVIRTSYVMEPSLRALRRQMRLRAMLKRQVHQFKNRMAAVLMETGIAYDARKLHGKRYYSQLIRRADVEGEVAEIVQFCRERIQQLQAQQNKIFRKLEKHQLLQKRVELLRTIPGVGRITALTWALEVGDPTRFPSSSDAISYCGLVRAENQTAGKEKGGPLSKTRNHHLQHVLIEVGHLAPRFNHQLAAIQAKEAMTRKPNVVAIAVARKIVEYLMAVDRSGKPFQMRPPVVTEASSDAGAQSPAATSSKI

SEQ ID NO: 103363 - protein, 355 aa, unidentified
MTSTKYIGLDVHKESISIAVLNSAGKVVMECVIETKASTILQFIHGLRGDLQVTFEEGTWAGWLYDLLKPHVTELVVCNPRKIALLKDGSKSDRIDAHKLAELLYMNKIKPVYHGEHGLRMLKELSRSYLTISKDLGRVMNRLKALYRSWAIPCAGTQVYAPRFRSEWLSKITEAGVRRRAELYYQQLDALRLVRQQARKELLAEARKHRATKLLRQIPGIGPLRAAHLVAVMQTPHRFRTKRQLWTYSGLGLETHDSAQYRVVEQQLQRSKKSVTLRGLNTNHNHDLKDIFKGAAMRASTAAGPLRDFYEVLLAKGRKPTMARLTLARKIAAITLIVWKKEVRFDANYLKQQAA

SEQ ID NO: 103364 - protein, 412 aa, unidentified
MDRLVERCAGLDVHKDSVAATVRVPGKDGQRLQETRTFATTTRGLLTLADWLASYGVTLVGMESTGCYWKPVYYLLEERFECWLLNAQHLRNVPGRKTDVADSAWICQLLEHGLVRASFVPPKPIRELRDLTRYRKAQIEERVREVQRLDKVLQDAGIKVSSVASETLGVSVRRMLDALVAGTHDPEVLAELARGRLRQKLPALQEALTGRFRSEHHGLLVSQILAHIDYLDETIATLSARIEHVIAPFSRERELLQTIPGVARLGAEVLIAEIGVDMSVFPSDAHLASWAGQCPGNHESAGKRRSGKPRSGSKWLHKTLTESAKAAARSKGTYLSAQYGRLRGRRGPGKATGALRHSILIAAYHILEQKVPYQELGADYFDRRRSSEQRTRRLVRQLEQLGHTVTLQPLAA

SEQ ID NO: 103365 - protein, 327 aa, unidentified
MEQAYIGVDLHKAFFQVCAVDRSGARQWEQRWPTTEAGIAGLLSRCGPDSRLAVEASSPTWAFVDRVVDHVGAVQVVDARKTRLKAGYAAKTDRLDAQRLADALRRDSVVGIYYPPPAIRDLRELCRYRCHLARVQAGVKQRIHALLLRHGVGAPRALFTQRGTAWLDALVLPGWAGQQLQGLRQILADVRRQLVPVLAAIRATAASDPIARVLDTRPGFGPVFSVTLRAEVGTVARFPDGAHVASYAGLVPRVERSGGRQWSGRITKAGSPWMRWALIEAAIHQFRRQDAFGQWARQLAVRKGILKARVAVARALCDELFETWPRA

SEQ ID NO: 103366 - protein, 416 aa, unidentified
MKCFVGIDVSSEKLDSCFLDDEKNILCQTSYVNDTLGATALKKQILQLHQIYDFDKVVIGMEATSMYSYHPAMNFHQDEQLQEIQAVTTIENPHRIKQYAKMFDTDKTDTIDAFMIADYLRNQHYTTSPVKEEKYMALQRLTRARYQTVCQLVEVKQHFIENLSYKCNTLKKELRDAPGSTTVFSAAIMELFTQDLSMDDLAQLPLDDLADWLQKKGRGRFKDPQDLAKTIQKAVRTSYRLDKAVNQSVDIVLSVFVREIRGLEKAIKDLDKAIEDLVQAIPEYQCLTSIPGVGKVYAAGLLAEIGQIERFKDQANLAKYAGLFWKKHESGKHSRENTPLTKKGNRYFRYYLVEAANSVRHYLPEYQMYYRKKYQETPKHQHKRAIVLTARKFVRLVDTLLRNHQLYTPPRSVIEK

SEQ ID NO: 103367 - protein, 338 aa, unidentified
MKKRIFIGIDVSKHTLDTAFIIRAGDKLTDPVWKQFSNTHSGLKEMSKWLLQMKVSLDQQALIVIENTGIYHRLLWQYCSKLQVDLCIENAAQVKWSLGIARGKNDKVDSRRLALYAVRHLDRLKAAPRLHSAMMALKDLLTLRNKLIVQSRSISTGFNELKNVSDSAVMKVMQKLLQPARDGLKESLKRIEEQIKTMLSQDKQLSKIHKLLITIPGIGHITAVMLMCCTNLFTLCSSGKQLACYCGVAPFDHQSGISIKGKHRVHRMANKELKRLLHLCALSVIYHKEEFKLYYERKMKEGKHPMCILNAIRNKIILRVFAVVKNDRPYVNNYLQAA

SEQ ID NO: 103368 - protein, 320 aa, unidentified
MAMTVLQSIIGVDVAKAEVVACHFEADELKIVPNNKTELKAWLKSLPVDSAIAIEATNIYHLDTVNLAHGMGHKVYVIDGYRLNHYRKSTGGRAKTDASDARLLARYLKNEQADLRAWNPPPKIYTKLQSLLRRRAALVKMRVGLNQSWAGEPLLKASSKSVAACLARHEGLIEKRILDAVTEAGLLHQIKRCQAVEGIGFLTAVALTMAFQRGEFESADAYIAFLGMDLRVSDSGQMSGRRSLSKKGDSEIRRLLHNAASAGIKSNAWKPLYEGYLARGLKTTQALVIIARKLARIAFALMKNLSEYQSKAVLGTSPQP

SEQ ID NO: 103369 - protein, 411 aa, unidentified
MRLFVGDDWAEDHHDIEVMDEAGKVLAKKRLPEAAAGMTQLHGLIGRFVPEDADDVEVVIGIETDRGPWVAALTAAGYLVFPVNPLQASRYRQRHGVSGAKSDGGDAHMLADMVRTDSHQLRLAAGDSPEGQGIKVVARTHKTLVWDRTRQVQRLRHQLREYFPAAIEAFEDLDAPDVLELLAKAPDPARAAKLTRAQVAAALKRARRRNIKDKTDAILAALRGEHLGQPPALTAAYAATVRSLIAVLTTLNEQVKTLEEQVREHFGRHPDAEIYQSQPGLGPILGARVLGEFGDDPGRYADAKSRKNYGGTSPITRASGKKKVVAARFIRNDRLIDALMAWAFASLNGSPGARAFYDEQRAKGLEHNDALRRLANRLVGILHGCLKTRTLYDEATAWGHRENLPQSSVAA

SEQ ID NO: 103370 - protein, 405 aa, unidentified
MYVGVDWGSQQHTVCVLDQAGGKVAAFSVAHSAAGLGELIARLRRLGDPAERPVAIERPDGRLVDRLLEAGHPVVPIPAHALKAWRRAQSLAGAKSDPGDAALLADYLRCLQHRLRVLEPFSAHTRALRAVVRTRDDLVDQRVAAGNQLRACLEAFWPGAAVIFADVCSPIALAFLERYPTPEAAQRLGEQRLAAFLVKHGYCGRRPAAQLLGRLRAAPAGLIGSVEAEARRNAVWALIRVLSALNTAIKDLDRSVAAHLGEHPDAPVFTSLPRSGKLNAAQVLAEWGDCRQAYDGPEAVACLAGVVPVTRRSGKHTSVSFRWACNKRLRRALCIFADNSRHASPWAAKVYGDARARGLDHPHAIRVLARAWTRVIWRCWQDGVPYDPAKHRAAQRLTETADSAA

SEQ ID NO: 103371 - protein, 397 aa, unidentified
MYIVGIDIAKRKHEAAVIDGEGTVIIKPFSFTNNCSGYNRLLAMLTKAKLPLDEVSFAMEATGHYWLALFTRLQKEGFRVQVINPVQTNSIRSFYIRQAKTDPRDALLIAEVIRFGHFSESTLHPENIYELRELCRGRHAIVSMQADVKRKVVALLDQVFPEYETAFTNLFGDTSMAILQTCPTPKELSEMPLEELCHLIEVPSHKRFRMAKARELQELARNSFGFAMAGDVFSTMIRLYAKHLVFLKQQVQEMDRKIAEIMDTLDTPITTITGIGPTLGAYILSEIGDISRFSSAAKLAAYAGIDPTMRQSGEYNGVRNRMSKRGSPYLRHAIWLAASSAVLHDPALKLYFQKKRDEGKPYMASVGHACRKMVSIIYAVMRDNKAYTPCIQNEISA

SEQ ID NO: 103372 - protein, 408 aa, unidentified
MKVLNRRCAGLDVHKDEVVACVRLAVRGKASHEVRRFATTTRGLLDLAEWLEASGVTDAAMEATGIYWKPVWHVLEERFQLVLANAAHVRNVPGRKSDVNDAAWIADLMAHGLIRASFVPPAPIQELRDLTRTRKQLGREIVQHTQRIEKVLEDANIKLSSLIADLLGASGRRLLKALIAGESDAVALAALGGSRLKCSRAELKEALEGRITPHHRFLVGQHLQMIEELEAAVAAFDARIEAALVPFHDAAERLTSLPGISDVAAQVILAEIGPDMSPFPTAGHLLSWAGLTPRLDESAGKRHSTRLKKGAPWLKPVLVQCAFAAARAKNTYLQAQFLRLKARRGPKKAAIAVAASILTAVYHMLRDGTFYNDLGPQHFARHDKTRAAMRLVRRIKDLGYDVEIKAAA

SEQ ID NO: 103373 - protein, 348 aa, unidentified
MYIGVDTHKLQHVLVALDVQGRSLGTRTCANTPEGWANGLAWARRWEGRVWGIENSGSLGKGFAQSLRVQGEDTVHEVSPHRTAQYRRRGRTQDKTDETDALAIARLLLAEGDTLPEVQRDDLSTELRLLSDHRDNLLAEKTRLINQLHGQMLQVDPSYKEKSGRLTDARGVAYCRDMALPQDDRLLRTRLLIVHQLAEQILRLDAEVAAVAVELTARVQESQTPIVALRGVGTIVAARIIGEIGVAPRIRSAAALAALAGISPVAVSSGGRGGYRLNRGGNRQLNRAIHVIALTQRRCDPRGRAYYMKKRAEGKTPRAALRCLKRRLVDVLFRAFSRHVEPSLCTAA

SEQ ID NO: 103374 - protein, 404 aa, unidentified
MIYVGIDWAEAHHDVCVLDDTGGVLATRQVPEGLEGMATLHALLGEHAEEPAEVVVGIETDRGLLVGSLVAAGYAVHAVNPLAASRYRERHTTSRAKSDRGDARMLADLVRTDRHNHRTVAADSELLAGIKVLARAHQNLIWTRGRQTNALRNALREFYPGALDAFEELHHPDALAVLAVAPDPTRGRKLSEARIVRALRRGGRQRNLERRAAEIRRALQAPQLTAPPLVVEAQAANTVALVAVITTLVEQIGKLEAELTDAFDHHPDAEILRSLPGLGDILGARVVAEFGDAPDRYVDARARRNYAGTAPITRASGTSRVVIARLARNTRLFDACYQWAFCALTRSPGARAYYDDHDPGPNTAKVARRKLANKLVGILHGCLTHRTLYDEDLAWPTMVAELAA

SEQ ID NO: 103375 - protein, 442 aa, unidentified
MSMSLSVLDPLATFVDVGSEQMHVSIAGGPPEVFGTFTTELHRLRDWLSERKVKSVAMEATGVYWLPLYGVLENAGFKVSMVNGKQTRNLPGRKTDMKDCQWGATLHAHGLLQAGFVPPAQIRRLQDYLRLRGDHLSSAATSVQHQQKALERMNVKLHDVISSLVSDSGIRVIEAILTGERDADRLLALCDVRIQNKKAQRVKESLRGTWEEEHLFALRQAVENWQHYQRQIAACDRQIEAVLRQINGPDAPGEDKTKAHKRGGINAPQIEDLHHLVSKLCGGKDLTVLPAHTDYSLLQLIGEVGTDLSLWSTEQHFTAWLGLAPGSRQSGKRKGSVQRKRNRAGRLFCMMARSLVQSKNIALGGFYRRMAARRGGLVANVALARKLAVLFWRVMVKGLDYAEAGLKAYEEQVLETKRRALSRLAKQLGRIVLPSLAELQKA

SEQ ID NO: 103376 - protein, 429 aa, unidentified
MRKKQPYRAVRVKDVDRKTLEVRLACGSIHVGIDVAKQEALVVVRDSAGQFERPWKVRLPGEIHELVALLQALGERHPLVVAMEPTGSYGHALHQALSDAAIVVHRVRTQATQEYAEMFDGVPSNHDGKDAAMLAELCALGKSWPWPWEVLSEADAELKSLVLWLDAQQTTKLKWIGRLEGLVSCYWPEASRLLDLTSQTLLRALREYGDPRALAADPEASAKLSSWGGHFLKAEKIAALLESARRTTGLRMTAAEVKYLKRVAQATWEADAAVTAAERELQEAAKQDATIQRMAPIVGSNTACVLAVTLGKPQAYHCGEAYRKALGLNLKERSSGQQRGGVHISKRGPSLARRWLFFAALREIKQGSAKTWYERQKAKDQDRGMGAVVAVMRRLALAIYAVVRDGSSYSPARMFGPHPVPTSIPSANE

SEQ ID NO: 103377 - protein, 358 aa, unidentified
MKELTTGKEAQLIIGVDLGDRLSEVCVMDASGEVRARTKLKTTAAGFEKFFRPMVPARIALEVGTHSPWVSRLLKSWGHEVLVANARKVRLIYQSTSKSDRMDAEALARLARLDPKLLSPISHRSGERQRHLALLRARDALVRARSLLVNHVRGAVKAMGGRLPACSTAAFGTKAELHLPETMKMALEPLLKVVETLTEQIEEAERGIGQVARKHYPEVVVVTQPTGVGLLTGLRFVLTLEEPRRFRRNRSVGAYLGLTPRRSQSGDQDRQMRITKAGDSDLRRSLMQCSHYILGPFGPDSDLRRFGMKLAERGGKSAKKRALVAVARRLAVLMLSLWKTGEVYEPLRQTQLVAQVPA

SEQ ID NO: 103378 - protein, 328 aa, unidentified
MLNPEEFLVFGVDVSKDELVLYDGSRHYRVKNERELKELSKLIRKRNGGDFGKVIISFEPTGGYSYHLLRFCSERKIKIMVVNPYKSSHFSKTQRPRGKNDEKDAVNLRKLVFVNPEEIREARIDERLEMLNSLITLYDKTEREITSWQRSLKHRQGYYSEEQAEEIEGIKKVIKVLRENRERILRKINEEIGKDEELRKKREVIRSMKGVGEIVSIVLLNFFLKYPEVSRTKITSLSGLDIVSSSSGRSIKKRGRISKMGNKLVRRKLFMSAMYLIQTEGRFRRFYEELRRRGKPKKVALTAIMRKVLVLTYSLYKNMSFYSESYNV

SEQ ID NO: 103379 - protein, 342 aa, unidentified
MKKLAVDESALLKLLHRWREEAEKAGHRIERIVVAFEAGRDGFWLARWLKARSIEAYVIHAASVAVSREHRRAKTDRLDSELLKRAFLGWLRGERDHCKMVAIPSIMDEDAKRPNRERESLIGEQSRIVNRMKAALIRLGIRGFNPKLKRAAGRLDGLHTPEGEPIPPNTLAELRRDMERRRLVSNQIRRIEQARLQRLEQEPDDGPHAMVRLLARVIGVGIETADMLVREVLSRNMRDRRAVARYAGLTGSPDESGRKCREKGLARSGNARVRRGMIQLAWRLLMFQKNSALAQWFRARTENARGTRKTMIVALARKLLIALWRLVHEGVVPDGIVLRPAQ

SEQ ID NO: 103380 - protein, 337 aa, unidentified
MVSVPVFLGLDYQDEVIEVNAMGIRGEILASRRCPNSVEAVISAVPPGCRVRGAAIEACCGAADFAEELMKATGWTVDLAHPGFVARMKQNPDKHDFGDARMLADLERVGYLPRVWLAPESIRQLRRVVRYRHQLANERRQVKLRIRALLREERVPKPSARAWTMAWMQWLAEEAALGSESRWVMERHLRRLVDLDREMRHVERRLVMLTRNDPVVLKLLSFKGIGLVTAVTLRAEIGRFDRFRTGKQLARFAGVTPRNASSGKRQADAGLIKAGNPQLRAVLIEAAHRLMRLDPRWAALGAAIRNRSRSGSLAAAAVANRWVRWLFHQMYPVDQAA

SEQ ID NO: 103381 - protein, 416 aa, unidentified
MEKVYSYCAGLDVHKVTVVACRLRVDEAGRKQKEIETFGTTTAELLRLSDWLTAGQCTHVAMESTGEFWKPVWNILEGSFEFLLVNAQHIKRVPGRKTDVQDAEWLAELLQHGLIKASFIPPREQRERRDLTRQRTQLVRERAGVVNRLQKVLEDANLKLSAVLSDITGLSGRAILDALVTETLDPRQLNDLVHGRARDKLPALEQALTGRVRAHHRFLLNHHLAQVDFLDEQIAAYSAEIARVTQPYDELVNLLDTIPGIARPTAELLLAEVGPDLSRFPSAAHLAAWAGVAPGNNESAGKHRSGKTRKGSQWLRTGLMQAAQTVGRQKNTYLAAHYHQIAARRGKKRALMAVAHSLLVIAYHVIKHQEPYRELGGNYFDERRRTSVVNRLGRRLAKLGYAVVPLPSAAAGPASA

SEQ ID NO: 103382 - protein, 391 aa, unidentified
MVCVGIDVAKDKHDCCILDSDGTIRADCITIPNNMDGFKQLLQTIRDCTKKSDKIKVGLEATGHYSYNILGFLLDNDLAVYVMNPLHTNLYRKSLSLRKTKTDRVDARTIATMLLSDVDLKSYTDTAYHNEELKSLTRYRFDKVRERAKLKQSVSRLVTILFPELEKLVPSLHIASVYALLSEYPGAKQISEIHLTKLTNLLATASKGRYGKDKAIQIRDAARTSIGSVMPAKFLELKHTIKLIRELTSEIDEIEVSIQKIMDELNPPILSIPGVGIQSAAMILAEIGDFSNFESPDKVLAYAGCSPSTYQSGKLTNCYAHIEKRGSRYLRYALYNATKYVCYWNPVFAEYLAKKRAEGKHYNVALSHATKKLVRLIYALQKSGKAYLTAA

SEQ ID NO: 103383 - protein, 381 aa, unidentified
MTTTATHNAHDTTPGRALFVAFELSEKTWKLGFTTGHGQKPRERSIAARNQTRVLQEVAQAKRRFGLPETAPVFSCYEAGREGFWLHRFLEAQGIPNQVVDSSSIEVNRRKRRAKSDALDVRKLLSMLMRYAHGERDVWRVVRVPSVEAEDQRHLHRDLETLKQERASTTTRIKGLLSSQGVRLTSVNKLPEQLEALRLWDGSPLPSGLRRRVLRVYAHHQFLSEQIAALEAERRARLQSAHDASIEKVHQLMQLRGIGINGAWLLVMEFFGWRELKTRREVGGLAGLTPTPYQSGESAREQGITKSGNRHVRWMTTELAWSWLRYQPESALSCWFRERFGGGGKRMRRIGIVAVARKLLIALWRFLETGVIPQGAELKAA

SEQ ID NO: 103384 - protein, 339 aa, unidentified
MKYTPVGVDIAKHLIQVHFIDEHTGEVIDKKLRRQDFLTFFSNRERCLIGMEACGGSQHWARELKKLGHEVRLLQARFVKAFVIGNKNDVMDARAIWMAVQQPGKEIAVKTEEQQSVLVLHRSRRQLVKFRTAQINALHGTFLEFGETIHKGRAVMDRELPAALERMKMKLPPYLITVLEDQYNRLSELDMLIDGLEKQLNSVARQSETCKRLMEIPGVGPLIATAAVATMGEASAFKSGREFAAYVGLVPKQTGSGGKIRLLGISKRGDTYLRTLFIHGARAAALLTKEPGPWITELKKRRPTSVAIVAMANKLARTVWAIAAHEREYDKNHVSIRPY

SEQ ID NO: 103385 - protein, 369 aa, unidentified
MEQYYVGLDVHSKQSVFVIEDGAGTVTARGEVPTTRPGFERLCAEHRLPSGTRVALETGTVAFFVARQLAALGLAPLVIDAHEIRLKAYRPNQKSDRRDALELCEGLRRGIYRAIVHVPRAEVTRLRETLGRRRHFVRLQSAQVSAVKALVRAAGLGQLRPSLGTEVGWAKALAALAGYPELQGYVAQHRALWRCTGEQVATLAAALARQHEASFATEMRRLQTIPGVGPIVAATAIAVFADVTRFPDAKHAASYAGLVPATYQSGDRTAHGRITKRGSAELRAMLCEAAHHARRPAHPLNPYFARLCAKRGYKMAVTAVAHRLCRIIFAMLRHATDFDTTKLNIERGPFARRVVRVYRLKATVSNRNK

SEQ ID NO: 103386 - protein, 467 aa, unidentified
MNCCSYQLFVGVDISKGKADAAILKVSDLRSVKPQFLRKKLSFKFVKSELTSFLDKVRSYSDENCTSVTFGLEVTGIYANNFYNFIKENLQHDESIHYLDTDFVNQWRQAHNIAKSDPIDAQTISTIIGTDDKVKYVSDFVFENEKGYQGFKCIVHRLEQRKKTLTQEYSRLIAHCDIYFPELQYVFDPKSAVFSAILSRYPTTHDIINTSKEEVFKAAYEASKHRVKMEKIVILFELCADTIVPDMILEPARQITFNLVESIRSIKADIKRIENDIKELLPSYELYPLLLTLTGCGPSTATVILAEVGDISRFKNADHFVSYCGCAPKNKRSGSSVESMGKISKKGSHYLRHAVYMIAEFARRHNPVLKALFERVKHGNKKRHRLAVVAVANKVARYIYSIMKYQTVFVIEHSHLMRLPEETRKSFFNSISTEFSKKTRKQIYHYSDENGEIFPFVFVGSEVEIQP

SEQ ID NO: 103387 - protein, 388 aa, unidentified
MQVVTGQAAAPTAIQTNLRAIFVSLELSRSTWLITSLSPGAAEKMSKHSVQAGDIAGLLRRLAQIKEKARARTGRDFPIITIQEAGLDGFWIHRVLQSEGIESHVVDPASIATSRRRRRAKTDKIDGETLVRTLLAYKRGEPRVCAMIKVPTPEEEDSRRLCRERKVLTAERVLHVNRIKGLLFCQGISGYEPLRRDRHERLEELQTGDGRPLPPHLKAQVNRELDRLELLLKQIKAVEAERDALLVAAHTPAAVPASMLLNIRGIGPEFAAVLWSEGLFRHFDNRRQVAAYAGLAPTPWQSGAVDREQGVSKAGNPRLRTTLIQLAWLWLRNQPHSALTLWFHERVSRHGGRLRKTTIVALARKLLVALWKYVTAGVVIEGAAMTAA

SEQ ID NO: 103388 - protein, 365 aa, unidentified
MKAPSTRPAAVLGLDVGKSSHWACLIDRDGEVLASAPVRNREAELDALFASAPAGTLVVVDQFRNIGSLAVRRARAAGLGVAHLPGLAASRAAGLFAGEAKTDERDAAVIARTALGVPDSLSGVPGRGEALEAARALSSQRDHVVACATRDKNRLRAVLLESCPALEAAVDLSDRRWLELLAGFGGAWGIARSGAGGPRAEAAGEAAAASTAPPPALVEAENRQVRFLAARISEALDEAGALEAETAALLEGDETYACLLTVPGIGPRTAAQLAVSVDIGRFPDHDHLASHCGIAPRVRSSGTSVRSVRASRRGDARLKSLLIFSCNSLVRSSGRYGEYYRACGAWGTGGRSRPSRGSGSGRYTP

SEQ ID NO: 103389 - protein, 350 aa, unidentified
MDRYIGLDAHTSSCTVATIGQSGKRLQSHVVETNAKALIEVIRAVPKDRHLCLEEGPHSNWLYEVLSPHVQETVVALVNESRGPKNDKLDAFGLAEQLRIGAIRTKVYKKRGSFGRLGYRVKAHSLLVADSVRVQSRIKALLRSRGVAVTGRDVYSTTERDEWFSKLPDSARSLAELLYLEYDGLEGLRQRAEREMIAEARKHDVYRIIQSCPGIGEIRAAQLMPVVVTPFRFANKRVFWSYCGLGIVMRSSSDWVRGRDGQWIKAPVQQTRGLNRNFNRPLKAVFKGAATTVIGRAQDEPLYRHHVSLLDGGTKPNLAKLTIARQIAAIVLALWRSKEVYDPKRLGHAT

SEQ ID NO: 103390 - protein, 457 aa, unidentified
MDDCDGVSRSQLQGLPIVRREVAGIDLGSERHWVCAPTPDGTAREVADFGATTAELIRMAEWLLERKVRSVAMESTGVYWIAPHEVLEGRGVEIPLVDTRQLAQVPGRNKKTDPVDCEWIQRLHSCGLLKGSFRPKEQICILRTLVRDKGNLVAEASDWLRRVQKSLDQMNVRVHRAVSHIDGETGMAILRAIVEGERDACKLALLRDPHCRKSEKEIAEQLTGHWREDHLFSLKQALKMYDALQKGIAEYDAEIVRKLEELEREECRGQKAPAVKNPEKARNIRKRGQEPMREALYRMSGVDLTAIDAIGVETVQVVLTEYGPDLSCFPTEKQFVSHATLAPKRPTSGGKPVKKKKRNSASTRVAAALRMAALSQRHSQTALGAYYRHIAARIGGDVAVFATARKLATYIYRLLRWGQQYVDEGAAAIEKRFHDSHIKSLKTKARKAGYNLEPMTA

SEQ ID NO: 103391 - protein, 352 aa, unidentified
MDKDSKLEFNGQHIYVGMDVHKKSWSVSVHTEQFEHKTFTQPPEVEKLTHYLQRTFPGATYHTVYEAGFSGFWLHDQLKEQGIDCMVVNPADVPTKNKERTGKTDRVDCRKLARGLRNGEIKGIYVPSRMKVEDRSLVRTRQSMVRKQTRCKNQIKSILFFYGITIPEESHWSRQFINWIESIHMERASGDFALKAHLEELKHLRQIIANLNRAILSLSRTEEYRADVLLLRTVPGISTLTAMILLTELADIFRFSSLDKLASYAGLVPDIKSSGETEYSTGITFRRNAALRGLLIESSWVAVRKDPALIMAFNKLSMRMKKTQAIVHIARKLLNRIRFVLKNRQKYVSAVV

SEQ ID NO: 103392 - protein, 341 aa, unidentified
MNEVTMIGVDLAKSVFQAHGATATGEPVFRKKLSRGQFLKFLSEQPPCVVAMEACASSHYWGREIMKLGHDVRLIPPIYVKPFVKRQKNDANDAEAIAEAAVRPTMRFVPVKSAEQQSRSMVFKTRDLFVRQRNAIINALRGHLMEYGIIAPPGRNFVKKLAEQIENPDSDLPSIVMELSRVHLDQLSVITDKVVAIERRLKEESKSDPETIRLQTAPGIGPVSAMAIKAFSPPLEGFKRGRDYAAWLGLVPVQKSTGGRQILGKTSKMGQRDIRRLLIIGAMSRVRWAIKNGPPKGSWLEQMLERKPRMLVAIALANKTARTIWAMMTKHEDYRDPIAAV

SEQ ID NO: 103393 - protein, 317 aa, unidentified
MTQKSTTLTNADHHLIAIDIAKDTLEVLFANAQSFAIANSEEGLRELLKRLQRLQDPFVICEATGGYERPLLAALAKAGIATTLLNPARLRAFAYSEGIKAKTDPLDARMILRFAQQKNLTPTAPPDPGSQLLAALLDRRSQLSEQLAREKNRLQKSPKPIVASIRRMIRAIEKELAIIDAQIEKLIASDARLEAKVKTLQGVKGVGKVTAWTLLGYLSEMPHLGRNQLVALAGIAPFNRDSGKTSAKRSIWAGRAKVRKCLYMAAQTAAQHNPVIKPYVQGLIQRGKPYKCAIVAAMRKLLIHLQSLLKIQQKALA

SEQ ID NO: 103394 - protein, 356 aa, unidentified
MHKTDPAEIIIGIDTHKETHAAVAINGLGARLGAMTLPASRRGYHEMETWAQSFGLVRAFGVEGTGSYGAGLTRFLQGRGHSVIEVNRPNRQIRHQHGKNDPLDAENAARAVLSGQARAAPKSGTGSVEMIRHLKVTRDTAVKSRTQAMVTLKTIILNAPAALRESLEGLTGKMALIRHLAALRPGAMISPTASAKAALRALARRWLALDAEIKSHDADLDALTTACAPTLKEAHGMSTGTAAEMLILVGDNPERIRSEAAFAKLCGACPIPASSGKTTRHRLNRGGHRQANAALYRVVIIRMRSHPPTLDYVRRRTAEGKGKMEIIRCLKRFVAREIFGYLCRASRPHTKVAPTS

SEQ ID NO: 103395 - protein, 344 aa, unidentified
MNITMIGLDTAKSVFQIHAVDETGKTQIKRKLSRNDLVLFFTKQELCPVVMEACGAAHHWARILTGLGHDVKLIAPEAVKPFVKKGKKNDAADAAALCAAASRPDMKFVPVKSLEQQGILALHSARSLLVKQQTMLANAMRGLATEFGLTVPKGIGRLEELTVLVDTDETFPVKARQAFAGLFDQCQALTESIVTLEAEIVAHARHDETARRLATIPGIGPITASLIAATVGDIGMFKTARHFAAWLGLVPRQHSTGGKTRLGRITKTGNREIRKLLVLGATSMVYRAPQWNSAAGLWIRGILERRPVRLATVALANKMARIAWALMTRNEVYQAKGRVAAAAA

SEQ ID NO: 103396 - protein, 309 aa, unidentified
MENIALIGIDLGKNSFHIHCQDRRGKAVYRKKFTRSKLIEFLATCPATTIAMEACGGSHFMARKLEELGHFPKLISPQFVRPFVKSNKNDFVDAEAICEAASRPSMRFVQPRTESQQAMRALHRVRESLVQDKVKTTNQMHAFLLEFGISVPRGSAVISRLSTILEDNNLPLYLSQLLLKLQQHYHYLVEQIKELESQLKRKLDEDEVGQRLLSIPCVGTLTASTISTEIGDGKQYASSRDFAAATGLVPRQYSTGGGQHCWASASEATRRYEPCWFSAPEYLYKNWNTSQAGWPTGSGSYCAGKVTLS

SEQ ID NO: 103397 - protein, 305 aa, unidentified
MNQITKEASKQTEKQSSQEGQKKGNLKLGLDVHYRQVTVAMQEENGPIKVVGKMSHQAFSNWITKKQQERWQLKSCYEAGASGYWLHRALEQQGVNNLVVVPKAMGQGGQKQKTDRRDSVQLCDNLDRYLGGNTKALSVVAAPSAQAEQRRGLIRFHRQLMQDKARYEARGKGLLCAQGIEVKGPWWKAKGWQELLQHAAGLQEWVKEQLGVWRNKILSTQKEEKLLRERIEAMAPQPLPKGVGAYSAAVLQYELRGFERFKNRRQVASYTGLCPGIHLSDGRGKEGSINRCGNATVRWTLVEMV

SEQ ID NO: 103398 - protein, 340 aa, unidentified
MSEITTIGLDLAKHVFQVHGIDAEGTTVLRKRLRRGQVLAFFSRIPRCLVGLEACATAHYWGRELAALGHEVRLMPAQYVKAYIKRNKNDAADAEAICEAVGRPTMRFVPVKTAEQQASQLLHRGREQLVRQRTMLVNALRAHLAEFGLVAAQGLRNVGELIRIVRDDDDTRVPDMARQVLQVLACQIEQIEAAVAGLEKQLLAWHKTNAVSQRLASIPGIGPIIATAIATTVADPNVFRSGRQFAAWLGLVPRQNSTGGKPRLGGITKRGNRYLRRLLINGASANLLRSKATKADPWVIGLRRRRPPLVVAVALANKTARIAWAVMLREKEYQPRAVAA

SEQ ID NO: 103399 - protein, 444 aa, unidentified
MPWLAEVLPGMAGSGEAGRREPLAGADALNYRGTEREKDMRVWCGIDWAEHHHDICLVDDDGTQLARRRISDDAAGFTVLAALLAEHAAGSAEPVPVAIETAKGLLCAALRAAGYQLYPVNPLAVSRYRDRYSVSHAKSDPGDAYVLANILRTDPGAHRPLPADSELALEIRVLARAHQDAIWDRQQTASKLRSLLREYYPAFLATFTDLTSREARAALALAPTPAQAATLRKASLRAALARAGRRRSIDAETTRIIAGLRAPQLRQPARIEQAMGTQALGYQRALDAAAANVTDLEQALTGSFDQHPDAEIITSLPGLGPILGARVLAEIGDDRSRFQDARGLKAYGGTAPVTRASGKRRSVTRRLVRNKRLCQAGYLWAFSLLTASPGARAHYDRRREHGDSHPAAARHLANRYLGILHYCLQNNQAYDEARAFPAGLADAA

SEQ ID NO: 103400 - protein, 417 aa, unidentified
MEDRSEARAVRYIALDIHKHYCVVAGVDREGRVILQPVRVEHADLEGWLKKKLHSTDHVVIESTTNAWHVYDLLSPWVERVAVANPIRVKQIAQARVKTDIRDTLILARLLAANLVPEVWVPPAHVRELRQLLSQRRQLVETHTQIVNRMHSVAHRHHLNHARGKRFNEKTTGWQKDKRLSTLEQFQLELEMENRAYIEKQISRIGKEVAKMSHQKPWAESMTYLMQLPGFGVITGMTVLAAIGEIQRFDSARHLASYSGLTPGLEQSGTKNRGKGMTKEGRRELRWALVEVAQRAVKSDPVWKTRFQEMQKRMHRNQAIVAIARRLLELVWYVLTRRQPYRHFSQERIAYKYLTWAWQMDEAARDGLTRQQFTRYYLMRLGIGHDLTRIALDPKHPRRIASEAELLALRPELDRIE

SEQ ID NO: 103401 - protein, 337 aa, unidentified
MTIIRVGLDTAKHVFQVHGVDENEQPIMRRQLRRGEVERFFAKLAPARIGLEACGASHYWGRVLRGLGHEVVLIAPQYIKPYVKRGKNDAVDAEAICEAMSRPGMRFVPVKSAENQAALMLLGVRDLLVKQRTMLINAMRGHAAEFGVIAAKGRVNVAELLQRALAEEAGVPPLARDMLGLLSAQLDALAAKLKAIEAELMALYKADPVSQCLATQPGIGPIGAVSFALKVPDPQAFASGRHFAAWLGVTPKENSSGGRHRPGRISRQGDEGLRRLLVLGATAVIRFATPGRASPWLIDLLARRPRKLAAVALANKMARTLWAMMVSGEVYRRPRPA

SEQ ID NO: 103402 - protein, 334 aa, unidentified
MVQGRAVVEDTGQKSSVRGEVKVMGGGFIGIDVSKGQLDVAFRPEGVHLQVSNDPRGIARLVRMLERWQPALVVLEASGGYEALLFERLSAKQIPVALLNPRHVRQFARASGRMAKTDAIDAVVLAHFAEVMKPEPRRLADEETRKLRILVGRRYQLIQMMTAELNRQSHSLAALREGFTATIRCFKKQIANIDKQVLALIQAAPELCAKAELLRSTPGIGAVASSTLLARLPELGTLDRKRIAALVGVAPFNRDSGKLKGKRAIWGGRSDVRAVLYMSTLVAIRRNPVLQDFYQRLRRAGKTSKKALTACMRKLIVTLNALIRHRTPWAPATC

SEQ ID NO: 103403 - protein, 335 aa, unidentified
MMEITTIGLDLAKHVFQVHAITVDGTVLKKRLRRGQVHAFFAGLRPCLVGMEACATAHFWARQLLELGHQVRLMPAQYVKAYLRRGKNDAADAAAICEAVTRPSMRFVPVKGETQQAALMLHRVRDLLVRQRTQLINAIRGHLAEFGIVEAQGPWNVPRLLADTEDARLPELARGLIRLLAGHLDELELRIAEIDAQIMAWHKADPVSQRLATIPGIGPLAATAIAATVPDPAVFRSGREFAAWLGLVPRQNSTGGKTRLGRTSRMGDAYIRRLLVIGAQSALWCSKATKANPWVQALLAKRPRLVVAVALANKMARIAWALMARQTTYRPAAAA

SEQ ID NO: 103404 - protein, 351 aa, unidentified
MLLIGVDYHPSFQAIAFFDEETGECGEPELNHSDGQAERFYRGLQQRGICVRVGMEATGYSRWFERLLAELGIEIWMGDPAEIKAKRVKKRKTDRNDALLLLRLLRENNFPQIWVASPENRDLRQLLWHRHRLVQMRTRIMNPLQALAMNEGYRWKKKLFSEQGRAQLEKLALAPWASRRRRELLELLDRMNPTIEELTSAVEQEAKKRPEVLRLMTHPGVGPLTALAFVLIIGTPTRFQRGKQIGTYVGMIPCEDSSAHKQRLGHISKQGNSLLRFLLVEAAQAAARSHPDWRRRYMHLAIRRHQSIAKVAMGRKLAIRLYWMWRNGSEYSQSLEFGSYAGQLGTGHGVK

SEQ ID NO: 103405 - protein, 341 aa, unidentified
MSIITVGIDLAKHVFAVHGVDDNGKSALVKPKVSREHLLPLVAQLPPCVIGMEACSGAHHWARLFRQHGHTVKLMAPKFVTPYRMGGKRGKNDAADAAAICEAVTRPNMRFVPIKEEHQQIILCLHRTRQGFVEERTATYNRLRGLIAEFGIVLPQKVANLRRHIGARLEDLPGFANQCVGDLLSHADQLDVRIAEYDRLIAKVAREDARSKRLMQRPGIGPVTASALLASIGGGHDFKNGRQVAAWIGLTPGQHSSGGKDRLGRITKAGDHYLRTLLVLGARTILNTLGDKQDHFSRWARNLVARRGYGRAAVAIAAKNARLAWAVLRYGEDFRLSPSAA

SEQ ID NO: 103406 - protein, 428 aa, unidentified
MKKSEYLSTLFVGIDVSARENVICALNFEQEKLLEFAAPNSQPGADEIADKLSVLLSSCNFTHVVIALESTSFYGIHIANFLSSCALLAPYNTYVYCLNPKMIANYKKSFIGMGKNDPIDAFVIADFARVGRITSEPWRGSQFLALQRLTRHRLHLVECLTREKTYMLSNVFLKFSEFATLTKGNHPFTNKYGATASAVLTDFLSNEQIAEASIEDLIAFVCEKGKNRFSNPQEVASILQAAARNSYRLDKCLYEPLTIAIASSLNCLKAFEAEIKSIDKAIEKTVSGLNPTEYLCLRSIPGIGPVFASGILAEIGSIQAFDSHSALAKYAGIVWTEKQSGDFQSDDTRMSKAGNKYLRYYLIEATGSVVRHLPEYNAFYQKKFDEVKTHQHKRALALTSRKFIRLVFGLLAKNQLFVPQGVDHTPNS

SEQ ID NO: 103407 - protein, 339 aa, unidentified
MTKYVGLDVSQKTTVLCIVDGEGHRLWRGECSSSPDQIVHTVLQHAGAGASIGVETGPMTPWLVHELRSRGLDVICLDARHARAALRMQLNKTDRNDAEGLAQIMRTGWFRAVHVKSFDAHRARALLGARQQLVGMVTKLSNHIRGVLKTFGMLPGSVRGRSFAERVELLVAERLDVAPIVRPMLTALSKLREQIAAFDKAIRAEVKQSRECRLLMSVPGIGPVTVLAYVSAIERPDRFRRSRLVGAHLGLTPRQYQSGDVDRSGHISKCGDTLARLCLYEAATVIMTRVKRPLGLKIWAMKIAKRSGTNKARVALARKLAVILHSIWRTGEAFCWGTH

SEQ ID NO: 103408 - protein, 352 aa, unidentified
MPIIAFDSHKHYTQACVETESGVRLAEERIAHRKGVFGGFLSRWEPGSPVAVETIGNWYWIVDEIEAAGMKAQLVHARKAKLMLGCVNKTDKLDARGLNRLQRAGTLPTVWIPSSDLRDKRELCRARMLFTAERTRLKNRVHSIIDKYGMQEMFEEVSDIFSAKASATMGACIKELPEQTRYVIRNLLGELKTVESRIEQLEKRIQRVYRRSRQIELLETLYGVGPILSVVIDQEIGDVNRFGSPEQFASYAGVCPRVHSSGGKTRYGKLRDDVNHYLKWAFCEAANVVSRYYRHYPDRHVSKLYGRLVAKRGHSKAIGAVARHLAEAAYWVLKKQESYREPKSRMVSSTAI

SEQ ID NO: 103409 - protein, 341 aa, unidentified
MKHFVGLDVSMKETAICVVDDAGQRVWEGSVPSSANAIAATMREKAPNLVRAGMETGPQAVWLWHALWEKGIAVDCIHARRAAAALKLQANKTDRNDAFGLARLVHSGWYEPVAIKSFDRYRMRAVLTARERIVRMCTTMINQIRGLAKTFGLQLSAGKGQVFEQSVRRALPDDAILRDLFESLLSVLSGLKDQRRAFDRQLARFAREDEACRIISSAPGVGNLTAIAFVTAVDDPARFRSACDVGAYLGLTPKRYQSGEVDIGGRISKTGDRLTRKLLFEAATVILYRASPSIALKQWGLRLSARSGSWKARVALARKLAVTLLTMWKTKTMFENRSFAT

SEQ ID NO: 103410 - protein, 369 aa, unidentified
MPHVTSIGLDVHARSVAAAAFNPFTGEVVHRDFGTDAAEIAEWALGFEEPRACYESGPTGFHMARELRALGLDCAVAAVSKMQRPAADARRKNDRRDAEFIARMLATHNIVEVPLPDAAVEAARDLDRALDDATVEYRRARQRLNMFLIRLGHVWDERNADGTRKGSWTRAHWRWISGIRLEGPQRDVLEYYVTAARCAESDRRQLEKKVLALARTDRWRPAVEALSCIKGIDTLTAFRLAAEAGSFTRFRTAPAFASWCGLVPSERSSGETERRGGITKTGNRLARTALVESAWHYLTCTPRPKPPAPGADVPAAIRARADDCTARLCRRREALAAAGKSSCKANAAVARELACWVWEIGRRAEGTLS

SEQ ID NO: 103411 - protein, 354 aa, unidentified
MTRCAKYVGLDVHQATCIAAVRTDAGRVIARSVLPTEAAAMTTYFRDMRGTVQVALEEGTQAQWLHDLLVPVVDRVVVVDRRGTTRQGNKGDVHDAEELAELLRRGACRAVYHASPERATLREVARTYQNLVDDATRVMLRLKALFRARGIRTPGRAVYRRGERAAWLAQLPGAGVQFRAAALYAELDVLLTLRPTAKAAMLAEAARDPAWALLRTIPFLGPVRVALLLATMQTPWRFRTKRQLWAYAGLAVVTRSTAEYQLDGGRPVRRTRPPMTRGLNRNHTPLLKNTFKSAATAATARPGPWQACYQAMLERGMRPELARVTLTRKLAAVTLHVWKTGERYDATKLMGPAR

SEQ ID NO: 103412 - protein, 305 aa, unidentified
MSSQVLDAKVWPGLAELQVSNTPQGVAELAAWCKAQGVELAVMEATGGYERSAFRLLWAHGVAAAVVNPRQVRRFAEAMGFLEKTDRIDAGLIARFAAAKGVEPQPPPPQAQDRLAALVTRLGQLTALKVAQENQRRLVEDETVDASIGEILSLVNGQVRRFETQIAELLQADPLWRELDRVFRQTKGVADRTVARLMAQMPEIGTLSGKEVAKLAGLAPLAKESGKQKARRSIRGGRPGVRALLYLIAGLVARYEPDYAAFRQKLLNAGKPRKVVRIALARKLLVRLNAKAREVRNNLPTSLHA

SEQ ID NO: 103413 - protein, 409 aa, unidentified
MERQLERCCGLDVHKESIAACVRLGGRTGKAEQYVQTFGTTVAELLVLHDWLAAHGVTHVAMESTGVFWKPVFYALESDFTCLLVNAAHIKQVPGRKTDVQDCVWIAQLLEHGLLRGSFVPPAPNRDLRDLTRYRKALIHDRTRVANRLHKALEEAGIKLASVASDILGVSGRAMLAALVQGTTDPAVLADLARASLRRKLPALRQALANRFRPHHAFVLGQLLAHLDYLEEAITTISTEIERVMAPFAEPLRRLDTIPGINQRTAEVILAEMGPDMSAFPSARHLASWAALCPGQHESAGKHKSGKTRKGNRWLRTALIEAAAGASRAKNSALQARFRRVLRHRGPKKAVVAVAHALLRMVYHVLADGTVYREAGADYYDRHHSQRITRRALQTLERQGYRVTLEPAA

SEQ ID NO: 103414 - protein, 397 aa, unidentified
MHQGTVVACLLIVLKDGKVRKQMRTFGTTTRELLSLREWLLSEGCTHVAMESTGVYWKPVYAILEGALEIVVANAQHVKKVPGRKTDVKDADWIADLLCNGLLRSSFVPPQPIRELRDLMRYRRKLVESQTAERNRLLKLLETANIKLASVASDVFGVSGRLMLQALAEGKATPQEIAQLAKGLLRKKIPELEPALEGRLEEHHRFLLELQLRRLQAVEDLVVLERRIQEKLKPYAAQLALLQEIPGVDWTLAAVIIAELGVDMKVFQSVSQAASWAGVCPGNNESAGKRKSSRIPKGNVYLKTALVEAAQSAAKAKGTYLRDKFYRLKARRGYKRAVVAVAHKILVAIYHMLSQEVSYQDLGDVYLDKLNKHHLTRNLVHRLERLGYTVTLEQKAA

SEQ ID NO: 103415 - protein, 322 aa, unidentified
MTVYLGIDIASKKFDAALLRNGSYRCKAFANSVAGFSALLKWSGEDDFSEIHACMEATGNYGTALATFLYEKKIKVSVVNHSRIKGYGMAELSRTKTDKSDSKLIARFCRATIPALWRPVLKPVRILQALVRRMDALKGMLRMESNRADKADASIQPSLQRISSHLKEEIETIRQEIKKHISSNDELRKQEALISSIPGIGSVTGAVILSFMADKQFSKAKEVAAFLGLNPRHHQSGSSVRGKSRMSKTGNAYLRSAMYMPALVALKHNPDIRAFGHRLRLAGKPGMLIVGAAMRKLIHIIFGVLRSGTVYTPQITGEPACR

SEQ ID NO: 103416 - protein, 354 aa, unidentified
MQITTIGLDLAKHWFQVHGVDANGHVVVRRRLRRSGVIAYFRSLEPCLVGMEACATAHYWARELSALGHTVKLMPPAYVKAYVKRNKNDATDAEAICEAVARPSMRFVPVKGAEQQSVLMLHRARSLLVRQRTMLVNALRAHMAEFGIIAPQGRRHVEILRQTIAHQQERLPELARSILQTIADQLNDTMERVREIEVRLVRLHRQNPISQLLATVPGVGIMSASAIAATTSNPTLFRSGREFAAWLGMTPRQNSSGGKDRLGRTSKRGDKYIRSLLIAGAVAVLRHARNRPTRDGEWVRALLARKPTKVAAVALANKTARIVWAVMMRGDGYQAKAVLGQPAEWPSAHFSMRG

SEQ ID NO: 103417 - protein, 381 aa, unidentified
MFTERTSVGLDVHARSVAAAALDGLTGQVWQETLRPDSEAILAWLGQLPGPTAVAYEAGPTGFGLARSLTSAGIRCVVAAPSKLQRPSGDRVKTDARDAQHLCRLLRLDEITAVTVPSIEQEAARDLVRAREDCRGDLMRARHRLSKLLLRHGHVYALGDRGQAWSLAHDRWLRQLRRDAADLGWSAGTRSAFDTCYETVTMVTDRRARLDAEIAAMAADSQFTPVVHRLGCLRGISTLTGFGLAVEIGDWSRFTGKTIGSFVGLTPSEYSSGQSRSQGSIVKTGNSHARRLLVEAAWHHRPAYRPGKTMLDRWKLAPAKARMRGDAGNRRLQRQWAKFIARNKRGTIATVAIARELAGWCWSLAVLDEETSERETEAIMP

SEQ ID NO: 103418 - protein, 343 aa, unidentified
MQTIATIGLDIAKSVFQVHGVDAAGQMVIRRQLKRRQVLVFFAKLPPCLIGIEACASSHYWARELQAVGHTVRLIPPAYVKPYVKRQKNDAADAEAICEAVTRPNMRFVPIKTIEQQGCLVLHRTRHLLVRQQTATINSIRAHLAEFGIVAPVGRRGVEHLLEVVADANDTQVPEVARACVAALGVQLQQLKAQILEFDRRILAWHRSSEASRRLNHIPGVGPLLATALVASIADPKAFRSGRDFSAWIGLVPKQNSSGGKDKLGNISKQGDRYLRSLFTAGALAVIRYAKIHGTKHRPWLVALLARRPTKVAAIALANKLARIAWALMTKGGRYRQPAALRV

SEQ ID NO: 103419 - protein, 395 aa, unidentified
MFIVGIDVAKRSHEVCMITSDGQTVQRPFSIRNNCTGDNLMLEEIRKHTNIKSQIVFAMESTAHYWLALFTRLRKDGYHVILLNPIQTSAMRDMFIRKIKTDAKDSFIIAELIRFGRYAESNVAQDRLLALKELCRNRFYLVDMAGDLKRKLIALIDRVFPEYEAQFDTIFCKSSVALLKKYPTPQRLSNAHLDKLTELLWNSSNGHFGEWKARELKDLARNSFGVEDCDGAYSTLILLMLDQIQSLSGKADALEKEISRLFQSFDTTVTTIPGVGPIIGAVILSEVGDISRFSSADKLAAYIGVDPSVNQSGEFQAAHAHMSKRGSPYLRRCIWMASQVAVQRDPMFRAYYEKKAAEGLKYMTIIGHVTRKMTAVVFAILRDHKVYEPVLPTAA

SEQ ID NO: 103420 - protein, 342 aa, unidentified
MEQIATIGLDIAKSVFQVHGIGKNGSVVVQRRLRRSQVLGFFSKLLPCVVGIEACASSHFWAREIGALGHDVRLMPAAYVKPYVKRQKNDAADAEAICEAVTRPTMRFVPVKSPEQQSIMVLHKTRQMVMRQRTKLANTIRAHMAEIGIVAPIGRKGLELLLEIIGQDEDGRLPEASRSCLRMLADQFSMVKAHILELDRAIVADVRRNESAKRLMAIPGVGPLLASAMVAAVPDPAMFRSGRNLAAWIGLVPRQNSSGGKERLGGITKQGNRYLRQLLFVGAMAVIRYAERHGTRRPWLVRLMARRQTKVAAAALANKTARMIWAIMTTGERYREPLLQAA

SEQ ID NO: 103421 - protein, 448 aa, unidentified
MSKLHVGLDVSQKSVATCFVLDDGTEPVKRFSFEHNPAGVDKLVAKINATAEDLGIDQVLIGMETTGLLWWHLAEALRNCAELQHLQPRIYAINAKLVAHFKKAYAEMDKTDPGDAFVIADRLRFGRLPRLAEPDERYLAIQKLTRHRFHLIHSLAGEKNRFLTHLFLKFSAFCQEEPLSDPFGAASSALLTEFLSVDEIAQMPVEDLTDFLVEKGKNRFPDPEAVAKAIKQAARNSYRLSKCLADPVNIVLAMTLENVRFFEKQIAAIDKAITRELAAFPGAQVLLSVPGLGPVFVAGIIAEVQDVNRFDTDAQLARFAAIVWKKNQSGAFEGDDTPMMRSGNEYLRYYFIEAANSLRMHNEEYAAYYQTKYREATTHHHKRACVLTARKLVRLVHTLLRKGQLYQTPDQRKESHAVLPAGMTPGELARHVVRRRQAKGRFRVHLDH

SEQ ID NO: 103422 - protein, 371 aa, unidentified
MQAEYDGRQFVGIDLHRRRSVIVRMSEAGEKLATVRIDNDPVALGLEIAKAGPDPEVVLEATYGWYWAVDVLAAAGARVHLAHPLGVKGFAYRRVKNDARDAADLADLLRMGRLPEAYVAPPAVRELRELVRYRAKLVAWRSGLKASVHAVLAKQGVHIAVSDLFGVGGRDLLARAPLDGAYRGRLSSLCRLIDAVDFEIDAVAGPIRARLAGHRGYTAIQAIPGVGPVLAAVFVAEVGEVDRFPGPAQLTSWAGLTPRHRESDLGGAPGTDHQAGLDPRSVGRGRGRPRRPAHRRLADLHPRPHRRTTRTQHRHRRGGPQTAHPRLLRPPRRTHPRPRTGRRGGVSRFGRDRTRGRSVSDPRRSTARPPA

SEQ ID NO: 103423 - protein, 447 aa, unidentified
MRSTIGTAFTETSGGPAPSGPRLYVGIDVGRRFHQVAAIPEARMENGSWERAPVRRIATSGAGFRELTSWLETTAIAPALVRIGCEPTGGGYSRTVAGWLERHGYEVQWLQNWAIHDRRQLMIGKQAKTDALDARLIARLVYERDRLSLVGGFLHRPPRNTDALRTLVRGRLRLMDQHIRFRQQLTAVEDVLFPELKDFYRSSVTSSSARILLESFPTPESVAAADPADLYRVIVTVGRNRRMVPRLLDFQLAAADSAGLTDDREPLVRAQHWLLYQLRLLDRQLEDAEAAIGETLAEWPEQDRRVLDSFPGMSQHRQAVLLSCIGDLSTFNSDRQLRKLLGWYPEAYQSGTAVHKHHLGKSGNRIGRHEIWLWSLQMLSPLFPPNPFRTYYQRLRGRGMSGSVAIGHLAGKLISVLFFCLHSGQPYDPVRHARDLGLGDVCTELEA

SEQ ID NO: 103424 - protein, 313 aa, unidentified
MAQRTPAVGIDVSKDWLDVAVYPTGERFQVANDAAGWRELRRQLKGLAARAIGIEASGGYEWQAIRVLVQAGLPVRMVNPWKLRQFARACGLLAKNDRLDAYAIARFVDTLPCRAARHDPDLARLAELVTVRRQILDARQQCANQTELLRDRELRRLLTRRIRQLDTDAARLDRRIACEIATVPALAERHALLCSMPGVGAVLAATLLAFLPELGSLTNRQAAALVGVAPYDFDSGKMRGSRCIFGGRAKVRHVLFMAAQVAAKWNPALQGFKERLIGAGKKPKVAIVAVMRKLIVTLNAMLRDNANWQDKTA

SEQ ID NO: 103425 - protein, 347 aa, unidentified
METGYDGRQVVGMDLHRRRSVLVRMSEDGRRLGTARIANSPVALRQQIARAGVAPRVVLEATYGWHWAADTLAAAGAEVHLAHPLGVKTFTYRRVKDDVRDAADLADLLRMGRLPEAWIAPREVRELREVTRYRQKLVGLRTNCRNQGARRAGQARHPGHLRRHLRALGHPVAGRAQPAAAVRGEGGLAAAADRRAEHRDRHAHRRDRRPAGRPPGYKLIQQLPGIGPVLAAVIIAEIGDVTRFKTAGQLASWAGLTPRHRESDVKVIRGHVTKQGSRLLRWALIEAIQHQPAGSRTRQVKDAIIARRGKQATNIAKVAAARQLLALVCYGLRDGHIRALSAPARAA

SEQ ID NO: 103426 - protein, 451 aa, unidentified
MEEAISMEVIHPQAAGVDIGSRSHWVAIGQSEQDVREFGVFNQDLFALADWLMEKKIKTVAMESTGTYWQNLFAVLSARGFHVILCNGKFTKNIKGKKSDVMDCQWIQKLHTLGLLASSFLPEEKTEQLRTYCRHRSNLIHATASTSKKMQKYLRLLNFRLDVVVKDICGLTGLLIIRAICEGETNPEKLASYRHGNCRKSEAEIASALQSNERKDYLFALGQELETYGHLQLKIGQCDKEIAKMLEEIIGSDDHKRQHHIDPKPHKRINKNTPKDIDPNLRSYQMFEGTDLLAIEGMSYSTVLALMSEVGIEGIRKFPTAKHFASWLRLAPNNEVSGGKVLSSRVPKGSNRLKIALRNAANAIGNLKDSTPLRDFFQRVNFRKGRVSAISATARKLAVIIWNMVVKGVPYVNPEGYLFLDQKRKLGLVKRIKKQIDKFGLTNEDIGFVSS

SEQ ID NO: 103427 - protein, 313 aa, unidentified
MTEITIGVDISKSHLDVFRLEDEAARRFENSAAGFRALVKWLGKAAVARIVFEPTGPYHRAFETALSGKFPLVKINPLQARRFAEACGTRTKTDAVDARMLARMGAALALEPDAPVNEKLNELRDLQVARTGLIKERTRLHNRGHVQANPVLKRQTKARLALVERQIAELDAEIARQIAQDQPTARKRQILCSVPGLGPIAAALILTFLPEIGTLDRKQAGSLAGLAPHSRESGQWKGKSFISGGRKPLRDALYMPALVAMRFNPDLKAKYTALRHVGKPAKVAIIAIMRKLLETANALVKGDHLWAKKSSCS

SEQ ID NO: 103428 - protein, 322 aa, unidentified
MRYIGIDVSKATFVVAYSSDKGGEIRTFNNTTAGIRQFIGTLPKDGSIHCVMEATGNYSALLLYMLNVAGITVSMENPLKVKNFAKAMLSTIKTDKSDARLITLYGEKMNPRPFKVQGEAILRLRQKRTVIRQLTKQITAMSNLRGSLACLPVPDKGATHTVDETIKFLEKKRDRLQAELTDLVEVEFSRQLALLTTIKGIGITLATALIITTGGFTYFQNAKQVSRYLGICPTYEQSGTSVNIKGHINRNGDAYTRGLLYIAAWPASRFNAQCKETYTRLRQNGKSGKLAMIAVANKLVRQAFAVVAHDKEYVDGFVSNRP

SEQ ID NO: 103429 - protein, 340 aa, unidentified
MKLIRVGVDLAKSVFQVHGVDRSERTTWRRRLRREDWIDMLRERLEPGGEVGMEACGGAHHWARELQKLGYRVKLIAPQFVKPYVKSNKHDAADAEAICEAMGRPGMRFVPVKTVEQQDIQAIHRVRASLVEQRSAKANQIRGLVAEYGLVAPRELLHLRRALRRWLEDEGNGLTMRFRRLLRGLQDELISLDERIAELDREIEEIAKSEPAAKRLMQLRGVGPIIATAMLATVGDARQFRNGRQMSASIGLTPKQHSSGGKERMLGISKRGDAYLRSLLIHGARAVIRTARAKDDPLSRWVIRIADRRHPNVAAVALANKTTRIAWAMLSRETNYQPAI

SEQ ID NO: 103430 - protein, 342 aa, unidentified
MAEVTIIGVDLAKNVFQVHGAATDGSVLFRKKLSRPQFARFMAEQPSCCVAMEACASAHHWARQMTQQGHEVRLIAPHYVKPFIKRQKNDAADAEAIVEAAQRPTMRFVEPKSADQQARAVAFRTREQLVKQRTEAVNALRSHLYEFGHVAPEGIGYVPRLERVVADPDAGIPDLAREICRMLLEQINHLTDRIKALKAKIAAISDEAELPRQLQTMPGIGPITALAVETFAPPMEQFRRGRDFAAWLGLVPRQHSTGGKQRLGRTSKMGQRDIRRLLVIGATAVIRWTSRRGAPKGSWLARMLERKPIPVVAVALANKMARGIWAMLTRGESYRGPVLIGA

SEQ ID NO: 103431 - protein, 263 aa, unidentified
MAQQMIIGIDLAKHVFQVCMVTPTGTLKTNTTVARGKLLTFMARPPPALIFMEACGGAHDWARRFCALGHDVRLLAPQYVTPFRRGQKNDPNDALALTEAGQRPHIPTVPIKTVEQQDIQALHRVRERRMKNRTAVVNQVRGLLLEYGIVIPQGIARFRTRLPRVIEEADHGVSFVLRDLLQSLQSDLHALDTRVVEVTCQLTRLSHELEACQRLQEMEGIGPLRATALVAALGNGHDFQTGRQVAAWLGLVPRQQSSGGTTR

SEQ ID NO: 103432 - protein, 371 aa, unidentified
MLYLAIDQHSKQITVCVRNADGDDVLRRQVSTRPEKIKAFFQQLIEMDSEFMAILEVCGFNDWLIAELHKWKCREIVLIHPERPSKKKTDRRDARKLCDLLWLNRERLAVGELVHGLRRVYIVSQQERENRQLTALRKNLGQRRTRTLNKIHRILNCHNLMWDYPTKTFQTQLGRRWLEKLELPEIDRLEMDALLQEWKTWDEQITQVDEKIAERASQREPGEILNSTQILMTAPGVSHYSGLAMASRIGPVERFPRPRSLANYFGLTPGCRNSGNTQDRLGSITKEGSKIARFILGQLVLHFLKHDPKMRSWYRRIKTRRGSNIARVAVMRRITTIFWHMLKHQEAYSIGGPPPRLRKQEDPPTERSDAA

SEQ ID NO: 103433 - protein, 331 aa, unidentified
MDEVKRFVGIDVAKVTLDVFIGSTGVAFTVANDEAGIQQLLRQLAAADFVILEATGGLETPVASALAAAGIAVAIVNPRQVRDFARATGRLAKTDRLDAEVLARFGEAVRPEARPLANEQAQALEALVTRRRQLVEMLTAEKNRRARAPKLLYRSIDEHIRWLEKRLSGFDDELGELIRTTPLWRERDELLRSVPGVGKVLSSTLLAQLPELGMLNRKQIAALAGLAPFNRDSGNMRGSRRIWGGRAQVRRVLYMATVAGIRSNPAIKTFYLRLRAGGKPAKPALTACMRKFLVILNAMLHNKTHWQTPALISPTSPFSPLLGAVSKHGCC

SEQ ID NO: 103434 - protein, 356 aa, unidentified
MGEGSWVGLDVHARSVVAGVIDQGSGEVRSLRLRSGGEAAVAWLQTLPAPVRVVYEAGPTGYGLARGCAEAGIDCVVAAPSRVRAAADRVKTDRRDAERLARLLRLGEITPVRIPRLEEEAARDLVRAREDARGDLMRSRHRLSKLLLRHGLVYDATAWTRTHDAWLRRQRFEGGPLAIVFDECYGRMLDAKSRRDTLDKAISELAATPPYVDVVERLVCLRGVSTLTAFALTVELGDWHRFRPQSLGPFLGLTPSEHSSGERRRQGAITKTGNSHVRRLLIEAAWHQRPPSRRSITLERRRAGKPLAVQAQAERSARRLHGRWHALETRGKPRTIVVVAVARELAGHCWAIATMD

SEQ ID NO: 103435 - protein, 348 aa, unidentified
MEHYAGIDVSLECSSVCVVDASGKIVREGKVASEPEALVDYFGSLRLPVVRIGLEAGPLSQWLYAAMQQAGLAVELLETRHVRDAFKAMPVKSDRNDARGIAQLMRLGWFRPVHCKSLAAQELRAMLTARKLVQSKLRDVENHLRGILRGFGLKVGKTTARSFAVRIRELVEGQANLETIAQALLAVHAVLLREFNGFEKRVRMMAREHVKARLLMTTPAVGPIVALTYAGAIDDPARFKSSKQTGAHFGLTPKKYQSGQTDVTGRISKIGDAAVREALYQAAHVMLTKPVKGCSELKSWAMRIARRAGMRKAKVALARKLAVVMHRMLADDKPFNPTARTTPVAVAA

SEQ ID NO: 103436 - protein, 374 aa, unidentified
MRDHSEAFVAIDTSKLRNAVAIAEGGRTGEVRFLGEIDNTPAATAKLVRKLAGQYERVAFCYEAGPTGYGLYRQITGLGHACIVVAPSLIPKKAGDRVKTNRRDALAMVTQFRAGELTAVWVPDPRHEAMRDLTRARGAAVEDLRRKRQQVSAFLLRLGRHYAGDKTWTKAHMSWLASQKLEHAEQRIAFEEMLLAVRQAHERVARLETAIRAAVPDWSLAEAVQALMAMRGIDMVSATAFLAEIGDLSRFQTPRELMAYLGLVPSEHSTGETVKRGPITKAGNRRARRTLVECAWSYRHPPRVGREKQDKVAAAPRAVREIAWKAQNRLYGRYRALIRRGKLKTVVVTAIARELAGFIWAVHREIGPAQAVAR

SEQ ID NO: 103437 - protein, 454 aa, unidentified
MAKRRKKSKFNVQSLPEHLRHINLNAAGIDIGSERHMVAVPEGRDKVSVREFAAFTADLHALANWLQQCGVTTVAMESTGVYWIPLFELLDRRGFEVKLVDARHVKNVSGRKSDVLDCQWIQQLHTYGLLAGAFRPTDELCVLRSYLRQREMLTQSSSMHIQHMQKALQQMNLLLHNVVSDITGVTGMKIIKAILAGERDPQMLARNRDGRCQNTSATIAKSLVGNYREEHLFALQQAVDLYETYQVKIADCDEAIVKHVAKQPDITDDTLPPGEKPIQARERIRSGVDVRELLFKKSGVDLFAIPGLAADTLLTLTSEVGFDMSPWKTIKHFTSWLGVCPGTKISGGKVLDKKTKRRPNRATQAFRMAAATQARSKTALGAFYRRIKARAGGKQAITATAHKIARIYYTLLTKGTTYVELGQEAYEQKYKQRRIHHLMTQAKSFGFQLVPCET

SEQ ID NO: 103438 - protein, 356 aa, unidentified
MSKVTASFENQNVYVGLDVHKRSWTAALYLNDQFIRNIHQPPHPQALYHYLAHTYPGATYSCAYECGKFGYWIQREFRQLGIECLVVNPADIPSTHKDEVYKTDTRDARGIGEALSKGQLRGVYVPYEEQEADRHLVRQRKKIWRDLVRCKNRIKGFLDYKGIEVPPQYDNANWSRNFITWLSQLEFAHSSNRVTLDYQLTEMELLRKELLSISNAIRKLMRSKKYNRLYYLLRSVTGIGPLTAASLLTEIGDMSRFKNFYHLNSFIGLLPMEHSSGERELKGRITVRKHRQLRSDLVECAWTAKRTDPALALYYSEQIKRGKNGKAAIVKVARKLLSRIRYVWLSGEPYQPSVVK

SEQ ID NO: 103439 - protein, 341 aa, unidentified
MLHTGIDLHKRDLTVTTVDAAGQLVKTARLRTTRAAVTGYFAALGAEPSEQRAVVESTSTWYWLADHLRAAGVDLTLGHSKYIKAISYAKVKTDAVDAATLAQLLRSDLIPAAHMISPELREPRDLLRQRLVLVAKRTRCKNAVAGLLAQYNVTTPAELPALPRFQCDLHAEQRVLLTAQIKRLERQLLPTLIPDADVQRLLWVPGIGKVAAFTLHLEIDGIARFADARHFFSYCRLVPGAKNSGGKHRHRRMKDGNRYLKLAFGHAAVRAIQYYPEIQAWYRQRLRTKGTMVARALVAKELARIVYHVLAKQQDFNGVFKGATLSRTKKLQWPRIPSPAA

SEQ ID NO: 103440 - protein, 418 aa, unidentified
MQIETDEGEIIERVAALDVGKAEVVCCVRVPGSNGQRMQEVRTVSTMTAALLALGDWLAGLGVTRVVMEATSDYWRAPFYLLEDRFETWLINAKDVKHLPGRPKTDRLDAVWLCKVAERQMLRPSFVPPPQIRALRDLTRYRVDLLVARTAEKQRAEKLLEDALIKLTVVVSDPFGVSGRAIMAALVAGERDPVALAGLARGTLRSKTDRLTEALTGRFTEHHGFLLEQMLHRIDALNADIAAVQARIEGQLGELAGAVARLDAIPGVGPVAAQMILAEIGTDMSRFPTPAHLTSWARFAPGVNQSAGRPKGKAGTGHGNRYLARVLGEAAVGAARTDTFLGERYRRISRRRGKNRAIVAIGRSILVIVWALLSDEQAQFIDLGPDHYASRTNPERKVRQHIRELQELGYTVTLNPAA

SEQ ID NO: 103441 - protein, 351 aa, unidentified
MVIIGVDYHPSDQYIAFVDTETGESGERRLNHSDREAERFYRDLKLRGVSVRVGMEATGYSRWFERLLAELGIEVWIGDAAKIKTKRVRKQKTDRNDAQLLLKLLLENTFPRVWVPSPENRDLRQLLWHRHRLVQMRTRIMNQLQALAMNEGKRRKKKLWSEQGRAQLEKLPLATWAARRRQDLLELLDRMNPPIEELTRAAEQEAKKWPEVLRLMTHPGVGPLTALAFVLIIGTPERFQCGKQIGSYVGLIPSEDSSAGHQRLGHISKQGNALLRFLLVEAAQAAVRCDSDWRHRYLHLAMRRERRIAKVAMARRLAVRLYWMWRNGWEYAQSVEFGSHTGQLVTGHGVH

SEQ ID NO: 103442 - protein, 374 aa, unidentified
MPRHQRYWVGLDAGHLETAVCLVDAEGHAFFEAMTETRAAPIRDILRRFGVEPVQTVTIEAGVGTQMVRDLRSFGFPVQVVDVRKSSKFLAIRRHKTDANDARGLAELGRVAQSMGPQVFVKPVEHQDIRIMINIRRTLLKQRARTDALLQSIFRLHGANIKLLNGRGSLAAEVASQLRLLRTSGVTIRVDLDPLVSMGEALRSHISNIDREMRTMATSIPACARFQTIPGVGTITALSFYSAVGDPYRFKNNRDVGPYLGLTPNLYQSGVTARRGRISRYGNKLTRSHLITAATVLLRTIKTESSLRTWGLQLATKIGFLKARVAVARKLAVIMMAMWKTSTTFHPDESRPRLLHPEQAGLDPVRISGSTIPL

SEQ ID NO: 103443 - protein, 446 aa, unidentified
MRWTASQAPCAETPEPLAPPQWCVGIDWGAQRHHVCVLTAARQRLGERTVEHTGDSLNQLATWLTAVAADHPEHVAVAIEVPRGAVVATLVERGLQVFALNPTQLDRLRDRHTVAGAQDDRRDAFVLAAALRTDPHSFRRVHLDAPQVLLLRELSRAAEALRAELRRATNRLREQRQRLYPQWRHLCPAADTAWLWALLELAPTPAHTTQLTEAHVRRVLKTHRIRRLSAAEVRAIVQAPAVTVAPGAAAAAQAHCALLFPCLRGLAAQVQACAHQVETVLAACTTADTAALSDVAIVQALPGVGRNITAWLFAEAAQPFARRDYHVLRTHGGVAPITKQSGKRLQVVMRRGCNPRLRYALFHLAHHAVQVDARLQKVYATLKAKGQSRGRALRGIADRLLRVLIAMLRDRTLYETTHVPSGAPGAHGETPGGQATALAATGVDKP

SEQ ID NO: 103444 - protein, 344 aa, unidentified
MQITTIGIDLAKNVFQVHGVNERGKAVLRKKLRRDQVAAFFANLAPCLVGMEACGGAHHWARKLQAMGHTVKLMAPQFIKPYVKSNKTDAADAEAICEAVSRPTMRFVPIKNVEQQSVLSLHRVRQGFVKARTAQANQIRGLLGEYGLVVPQGIGYIASRVPDLIEDASIELPGTFRLLISRLLDHLKELQRQVEEIEDQIRAWHRSSETSQRLEKVPGIGPITATALAATVGDAKNFDNGRQLAAWLGLVPRQHSSGGKPTLLGMSKRGDAYLRTLLIHGARSVIYRAGQRADAESWLVKLVARRNANIAAVALANKTARIVWALLAREREFRSDYTTVRAAA

SEQ ID NO: 103445 - protein, 464 aa, unidentified
MITEKVEGDKMARRKQRRKRLTVTDLPEQLQHVNLNAAGIDVGSDRHVVAVPVGRDEVSVREFEAFTTDLHALADWLTKCGITSVVMESTGVYWIPLFELLEQRGFEVKLVDARQVKNVSGRKSDVLDCQWLQQLHTYGLLAGAFRPPDQVCVLRGYMRQREMLVQASSMHIQHMQKALQQMNLLLHNVVSDITGVTGMKIIKAIISGQRDPQILARQRDQRCHSSAATIAKSLLGNYREEHLFALTQAVSLYETYQAKIVECETAIASYLKQQPNRTDDEPPPPDKSVRNRDRLRGGVDVRSQLYKMTGVDLFNLPGLAADTLLTLAGEVGFDMTPWHSEKHFTSWLALCPGTKKSNGKVLSRKTKRSANRAAAAFRIAAASLARSQTALGAFYRRIRVRVGPAEAITATARKLAVLYYSLLKHGSAYVEIGQTAYEQKYQQRRLNSIQKQALAMGYQLIPAA

SEQ ID NO: 103446 - protein, 387 aa, unidentified
MYYIGIDISKFKHDCAVIDDAGDVVTPSWSFANDLEGFLQFKALLDSLGTETKIGLESTGHYGMNLKLFLEADGFSFMEFNPLLINRFVKSKSLRKTKTDAIDCEMIARYLMTVEYKPYPPSFYHIEKLKSLTRFRDNLVRQRSRQLVELTNILDKVFPEFKPFFGGKFTVTALHILSEYSSPEKIANMNSRSYEPLRKLSRGRFSTTHFAKLKLLAKNTVGHPTDFLLQEMDIVLELYSQLDSKVDETESLIRECVSEIDPPMLTVPGIGVDSAAVILAEFGDFSKFQNPSQMLSFAGMEPGYFQSGTSESTGKMVKHGSSFLRYALINCTQTVINYEPTFAQYYAKKRAEGKPYRVALTHTAKKLIRVIFTLQTRNITYNSDSVR

SEQ ID NO: 103447 - protein, 370 aa, unidentified
MIQRTTETVWVGMDVHQDSITAAILFGEGQDPQVERLPGDLNAVRRMFRRLSRHGTPRACYEASGAGYVLQRRLTQDGFHCEVIAPGLIPRKPGDRRKTDRLDSVHLVRHYRAGNLVPVTVPDSDREALRQLVRSRLAVQSHVVRLKHRIVRVMATHGHRFTGTRSNWTKKHRLWLKKLQRELDGPLQIVLAFHMEHLEYLEAQKNALEAEIARHARTEPWRERVEALCCFRGIQVLTAMTILTELGDIRRFRTAPGFMAYAGLVPSERSSGNVHRRGPITRTGSQELRRVLVEASWHYRKKAGADLILNRRRMGQNPEVVAIAIKAQHRLYKTFWKIASRKHSCTAVTAVARELCGFLWAALQVRAMEV

SEQ ID NO: 103448 - protein, 423 aa, unidentified
MSYRIAGIDVHKKMLAVVVSDVEVDGEFQFERVRYNSSPEYLQRLAEWLIAQRVEEVVMESTAQYWKPVWGALERYWKPICQEREGAGPRSGTLHLAQAQSNRGRRGRKKDFPDAERLVKRLVADELVLSFVPDTEQRLWRTVTRRKYQLTRNHVRLQNQLEGLLEECHIKLSSLVSDLLGASARRMLKALAEGETNPVALAAMADKNLRATQAQLCDALGACAELRPIYRRLLKMFLEELQFIDQQISELDHELASLLSRHHDAVVHLAEIPGLGVDSAQQIIAEVGAGATTFPSAKQLSSWVGACPGEEESAEVSKSHRSPKGNRHMRRILNQAANAAAKSKGTIFEIVYRRLVSRLGHNQTIGAIAHRLCRLIWIILHRGVRYEERGPSVNAKTRRHRTNRMIRELRNLGYRVEPLVTTV

SEQ ID NO: 103449 - protein, 338 aa, unidentified
MAILNVGIDLAKNVFALHGVNERGQVDLRRPSVPRAKLHALVAALPPCTIGMEACSGAHHWARLFSQHGHTVKLMAPKFVAPYRMSGKRGKTDAADAAAICEAVQRPNMRFVPVKTAEQQSRLMVHRARQGYVEARTAIFNRIRGLLAEFGVVLPQKAEVVRREAASHMDTLPGYGKTVIEDLLAEVRHLDERVAQYDVHVRAMARDSASAQQLMQIVGIGEVTATAIVATVGNAREFSSSRQFAAWLGLVPGQYSSGGTTRLGRITKAGDAYLRGLLVMGARAVLNAAGNKTDSISRWATNIALRRGYWRAVVAVAAKNARLVWAALTKGESFTLPA

SEQ ID NO: 103450 - protein, 337 aa, unidentified
MTLYCGIDLHSNNSVVAVLDEQDHTVYEKRLPNDLDTITEVLCIYQSELAACVVESTYNWYWLVDGLMAAGFPVRLAHTSALPEYSGLKYSNDFSDARQLAHLLRLGLLPTGYIYPKEERALRDLLRRRLLLVRQRSLHHVSLQSLIARHSGQRLNTLQIKQLTKGHLADYLQGHALLGGEITRQARCWLETAIKRIERELQSHIQPREDYQLLQSIPGVGSVLGTTIALETGTIERFASPGNYASYARCVKSEKISNNKYKGQGNKKNGNKYLAWAFMEAGHYGAIWDPRIKRFYQRKKAKAHIMVAKKAVANKLARACYHMLKRGEEFDVTRAFS

SEQ ID NO: 103451 - protein, 337 aa, unidentified
MYYIGLDIHKKTISYCVKDAAGCVHREGKIGSSRRELDAWVRTLPQPRMMAMEATIFTGWIYDYLLPHAEKLKVAHPLMLRAIAAAKKKNDKIDAAKIADCLRCDFLPECHIAPTEIRDRRRVLRYRNLVVKQMVQMKNRVSGLLLETGVTYNKRQLHKVGYFGEMMSTNAEINDAVRPLLNLSRGMIRRSSKLEYDLVSSLERDPLLRERLRRLRTVPGVGSITALTWALEIGDYTRFRSNRQAISYCGLCADEKSSADKVMRMPLSKQRNKHIQRVLVEAAKLAPRLSPELAMIRARELERGNPNRATLAVARKMVCYMLAVERRQQDFVQTAAA

SEQ ID NO: 103452 - protein, 361 aa, unidentified
MKKPAQHLIAEVPRRQTKFEMTIGIDLGDVWSHYCKLNQDGEVVDRGRFRTTSKAIDKWFTDVPPARVAMEAGTHSIWISEQLQEFGHEVIVANVRELRAISHSDRKSDQVDAEKLARYARLDPEILRPIAHRTVEQQEALTLIRARNLIVRLRAAAVNAVRGLTKSCGHRMPASTTGTFAKRSLSVMPPGLAQALGPVLGQIAQMTANIKEYDRQIQQLGQTEYPETQALLKVHGVGPITATTFVLTLGSKERFKQSRDVGCYLGLRPRRSQSGDRDPQLGITKAGNTYLRSLLIECANHILRPHGKDSSLRRWGLQLASRGGKQARNKAVVAVARKLAILLHHLWVTQKQYVPFYEQAA

SEQ ID NO: 103453 - protein, 417 aa, unidentified
MTDSYAWFVGIDWGYQTHQICLVDAGGRVRDTRRVDHDRGALEAYLTWLLTETGATPTQIAVAIETPRGALVTALLERGFAVYALNPKQLDRFRDRFSAAGAKDDARDAHVLADSVRTDRRAFRRVPVDDPILVQLRELAHVEADCQRDLTRLTNQLRDQVYRIAPPLLRLCPAADEPWFWTLLEHAPTRAEHQQVTRTQVLTVLRTHRIRRLTAADLLAALRAPALAVAAGVDAATREAIQSLIPRLRVAHAQRQRSITRQEALLTELRERPASDAEPTEHHDVEILASLPGVGRMVTVAMLTQAAHALATRDYARLRVQLGIAPITKASGKSRVVQMRHACAARLRDAAYHWGRVSMQQDPTTAAYYRRLRRRGQTHGRALRSVVDRWLRILVAMLRHRTLYDATRVEPPTAVPA

SEQ ID NO: 103454 - protein, 343 aa, unidentified
MQTITTIGLDIAKSVFQVHGIDAEGTVILRRQLKRRYVLVFFQKLPPCLVGIEACASSHYWSRELKALGHAVRLMPPAYVKPYVKRQKNDATDAEAICEAMRRPTMRFVETKTTEQQSCLMLHRTRHLFIRQQTAVVNAIRAHLAEFGIVAPVGRRGVEELLNVVADANDERLPEVARACLAALGDQLRVLKAQVLKFDRMITVWHQSNEMSKRLDELPGVGPALATALVASVADPKAFRSGRNFSAWIGLVPKQSSSGGKQRLGSISKQGDRYLRSLFTAGALAVIRYAKIHGTGHRPWLTALLARRSTKVAAVALANKIARMAWAMMARGERYREPVALAA

SEQ ID NO: 103455 - protein, 339 aa, unidentified
MVHVGIDLHKHVSQIARLEESGELNQTRLNNDRAQIMRYFQAIPRPAKVAIEASGTWWWIVDLLEELGHQPVLSNPKQTKAIAAARLKNDRVDAERLAVLLRGDLLPTVWSPPAEIRQARELLRHRIQLVWTRTAIKNQLLALLARRNMRPQNNSRWTTVGGRSEIQALELGPNPSLIRDNCLQLMHQIDQRVRDVDKELARQWASDPVVKRLVTIPGVGVLIATVLLLEIGNMTRFPSAKHLASYIGLTPRIRASANRVRTGRISKEGNRLLRWALVIAATQAARKPGTLRTCYRNIQQRRGKKIARVALARKLVEIVYHVWTHEVDFLTVLNWSVRG

SEQ ID NO: 103456 - protein, 321 aa, unidentified
MPENKLIVGIDVSKRQLDVHVHPLGQRFSVTNTSSGWADLAERLAGYTVKLVALEASGGYERAVAGDLTARGYRVRVLNPAQVRHFAKAAGRRAKNDPIDAEVIARYAATFEGPVLVPDQVRQKLAEAMGSRALLVEHRTALKNQLGTTSIETVRELLQAQLKALNAQINALENFIKQTIADHQALTRRAEIIVSVPGLGKVSCWALLAWMPEIGSLTRKQAAALIGVAPYDRDSGPFRGTRHIAGGRKPPRDVLYMAAQSAAFTNPTMSPFYQRLRAKGKEHKVAVIAVLRKLIGLINTLIEEGRTWQANHVSQRPIHAK

SEQ ID NO: 103457 - protein, 338 aa, unidentified
MTVVTVGIDLAKNVFAVHGVNAAGKAILVKPLVRRAKLLELIATLPACLIGMEACTGAHYWAREFQKMGHTVRIMAPQLVSPYRMGGRHGKNDAADAAAICEAVARPNMRFVPVKSIEQQGQLFVHRAHQGYVSERTALINRIRGLLSELGIVLPQAFKAFLSGVAQVLEDLPGYCNQVIGDLLNELFHIEEKIKNSEKLIQQLARDNSAAQLLMQFRGVGPMTATAIVASIGNGHDFRNGRQFSAWLGLTPRQQSSGGKTRLGRITKAGDSYLRTLLVLGAKSVLLGAAKNDDPVSKWALQLKERRGYGRALVAIAAKNARMCWAMLHLKDEFRFPA

SEQ ID NO: 103458 - protein, 482 aa, unidentified
MKPKQQEKTKNATYQPTQGHWQQMNRKQRREMTRKIQSEDVSLEMIHPDAAGIDIGNESHYVAVPPKRDSQPVRRFGCTTAELKAMADWLKQCGIRTVAMQSTGVYWIAVYDILEHAGLEVYLVNARDTKNLPGRKSDVQESQWLMKLHTYGLLRNSFRPSQKIRTMRTYWRQRNDLVQSAGRHIQRIQKALTQMNIQLANVLSDVSGMTGQTIIKAILSGERDPHKLAAFRDPRVKASEEEIARSLEGNWEEGVLFVLKQEQAGYEFCQKQMAECDQRLEQYLQQREDRSAGASLPEEKRKERLKKKKGNKPLFDLRTGLFRMTGTDLTRIDGIDVMTAMTILSEAGWDMSKWKTEDHFVSWLRLCPDNRISGDKIIGKGRLPTNNRVSIALKMAANALRTSKTYLGAQFRRLRSRLDTPVAIKAMAAKLARLVYCMLRYGMKYVDQGAAFYEAQHYQLQIKHLKTKAAKLGFQLIQVPAP

SEQ ID NO: 103459 - protein, 270 aa, unidentified
MNVRTLGIDLAKNVFSVHGMDDRGKTVLHRVLRRRQLLSFVAQLPRCLIGMEACGSAHYWAREITKCGHEVRLMSPRFVRPYVKSNKNDSRDAEAICEAVSRASMRFVAIKSRDQQDTMALHRVRSLLIRERTSLMNEMRGLLAECGVIAAQGASALRRLIATVIAETDERVSDLLREILSEMSERLRLFEERLKRYDRRITELADKDERTGRLMTVPGVGPLTATALIAAVGNARQFRSGRELAAWLGLVPRQHSSGDRVTLLGISKAR

SEQ ID NO: 103460 - protein, 335 aa, unidentified
MTKEDFIYVGIDLHKETHTAVMIDCYNNKLGEITFPNRPADFPKLVTKVKKCNTDAKEVVYGLENAYGYGRALAVWLIDKGYFVKDVNTAISHRQAKHRGAMYRKSDSDDAEAIALATLNMLDKLPDACPNDAYWSLGQLVHRRDNIMKQRTRLVNQLHEQLCIAYPSYKSFFNDISRPTELYFWEHYPSKKYLKGKSVEDLRAELVPVSHNKCSTKTCEKILDAVASDKVKNNAYQDARDMVTLSIVSDLQHYDSQLTEVDKMLEQMYKMLGCTLTTIPGVNVITAVKILAEIGDIKRFANANKLAQFAGIAPLHLSSSGKGKDVATKQGNRRL

SEQ ID NO: 103461 - protein, 352 aa, unidentified
MGIVVALDVHRKQITYKALDRDSGELRRGRIAPAARADVRAWLARFAGSEAEFALEGTTGWRFVIEEIERAGHRAHLADPAETAARRGRKRRAKTDNADCDLQLRLLLAGELPESWIPPPQICELRTRVRMRKTLIDQRTAWQQRVQAQLFQQGVPAGQRLRSQAGREALAAVELSPAGRELVALGLRMIDALDRELAPLDRELHAFARRQPGCRALIASLYGVGPVSATAILAELGDARRFSSSDDAVRHSGLDVTVYQSDSKRAAGRLSHEGPELLRWALYEAAVSAARASSPDHAYYLQVAERLDHTRACLSVARKLCRRAYHILRELGDEALAPIDGDQAEEAIAAAA

SEQ ID NO: 103462 - protein, 349 aa, unidentified
MTIVETTCSVTAGVDTHADVHVAAAVDPVGGVLGIESFPTTSAGYAQLVAWLRSHGEVALVGVEGTGSYGAGLCRNLTRAGIRVVEVDRPNRQVRRREGKSDPVDAVAAARAALSGQALGQPKSRDGDVEAIRVLEVACRSATEERIATLNQLRHLVICADDQVRSRFAGLSVVRLTAEAAGLRPRPTDTVRYSTLFAIRTLGRRVAALDAELVELKAVARPLIDRTAPGLLSMYGVGYDVAAKLLVAAGDNPARLRSEAAFAHLCGVAPLEASSGKTVRHRLNRGGNRQANKALYHVVITRMASHQPTKDYVARRRAEGKSTGEIARILKRYVAREAFKHLRPIATLS

SEQ ID NO: 103463 - protein, 439 aa, unidentified
MSTTDQDQLEFAAFVGIDWADRQHVWALSAVGSSRVEQGQLAHTPEAVDQWAVELERRFEGRPVAVALEQSHGPLVFMLSKYAHLVLFPVHPSAAANYRKSFRPSGAKDDPYDASMLLDLLMRHGEQLRRLQPDTPETRTLQLLVQERRKLVSEKTRYSNRLTAHLKLYFPQVLGWFVQVTSEITGEFLERWPTLEKLQRARPATIRRFLCDHNSRDAEKLETRLEQIRHAVPATHDVAVVTASSTAVMALVRLVKELRRSIAAYDKQIEALARAHPDFDLFNSLPGAGPVLVPRLIAALGTQRERYQSAREIQCYSGIAPVVERSGNQYWVHWRWACPKFLRQTFQEWALHSIGQSEWAREYYEEKRAKGKSQHSVLRSLAFKWIRILFRCWKNRTPYNEQLYQRARAKRRPKTETHQTVELQWKKVAGFSKLSALPS

SEQ ID NO: 103464 - protein, 418 aa, unidentified
MEQHYMEEEIRLKHMFIGIDLHKNHHTAVFLNGFKRKLGMFKFDNKPSEFPKLLAEAKKYLKKGITPAFGLEDTGGYGRALAVYLVQKGQIVKEVNPALPNGVRKANPIVQKSDEWDAECVGHVLIDKFESLPDANPIDKYWVIGQLVTTRTATATDLTVLINQLHGQISHHYPSYRKFFSELDGKTALAFFEKYPSPHLLEGVTVQELKEFLLKPSNYACSLKSAEKILSMVQADGETKRNYQEDRDFIIQSHIRRIRNCKEEIEAIEGRLEVLMKDTEYKLESMHGIDLVTAAGFVAEIGDINRFSSPEKLARFAGIAPVFKGSGDKGSFKKCKQGNRTLHELFYRLACRQIGTKRGSKEPNNPFYYEYYLQKLAAGKTKTQAIICIMRKLVDVVFALMKNKSRYIKPIVQYKQTG

SEQ ID NO: 103465 - protein, 350 aa, unidentified
MIIIGCDYHPGFQQIAFVDKETGECSERRLEHREEAEKFYRDLGAQGAAVRLGMEASGHARWFERLLGELRFDLWIGDAAEIRTKRVRKQKTDRQDAELILRLLLEDRFPRIWVPRGENRDLRQLLWHRHRMVQARTRIMNQLQAVALNEGLRCKKRLWRDAGREQLEAFELAPWASRRRRDLLELLDQLTPTIAELTQAIEQEVEKCPEARRLQTHPGVGALTALAFVLIIGRADRFQCGKQIASYLGLVPLEESSGQRRRLGHITKQGNSLLRFLLVEAAQVTVRSDPEWRSKYFHLAMRRGRKIAKVAMARRLAVRMYWMWRKGWDYEQLKKFGSHAGQPGTGDGVR

SEQ ID NO: 103466 - protein, 349 aa, unidentified
MSHNFNNAVAVVGIDIGKNSFHVVGLDSRGAIVLRQKWSRGQIEARLANMPPCLIGMEACVGAHHLSRKLRTLGHDARLMPAKYVRPYSKGQKNDFRDAEAIAEAVQRPTMKFVATKTAEQLDLQALHRVRERLVSQRTGIINQIRAFLLERGIAVRQGLRFLRAELPRLLATPPDALSPRMVGVIEGLAEDWRRLDERIEHLSGEITALAHQDAGCKRLVSVPGIGPIISSAMVAAIGTGDAFSKGRDFAAWLGLVPKQISTGDRTILGKISKRGNRYLRVLFVQAAWVVLIKPMSWERHGLRSWIEAAKKRLHRNVLAIALANKLARIAWGVLAGGRIFEASKLQAA

SEQ ID NO: 103467 - protein, 394 aa, unidentified
MRSVGLDLGVRHIAFCEVKDGAVVDKGAVRSFSQLASRIGPDTAPAQVGFEACREGWHVHDMLQRWGHRPRMLDTTRIRQIGVGQHRRKNDAIDAETIALAIESGRVAEAHVLSPERRALRAQLSVRGALVQARSQYVTTIRGLARAAGILLPTSSTSSFVQKVEEAKMSDALRTLVAPLVRILVALEAELEQADAELAKMAERDPSITLCATVPGVGLIVAATYVSVIDEAGRFRNAHAVAAYLGLVPSEATTGGPSKRRLGGITKQGNTHARTLLIQAGWSILRARASADPLRRWADHVAETRGRKIAVVALARKLAGVLWAMLRDGTVYDGALEAEESARGMRENAMRTEKRARALEHAAKKLRRPASPADAKAENPPAKAGRTTRRTSTA

SEQ ID NO: 103468 - protein, 317 aa, unidentified
MARKGTIVGIDVAKGKIDAAIRFGAEASFANSAEGRRELQAWLKEHGVCKAVMEASGGYEKSWAALLRGAAVEVVITDPNRVRHFAKSAGQLAKNDPIDARMIAWFGEVFGHVSGQPHDEERQELDQIVTARLGIVRLKEQIENWGEHEQPKAVQKAQQALLKAVATQLAKLETIIAAKIDKTERFAQRAEIIQSVPGLAGTAAAGLIAFLPELGLVDRQAAAALLGVAPFDADSGKRRGERHIQGGRHKLRKLLFMPVLSAATQHNPVLKACYQRLIAKGKKAKVALIACMRKLIGILNTMLARGEKWDPARHAIA

SEQ ID NO: 103469 - protein, 467 aa, unidentified
MTPHKDFFLDSRPSAPTPTLPPSPVLSDALQVCHPHAAGIDIGEAEHWVAVPPGCDPQPVRRFGTFTVDLDALADWLIDCGITTVAMESTGVYWIPLFELLEARGVQVLLIDPRQAKRAPGRPQTDRLDGKWLQRLHAYGLLAGAFRPTDQVCVLRGYLRHRQMLITSAAHHIQHMHKALEQMNLKLTQVVSDITGATGMAILKAIIAGERDPQRLAKLRNARCHHDEDDIAKALQGTWRAEHLFALQQAVALYEFYHQQVALCDQQIKAHLETFADQSAGQPLPPKARRHKKTNEPRFEARTPLYRMAGVDLTAIEGIEEGTALAILAEIGTDMHRWPSVKHFCSWLGLCPQHQISGGKVLSRRVRPGAHRVTVALRLAARSLHHSQSALGAFFRRMKTRLGTPKAITATAHKLARLVYHLLKHGSAYVQQGLDAYEAQYHERKVKTMAKQAKALGYTLVPLVAQG

SEQ ID NO: 103470 - protein, 396 aa, unidentified
MKYLGIDIGKNNHVAGMIGDDGKPVFRAFSFSNTTEGAESLLTKLATHNVHYDDLEVGLESTGHYWLAVYSYLHDKGCKLHVINPIQTDGWRKGVEIRKRKTDVIDAMLIAELVRYGDFIESHMPEEVVLSLKNLTRFRSYLVDSISDLKRKVICVLDQVFPEYQSVFSDVFGTTSKEILLQFSSPAELEDVSADTLAELLAGLSRKKLGLKKAEELNRAASTSFGVTFCRDSFTFQLRMLIEQIKYIESQVKDTEAEICTIMKKLASPITTVPGVGKRLGAVILGEIGDIGKFDHASKFVAFAGIDSIVNQSGEFEASNNHVSKRGSAYLRRALYQAALVAAVGKNPDPVLSAFYQKKLAEGKHHKTCIVAVARKLCYIIYSVLTENRPFEVRNP

SEQ ID NO: 103471 - protein, 378 aa, unidentified
MKVMYERVAGIDVHKKMIKVAIRSPGARPWTRKTEILTFRTFYGVLREVARELRRRGVTHVVMEASGIYTEPVYHALCEEDGLEVLVVNPAHVKAVKGHKTDARDCARLAELLECGLLQGSYIPPRELKEVRDLVRYRIKKVQARTSEIQRLDKTLESAGIKLGSVVSDVTGKGPTAMIEALIDGERRGKVLADLALGRARSAGKLADLTMALEGRFTGHHAAMCRLVLDQVRLLDAAVADLDERIAAAAAPWQREIALLKTIPGFGDVVAWAWIAEIGPDPRRWFASGGKLASWAGLAPGNHVSAGKRRYGRTGDAGTYIKPVLVQAAWAAIRVKGRLQARYHKLVRRMGGPKNPAAVKKAIVAIAHPAQDRLLRAQ

SEQ ID NO: 103472 - protein, 374 aa, unidentified
MLLPRQRFKLARGTKDKEHAMSEKLNTAIAVIGIDIGKNSFHVVGHDQRGAIVLHQKWSRGQVAARFANMPPCLIGMEACVGAHHLSRKLKALGHDARLMPAKYVRPYSKGQKNDFRDAEAIAEAVQRPTMKFVATKTADQLDLQALHRVRERFVSQRTGIINQIRAFLLERGIAVRQGQRFLRAELPRILATPSDVLSPRMVHLIENLAGDWRRLDERIESLSSEIEAIARQDAGCERLMSVPGIGPIISSAMVAAIGSGEVFTKGRDFAAWLGLVPRQMSTGGRTILGRISKRGNRYLRVLFVQAAWVVLIKPKSWERHGLKSWIEAAKKRLHPNVLAIALANKLARIAWGVLAHGRDFEVRKISEAAAQSA

SEQ ID NO: 103473 - protein, 345 aa, unidentified
MSVYVGIDVHRKRSQVAVINQDGEVLANRNVPNGAKPILSVIGGLPAGTKAAFEAAFGWGWLVELLEDYGFEPHLVHPLQCKAIASARLKNDKVDAAILAQLLRADLLPEAWIAPPQVRQLRALLRHRIQLVRLRTLLRNRIHAVLADHGHDRPGGYWSGPGRAWLASLDLPAVSAEVICDALALIDALESVIDRLDAEIRGHARSDPRVKILTQLPGVGPFTALVLLAEIGDVTRFASARKLASWAGLTPTVRGSDRTVRHGHISKQGSVWVRWILCEAAQTAKRSPQFAARYQIIARKRGKKIATTAIARKLLTRAWHLLTDAERAASPPAITTASAPPTGAP

SEQ ID NO: 103474 - protein, 397 aa, unidentified
MYIVGIDIAKRKHEAAVIDGEGAVIIKPFSFTNNCSGYNRLLAMLTKAKLPLDEVSFAMEATGHYWLALFTRLQKEGFRVQVINPVQTNSIRSFYIRQAKTDPRDALLIAEVIRFGHFSESTLHPENIYELRELCRGRHAIVSMQADIKRKVVALLDQVFPEYETAFTNMFSDTSMAILQTCPTPKELSEMPLEELCHLIEVSSHKRFRMAKAQELQELARNSFGFAMAGDVFSTMIRLYAKHLDFLKQQVQEMDRKIAEIMDTLDTPITTITGIGPTLGAYILSEIGDINRFSSAAKLAAYAGIDPTMRQSGEYNGVRNRMSKRGSPYLRHAIWLAASSAVLHDPALKLYFQKKRDEGKPYMASVGHACRKMVSIIYAVMRDNKAYTPCIPNEISA

SEQ ID NO: 103475 - protein, 318 aa, unidentified
MYCIGVDVSKQHLATYDGERQRTFPNTRDLKELAAFLKGKGNKVTVVFEPTSTYSRSLERLCRSRKLRCLRLNPRVLPHLREVVQGRSKTDRTDAELLWQYGQDHGPGDLLEEDRLGHILKVYLSCYAQAQKARIACQQLREALSHDPDTPAEILEELGREIGRLKAREEKMLVRAQTCIEKDKEAERTYALLLTIPGVGRVTATVLATLFRRYAGTNRGEIVALVGMDPLEYRSGSSVHKKSRISKRGDGFVRKVLFEATLAAARFNPAVREIYRRLKENGKPEKVARIAAARKLLLIAHAMYRTGQPYRAPKASGG

SEQ ID NO: 103476 - protein, 347 aa, unidentified
MDQIIRIGMDTSKHVFQLHGVNAAERPILRKKMRRKEMVDFFATCPPTVIAIEACAASHHWARLLTGFEHEVKLIAPQLAKPYVKRGKNDAADAEALCEAMSRPTMRFVPVKSADQQAALMLVGMRERAVAAQTQLANTIRGYAAEFGLTAAKGMSHLPLLLERIMIDESIPAVARELFASLVEEFAQLGERLKEVEAKLMAWYRNNECCRRLAKIPGVGPIGAVLLVMKAPAPEQFRSGRQFAAWMGLTPKDHSTAGKVRLGIITRAGDEALRKTLVVGATSLLRQVRAGRGRNASLWLIELLKRKAPKLAAVALANKIARIAWKMMVTGEAYKGNAARPALACAA

SEQ ID NO: 103477 - protein, 366 aa, unidentified
MRTKKSYYIGLDVHKDSIWMAVMMDESNSPIESKQLPNNYLKVVKALAPYQEKGIVQVAYEAGCLGYGLQRYLSEFGFDCRVLPPTKVVRPGMDKRVKTDKRDAVLIANMLKRREGESINIPTREDEAGRDLLRCRNDLKDDLKRAKQRLLNFLLRHDKKYETNRYWTMKHRKWMGEQKYDLALDKMTYDFYISYIESTERRIERVDEEIRKEAENVRNAEKTRILRAFRGIDYVTALSFISEVGDFRRFATAESFMSFLGLVPSEYSSGKKIQRGSITKTGNSHLRRLLVESAWHYTRPVKESKRLAERRVGTNEKVITYADKAITRLHGKYYKMLARGKEQNIAVTSVARELAGFIWGVMNMAA

SEQ ID NO: 103478 - protein, 343 aa, unidentified
MDHIAIDLGGRESQLCIRSADGTIVRELRYRTAALGGLLGTMPASRVVLETCAESFAVADQARAHGHEVRIVPATLVKSLGVGARGKKTDVQDARTLSEVSCRIDLPSVHLPSEPARRLKVACGMRESLVRSRTLLVNSVRGFLRTQLQRIKGRYNDQFTARVRRQYSERLRPIPTEIERQLVVIDCLSNQIRQADRELALEAKNHPLCHRLMTVPGVGPITALRFVATIDEVERFGDASRIASYLGLVPGEWSSSDRQQRMGITKAGSPKLRWLLVQAAWSALRSKRGQELQQWTRQVEHRRGSRVAVVALARKLSGIMFAIWRDGTEYQPSRAARPVPAAS

SEQ ID NO: 103479 - protein, 343 aa, unidentified
MQIRSVGIDLGKTTFHLVALGDDGKVLLKKKFTQKQLIAFTVNLQTSLIGMEACSGAHFLGRALRAQGHDVKLIPAQFVKPFVKSNKNDFLDAEAIAEAVDRKNMRFVPIKTDDQLDLQALHRVRDRLIARRTSVINQLRAFLLERGMTFAKTPTKLKVAMPEILENADANLTPRMRNLISLLWSEWKDLEQQIVTVNAEVEQIASSDAACVRLRQIPGIGPLIATAIVAAIGNGAAFHKGREFSSWLGLVPRQHSTGGKARLLGISKRGNSYLRKILIHGARSAVVRMKRDRAPFGAWLDALQTRAPLNGVVTATANKLARIAWAVLSTGKEYRALPSPPPA

SEQ ID NO: 103480 - protein, 355 aa, unidentified
MLADRVDYIIGVDTHTATHTAAVVTPTGAALAHRTVPADADGYLHVYRFAVEQAPGRRVWAIEGTGSYGAGLTTHLLEQGEWVVEVDRPARPARRNGTKTDDLDAVRAAREALGREHLAQPRQRGDREAIRVLVTTRQSAMQARTCAINHLKALVVNAPERLRRQLRALATDQLLARCARLRSHPTQPIEYRATIAALRRTAQRSLALAAEADDLHSELDTLIRRRAPGLLAEPGIGVICAAQLLNAWSHAGRLRSEAAFAMLGGAAPIEASSGKVVRHRLNRSGDRQLNRALHTIVLSRMAYHAETRAYVARRIAEGKTAREIQRCLKRYLARRLFKLLEAPPAHAQKEKIATT

SEQ ID NO: 103481 - protein, 348 aa, unidentified
MQIAILGIDLGKNSCSVVGLDESGRIVVRRRMHRVSVIKFAGGLTPCVVAMEACCGAHHLGRLLRTQGHEVRLMSPEYVRPYVKAQKNDERDAEAIAEAATRPTMRFVDLKSEDQLDMQSLHRARSRLVGERTALINQLRAVLLERGIIVAQGRRRLAQYLSQALDGDEAAPLQLSSRIRLLIEDMRAQWRELDRRVAEFDGEFVAAARSEAAARRLSTIPGIGAINATALVAAVGDARSFARARDLAAWLGLVPRQATTGGRPRLLGITKRGNKYLRTLLIHGARAALPSLLTVESPLGNWLRGLSARAHRNTVIVALASKLARIAWAVLRSSTSYNAAIGRSLIAA

SEQ ID NO: 103482 - protein, 354 aa, unidentified
MKCHLANHTIGVDLGDKQNVVCVLDWNGDIATTFKVTNTKTAMRKRFAAYSGAFVAIEAGTHSAWISRLLKELGCAVVVGNPRKLRCIWQEPIKTDFRDAEMLARVAKMDPKLLRPIEHRSADAQARLAILQARDALVKSRTSLINHVRGTVKCAGERLPKCSAASFHKKAPEHIPSELKAALLPLIEQIANFTEGIKKYEHEVTHLSRTHYPETEVLRQVPGVGPITALAFVLTLEDKDRFTKSRDVGPFLGLVPKRDQSGDTDKQLRITKCGNSQLRTLLVNVAHYVLGPFGADSELRRFGQRIAARGGTIAKKRAVVAVARKLAVLLHRLWVTGEEYHPFYCHKDSTVEAA

SEQ ID NO: 103483 - protein, 347 aa, unidentified
MDHIGIDAGMKTSHICELTEAGEVIERQIRTERKRLQEVFGGRPPARILIEAATESEWIACCLEALGHEVIVADPNYAPMYAHRSRRIKTDRRDAHALAEACRLGAYRPAHRASRSQRDRRTGLGVRELLIRTRSRWIVHVRSLLRRDGLRLPPGRAENFVARVNTLALSEQLAAQIAPVLALLEPLNAQIAARDAEVAQWAREDERTRRLMTAPGVGPVTAVAFVATVDRVARFRNAHQLESYVGLVPREWSSSETQRKGAITKAGNTRLRWLLVEAAWCVLRRKPKPETFLLRTWADGIARRRGSHVAAVALARRLAGILFAMWRDQTEYDSRLIGGRPGHRRVA

SEQ ID NO: 103484 - protein, 351 aa, unidentified
MDKITTVGLDLAKQLIAMHAVDARGQVVLRKVLRRDALLRWSATLPPCEIAMEACGGAHHWARELTQQGHSVRIIAAEFVRPFRKSGKNDANDAEAICTAVRQANMRFVAIKSVEQQAALCVHRLRQGLVEERTALINRMRGLLTEFGVVAPLSPEKLRRELRLCLDEEKTHVPLMVRQLVTDELAALDALEQRIADYAAQIAAQVRDNVSAQRLQGIAGVGALTAAAMVATVGQPQAFRNGRQFAAWLGLVPRQHSTGGKSRLGRITRRGDAYLRTLLILGAKSALQAALRKPPPLRHRLRQWIVDVFTRIGYHKTLVAIANKHARIIWALLVKGEDFDVQRLTLTAVAA

SEQ ID NO: 103485 - protein, 391 aa, unidentified
MSMYFIGIDISKYKHDCCIISASDQKVVSKVTIKNNKAGFDELLTIINSLSNPEGIRIGFESTAHYALNLELFLESSLLTFMEVNPVLISEYKKSKTLRRTKTDSVDCESIARWLMTVEYKPHSKGFYHAYSLKSLTRLCDKLIRQRSFYLVKITNVLDHTFPEFKPFFNERLSKTALYLLENYGSAEKMARMNSASYEKLRSLSRGKFSPQQFLRLKELADNTVGVNNSIFDVELNSLLSLYKSLVKEIDTIEKEINKLIEEVHPHYMSVPGIGPLSAAVIYSEYGDISNFTNSGQMLAFAGIEPGINESGTESHGSKMVKRGSSQLRYTLINCCLPLIRFDMTFAAYYAKKRGEGKPHRVAITHVAKKLIRVIYALERQDIDFNAQKLH

SEQ ID NO: 103486 - protein, 324 aa, unidentified
MQINSVGIDLGKTTFHLVALGEAGKVLVRKKFNQRQLLTYTANMPTSLIGLEACSGAHFLGRALRKQGHEVRLIAAQFVKPFVKSNKNDFVDAEAIAEAVERKNMRFVPIKTDDQLDLQAIHRVRDRLISRRTAVINQLRAFLLERGLTFARTPAKLRNALPDILENPAVDLTTQMRNLIDLLWAEWKAVEDQIEGLSRELERISAGDAGCTRLRRIPGIGPIVATAIVAAIGNGAAFRKGRDFAAWLGIVPRQYSTGGKTRLLGISKRGNVYLRKILIHGARAAVLRMKRDRAPIGAWLDALDARAPKNIVTVAMANKLARIA

SEQ ID NO: 103487 - protein, 355 aa, unidentified
MRIIGCDLHARQQTLAVLDVATGEIQEHILEHEGSAVRDFYSGLEGRVRVGIEATGSMHWFLELMDELGVECQVGHPAKIRACEPRKQKHDRRDAMLLLNLLAEDRFPKIWMPTAEQRDVRELLLYRHQWVRIRVRVQNALQSIALSHGLRRGTSLWSKAGLEAIGSLALPPYTTQRRDALVRTYRQLQTEIEALDKTVAACAEQRPQARRLMTHPGVGPITGLATEVFLGDATRFADGKAVASYVGMIPSEFSSAGRQRCGALTKQGNALLRFLWCEAVGHAARRDEALKRFFRRKLAQKGLGKATVATGRKLGIRLWIMMRDQIDYEEFCRHARRNGEAQAEMPDCEHGPGRQ

SEQ ID NO: 103488 - protein, 382 aa, unidentified
MGPVEGNAYIGLLVEESITLLDWGNMVERETEAKSSGSGVTNPYHRTEHCDKIHEYRCDKEVGVIGIDISKEHLITSRGRVRRYENKKEGYEEILKMKPCTIVLEPTGVYAIKPSQYFKERGVRVLQVSPNVLSREKEFRGKKTDFYDAEKLENMVDKAKEYDYNPLKELVTLYLFLKDIETKYKNRLKRALFLVSDNDKVSKDRLEKLAKGDFTQEELYQLEYTPLVLEEIKILAKNLLETQERLKEVRRMIEGQVPQDHVLLTIPGVGRLAAGIIIGIVGDVKRFPKPESFVAYCGLDPVVERSGKAVVSRGISKRGNKYLRSLFYFLAMRSYSRNPTLLKFYETHKDRLKGKKLYVALARKLARVVWSVWYNNKPYEPK

SEQ ID NO: 103489 - protein, 328 aa, unidentified
MAKHTMICAGIDTGKRKLDIALDRSPEQQLRIDNTPEGYKVLLDWLRRRRVKRIGIEASGGYEQAVVAELRRRRFVVVVFQPAQVRAYAKFHLQRAKNDKIDAVLIAACTAAVKTIHAPPDARLQPLAEHLTMIDQIGEDIARLKNRLETCRNPRFQQTWEEDIARLAKRKKIELKALVATIREHRDLAERLDLIESVDGIGQPTAVAILVRLPEIGRITREQAAALAGVAPYDDDSGEQVGIRHIDGGRQRLRRALYTAALPASLRWNPQLIALYRRLIAAGKEHKRALIACARKLLIFANTVVARGTPWDRERPAVASMSAVPQAA

SEQ ID NO: 103490 - protein, 350 aa, unidentified
MKRPKDRLFAGIDLHGNNLVIGVIDQDGRRVTHRKLDCELDQVEAFLRPHKSQLQSAAVESTFNWYWLVDGMRVRGYSIDLANPAQIEQYSGIKHADDKHDAFFLAELQRLNILPKAHIYDAEVRPVRDLLRRRTNLVHHRTALILSFKSLYHRTTGQEIALGQVKQMGPKEAPALYEHPANQLIAQIQIEHIGKLEQSIVRIEKAVLSCAREIPLYEKLLTLPGIGKILGMTITMEVGDIKRFKTDGDFASYCRAVDSRRLSNGKQKGENNAKCGNRYLCWAFVEAANFARRYNEHCQRWYDRKKAKCGTVIATKALACKLAKAAWHVMTKQTDYDAKRMFPELAVRAK

SEQ ID NO: 103491 - protein, 402 aa, unidentified
MNNPALCIDVSKSSSFATGFLSYNKPYSKPFDFSHTPDGMKSALHCLKELQDNSNSKPDVVLEATGNFYKPVTQYFIDLGYSVYVLNPLQTSMEKRKSIRKIKTDPVDTYRIAQVYYTNDLKPFKEQSHDSQELRSLCRQWDGFNTLNTETQLRFRSILALVFPKYDSVFDHLCNPTSLRVIAYFPSPKAILSAKREELFNLIKLCRHSNEWCNHKVDMLIAAARESLSFDGAQQSNIRVLQSYVKSLLTHKEILADIRAQINEWTKLSHNFQLLLSIPGVGEVTAATILGEIGDISNFDTAKQLVAYAGLDPSVYQSGSFRAKNTKISKRGTPYLRKALYQAASAAVRKRPKGPCNSVLYEYYTNKVNAGKPPKVALVATCNKLLRIIFGILSSKTEFKAE

SEQ ID NO: 103492 - protein, 345 aa, unidentified
MEHYAGIDISLEYSSVCVVDASGKIVHEAKVESEPGALIGWFASLGLELARIGMEAGPLSQWLYAGMRQEGLPVELLETRHVRDAFKAMPVKSDRNDARGIAQLMRLGWFRPVHCKSLAAQEVRAMLTARELVQSKLRDVENSLRGILRGFGLKVGKTTSRSFGPRIRELVAGHPNLKTVAAGLLSVHAVLLSEFQAFEKQVRALVRQDARARRLMSTPGVGPIVALTYAAAIDDPRRFSSSKRVGAHFGLTPKKYQSGETDYSGKISKIGDAAVRTALYEAAHIMLVKPLQGCTALKSWAMRIARRAGMKKAKVALARKLAVILHRMLADETVFKDAAKSMAAA

SEQ ID NO: 103493 - protein, 385 aa, unidentified
MKPPPRHVRRRSALLPLQPKGDQVIVVGVDPHKRTHTAVAIERASGELRAELTVSARAAGHEELLLWARQQSQVRLFALEDCRHVSEALERFLIGRGERVVRVAPKLMGQSRRGSRSYGKSDSIDALAVARAALSEPRLPEARLAGAELEVKLLLSHREDLVGEANRTSNRLRWHLHDLDPEIALARGRLDRTAWMERLSRRLQRGEQTVRVRICRQQLRRLKALAREIKGAEAELDALVRTQAPELLELPGCGTLCAAKLVAEVAGVERFPDDAKLAMLAGVAPLDASSGRQQRHRLNRKGNRQLNLALHRIAVTQARFHQPARVFLERKRAEGKGRREALRCLKRHLVRVVWRTLRAASSERMISISPNLQEIKMPTPEPVLT

SEQ ID NO: 103494 - protein, 402 aa, unidentified
MHYLGIDVSKASHQCVILDAEGEALGKSFTVQSSKDDFANLVKKLSDLNIPQTDITAGLEATGNLWENIYIYLKEQGIKVTLLNPFQTNKFHQAMMKKAKTDSIDALVIAGLLRSGCAVGSYIPDEDIQSLRDLIRLKDGYLRDTKNYKRKAYSLLNLVFPELLNLVKDPFNISCTEILSKYQTASDFKSLKTKDLLKVARGHQGNNYDETWADKVIQAAKDSIYSGKASKARGIVLKSLVLNIKNLKEQMSELDNEIQNILKTDDDSSNNDIDNLLTIPGVGPKTIAVFIAEVGDITRFASCKDFIGFVGLYPKIEQSGSSLNRAKLTTKGSRLLKHALYMASVASLIHNPYLKSVYNDKLSQGKCAKQALIVVSRKIACIMYSMLKNNTAYNPGRVAIAV

SEQ ID NO: 103495 - protein, 422 aa, unidentified
MNFCPVAGIDVSKRFSDMCVLSPDNKIFAQEKIYHDETSINRANALLQEAEQLFSSKPVIVMESTSHYHLILFQFFSDRGYDVIVVNPLQSNSMKDFSIRKRKTDRVDAFKLAMMYRTKTLRPSQIPQTAMRALRQLCRERVEFLNDITRYKNRLTALLDQSFPGYDRVFSDVGGITSCAVLVHFPTPAILLTVEEAELVEVIAAASKSGYGFAKKKAELLISAAQKAQILGVHSCADETLIVCAIQMLRTLSESILQIDKAIENLLAQTKEIRNNVSLLQSIPGIGNHSAALLLGEIGDFTLFKKPKQLAAYFGLDPSERQSGTFRGTKNKLSKRGSPYARAALHMGVVNSICKHGKKPAPNPVLLSYYEKKCKNKPAKVAQAASMHKLVFIVFAVLRDQKPFELKTPDQHAVEQGFVKAA

SEQ ID NO: 103496 - protein, 438 aa, unidentified
MERFSLVNPHAAGIDVGDTEMVVAVSPDACDQNVRTFGAFTCDYEQIVCWLQECKVTHVALESTGVYWIQLYLLLQQEGFEVTLANAKHIKNVSGRKDDENDAMWIQRLHSCGLISGSFQPDLQTRGLRDLMRHRRSLVRDQSRCTNRIIKALELMNIKVQTVISDIDGKTGKAIVEAILNGERNASVLASLADKRVKASKETLIKSLQGNWNTQQLFLLKQQYSTYNFISSQIKETDLQIEKQVQALTAYQHEGELLPINLDHPRKRSTRKNAIPFHATAHLHALLGVDLTQIPGISEVSALEIISEIGTDMNRWPTENHFTSWLGIVPNTKKSGGKIISNKIMKKKHRAGQALRIAASTMYHSKSPLGDFFRRKQAKGGPSKAILSTATKIAISIYMMIKNKTPYQPERMKEAQDKFKQNQIRKLETRLAQLKSAA

SEQ ID NO: 103497 - protein, 413 aa, unidentified
MTITCGIDWAESHHDVALLDEAGKLVAKRRISDDAEGYRRLLEMLAEAGDTALDPIPVAVETARGLLISCLRTTGRKVYSINPMAVARYRERHRVARAKSDHADAVALANILRTDADAHRPLPADTELAQAIAVLARAQQDAVWNRGQLSNQLRSHLKQYFPAAVAAFQVRGVGLDSREARAVLAAGPDPSSAAKLTLARLRTLLRNSGRQRSIDTWAQRLRGVFAGEFLRQLPLVEAAMGRQTQALVGQLDAACRAADDLADAAAEAFAQHPDADILTSFPGIGPLTGASVLGEIGDDRARFRDARGLKSYAGSAPITIASGKSLVVHHRKVKNQRLAAAGYVWIFGALPSPQVKQHYDRRRAAGDKHAAAMRNLFNRFLGCLYHCLQTGQAFDPAKAFPAPEPQQSQPVAA

SEQ ID NO: 103498 - protein, 399 aa, unidentified
MESIHPNGERIKRFRELKATLRTQRDWLLVGIDVAKAAAVAQIRLAHTRILERQGVLPMTTAGFTAFWRRLERHQRATGAQAIVVALEPTGTYHQALAAFLVAQGADVVLVDNHVAHLNRRTLDRTWDKHDAKDAANLCDLLEQGKVLFYTQLAEPLASLRRLVRLLRRARVELGACKTRWQNTLRPALGPVGDPLPPAVAAALPAPLRAWCPAAERPDGPGRRRALPPGLAAELADLAARGTAVQQRIAALEATLTRCAAPLPATGLLDSLPGVGETLAAILVAEIGEITWYTKFSQLRKLAGLDIIRLQSGQWAGTARISRCGRPLLRWALYQAALGACRTPAWRAKRAALLAKRQGDPHAFFKANVELAAKLLRLVWGVWRSGRPYTSARALPPAA

SEQ ID NO: 103499 - protein, 412 aa, unidentified
MDVLVDRCAGLDVHRDSVMATVRVPGKRRRQRERHTRAFGTTIAQLAALGDWLAGFDVTLVGMEATGIYWQPVFHVLEHRFECWLLNAQHLHNVPGRKSDVIDSAWICELVEHGLVRPSFVPPPEIRRLRELTRLRKAEIQERTRAIQRLEKLLQSVGIKLTSVASQAYSVSARAMLEALLAGTSDPSQLAELARGPLRAKIPQLREALANRFDISHHGVLVSQLLSHIDALDRAIAVFDERIAVATEPYAELIKLVSTIPGVKQRTAEVLLAECGADMSVFPTVGHFTSWARICPGNNKSAGKNRSGKTLRGSRWLREALTEAAKAAARTKGTYLASHYRQIRGRRGEPKAIGATRHDILVAYYHIVRDQIPYRELGADWLARRYSPEHRARRLVRQLEALGLKVTLEAAA

SEQ ID NO: 103500 - protein, 340 aa, unidentified
MDNIGLDLHKRESQLCILTSDGEVVERRIQTSRERFTAVLGERAPARILVEAATESEWVAQHLEALGHEVIVADPNCAPMYATRSRRVKTDRRDARTLAEACQLAAYRRVHRLSPARRHVQVELTVRDALIRTRTRYVAVVKARVRREGLRVPGGDPEHTVAKLMALPLSVAVAAELAPLVALLEPLNAQIVAADARLAVLAAADAVVQRLMTAPTIGPVTAVAYVATLDDVGRFATARRVAAYLGLAPTERSSGEQQRRGPISKTGNPRVRCLLVEAGWRILRSTQPAAAPLRAWAERIAARRGRAIAAVALARRLAGILYAMWRDDADYRAAAISAVV

SEQ ID NO: 103501 - protein, 408 aa, unidentified
MEVMYPRCAGLDVHKEQVTACIRIASDGKASREVRSFSTTTSGLLALAEWLGNDGCTHVAMEATGVYWKPVWHILEGSFELVLANAQHVRNVPGRKSDVNDATWLADLLAHGLVRASFVPPTPVQEMRDLTRTRKQLVREIAQHTQRIHKTLEDANIKLDSVISNILGLSGRAFLAALIAGETDPEKLVELAHPRLRAGRSTLVEALRGRVTQHHRFLLELHLSQIDSLDKAVRGLEARMGDALAPFRGQVEHLKTIPGVSDTVAQVIAAEVGLDMGRFPTAGHLISWAGLCPKMDESAGKRRSTRVRKGAPWLKTTLVTAAWAAARKKTGYLRAQFLRIKSRRGAKKAIMAVAASMLTAVYYMLRNDMPYRDRGADHLDDRDKRQVANRLLKRLAALGFTVTVTAAA

SEQ ID NO: 103502 - protein, 340 aa, unidentified
MVEGTEGSHHKEGSTKMSEGITVCAGIDTGKHKLDIAIDGSAERLQIDNNSEGHRSLSSWLRQRRVERIGLEASGGYEQAVVLSLRTDGFVVIVFQPVQVRAYAKFVLQHAKNDAIDAVLIARCTAAATDIREPPDARLALLAQHLTMIEQLTQDVGQLKTRREASREQRIREFWKREINRLKVLLNSELKQVVAVIREHRDLADRLDLIASVDGVGLRTAVAILVRMPEIGRVTREQAAAIAGLAPYDDDSGLRRGTRHIKGGRQRLRQSLYAAALPAVFYWNPQLQVFYKRLIAAGKSHRLALVACARKLLIFVNTVVARGTPWQEEPPIRATNHAAA

SEQ ID NO: 103503 - protein, 391 aa, unidentified
MVQVNDLSRSLAAFDPISTLVVVVEMSKASWLVSSVVPGVERQPLKKLEPDATALLRLIERWRNEAVRVGRPISRIALAYEAGRDGFWLARWLIARGIEAHVIHSASVAVSRERKRAKTDRLDAAMLMRVFLGWLRGERGHCGMVAIPTMEEEDARRPNRERESLVNERSRIINRMKSALARLGIRGFKPHLRKAPERLAGLRTAEGTGLPANIIEEFRRDMARLALVREQISSIEKTRAERLERAPDTGPHAMVRLLARVIGIGIETADMLVREILSRKLRDRRALARYAGLTGSPDESGLKSREKGLAKAGNARVRRGLIQLAWRFLMFQKDSALARWYRTRTEGPSGARKTTMIVALARKLLIALWRLVTTGEVPDGVELRPAARGIL

SEQ ID NO: 103504 - protein, 341 aa, unidentified
MRVMIGVDPHKGSHTAVAIDTAESELARLKVRATRRQAEELLGWAAQFEERTWAVESAGGLGYLLSEQLLAAGEDVVDVPATLAARVRLLGSGRSQKNDPNDARSVAVAALRSPQVVAVDRADHVGVLRLLAKRNTDLGRARNRTACRLHALLAELVAGGIPNEINASSAERLLADVATTSPIALARHALALEHLDDLRRFDAQMAESKRRIAAAVTESGTTLTELFGVGPVVACMLIGYTGDVHRFRSQGHYATYNGTAPIDVSSGGRVVQRLSRRGNRQLNHAIHIAAVTQIRHPHSPGRPFFDRKLEEGKTKKEALRALKRRISDVVYRQLLLDAKQP

SEQ ID NO: 103505 - protein, 343 aa, unidentified
MENITTVGLDLAKSVFQVHAITEEGAVIVRRALRRSQVLDFFRKLQPCLVGMEACGSAHYWAQEIQALGHTVRLMPPVYVKAYLKRNKTDAADAEAICEAVTRPTMRYVPVKTQYEQSAGMVLKARDLLIRQRTQTINALRAHLAELGIVRATGLVGIISLAAIVRDHTDHRLPDEARMALEELVAQIETVTTRIERLDRKILEAVRKDDSARRLTAIPGVGPIIAATVRAVVPDPAGFRTGRDFAAWIGLTPRAHSSGGKERIGSISKRGNQQLRTLLVAGATSVLKLARRGLQASPWIAAMLLRRPFKVVAVALANKIARIIWALLVRDDTYRGAKMIEQT

SEQ ID NO: 103506 - protein, 346 aa, unidentified
MLYAGLDLSRQRLDVHVLDEEGRTIEVMAVHPDADALRTLAAHVLRHGQEVSAAIESMTGGRFVHDQLKFAGWDVAIADSAKVKGIAPLAAKTDKIDAWVLADLARRNLVPEIWLPDPRVRAERERARFRLHLVRHRTALKNRIHATLMTFGHSVPVSDLFGTAGRELLAGLALPEPWATTLATSLCMVDELNIRIDACERDLVRLGADHPYIPLLLTVPGVGWVLAYTIASEIGDIARFASPKKLAGYTGLCPFVRQSGNHDLRGPLAKNGPKYLRWALVEAATHAARDAHYRARYERNKKRLGRQRGAKVARIDIARQLAEAIWHVLTKNEPFSPAGPAIALVA

SEQ ID NO: 103507 - protein, 388 aa, unidentified
MTQTPVPCSVPAAPDYDRTLVLAIELSNTSWVLAAQVPGLPRVKAKRTIEPTAAALLAAIQGYRERAKTAGRRVERVVAIYEAGWSGFWLARWLATHGIETHVVQPSSVPVDRRARRAKSDGIDAELLLRTLLAWLRGEPRVCSMVPIPAEADEDARRCVREREELVAERVALVNRIGAVLATLGVGEYNPLLRNRRERLDALRTALGTSLPPHAHAKISRMLDRLDLVRAQIAALEQERDAVLEDEVPDRAGGMIQQLATLRGIGVQSATVLVREAFVREFANGKALGSYAGLCATPHSSGGTEREQGISKAGNRRLRTVMVELAWLWQRYQPGSAEVTWFRARASGTGARMRKVMVVALARKLLLALWRFATQGVVPEGAVIKPAT

SEQ ID NO: 103508 - protein, 342 aa, unidentified
MKVEKDLYGGLDLHGDNVFCTLMDQQRQVVFERRLPNDMETIREALEPFRKRIRVLAVESTYNWYWLVDGLAKLGYEVKLANPAKMQENIGLKYADDKTDARFLSRQLVMGTLPEGYIYPVETRGLRDVLRRRMRLVHVRTGEWLSLESLVARHTGRGMNVKELTDCEIGEVLRGQPHALLMAQANFRHLDFLKKEIKKLEKAVMDEFPDMSGYHRLMTVPGIGMVLARTILLETGPVGRFRRAGNYASYCRAVKSVHTTNGKKKGEGNGKSGNKYLSWAYVEAATLAVRYSPELRAWFQRKLARSGMRVIAVKALANKLCKACYFMLRDGTDFDVKRLVGG

SEQ ID NO: 103509 - protein, 398 aa, unidentified
MLSIGIDVSKGKSTVCGMKPEGEIVYAPFEVQHTREGMSELVSLLRSSGEEVRAVLESTGSYHCPVVAALLENGIFVSVINSLRMKRFCSQSIRKVKTDRIDAMQIALYGLAYWQELQPTRLPEDTYRELQRLARQYYQMTSMLIKAKVDFNALCDQVLPGMQELMSDHAGRHKLSDFVLRYHHTAHILKMGETRFRKDYCKWAEKKGYRNHERMAALIFATAQNGIPVLPDAPSTQIVITEAIRVLHTVEASRDAILTQMQALAKTLPEYSLVREMPCIGDTLAPRLIAEIGDVRRFHSKRALIAYAGIDAPPYQSGKFSANNRHISKRGNRYLRKTGYEVMQSYVMHKPANDPIFTFIEKKRSEGKSGKLAMVAGLNKFLRVYYGKVTELYRSLPQ

SEQ ID NO: 103510 - protein, 376 aa, unidentified
MREKLRFLGLDVHAETITAAIVEPDGEVRSLGTIANREDSIRKFIRKLGLVEQLRACYEAGPTGFVLYWQLAQLGVQCMVVAPSLVPKKPGDRVKTDRRDAIKLARSHRSGDLTAVWVPDEDSEALRDLVRQREAAKQDQLRARHRLTKFLLRTGRRPPLGLKAWTERYLAWLQQVGYTQPAQQATLVDCLNEVQHMSARVKRLEEAILEVVKLAPQPMQDVIRGLQALRGVAHISAVTIAAELGNISSRFESARKLMGYCGVFPSEDSSGKRIRRGGITKAGNAHLRRIVVESAWSYRHLPRVGAKLRKRQHGVPAEITEIAWKAQNRLHKRYMKLTMAGKDQRKTMTAVARELLGFIWAIGIKAEAAGKQQLAA

SEQ ID NO: 103511 - protein, 374 aa, unidentified
MVDDTALYVGLDVSKEKIVVDLAEAGRNGEVRYYGEIANRADAVRKFVDKLAGRHERLCFCYEAGPTGYGLYRQLSGLGHECLVVAPSLIPTRPGLQIKTDRRDALALAALLRAGELSSIWVPDETHEAMRDLCRARETAVSDMRRARQHLLSFLLRHGRIFEGRSHWTKAHRNWLATQRFDHRAQQIAMEEYIRAIEQIEERRERLTQQMLALLPDWSLNPVVEAIQALRGVAQISAVTLVSEIGDFRRFRNPRQFMAWLGLVPREHSTGASVVRGSITKAGNTRARRMLVEGAWTYRLPARVGQEILKRSEGLPEEIRAIAWKAQVRLCQRYRRMQAGGRPTNIVIVAIARELAAFVWAIATTIPVTPTKAI

SEQ ID NO: 103512 - protein, 419 aa, unidentified
MKVVYPICCGVDVHKSFFVATIIKTEGITPKYSKKRFSTFNNEILRFKEWLIENNCYDVCMESTGKYWIPVFNLLEDKINVVIASPKWVRAVKGNKDDTKDSKWIGDLFRLGLVPGSFIPPKPIRVLREYTRYRYKLVSCKSSEKNRFQNSFTVCNVALDSVVSDMFGKSASLITDYLIKTDNFDPEHCKSLLQRSLKKKADLVLDAVSGYQIAPAQKQRMLMVRSHLDYVEKAIETVDKGIDTIVAPYESYISLLCSIPGVERRSAITIISEIGTDISQFSSSKRLCRWAGLTPGNNESAGKKKSVRITRAGIYLKPALVQVAHAAVKSKESPYYKNKYERISKRRGKKRAIIAIARMILTSVFHMFKIGELWNPTDLFKLDMPPVLQEKQKQKAIQNAIKLLASQGLTVVENPTPAA

SEQ ID NO: 103513 - protein, 414 aa, unidentified
MQVEYERCCGIDVHKETVVACVIVPGADGKPIKETRTFNTMTGDLRALAEWLKQKQCTHVAMESTGVYWKPVYNLLEGQFEVLVVNAEHLKKVAGRKSDVADAEWIADLLRHGLLKGSFIPSAPQRAWRDLTRYRTTLTDERTREVNRVQKVLEDANIKLASVASNVMGVSGRAMLEQLIQGKTDPALLAELAKGRLREKRELLEQALTGTFKPHHRFMLIQHLSHIDFLDEQIAKLDAALEEQMRPFQAELMRWDQIPGINLRIAQVLVAEIGTDLKQFEDAAHLASWAGMCPGNNESGGKRKSGRTRKGSKWLRRALVEAAHGAARTKAKYFKNLYHRLAGRRGKKRAIVAVGHSLLVTGYYLITRGRNYEDLGANYFDERNKEMVKRQAIKRLEKLGFKVELKPTVVLELA

SEQ ID NO: 103514 - protein, 401 aa, unidentified
MAGRLWAGVDVGKEHHWVAVVDEAGTVVLSRKVVNDEAAIIAALGQVDALGDEVSWTVDLTTVYATLLLTVLADAGHSVRYLAGRSVWQASVVYRGGEAKTDAKDARVIADQARMRGGDLPVLQPDDELITELQMLTAHRADLVADRTRTINRLRQQLIAVSPALERVARPASDRGWVVLLARYQRPKAIRRSGVTRLSKTLTDAGVRNSAAIAEAAVAAAKTQTVRLPGEDIAAGLVAELAQGVINLDERIKQTETAIEDRFRRHPLADAIVSLPGMGFRLGAELLAAVGDPSRISSADHLASWAGLAPVPRDSGKRTGRLHTPQRYSRRLRRVMYMSALTAIRCDPTSRAYYRRKRDQGKRPIPATICLARRRVNVLYALIRDNRTWQPDSPPINTAAA

SEQ ID NO: 103515 - protein, 385 aa, unidentified
MQASNTCMPITDHTATIFVAIELSQRNWLVVMHSPDRQRISRHRLDGGDHDGLVALIEKVRSRSVGALGVAPEVVSCYEAGYDGFWLHRRLTAAGITNLVFDPASIAVEQRGRRAKTDRIDGEVMLRTLMAHRRGEPRVVRIVHVPSAEHEDLRRRSRERQRLITEQTAHINRIKGLLKLIGLGAGNVRRRDWPGWLEGQRDWQGKPVPRHLMDELKREHARLLVVGEQLQALAAAADTAAQPASPAAAQIAQRKAQLLRLNALGPVFAGTLMDELFYKDFRNRRQVAAYCGLSPTPWRSGTMAREQGISKAGNRRVRHKAIELAWLWLRHQSGSALSAWFRRLSESGGRRAKRIAIVALARKLIVALWRYLTTGLVPEGAIIKA

SEQ ID NO: 103516 - protein, 373 aa, unidentified
MENTITYVAMDTHKKEHKIALHYPGQQEIVNLIMKNSSSEISKTVKRILKKSPGEVRFCYEAGVCGFNLKRRIESLGCKCAVIAPSLTPTKPGERIKTDRRDAVRLLEMFKAGLLTEVHAPDPQQEAARELTRLRQTARQNLMRIRHQLLKFLTRHGYIYTEGNHWTGRHLRWLRGLEFEEPLLQEVFDSYLTEMQHCMQRLDSMDKQVGHLADSQAYKEMVGLLKCFHGIDTLTAISIITEVFDFGRFSSPRDLMSYLGLTPSESSSGEKQKKGPITKTGNKRVRRLLIEVSWHYRHPYHISKVLKQRRKDQPQWAIDIADRAGQRLRKRYWYLIHRGKMQCKATTAVARELAGFIWSVFREYQVRNMHKAA

SEQ ID NO: 103517 - protein, 365 aa, unidentified
MLLRNSLFPAAPYMEILGMERTLNHHWCVGVDLHKDTLTACVFCRGCGEVSYQKLPCKCRKLITEYFAALPRPHTVAIETVGFYRWLWELAEPLVEKLVLADATQARALAGRRLKTDREDAYNIAELLAAGRLPLSYAPPLEVQFLRDLTRHRNGFSRGHARVLCRVKSIMNANNRPGPARLESDGLIRYLKAQGEKLPPRHVAMLWQCVDQLALTERQIAQAERVIGEMVEREEFREVYAILTSFPGVALVTAATVIAEVGDFGRFTHRKAIGRFAGLNPRVFASGGKQRIGHIAKTGSPQLRWIMQQAAWTAIRTDDEVRRVFLRIAKRSGRKAAAVAIARKMLTWMWVAVTKGEPYRSRVAA

SEQ ID NO: 103518 - protein, 413 aa, unidentified
MKVFCGIDWAEAHHDLALVDDQGTLIAKRRISDDAAGFAALITLLADAGDSADDPIPVAIETSRGLLVACLRATGRKVFAINPKAVDRYRDRYSVARKKSDAGDAFVLANILRTDIAAHRPLPVDSELAQAIAVLARAQQDAVWERTCAHNKLRSLLREYYPALLAAFTTKRGGLLRPEARALLAAAPTPRAAATLSITRLAALLRRAGRHRGIDAEAARIHAILRTEYLHHLPLVEDAFGRQALALLRALNTACTNAEELAAATIDHFDTHPDAEIITSLPGLGSLTGARVLAEIGDDRSRFTNARSLKAYAGSAPVTRASGKSLTVIHRRVKNQRLAAVGYVWAFSALTASPGARTHYDRRKTTGDRHTAAQRHLFNRLLGCLHHCLQTRQHYDEQIAFPTTRNNSTKEAA

SEQ ID NO: 103519 - protein, 341 aa, unidentified
MSESALIGIDLGKHTFHLHGQDKSGREVFRRKCSRAQMMQFFGNVPSCVVVMEACAGSHFVARQLMAMGHTAKLISPQFVKPFVKGNKNDFVDAEAICEAASRPSMRFVTPKTESQQTLSVLHRMRESLVHDRTKTANQMHGFLLEFGISLPKGLAIMKRLASVVAEHDLPVRLTVLLQRLHDHFVYLDEQIKALDKELAGQLANDDLGSRLLSMPCVGPITASLLAVEMGDGKQYRCGLDFAASVGLVPRQYSTGGKANLLGISKRGDKHLRQLLVQCSRVYMQRLDHQKGALADWVKTLLSRRHSNVVACALANKLARIAWAIAARHTQYEAGPDALNA

SEQ ID NO: 103520 - protein, 361 aa, unidentified
MTNFIFAGCDLHEETLVNRIAIGQQPSERKTVGNSRAGRELIAGLKRESDKHGGARIIFGYEASGQGFGLHDQMVEAGIECYVLAPTKMESSVKQKRNKNDDRDAERILKRLRAHKLAGEELPSVWVPDLQTRDDRETVRARQDLGDKLSSVKVQLRSLLQRHGIEKPTGVGKPRTKSHQQWLEQLSGDSQLGVGVRTALGSLLRQVRHLEQEIQQLDEAVDQLSRKPHRQAVVDALDQETGIGRLTATAYAVEVADFTRFRRGRQIGAYWGMTPSSDESGEVNDRKGHITRQGSPRIRKLLCQATWYRVQKDPQVRAIYQRLVIRNPKKKKIAVVACMRRLAVRLWHIGRQAQLAMKEAK

SEQ ID NO: 103521 - protein, 340 aa, unidentified
MDYCGIDLHQDKTYVCILDEEGDVMERTTVRTTRRALSKYFNARERMRVVMEAGGSSPWVSRLVERCGHEVIVCSTRRVRLIAESTLKTDDVDAEVLARLVRIDPGFLGSVTHRSEEAQRLRSKLTVRTSLVETRKKWINAVKGILRGEGYRVAGGAPRTFPQGLAKLELPAQLREGIEPLLRQLDLVTAEIEGVEENLKLVADDLPVVAHLRRIPGVGLIVALYYVLTIDDPERFRESRDVAAYFGLRPTMRSSGKVSYFGRITREGDSEMRRLLVQAAHGLLRTRARSHLKDWALKPAARRGKGKAVVALARKLAVLMHRLWVTGEVFQPYPEKAAAE

SEQ ID NO: 103522 - protein, 355 aa, unidentified
MTSVKYIGMDVHTESTSIAVRNSLGKIVMEGVIETKANTILQFLDGLRGDLRVVFEEGTWATWLYDLLKSHVTEVLVCNTRKNAVRKGSKSDRIDARKLAEQLYMNNVKSVYHGERGLRMMKELARSYLTITKDLVRVMNRLKALYRSWGIPCAGTEVYALRYRAEWLAKISEAGVRRRAEHYYQQLDALWPLRQEARRDLLVESRKHKIWKLLRRIPAIGPIRAAILIAVMQTPHRFRTKRHLWTYSGLGLETYDSAEYRAVRGQLERSRKQATVRGLNKDYNHDLKDIFKGAAMRASTAAGPLRDFYDNLLAKGRKPTMARLTLARKIAAITLIVWKKEVRFDANYLKPQQAA

SEQ ID NO: 103523 - protein, 378 aa, unidentified
MPSDTTTYVGLDVHKRMIAVSLVVAGTGEVREWQETNDATVARRLARRLQREAGGPVSCCYEAGPTGYVLQRRLRSEGVMCTVVAPSLIPVRPGSRIKTDRRDARKLGELLGAGLLTAVHPPSEEQEALRDLCRCRVDVVEDLLRARHRMSKFLLRRHCVCKESGNNWGTRHMNWLRRLRFEDAASQVTFDSYLLGIDQLGERLLQLELQLAEFGAQEPYREPVGWLRCFRGIDTVTAVSLVAELHDFRRFGSARALMSYLGLVPGENSSGERERRGSITKAGNGHARRLLVEAAWHQRHRPAISQPLRKRRAGQPAWVLAIADRAQERLWRRWTRMTFRGKPTQKVVVAMAREMVGYLWAVLQGPPIADTPIIDTKP

SEQ ID NO: 103524 - protein, 309 aa, unidentified
MEQQVKFDQVIHCGCGMDVHQKTVVATIRRNDTDFETREFNTYTRSLKLLRDWCKSEGVTHIAMESTGIYWRPIYNIMEEDFEVILVNARHIKNVPGHKTDKKDSRWISKLLLSGLLKGSFIPPREIRELRDLVRYKKKIVAEISSEKNRVIKILEDCNLKLSSVFSDVSGASASKMINDIIEGNDDVEGLMKHIHGKVQASRTEIRQALEGTLTDHHRRMLKLVNMSIEGKEKIIRELDRQIGETVEKYAVEIDNLQTIPGVGKESAIRIISEIGIDMSRFPNENHLSSWAGTSPGSNESAGKKKVHE

SEQ ID NO: 103525 - protein, 282 aa, unidentified
MSQPSTTTPYRLYVGADIAAQSVTLASLRPPEGVSAAFTIEQTPSGYTSLKARLLGSGAAASEVLVVMEATGTYWLKLAVDLQQAGFVVSVINPAQAHHFAQALLKRAKTDAIDAQTLAQLAAHLSPAPWTPPPAIYADLQQRLAQRDDLIGIRTQVRNQRHALSQRPHVVAAVRQRMDDLIDTLTVQIKAIDAELAELAQRSEPWMQSITYLRTIKGVGLITAAWLVVATLNFSVCTTPDEATAYAGLAPHPHTSGSSVRGRARIGHGGNARLRTALYMAT

SEQ ID NO: 103526 - protein, 321 aa, unidentified
MNTSLVSSIGIDVSKASLSFATLRVDHSAVVKSCANNEEGIDSMLAFFEEHKTDINVPCVIESTGDYHVQCALMVADAGFTVNVINPLITKQYQRASVRNNKDDTVDAVRLARIGLLEPNLRRFKATKQSLALKKVVASVGKLDHYRQQLKAHVKQLKEAEALLGVKMNLSQLEKAIASIEKQTDQFETYIHDHAPKEAIEISNGVRGLSQTSVAKILSLLDGHEFTDKHKLVAFTGLDVAARRSGSWKGRERISKRGNPHFRKILFQIAWGLKQHNETYRAYYTQMRERGKHYFTCLIAVARKFLRFLFAYVWKKSVSFS

SEQ ID NO: 103527 - protein, 351 aa, unidentified
METQITAQPKLYIGIDIHKRSWKIHCSTDLFSGKSFSMEPEPEFLQKYVLKHFADYQVSVAYEAGCCGYYAHRCFTSYGWLSLVVNPADIHRKGKEKYTKTDRIDAQLISRELKDGRLDSIHIPTIEREELRSLFRRRNDLVKDFRRIKSYIKMQLLYFGIKEPVHFDNDHWSHAYRKWLDDMIFKHPTAKATLDSRMRFFRFVDKELRDVSTQIRGYCRKHHKKDYYLLRSIPGIGGIVACGIISELGDLRRFNSIKHLAGYVGLAPGVHQSGGNYKSMGITMRAHRLMRSYFVEASWQAIRADPVMLAYYRKHHGKNVKSVIIKVARKLLSRTLAVIKTETPYAIGVLE

SEQ ID NO: 103528 - protein, 338 aa, unidentified
MKLYGAIDLHSTNNVTVVINEHDQVVYQKRLPNDLSLIAQQLSTYRASLEGIVVESTYNWYWLVDGLMEKGHRVHLANTAAIQQYNGLKYTDDHSDARWLAHLLRLGVLPEGYIYPKQERAVRDLLRKRGQLVHQRTANLLSIQSLISRTTGNSISAKYIKALDIQHVDGVLPNPDLVLALKANLAVMNSADAQIEILEKAVQDRVKLRPQFRFLKTVPGIGPILALTIMLETGEIARFASVGNYASYCRCVGSRKISNGKRKGSGNTKNGNKYLAWAFVEAANFAIRFYPRIKSFYQKKKSKSHAIVAIKAVAHKLCRACYYIMKDQVPFDITKAFA

SEQ ID NO: 103529 - protein, 337 aa, unidentified
MDYFAGLDISMDETHVCVLDREGVVVRESKTESTAQAIAGELAKAPSCRRIVFETGRMAPILFHGLSHLGLPVVCVESRQAYQALRSLATHKTDRNDARGLAHLARTGFFKPVHVKSLSAHAVRSLIGARKKLVGQRVTLENQIRGLAVVFGVRLPRALTVAFVNQALKASEGIAGLSAAMRGLIAARTAVMTAVAAIDADMRRMTRASAACRRLMTIPGVGQLTALAFVAAIDDPSRVRRSRDIGAYLGLVPRRHQSGEVDYTGGISKCGDGRVRTLLYEAANVMLTRYKGQLKLKDWAFAIAKRSTMRKAKVALARRLAIIMHAMLRDGTEFELA

SEQ ID NO: 103530 - protein, 423 aa, unidentified
MKISEVRQELSEGSLWAGVDVGKNSLFLVLRDVAGKFSRPWKANQPAELGELVGRILELSTACPLVVALESTGTYGDALRQALTDANVSVERVSGKATHDYAEIFDGVPSAHDGKDAAIVAELAALGKSTPWPYQGASEEDAELARHVDWMDAQQDILQTWQGRLEGLLSRHWPEATRIFGLSSVTLLKVLSHYGGPAALAQASEAEEQLSRWGGHFLKPEKIRRFVKSAARTVGVRMTEVDLCRMKSYAQEARQAAGEVERSKRALSRLSSENETLERQAAVVGAPTASVLWVSVGDPADYRCGEAYRKAMGLNLKERSSGKYQGKLKITKRGPGLARRWMFFAAMRILQEPPVRDWFEAKKRKDNDRGLGAVVAVMRKLALALHAVGAEGEKFSRERLFPGRPFRGGKSGPHGRPSKIRKD

SEQ ID NO: 103531 - protein, 410 aa, unidentified
MPKIVYPICCGIDVHKSFVVACIATNDEKLVTTYKSKRFSTFTGDLRRLSEWLTQNNCHDVCMESTGKYWIPVYNILETTCHVVLAHPKYLKAIKGKKTDKRDAKWIADIFKHDMLNGSFIPPADIRQLRDLVRYHFKLTSYTTGEKNRAQNCLTVSNIKLDDVFSNVFGKAASAITSRLLESNEPFDVIPYLTKNIKASPKEIQLAVDGMMCANQAEKLRIIRSHMDSLDLCKANLESVILSVAEKYLPQVNLVVTVPGIQPFSAIGIIGEIGVDMSVFETSRHLCSWAGLAPQNDQSAGKKKTTRISRAGVYIKPLLVQCANAAIRSKQNPEIANRYNSIKKRRGHKKAIIAIARMLLTAIYNILKKNEPYNAELYRQSDTPPLQREVTVEQAIFILQRQGYLVTVST

SEQ ID NO: 103532 - protein, 335 aa, unidentified
MHYLYYVGLDVSKETFDASLVAFEDANEMAHRKFANSRKGICSCLHWVEKRHGIRLDDVIFCAEDMGSYISEMAVCASDRTLNFNFSLISPLVIKYSMGIARGKTDRVDARRIAEYAITHYRKIALYLPAEKELCQLRTWLILRAHLAKQRVAKLVLLEKLDYKEKFADVSIQRSMLQEEIAYAETHMKTIEREMKELIAADSNICRNYKLLTSIKGVGPITAIVMLCSTLNFTKITDLRKFACYCGLAPFEHSSGTSVRGGCHTSSMANRDIKVQLNRSALIAIRCDPQLKAYYERKVAEGKHKFSVLNAVRAKIAARCFAVVRRGTPYVALQI

SEQ ID NO: 103533 - protein, 365 aa, unidentified
MPELTHIGLDVHKETIAVAVVRPGASECEERVIANTPEALRRLFTRFPDRAALRTCYEAGPTGYDTWRLLSSLGVPCEVIAPSLIPRRSGAHVKTDRIDARNLARLDRAGELTAVRVPTPAEEALRDLVRAREDLKSDRRIARQRLKSFLLRYGKRYPVPRGRWGVRYELWLQTLSFEEPAAQAAFDHLMGAASVRAAQLAAIEREIEAAALTGALAEPVAQLRAFRGLDTLSAVTIASETCDFRRFPTAASYMAFTGLVPREHSSGATRRQGAITKAGNAHLRRVLVEAAWAYRHRPAVRGKLAARQEGLPPDLLAYSWKAQQRLHAAYRKLAARRGANKAAVAVARELSGFVWGAMTGRLGAC

SEQ ID NO: 103534 - protein, 351 aa, unidentified
MKEYISFDSHKRYTWVERERVTDGRVMQCRLEHAPGAIRSYLQQCEPGTAVAVEATGNWYWIVSEIEQASLQPLLVHPRKAKLMMGLINKTDRLDTHGMNRLQRHGTLPTVWIPPAELRDLRELTRTRLVLTQQRTRLKNRISATVSKYGLPASEASDPFSKKARAELQQRLALLPEQAQWVSRQLLSQLDFVMVQIQQIEQRLGELSRITPAMRLLQSLPGVGGILAPTMALEIGEIRRFLSAERLASYAGTTPRVHASGGKVRYGNLRSDVNRYLKWAFVEAANSVAVNYPRNEGRHVSRLYRRLRERKGHNKAIGAVARHLAEAAFHVLQGQQPYRDPAAEAGCAREV

SEQ ID NO: 103535 - protein, 343 aa, unidentified
MSEISMIGLDIAKNVFQVHGVDAFGMMVLRRQLRRAAVERFFAKLPPCLVGMEACGSAHHWARVISRYGHQVKLMPPAYVKPYIKRNKNDGRDAEGICEAVGRPTMRFVAVKSVEQQATLAVHGTRALLVRQRTMTGNALRAALSELGIVAAQGLEGLRELMARLEEPSKAIPEMMRAALLVLARHWQALDADERALERQIAKAARCDRDARRLMEVPGVGPIIASTVLAKVPDAKLFRSGRDFAAWIGLTGKDHGTGGKHRPGRISKQGDRVLRALLISGASAHLRQQKARGVTDPWLRELLARRPYKVAMVAFAAKTARILWAMLVKGEHYRDRASASAAA

SEQ ID NO: 103536 - protein, 425 aa, unidentified
MKEPTVQAFVGVDWGTEEHAVCAVSPTGEVLWQRTAKHDADSLDQMCGWLLELGMGDPQAVHVAIEVPHGVVVDTLQDRDFPTHSINPKQLDRFRDRFSPAGAKDDSRDAHVLGDSLRTDGHRFRRLCIERPEVVELREWSRMSDELRTEHNRLTNRVREQLRRYYPQFLQIGEDVGKDWVLDLWELVPTPDRAKRVREKTLAGFLKGHRIRRVDAVSLRSVLLRPPVTVSPGTVAAACAHIRLLAERIRVLNRQLKECHKKLDWLCDALIPPSPEDETEGEMQAEHHDVEILRSMVGIGSIILATMLGEAWWAIKARDIDVLRTLGGAAPVTKRSGKRLTVVMRKACNPRLRDAYYHWARVSVQKDPRSRHRYAQLRAKGHSHGRALRTVADRLLTVLCAMLRNGTLYDVERGKDVAYKLAAAG

SEQ ID NO: 103537 - protein, 394 aa, unidentified
MHKDAHCAVVIDCWMNKLGEVNFENRPSRYPAFVEDVRKICGTKEIVFGLEDTRGFGRNLAAYLVGRKFEVKHVNPAYTSAVRLANPIIYKDDSYDAYCVARVLRDMVDTLQDAKHEDIFWTIRQIVKRRDLIVKSNVMNKNQLHSQLAYSYPSYRKFFAMIDSKSALCFWENYPSPEYIWNTTPEEIYHTIKPVHQALKIQRIHEIISMIERDGDTRKDYQPERDFIVRNIVKDIRHNKALIAEIDDELRKLIPLTGYKLHTMPGIDLVTEAQIISEIGDINRFPDSDKLARFMGLAPVQFSSAGKGKDQRCRNGNRALNAIFHFLAIQMVAVSASGKPRHPVFREYFEQKVKEGKNKPQALVCVARRLVRIIYGMMKTKTEYRPYEKVDDKN

SEQ ID NO: 103538 - protein, 402 aa, unidentified
MLSKRSKRSVVETVKPAALSASEKPQASRRAVDRSCLGDQNTVTEQDRRLSVGSSPNSRKNRASASVVTSSNLQDRVNTISTAPLDPHVFVGVDIAKDKFDVHVRPSAKKATFTNDPSGFDLFVKYLKQFPTLQLLVVEASGGYERPLVTHLIDDEVPVAVVNPRQARDFAKGLGHRAKTDPIDASDLAQFAELVKPTLTPKTPENQQELQDLVTRRRQILQIRTIEKNRQNTIHGKLPIKSVKDTIALFDKQLVAIEIAITELFNASDDWTAKTKILTSVPGVGLTTAHQLLAEISELGTVNRNQIAALGGLAPYNHDSGKLKGRRCISGGRPNVRSAIYMAAFSARRCNPIFKAFAKRLEDAGKPYLVIQVACMRKLLITLNAMLKTGLTWNRQIVQEIS

SEQ ID NO: 103539 - protein, 400 aa, unidentified
MIDTGDIDVFLGLDVGKGEHHATAVTPAGKKAFDKRLPNTEPKLRELFAKLQAKHGTVLVVVDQPASIGALPLAVAQDVGCPVAHLPGLTMRRIADLYPGEAKTDAKDAFIIADAARAMPHTLRTIDGEDETIAELEMIVGFDDDLAGEATRVANRLHGLLTQIHPSLERVLGPRLQHPAVLTLLQRFGSPAQIRKAGRRRLITLLRPKAPRMAERLIEEIFAALDEQTVTVPGTEAAALIVPSLAGSLAAVLDQRKLLAKRIEELLEDHPLSKVLTSMPGVGVRTGARILIEVGDGSTFPTAGHLAAYAGLAPATRSSGSSIRGEQPSRRGNKQLKRAFFLSAFAALGDPASRAYYDKKITQGKHHTQALLCLARRRADVLFAMLRDGTFCEPRPAAAR

SEQ ID NO: 103540 - protein, 345 aa, unidentified
MNITTVGLDLAKNVFQVHAIDEAGEVVVGKALRRRQMMPFFSKLDPCLVGMEACATSHHWARQLTALGHQVKLMPPIYVKPYVKRGKTDAGDAEAISEAVTRPTMRFVAVKSLDQQSMLALHRTRDLLIRQRTQPVNMIRGQLAEFGIVLAKGIQHVFKFTGQLLDGEAPDIPPLAASVIVTLAENLRDLHARIGGLDKDIRTWSKDNEVVQRLLTIPGIGIITASALAATVTDPHQFTSGRQFAAWLGLTPKANSSGGKERMGRISKMGDQYLRRLLVNGMTSLSQSVRRNPDAHPWAAGLMRRKPDKLVAVAMANKTARIAWAVMTRGEVYRAPQPSGVKEAA

SEQ ID NO: 103541 - protein, 408 aa, unidentified
MRQLLERCCGLDVHKKSISACARVPDEQGEVAELYATFGTTTPDLLELSDWMMGLGVTHVAMEATGDFWKPVYYILEADFELLLVNPAHIKHVPGRKTDAIDAAWIAELLSYGLLRKSFVPPPPIRRLRDLTRYRKALIRDRSREVNRVHKVLEDAGVKLSAVATDVMGVSGRAIMEALIGGTSNPDALASLAKGRLRAKIPELHKALTARFKDHHGFMLQRMLAHIDDLDADIAAISGRIEAEIGPFAEKAKLLPSITGVGTRAAEAIIGEIGVDMSVFPTSGHLASWAGLCPGQRESAGKRKSSRTRKGSELLRTTLVECAHSASHTKDTYLAEFFWQVTRRQGKDKAIVAVAHEILIACWRVLSTGTAYCDPGPGALRARSEEQIRRRAIRQLESLGLRVTLDAA

SEQ ID NO: 103542 - protein, 428 aa, unidentified
MSNQEIIRREQYCQIVSEITGSDEYMVVGMDVGKDKHHAFVGTARGICLFKKLVFDNNLDGFDRLLTTVDQLKSQSCLEKIVYGLEPTGNYHKPLARHLIRCGRNVVFVAGQAVKKNRELLDGRWDKNDGKDAANVADLVSRGKCLYYDCPSPQIEELRGLLSLRRRLKKEEHSLRMRIRNNLLAQYFPEMDKFYSSCESESLAIVKWCLDPDKISVMEFDEFFDMVTKTRRGIEQMRRLRHIHRLAIESVGCPMGPAAEYEAGLLVEKRQQVAVQIKETADLMKDICLELPEYKYLLTIPGFGPYISAKVLAAIGDPFRFDNRKQVIKMAGYDLSANRSGKTSDQAVPVISKKGNGELRYALYQAAHIAASRTDLFRAYFTKILRGRERERGIKTKMRVKLAAKMLVIAWTLMKTKQSFDPGHLNID

SEQ ID NO: 103543 - protein, 363 aa, unidentified
MQYRTNNELSSLEETRCQFNGGTGVIKLGIDMHQDFYVVVEQLGGSNPKPPQRFKKEAFVLWAAKLKKQGNQVHAVYEACGFGFGLQRQLSALGIDCHVVCPQKLDEQNRRVKTDGLDAKALCLKLDRFVQGNRAALARVRVPTEKEEQLRAIHRQREQLVKARKRLEAQGRSLMVNYGVEPIQQWWKGRAFARLRVPTWMKELLATSQPILLALEEKIRALTVQLQNAAEPNQPRGIGALTSVVIDREIGNWQRFNNRRQIGSYTGLCPGEHSSGNTRLQSCVTKHGNPRLRAALVELAWRLVRFQPNYKPIVKWRATLAKGALATGAARKKAIVAVARQLAVDLWRIRTGRLQAQELGLIN

SEQ ID NO: 103544 - protein, 361 aa, unidentified
MFNERTSVGLDVHARSIVACGLDTVTGQTLRRRLVPTADVVLDWLRELPGPVAVAYEAGPTGFGLARQLTAAGVRCVVVAPSKLQRPAADRVKTDARDALHLARLLRMDQIVEVRVPGIEQEAARDLVRAREDVRGDLMSCRHRLSKLLLRQGILYSGGSTWTGVHETWLRGQQFTQRGVQIAFDAGLEAMLLTVERRNRLDKAIIEMATRGEYTAVVRRLSCLRGVSTLTAFGLAVEIGDWHRFTGATIGAYLGLVPTESSSGQQRSQGSITKAGNAHARRLLIEAAWHHRKTYRTPSATMRARWNLASPAAKARGHAGNHRLHQRWQAFLARRKKPAIANVAVARELAGWCWSLAVLDD

SEQ ID NO: 103545 - protein, 350 aa, unidentified
MDKYIAFDVHMQSCTMAVVGSSGRRLKSQVVETNGRALVDAIRGIPGRRHVCLEEGTQSAWLYELLRPHADDVVVTLAERRRGPKDDLRDAWMLAEQLRTGSLRAVVYKGPRRMRGLGDAVRGYTMLTGDLIRVKNRIKALYRSRGILTDARVYRPEQRSHWECKLPGSRRRLAEMLGGYLDAVEQAQGEAESWLREEAKKCAVVKLLATAPGMGLIRTAQVVAIVATPHRFRTVRQFWTYCGLGIVTRSSADWVREGGRWIRAQTMQTRGLNRNRHPLLKAVFKGAATTVIAGLPDHPLCRDYHRMLEAGIKPNLAKLTLARRIAAAVLSMWKHQEVYDPKKQCPKQTA

SEQ ID NO: 103546 - protein, 410 aa, unidentified
MRICMKQIVSVGIDVSKGKSTVCAMIHPNTIIKESFEVLHTVEEMSMLADYIGSLDGEIRIVMESTGHYHLPVAQFLYQKGFFVCVENAYIIRQFSRIMLHGAKTDPLDAKKLAKYGLAYWSELKPYKFHPSCYTELSLLSKQYQTYIKLLIAAKQNVIHLMDEMLPGFKEALDTASSVQFSKVKYVDFAKEFYHVDMIKSMGKEIFRENYKQWCKEKGYRFQSEKADELFHLAEDGIPTLPTEFPSTRLCMEVATEQVSQLGYALEQILSQMQNLAKTLPEYQTIRQMGGMGEKLCVRFIADIGDVRRFHNGKALVAYAGIDAPPYQSGQYTGTKRRISKRGNSALRKTGYEVMKSLKSHPPKTDTRVYDFIIKKENEGKSKKQAKIAGLNKFLQIYYARVMEIYKNIA

SEQ ID NO: 103547 - protein, 391 aa, unidentified
MIFVGIDVAKDTHYAAVSDDSGAVLVKPFAFQNNAEGFCLLLKKLSEFDRSKLLIGLESTGIYSENLICFLYESGFRLAVINPIQTATLRKTAIRKTKTDKVDTMLIIKSLMVNSYRLYSQRDADSLKLRTLCHFRQNLKKSKARLKIQLAGYVNLVFPEFGKFFKSGIHIAASYALLKKYSSPKEIAALRTSTLCILLSKASHGRFGKDTAEALKSLALSSVGVKNPYISIQIAQTIAQIELLEQQIKDLNSAIEEAMESINSVLMTVPGIGAVNAACILGEIGDIKRFSKPCKLLAYAGLDPTVRQSGQFTAKSTRMSKRGSALLRYALINSAWQLTLNDTTFKAYYDLKRSQGLNHYGALGHVAHKLTRVIFKLLTSDTPFNPAKLVA

SEQ ID NO: 103548 - protein, 339 aa, unidentified
MKLYGGMDLHSNNSYMVLIDESGAVVQRRRVGNEMGRVLQTLEAYREQIDSLVVESTYNWYWLVDGLKAAGYQVRLAHPSALQPYEGLKYSDDRSDAHWLAEMLRLGIVPSGYIYPEAQRPLRDLLRQRSFLVRQCTSQLLHMGNILSRNRGRKTSRQQLRQMTVAEVRELFPDRERTLAVESSLRVIEVLEQQIRAIEKQVLERIKPEAGFRNLQTVYGVGPILAMTIWLETGEIGRFKQVGDYASYCRCVTSTRISNAKKRGQNNRHNGNAYLAWAYVEAATYAARFYGQAARFVERKTAQVNRTLAIKALAHKLARACYYVLRDQVRFEPARLFGG

SEQ ID NO: 103549 - protein, 410 aa, unidentified
MQTLVERGCGLDVHQATVVACLLIVLKSGKVHKQVRTFGTTTRDLLGLREWLLSEGCTHVAMESTGVYWKPIYAILEGAFEIVVANAQHVKKVPGRKTDVKDAEWIADLLCHGLLRASFVPPKPIRELRDLTRYRRKLVESRSAERNRLLKVLETANIKLASVVSDVFGASGRLMLLALAEGKDTAQEMAQLAKKQLRKKIPELQLALEGKVEEHHRFLLSVQLHRLGAVEKDLAIVEQRIEEKLKPYEAEIKLLDEIPGVDVALAGAIIAELGADMRVFENVSQLASWAGVCSGNNESAGKRRSGRIPKGNVYLKTALVEAANAAAKAKGTYLRDKFYRLKARRGYKRAAVAVAHKILVAIYHMLSHRVCYNELGDLYLDKLNKHHLTRNLVHRLERLGYTVTLEQKAA

SEQ ID NO: 103550 - protein, 428 aa, unidentified
MSYRIAGIDVHKKMLAVVVSDVEIESEYQFERRMFSSNPEQLRSLAAWLVEQKAEEIVMESTAQYWKPVWETLERYWKPLCEKREGARRRSGTLHLAQALSNRGRRGRKRDFVDAERLVKRLVARELTLSFVPDAEQRLWRTVTRKKYQLRRDVVRLHNQLESLLEEAHIKLSSLVSDLLGVSARRMLKALADGETNPAALAALAHERLRATPEQLCDALGACTELKPVYRRLLKMTLEHLQILEQQIGQLDQELATLLHPHQDAVQRLAEVPGFAVDSAQQIIAEVGPAATTFPSEKCLSSWVGACPGEEESAGVNYSHRSPKGNRHMRRLLNQTANAAVKAKGSIFEIIYRRCVPRLGHNQAIGVIAHRQCRLIWLILHQGTRYEERGPAVTKRSRYQRTWRMIRQLRNLGYRIELPNPQASQAPA

SEQ ID NO: 103551 - protein, 411 aa, unidentified
MERIVERPSALDVHRASVTACVRVWAEGELIEHLAEFQTTIQGLLALRDWLESLAVRRVAMEATGVYWRPVWAVLEDRFELMLVNARHVKQVPGRKTDVKDAQWLCQLLEAGLLRASLVPPKPIRTLRNLTRYRKTQINDRQREAARLHKILEDTGIKLGCIASDIMGKSGRAMLDALVAGTTDPVVLAELARGQLRKKIPALREALEGRFDSEHALIVGQILAHIDFLDEAIERLSHAIEEQIAPFAHERDLLMTIPGVKQRTAEVLIAEIGVDMSAFPTAKHLASWAGMCPGNDESAGKRRSGKTRKGSKWLRATLTEAALAATRTKNSYLAAQYQRLRGRRGHSKAVTAVGHSILTAAWHMLHTGELYRDLGGDYFTRQNPDLLTKRLVRQLQTLGHQVTLEPLDAAA

SEQ ID NO: 103552 - protein, 455 aa, unidentified
MKHEPEEIPDAEHELVIERVAAVDVAKASGKVCVRVPGKAGRRVSRVWDVAATTAAVTELAEDLVELGVERVTVESTSDYWRIWYYLLEAAGLEVQLVNARDVKNVPGRAKTDKLDAVWLAKLTEKGMLRPSFVPPTEIRRLRDYTRLRADLTHDRSRQVQRLEKLLEDALVKLSTVATDIMGVSGRAMIEALIAGQRDAKVLAGLARGRMKTKRAALIEALSGRFDDHHAELARMLLDQIDALTAQIDTLTARIEQLLAAMPEAQPVDPRRDGPTSGHPVGVTADTLAECARLTTVERLDEIAGIGEHNAQVIIAEIGLDMSRFPTPAHLVSWAKLCPRTIQSGPVTRGGRTGKGNPYLKGALGDAAAAAAKTSTFLGERYRRIVKRRGKLKALVAVARSILVIVWNLLNDPTARFHDLGPDYHTNRIATERRMRNHIAQLTAMGYRVTLEPAA

SEQ ID NO: 103553 - protein, 316 aa, unidentified
MKTKRADAGIDVSKDELSIGLWPSGKQWTCPREEQAVRKLAAELQRLRVRLVVLEATGGLEMMVVLALVAAGVPVHRCEPSRARHFAKALGVHAKTDRVDALTLARFAASGELEAQSFAGEHVRKLDALVTRRRQLVDLKTVETNRLKASEDKQCRANIEQLLRVLVKQVKKLDAEIVKALEQAPELKAKADLLRTAPGIGKTNAATLVSALSELGTLNRWQVAALSGTAPYDFKSGKFKGQSRIFGGRAEVRTALYMAALTAVRDDPRFAQLYARYLAAGKKKKVALVACMRRLVVALNAMLRDQTPWRQTAPAA

SEQ ID NO: 103554 - protein, 374 aa, unidentified
MTDHSEAFVAFDTSKLSNAVAIAEGGRTGEVRFLGEIETTEAAVVRLLKKLAGKYARLTFCYEAGPTGYGLYHLIKRLGHDCVVVAPSLIPKKAGDRVKTNRRDALDLARQLRAGELTAVWVPDARHEAMRDLTRARAAAVDDLKSKRQQVLSLLLRQGLHYPGKRTWTKAHMNWLASQKLEHAEQRIAFEEMLLAVRQAAERIARLEAAIRAAVPDWSLSPVVTALMAMRGFDLVAASAFLAEVGDLTRFRSARELMGYLGLTPSEHSTGAKVKRGGITKAGNGRARRVLVECSWSYRHPPRVGKDKLAKVAAAPPAAQEIAWKAQSRLSGRFRALARRGKRPTVVVTAIARELAGFIWALNRSLAGAAACAA

SEQ ID NO: 103555 - protein, 401 aa, unidentified
MTSGFGVFLGLDVGKDAHHAVGLDPTGKRLHDAPLPNSEPKLRALFDKLATHGPLLVVVDQPATIGALPVAVARAAGHQVAYLPGLAMRRIADLYPGRAKTDARDAFIIADAARSLPHTLRPVDVGDDALAELDVLVGFDDDLAGEATRIGNRIRGLLTGIHPALERAIGPRISHPAVLEILSRCGGPTGIRTAGRRRLAAIATAHAPRIGDTLVTAILAALDEQTVTVPGTAAADTVLPRLADSLKTILQQRKQVAAEVEEILDAHPLAGVLISMPGIGVRTAARILLEIGDASAFKSSGHLAAYAGIAPVTRSSGTSIKGEHPARTGNRKLKRAFFLAAFAALADPTSRAYYDRKRAEGKKHNAALICLARRRCDVLFAMLRTKTHYRLPQADTSPAAA

SEQ ID NO: 103556 - protein, 346 aa, unidentified
MIIVGCDFHPGWQQVAVFDSATGEIREEKLENGNGEAKRFYASLPSPSRVGFEASGNTQWFEDLLDSLGHEVWIGDAAEIRASYVRKQKTDRRDAAHILKLLIENRFPRLWRPSQAERNLRQLLIHRHRLVGIRTRVKNGLQHLMLNRGVQLKQKLWNEAGQKVLSELPLEGWAAQRRQDLLKLLSELNPQITKLDQAVERTAYQHPGTRLLMTQPGVGPITALAYVITMGDVTRFQRGKQVASYLGLIPSERSSSNRRRLGSISKQGNPFLRMLLVESVQTVCRLDEGFRNQYKHRCHRMKKGVAKVAAARKLAVRLFWMLRTDTAYPEIARIEGSPRDGVVGGS

SEQ ID NO: 103557 - protein, 350 aa, unidentified
MIVGIDVHKHTHAAALIDDRGGEVATLTLANSPKGYRELIDWLVEHDAARAVIGIESPGSYGRCLVAALAGAGFEVLQVPAWRTHRERHHRGPGKTDPGDALSIAHVVLTKRDELGPAQEPELVRALGMLELQRRRFVRDRTQAIQRLRSDWTQLDPVAEASVIRCDRQRELRRLKRIRLGDSLAQRTAARCIRELAHDIDDLNYRIAALDKEIAELLAEHENPLDDLLGTGTNLTATIIAQAGDVRRFRNASAFARFCGAAPIPCGSGQTTGRHRLHRGGNRQLNAALYRIAIVQARHHPDARTYLARKIAEGKTTREARRALKRHLANVLYRRLHTWANTTPAMNLLT

SEQ ID NO: 103558 - protein, 419 aa, unidentified
MKNTKTKKIKNINKKTLIVTMDIGKTVHFGYFRAPNGEDVKPFPFYNYRKSFNEFWEKVCQFKAEQSLEEIVVGFESTGPYAEPLCNFLREKPVKLVQVNPVHTKRVKELQGNSPNKTDKKDPKVIADVISLGHALTMVVPEGAAAQLRRLSNARERALKSRTVKINQVQDLIFLIFPEFSQVMKDTKTKSARYLIKNYPTPDSIVAMGLETLAVTLRKVSRGKLGQKRAEELFEAAQASVGIKEGRESILLEIDHLISNIDNEDLFIEGLEKQIEHYLTQVPYSQSILSVKGIGNVTVGGLIGEVGDFKKFNTISEVMKLAGLDLYEISSGKHKGLHRISKRGRPLMRKLLFFASINAVKSKGIMHAYYKQMLDRGMLKMKALIAVSRKLLAIIFALARNNTHYVENYSDISHRKLAA

SEQ ID NO: 103559 - protein, 312 aa, unidentified
MTDQTFVGVDVAKDWLDIHHASHGATRINNSHAAVRSFAARCAKEGAWVVFEASGGYDHQLRDALESAQVRFSRINPRQARDFARAMGVIGKTDRVDARMLAELGARLTPAPTQPLPPERRALQAQATRRRQLVEMRKQEATRLQQTADPAARADIRGVIAMLDRRIAKIEARMTDLVTADPELAAIERRLRTAPGVGPVVAATLIAELPELGQIDRRSIAALAGLAPIARDSGRRSGPRSIGGGRPIVRTILYLAALQASRRSPQFIHFRERLQAAGKSVKTAIIATARKLVVTLNAMLASGTDYRPIAAV

SEQ ID NO: 103560 - protein, 387 aa, unidentified
MTKNKGRVVGLDVHPDSFAGAVVEGTNPASARVLSSSSRVELKQLECWALRHTSAQDTLVLEASGNAFAVAARLRAIRRKVEILDSHRAGKVGKVYCANDRVDAVKIARIYLSALSPIVWQPDAKTLERREIFSAYQAVVKESTRAKQQLRSMLNEHCVRLEKGFRLCHPHAIKRLLAMRAWTPARTMLLQQLHGTLVAARRRRTLLRRHMAQEIVAEEALLRLTRLCGINLVTLYGVVAAVGDVRRFAHSKKLVAYIGLNPSVSQSGNFEGGGALKRHGRGALRALLIQSGKKLLEVNNPLQKWGLAVAARRGRNKAAVAVARKLCVALWHVLMGHAIGALERLDTLETKLSKFATEMGPAALAAFGYNNKADFVKKKLYVLRSYP

SEQ ID NO: 103561 - protein, 353 aa, unidentified
MKILALDLGKYKTVGCEYERESARHKFHTARTTQQQLHDLLVEVEPDRVVIEICSIAGWVSDLVQSLGIELQVANPSDDAWRWRKVKKKNDRQDALKLAQLSAVNQLRTVHIPESATRQWRALIAYRQQLVRRRTKIKNHIRDLLLREGELLPRGAKCWSQEGVAALAEKARPMGEVGINELWRGELGVELVQLREMQAQVQIVEEKLNQIGTADERVKRLRTAPGVGPRLAEAVVALFDDPDRFKKAGQVSAYIGMVPKQLDSGETERSGRITRHGNRLVRSLLVEVAWAGLRHNPWARATYERISGGKKSRKKIAIVAVGRKLLVRCWAMLRDETDWRVETKLKPARQTVA

SEQ ID NO: 103562 - protein, 412 aa, unidentified
METVVERPAALDVHKAQVTACVRVPAAGGGREQHVAEFPTTVAGLLMLRDWLAAHRVRQVTMEATGVFWKPVWAILEDDFECLLVNARHVKQVPGRKTDVSDAAWLCQLAEAGLLRASFVPPKPIRQLRNLARYRKTQIQERAREANRLHKALEDTGIKLDCVATDILGKSGRAMLDALVAGTTDPEVLADLAKGRLRAKLPALREALRGRFDHLHAVWIGAILAHLDFLDEQIAGLTEAIGEQIAPFEQAVELLCTIPGVQRRTAETIVAEIGVDMSVFPDAKHLASWAGQCPGNDQSAGKRRSGKSRKGSKWLDWALEEAAMAAIRTNDVYLAAQYARLRPRRGHKKALGAVKHSIICACWHMLTTGELYRDLGGDYFRKRDPERTTKRLIAQLEALGHTVTLHEARVAA

SEQ ID NO: 103563 - protein, 451 aa, unidentified
MSKQRNKVVSLPVIEPNAAGIDVGATEIFVAVPADRDLEPIRCFPTFTVDLERLADWLQQCHIRTVAMESTGVYWIPLFQILDKRKIDVRLVNAHHVKNVPGRKTDVSDCQWIQHLHSVGLLRGSFRPNDEICAIRSLWRHRDSLIQLATLHLQHMQKALDQMNLQIHHVISDLDGTTGLAIMDAILAGERDPLKLAQLRHPRIRASEETIMKSLVGDYREEHLFTLRQSLKAYRYYQEMIQEVDAQVKRMMQRLPSKVAEGEEPPQGSKRRARKTPWRNEPPQLREDIYRAFGVDLTEIPGVNSLTAQMLLTEIGPNLDRFPTAAAFCSWLRLCPDPKISGGQVLSSRTRPTKNRAALALRVATQSLHRSDCFLGDYFRRMKARMGTPKAMTATAHKLARIIFHMITTQQPYDATIFQKQEERRHHQKSARLHVQARELGFQLVPINFVP

SEQ ID NO: 103564 - protein, 338 aa, unidentified
MKITTVGVDLAKSVFTVYGVDEHGKPALRKTVRRGKLLELFAQLPACVVGMEACSGAQHWARELRKLGHTPRIMAAEFVEPYRRGGKNDTNDAAAICEAVARPQMRFVPIKSVEQQAVLAVHRLRQGLVEERTALANRIRGLLTEYGLVIGVGLDRLRKALPAILEDAENGVPGIAREVFADATRQLIELDARIGDYDRRITALARASEPVQRLMKMEGVGPVTATAIVASVGDAKVFRNGRQFAAWLGLTPRQHSTGGKQRLGAMTKHGDVYLRTLLIHGARAVLRVTPTHSDAKSRWAESLRHRRPDNVAAVALAAKHARIIWALLARGQHYRPAV

SEQ ID NO: 103565 - protein, 339 aa, unidentified
MKDIKILGVDIAKDVFQLCGIDEWGKVIYTRRVKRAQYVSTVASLKVGCVVMEACGGANHWYRTFMGMGIPTQLISPQHVKPYVKSNKNDRNDAQAIAEAASRASMRFVRGKTVEQQDVQALLKIRDRLVKSRTALINEIRGLLQEYGLTMARGAKRFYEELPLILASEAVGLTPRMKRVLNCLYTELLNRDEAIGDYEEELKAVAKANEDCQRVQSIPGVGYLTALSVYASVGDIHQFHRSRQLSAFIGLVPRQHSSGNKEVLLGISKRGNVMLRTLLIHGARALLRHVKNKTDKKSLWLKALIERRGMNRACVALANKNARIIWALLTRQETYRCGA

SEQ ID NO: 103566 - protein, 333 aa, unidentified
MGTTAATATAVIGIDVSKATFDACLLTPDGKARVKAFPNTAGGFAAVLAWADGHGAGATARYGMESTGGYEDALARHLHAAGRAVSVINPTRVKYAGVMRGRRNKTDKADAQLIAAYTRDEAPPAWTPPTAEVRELQAFVRRRDDLRALAASEKARLESPLLTPAARKSVARVVKLLGKEADAMQKAADALIAATPALAADAELLVSISGVGSQTASTVLAELPPVARVPSAQAAAAYCGLSPREFTSGTSVKKRTRLSKSGNARLRKALYLPTLTAIRFNPVLKAFFDRLVAAGKPKMQAVGACMRKLVMICYGVLKSRKPFDPVFASRIAT

SEQ ID NO: 103567 - protein, 342 aa, unidentified
MREIIRIGMDTSKHIFVLHGVDAAEQPVLRKKLSRKQVLEFFAKLPPTVIGMEACGAAHYWGRELGKLGHEVKLIAPQLVKPYVLRNKNDGRDADGVCEAMGRPRMRFVPVKSAEQQAALMLAGVRDGLIGRRTQLSNAIRGYAAEFGLIAPKGLDKIEPLLARITQDESVPAMARELFAMQGRDYAQLQGELKAVEARLLAWHRANATSRRLAQIPSVGPIIATSLVMKTPDPHAFRSGRLFAAWLGLTPKDHSTAGKTRLGKITRAGDETLRRLLVAGATAVIRQARLGRGHPSRWLVALLRRKPPKLAAVALANKVARIAWKLMATGESYDAARMNAVT

SEQ ID NO: 103568 - protein, 415 aa, unidentified
MLKIVYPICCGLDVHKSSVFACIAATDENGVTTYQSRKFKTFTCDLQELAAWLARNNCKDVCMESAGKYWYPVWNILEPTCNLVIAHPKYVKAIRGKKTDKKDAKWIADIFKHDLVSGSFIPPFDIRQLRDLTRYYRKLVGFSTGEKNRAQNCLTVSNLKLDDVFSDVFGKSATAITDYLIENPGETFDVKPFVDGRCKTPVTEIQAAVEGSICREQAEKLKIIRSHMGNLDTCKANLESAVLDIAVKYLPQIELVLTVPGIRDSFVAISLIAEVGVDMSVFPSAKHLCSWAGLTPQNNESAGKKKTTRITHAGTYIKPLLVQCAVAVVQSEKHPEIRNRYLALRKRRGHKKAVIAIARMMLTAIYSILKNNEPYNAELYHKPDVPPENRHVSVDEAVFILQRQGYIVTAPQAVI

SEQ ID NO: 103569 - protein, 472 aa, unidentified
MKSHRRAAASCQRTTKRPVWSPLLKRLQPDAAGLDCGATSHYVAVPADRDPEPVREFRTSTGGLHALADWLVKCGIKTVAMESTGVYWIAVHEILEERGLEVVLVNAHHVHNVRGRKTDVQDCQWLQELHSVGLLHASFRPAGEIVVLRSYVRHRQSLVEASATCIHRMQKALTQMNLKLHHVLSDITGVTGMAIVRDILAGVRDPLKLAAHRHGGCKASELEIIAALTGNYRAEHLFALRQNFAAFEFYLRQIADCDQAIEAQLANLAQSRQPPAQALPEARPRCKPSKNEPRVELRAPLHRITGGADLSQIDGIGPYGALQLIAEIGTDMSRWRTEKHFTGWLTLAPNNKISGKRLLSSKTQPSANRAAAVLRRAAMSLTRSSTALGAYYRRLAYRLGQPKAITATARKLAILVYRVLSGDLTYKDPGASAYLELHRTRLINGLRRRAQELGLGLINLETGEVLDHALVP

SEQ ID NO: 103570 - protein, 351 aa, unidentified
MESQAYFVGIDLHKELIQLCVLDARGEKITEQRFTGGTLGQGHAVVKFLGQWKDGGRYAVEALGMNRWMVNAMREQGMDVIVVDAVKLNLRMLGKKTDRRDAYEIARRLWLGDIDRNAKTYYPREEEYGWRKLLRTRHKLVQIRQQLVNQVRGLLNAYRVASPKGELTSKRNLEQLSRIELSGKLLTDCLRGLEQTLRSVQGSIDALTLRIEEEASNEKVSSLHENLEGVGPQTALTIVCELGDVNRFTSTRAVASYVGLAPRVANSADKAHHGKITKRGNSELRWILSEWAVRLMAKNSLVQRWAEPLLRRMHKNKVRIALARRLLIGVYFMLRRGELFSLERCLATRAA

SEQ ID NO: 103571 - protein, 342 aa, unidentified
MKDMMIGVDLAKTVFQVHGALQTGEVQFRKKLTRKQFVTFMAHQEPCLVVFEACGGAHFWAREMEALGHEAKLIAPQYVRPFVKRQKNDAADAEAIVIAARQPEMRFVPTKTVEQQSRAAVFRGRERLVHQRTEDVNALRALLYEHGHVFPIGIRSLDRIAALLEDETADLPTLIREECKELLAQIAEKTARVLERNKKLSTLASQSDRARRLQTMPGVGPITAIAVEAFGPDMAQFKTGRDFAAWLGLVPKQHSSGGKERLGRMTKAGQADTRRLLIIGAMSRLNWLGVRSVAEGGWLSRMLARKPKMLVAIALANKMARQIWAMLTKHEDYKDPEIAGAA

SEQ ID NO: 103572 - protein, 353 aa, unidentified
MEYYVGCDSHRRYSVFVVIDEKGRATAPVRVEHDRSKLREFLRSLPPRSKVAIESSGGWYWLVDEIEAAGLTPQLAHAYDAKQRMAGRNKTDKFDARGLALELLTGTLPAIWIPPADVRDLRGLIRTRLALRAQSTQVKNRVSAAINRYGLKEPNEDHDLFAHRCRSSLNRYIQSLPSATQQATKQELALLDEINNHVGDLEKQIDKQVGPLKEMYLLRTVPGIGRILGATILLEVGNVERFPSAAHMASYAGLVPVVHSSGGKTWQGRVPKNANLFLKWAFVEAANCIVAQQRRLNGTHALVLYQRLKAAKGHGKAAVAVARHLAEASWWVLSKQQPYREPKQARISSSTHG

SEQ ID NO: 103573 - protein, 332 aa, unidentified
MQYHPTKLGIDIAKLTFDCFLKTGKKGKVKTFHNDATGYGELMRWLEKEGVKEVHASMESTGNYWVALAEELVKAGQQVSVINALQIKRYRDYGKLHGNKTDKADAQLIAEYSEKEEERLRLWQIPSEKSRHLRALVRLTDDLKGDLTRTRNRIAAIVTDEMVLASLKRTQANFVEEIKKVEAEIKVVIRQDPELNRKYGLLRSIHGVGDKTATRFLADFPDLSLFRTHAQLVAFMGLNPTIAESGTSVRGRTKISKQGNSQWRAALWFPCITAIRKNPIVSKLSERMLASGHAKMEVKIAAMRKLVVQMYGVLKSGKPFDPVNGRNIALSS

SEQ ID NO: 103574 - protein, 325 aa, unidentified
METKELCCGIDVSHTTLDVCYQNNQGQLFHLKVGNNNSGYQKIMEHTGPDYHFVMEATGVYYIRLAFYLHSKGCALSVVNAMAIKRYIQMHLERNKTDKKDAQWICRYAIEQRPPYWQMPDNAYFESRQLYNTIREYTEQIKRINNQLHSLRLLPVPSKDTIKSLEKVVACMQKEIKQLEQKLQQLLELWQPDQLKSVSSVKGIGKRAAAMLIVFTQGFKHTESHRQLISFAGLAPTQYSSGSSIQGKPRIYKRGGKNLRDVLYMCSMNAMKTNPACKSLYERLRTNGKTGKQALVAVMNKLLKQVFAVVKNNSVYQPNYCSVKP

SEQ ID NO: 103575 - protein, 367 aa, unidentified
MEVTTVGIDLAKNVFAVVGMDANGKQVLRKQLRRERVLPFFRGLAPCLVGMEACGGSHWWARKIGALGHTVKLMNPRTVAGYRSGTKHDYNDAEAACEAVSRPRVQAVTPKSQAQQDWLALHRVRQALIKQRTSWSNQIRALLHERGVTVATGAAALRRQLAHWPEDNPDLSEMIHRLVLELGKYWEECDARIGQLNEQLKQHCRDDERCQRLDEVVGIGPLIASAVVATIGAEFKRGRELSAFLGLVPGQRSSGGKTVLLGITKHGDRYLRTLLIHGARSALRSCSTRSDALSRWMCQLRERQGANIAAVAVANKLARIVLALLKTGHSFDPKRAAATPQSGQSEAATNTSLAQSGKLRLAVEGGH

SEQ ID NO: 103576 - protein, 366 aa, unidentified
MTTIACNTNTNTMDPVDVVGGVDTHQDTHTAAAIDGTGRLLGHRTFMATGAGYRALLAWLRSWGTVEVVGVEGTGAYGAGLAEHLRTAGVDLVEVDRPDRKTRRSTGKSDPIDAEAAARAALGRVRTGVPKVRDGKVEALRNIRVARRSAVDQRADCQRRIKTLIVTAPDHLRAQLRGLPKRELLNTCAALRPDTEQIADPTQATKVALRALARRHAALTQEINELDALIEPLVAALNPALLALNGVGPDTAGQLLVTAGENTDRLHSEAAFAMLCGAAPIPASSGKTHRHSLNRGGDRQANAALYRIVLCRLRWDHRTQAYMTRRTTEGLSTKDIIRCLKRLVAREVFYALTTHATTPTTLTTAA

SEQ ID NO: 103577 - protein, 342 aa, unidentified
MKITTVGIDLAKNVIQVHGINEQGKKVFNKQLQRKHVLTHFAQLPPCLIGMEACSSAHFWARKLQSQGHTVKLMAPQFVKPYVKTNKNDAADAEAICEAVTRPTMRFVPIKNGEQQAVLSLHRARQGFVKARTAQANQIRGLLMEYGITIPQGISHITKRIPELLEDGENELPGVFRQLLQRLGNHLKALDRQATELEEQIQTWHRESEASKTLARIPGIGPLTASALVASIGDARSFRNGRQLAAWLGLVPRQHSSGGKPRLQGISKRGDTYLRTLLIHGARSVIRVATGKTTPIHCWAVNLVERRNKNVAAVALANKNARIVWALMTQNREYQSNFVRTV

SEQ ID NO: 103578 - protein, 411 aa, unidentified
METIFERVGALDVHKAQVTACVRVPGPDGRQPHLAQFATTVQGLLALRDWLAAHGVTHVAMEATGVYWQPVWHILEEDFELTLCNARHVKQVPGRKTDISDAQWLCQLMEAGLLRASFVPPKHQRQLRTLTRYRKTQIAERQREANRLHKTLEDTNIKLDCVASDILGKSGRAMLDALVAGTTDPQVLADLALGKLRKKLPALREALEGRFEPHHALVIGAILAHLDFLDDQIDGLCEAISEHLDPQTAAGVKLAATITGVAKRTAEVMIAEIGTDMSVFPSARHLASWAGGCPGNDQSAGKRRSGRTRKGPKWLGIALEEAALGATRAKGSYLQALYKRLRPRIGHGRALGAVKHSMLTAYWHMFTTGQTYTDLGGDYYERRDPQRLTRRLVGRLEALGNTVSLQPQQAT

SEQ ID NO: 103579 - protein, 339 aa, unidentified
MQIVTIGLDIAKNVFQLHGVDAAGDVVLRRKLRRSEVRVFFSRLTPCLIGIEACATSHYWARELMSLGHSVRLIPPSYVKPYVRRGKNDAADAAAICEAVARPTMRFVPVKTIDQQAVLVLHRSRDLLVKQRTMLINALRCHLAEFGIVAAQKRTGLAELVACVEEGVDDDFPELLRRGLKPLIHQLKQIQAQILQLEKEIETWHRSNSISCRLATIPGVGPIIASAIAATMLDPAHFRSGREFAAWLGLVPRQNSSGGKERLGRISRQGNRYVRRLLVIGATAILRHDRHRTSGNGWMRALLERKPARLVTVALANKMARTAWALLARNADYRVQTTE

SEQ ID NO: 103580 - protein, 368 aa, unidentified
MKNYITFVGLDVHKNSIVVALADAGRNAEVRQYGTIGGGLDDLDRLVKKLSSPNRALHFVYEAGPCGYDIFRSLTDKGFDCAVVSPAHIPKSPADRVKTDRRDAMTLARLHRAGELTYVFVPRADDEAMRDLTRAREDAKKAQRVAQQQLGGMLLRLGFRYPKDNWTKQHFLWLADQKMPMPAQQVVFQEYINTINETIARVERLTQQIQLLVPNWRMAPVVNALQALRGVSLIVAVTTIAELGDLTRFDHPKKLMAYLGLIPSEHSSGQKRRQGSITKTGNGHARRVLVEAAHSYRLPARVSRVLLKRQEGLSQEVTELAWKCQVRLCARFRRLVAKGKNHNTVVTAIARELAAFMWAIANQTPIAV

SEQ ID NO: 103581 - protein, 343 aa, unidentified
MQAIATIGLDIAKSVFQVHGVDAVGQVVIRRQLKRRYVLAFFQKVPPCLVGIEACASSHHWSRELQALGHTVRLMPPAYVKPYVKRQKNDAADAAAICEAVTRANMRFVATKTPEQQSGLMLHRTRHLFIRQQTAVINAIRAHLAEFGIVAPVGRNGVEQLLGIVADPNDKRLPEVARVCIAALGTQLRVLKAQVLNFDRQIMAWHRSNETSKRLDEIPGVGPVLATALVASVADPKAFRSGRDFSAWIGLMPKQNSSGGKDRLGSISKQGDRYLRGLFTAGALAVIRYAKIHGTKHRPWLTALLARRPTKVVAIALANKLARMAWAMMAKGERYKQPVALAA

SEQ ID NO: 103582 - protein, 366 aa, unidentified
MTDLTLFIGLDVHKKTISVAIVEGSAGAAVRFYGTIANTPDSLRTLCRKLSRSGQQLHFCYEAGPCGYGVQRQLTRLGHRCDVVAPALIPRKVGDKVKTDRRDAMMLAQTLRAGQLTAVWVPDEAMRDLVRLRAQAMRDLRKTRQQLLSFLLRHGLVSPYGHWTKMHRRWLGELVFAHPAQHLAHEEMLQRIERAEALCDRLKAAILELVPQWSLAPVVEAIQALRGVSLIVASVIVAEIGNFSRFDSPRQLMAYLGLNPSEHSSGATIRRGAITKTGNTLARTCLVEAAWTYRFPARVTQIIRNRLQGLPEPIRNVAWKAQVRLSARYRKFTAAGKPAPKVVVAIARELVGFIWAIARMVEPKFV

SEQ ID NO: 103583 - protein, 357 aa, unidentified
MKLTAKYVGLDVHQATTVAVVQEESGRVITRSVLATEESRIVEFVRGMRGPIHVAFEEGTQAQWLHDLLVSRVAQVLVCDRRGEPRHGNKGDWADAEYLADQLRRGGLRAVYHGSPQRAVLKELGRAYRNLVEDSTRVMQRLKALFRARGIKTAGRGVYHETRRGEWLAQLRDVGVRFRAETLYAELEVLQRLRPKAKTALLAEAKRDPAWAILQTIPFLGPVRVALLLATLQTPWRFRTKRALWAYAGLAVVTRTTAEYALADGRPVRRRRPPMTRGLNRNHNRVVKDVFKGAATAAASRPGALRDFYQGMLSREMRPELARVTLTRKLAALTLRLWKTGERYDPAKLTVHAVLAR

SEQ ID NO: 103584 - protein, 358 aa, unidentified
MQQRKKINFEGQNIYIGIDVHLKNWSVTTITQSGYKKTHSQNSSARELFEHLRKHYPGGKYLAVYESGFTGFSTYYALKEYGIDCMVIHAADVPTTQYESVMKSDSMDSDKLAKALKTGTLKGIYVHRRENLDARGVVRLRKTLQTQLGGYKSRVKHLLYNNGIVFPKCFAGKSTHWSKRFMRWLREDVILLSSTRTSLDLLLDQVELFRKNLLNATRQIRALSRSEHYARTYENLTSIPGIGMLTGMSLLTEIDDVERFHNEKQFASYLGLVPTSHSSGEKIANGEKTFRGNKLLGPMIVESAWTMIRHDSVMAAAYGEYCKRMKSQEAVIRIARKLSNRILKILRSGQKYEYDRCH

SEQ ID NO: 103585 - protein, 405 aa, unidentified
MNRRLALQESSIKEVHFMEGERAEVGIDVHKRTYSVTLWSEERDEVVTRWTQPADPSALIRSMTPFKEHVNRVVYEAGPTGYGLVRALRAEGFRADVIAPSRTPKSTGQEAKSDRLDSRRLSMWSAKKLLKAVRIPTLEEEGDRQVFRTRDDMVAKRRRVKQQIKGFLLQHGIEEPDGLQTWARRGVESLRKMKLSAQLRFSLDFLLADLEHYDSQVQKADAALKSLAATRRHKQASEALQTVPGVGTVTAMAMRTELIAPERFDKGRQVAAMAGLAPLVSSSGETTRQGPLMKCGNARLRKILIEAAWRWMARDDWAAERYGRLVRNRGDRKKAIAGMARRLVIILWRISVTGEPYRPRPDQEPAPGSRTVRKGCQPGLPDKNIKRKRAPSSTRQHPVSVQPPT

SEQ ID NO: 103586 - protein, 341 aa, unidentified
MMSNVATIGLDIAKSVFQVHGVDAAGEIAVRRKLTRGRVLAFFKSLPRCLVGIEACSSSHYWARELIALGHDVRLLPAQYVKPYLKRQKNDAADAEAICEAVTRPTMRFVPVKSPEQQSVMMLHRVRLMLNRQRTQISNALRSHLSEFGVVAPIGRNGIEQLLVVINDESDARIPADARLCLRMLEAQLKVVKEQILENDRRVRASARETELGRRLMEIPGVGPLLASAFVATIADPHAFKSGRCLSAWIGLVPKQNSSGGKEKLGSISKAGNRYLRQLLVVGAMAVIRYAERNGTRRPWLVQLMARRTTKVAAVALANKTARMVWALMTGGERYREPVIA

SEQ ID NO: 103587 - protein, 356 aa, unidentified
MAHCTRCSRPEPEQLAAPLKCEFTASVGVRRERSHRVYLTREIIMSHAVGIDVSQATLEVCAEPQGASRTFANTTVGIADLLAWVVPMTPTRFVFEASGGYEKKPLMALVGAGQSACRLNAQRVHHFAKALGQRAKTDPVDARVLQHFGDMVQPTATVLPGPERAQLRDLIQRRQQLITLRTGEINRSHQAESAVRVSHQRIRQALTDEIKRIEQTIRDVLKATAELAALVALLSKTPGLGTLISATLCGQLPELGHYSRRAISALVGVAPMADDSGKHHGQRHIAGGRAVPRTALYQAVLSGLRHNPQIKALYVRLKARGKPSKVAMTACMRHLLCMLNAMVRDNQPWNPLPATT

SEQ ID NO: 103588 - protein, 345 aa, unidentified
MTPPTNRPAYQLFVGIDIAATTFTAVWTTDGPPQERARSFPQTPAGFEALQAQLQATGVAPGQILVVLEATGSYWVALAVALHEAGYVVSVVNPAQAHNYAKSLPRRAKTDLLDAAVLAQFAAERRPCPWTPPPAVYHELRQRLLARDALLTMRQQARNQRHALLQWPIVVESVRQQLDSLIADLEMRLTDLDSEIAQVLSEGAWAESATLLLSITGIGRITTAWLLVGTLNFQACRSAESAAAYAGLVPLAHDSGSSVRGRAQIGHGGHARLRTALYLATLTAARFNPIIKAQYERLRAAGKPMKVARCAAARKLVHLAWAVVTKRQPFDPSYGMRMVEERRAA

SEQ ID NO: 103589 - protein, 407 aa, unidentified
MIFVGVDWAEAHHDVHVEDAEGRRLGGGRLPEGVEGIARFHELVGAHTEDPSEVIVGIETDRGLFVAALVAAGYLVFAVNPMSTSRYRDRHSTSGAKSDPGDAKVLADMVRTDRHNHRPVAGDSEVVEAVKVLARAHQSMIWSRGRQANALRSTLREFYPATLSAFDDLASADATEVLKVAPTPSLGAALSPAKIASALRRGGRQRRIDERAREIQAALRAPQLQGSALVASAMGASVKASVAVISTMNAEIANLAQQLEAGFEQHPAAKVVRSLPGLGTILGARVLGEFGDDPDRYASAKSGKNHAGTSPITRASGTKRVVLARYARNMRLADAIYLWSFASLTASPGARAFYDAHRQAGNTHHAALRALGNRLVGILHGCLVNGNFYDEHAAWGHRSASQLTEAA

SEQ ID NO: 103590 - protein, 355 aa, unidentified
MNSEKYIGLDVHQATISVAVMDSMGKLIMESILETKAATILEFVAGLRGTLSVTFEEGTWAAWLYDLLKPHVDELVVCNPRKNALLKDGNKSDRIDARKLADRLRLNDLKPVYHGETGVRMLRELARSYLNLVKDQTRVMNRLKAMYRSWAIPCAGRDVYYARHRAEWLGKIREAGVRRRAEHLYQQLDMLQHLRQQARRELLAESRQHPITAKLRQIPSLGPIRSALAVALIRTPHRFRTRRQLWAYSGLALETRTSGEYRCVEGQIRRSKKQISIRGLNKDHNHDLKGLFKGAATRASVQPGPFQDFYQRSLAKGIKPTMVRLTLARKIAAITLTLWKKGENFDAEKLKSQAA

SEQ ID NO: 103591 - protein, 406 aa, unidentified
MNIHSSPHLHVAVDIGSREHYVAIGLPEGEILDEFSISHTPAGFQSFFSRIEQQERFYSLPVDVAMEGYNGWARPLDAQVQRHGYQLYNVNNLKLARFKEIFPAPAKSDSIDARKILELFQLQNHLPLAKGVLQSVLPVPDANQHLKRLSRRRRQLTNEKIALQNRIQPDLQAVCPTLLDITHSVDNQWFLHFLTCRDDLEKLLRLQNKSLLAIKGIGKSYLSLICDWQKQAEFSDEIKEVGPMIQEDARRLLALITSIKMLEAKIDHQTQDSEYAQHINSIPGFGLVCSAELAGETGTLERFPKQSSFSMYIGMSPLDNKSGAYEGTKAPKHVNTRARKAMMTAVCRHMACVPESRAYYDKKRSEGKTHNKAIRALGRHISRVILSMLRHDRDYLEPKLKKPIND

SEQ ID NO: 103592 - protein, 370 aa, unidentified
MNYSNTLFVGLDVHKEAIAVAYVAEAPGAEVLSLGSIGTRQCDIDKLVRKLKGKASKLFFVYEAGPCGYWLYRYLTKQRLTCRVVAPSLIPKKPGDRVKTDRRDAVQLARLMRSGDLTAVYVPAIEDEAIRDVSRARQDAMHDLKAAKYRLKAFLLRHDIRYEGRATWSPAHLRWLAEVVCPTPAQQIVFQEYVRTVSEHQDRLQRLESELQAAVKTWRWGPVVEAIQALRGVQFTVALTLIAELGDLTRFDNPRQLMSYLGLTPSEYSSGPMRRLGGITKAGNTHARRALIEGAWAYRYPAKVSRHLQLRLEKVPKAIQDISWKAQVRLCKRYRQLTARGKHANKVVVAIAREMAAFVWAIARVVQEAH

SEQ ID NO: 103593 - protein, 326 aa, unidentified
MDYFAGLDVSVKETSVCIVDDTGKIVREVRVASEPEALLKVLTNPAYHFKRIGLEAGPLSQWLFSVLAEAGLPAICVETRQMRAALKAQINKTDRNDARGIAQMMRAGLYRPVHVKTLRSQKLRMLLTHRKLLQSKAIAIENDLRATLRNFGLKVGVVATRRFEARIKELVENLPDLAALVEPLLVVRQVLREQIVILHRRLLAIVRDDEVCRRLMTTPGVGPVVALTYRATVDVPARFRKSKAVGAVFGLTCCSIGRGRLQRQNITLRRRDDAGHALRSRSGHAAFEAMVLAQGMGDADRQASRDEKGDRRSGTSVGCDPPPHLG

SEQ ID NO: 103594 - protein, 488 aa, unidentified
MSAAGQQEGKKDPTLNARAPKRKARGSRCPQGKGHRRRSKLTITNPDAAGIDVGSRVHYVAVPEDRAPVSVRSFGAYTGQLDELVQWLKDCGIKTVAMESTGVYWVPLYQKLEEAGFEVLLVDAHQAKHVPGRKSDVQDCQWLQQLLTYGLLRAAFRPEDSVCRLRSLQRHRKNLVEAAAMWVQHMQKALNEMNLHLHHVLSDISGLSGLRILDGILAGERDPAKLASLAHHRVRKSQAQIEAALTGDYRPELLFVLGQSLQNYRQIQHQITQCDLSIEQQLAKMTDCATPRQAAEPMPSSPELGGGKSGKRKPPVALEASLAGHLKRILGVDLTTIPGLNVLAILTLISEIGTNMTKWRNEKAFVSWLGLSPNNKISGQRLLSSRTRKVVNRAATILRLAAMIVGKTDTPLGSFYRRKRAQLGGPKAVTATARKLGCLVYRLIKNGQGYNAPDLHTYELKYKDQILNSLRKRANTFGFDLVELPKAA

SEQ ID NO: 103595 - protein, 358 aa, unidentified
MADKVTEAAVVGGVDTHKDLHVAAVVDQNNKVLGTQYFSTTRQGYRQMLAWMTSFGILKRIGVECTGTYGSGLLRYFQNAGLEVLEVTAPDRMERRKRGKSDTIDAECAAHAAFSGIRTVTPKTRDGMIESLRVLKTCRKTAISARKVALQIIHSNIISAPDELREQLRNMTRMQLIRTLGSWRPDASEYRNVTNVYRISLKSLARRYLELHDEIADLDVMIAAIVDELAPELIKRNAIGYESASQLLITAGDNPQRLKSESGFAALCGVSPVPVSSGKTNRYRLNRGGDRAANSALHIIAIGRLRTDDKTKEYVARRVAEGHTKMEAIRCLKRYISREVYTLLRNQNRQVNSIPITA

SEQ ID NO: 103596 - protein, 412 aa, unidentified
MQDILTCAMGLDVHRDIIVACLVKGAVDAEPEAETRTFSTLIPEMQKLRDWVIESECRNIAMESTGIYWQPIYEMLESCFDGEISILVVNARHMKNVPGRKTDMKDAQWIATLLRAGLLKGSFIPDKAFRELRHLTRYRKSVVHDITAQKNRIDKFLQSSGFRFTAFLSDTFGASGRNIIRHLIEHGSIDREALDKCLKTKTRNRIDEILVALNGSLSEHQRRFLNMVFRHLEDLEAHKHTVEDEITEEVLKHTDALNLLCSIPGIDVTAAAAIIAEIGTDMSSFLDSQHICSWAGLSPGNNESAGKRKSVHINKGNPYLKSMLCEVAWIMASHRKLYLSGWYWKVKQRKGAKRATIALARKILSIIYTMLKTGTPYNEECFEQRRLRCERKRANRLVNELQKLGYVVVAPD

SEQ ID NO: 103597 - protein, 402 aa, unidentified
MNAVGIDVSKGKSMVAIMRPFGEIVSAPFEIKHTASDINSLVELINSVEGESRIVMEHTGRYYEVLAHQLSEANLFVSAINPKLIKDFDNDSLRKVKSDKADAVKIARYALDKWQNLKQYSVMDELRNQLKTMNRQFSFYMKHKTAMKNNLIGILDQTYPGVNTYFDSPARSDGSQKWVDFASTYWHVDCVRKMSLNAFTCHYQNWCKRKKYNFSQSKAEEIYGKAKELVPVLPKDDLTKLIIKQAVDQLNSASTTVESLRTLMNETASKLPEYPIVMGMKGVGPSLGPQLMAEIGDVSRFTHKGAITAFAGVDPGVNESGTYEQKSVPTSKRGSSDLRKTLFQVMDALIKTKPQDDPVYRFLDKKRAQGKPYYVYMTAGANKFLRIYYGRVKEYLATLPES

SEQ ID NO: 103598 - protein, 319 aa, unidentified
MAQNDLVVVGIDVAKDKVDACIRALSLRQTFSSTAEGRRKLISWLRKHKVTAAVMEASGGYEREWARAMRQNAVEVRIVDPKRVRNFARSAGQLAKNDAIDAEMIAWFAETFGEDSRQAHDAAREKLVQIVNARCALIDLQIKLQNREEHPAPEPVRKMQARLLRQLAREIAGLEAAIAAVIKATAHFAELAEIIESVPGLAKITSAGLIAAMPELGQVSNQAISALLGVAPYDDDSGKRRGERQIKGGRRKMRNLFYMACLGAATRHNPVLKAFYRRLVVKGKEPKVALVACMRKLIVILNTMIARRQKWDLSRYALS

SEQ ID NO: 103599 - protein, 346 aa, unidentified
MKYYAGLDVSMEETAVCVVDGEGKIVGEAKVASEPGAIAGYLARWSGSLVRVAQEAGGLSPWLHEGLVGFGLAAVCIETRRMKAYAKASSVKTDRRDARLIALAVRAGLYRAVHVKSQDSHKLRLALTGRQALLRQARQLQGKVRGDLKVFGVKLGRVGSGGFAGRVKTLLSGRADLWSLVEPLLAMRAALLAQVRVYDRALYRLAQDDAVCRQLMTVPGVGKLTALAFRAGIDAPERFTRARCVPVALGLTPRVDNSGELERNGAITKAGDKFLRSLLFEAANALLTRSRRWSALKHWGLAVAKKRGVNRARVAVARRLAIILFVMWRDGSDFRYGREECPATAA

SEQ ID NO: 103600 - protein, 339 aa, unidentified
MAILFVGIDLAKNVFAIHGVDEHGKAVLVRPSVQRARLHQLVSALPPCTIGMEACSGAHHWARLFAQHGHAVRLMAPKFVTPYRMSGKRGKNDAADAQAICEAVQRPNMRFVPVKSLDEQARLCIHRVRQGFVEQRTATINRLRGLLSEFGIVLAQKAATVRREAAAHLEDLPGWANTAVGDCLSEVHRLDERLAEYDRHISQIAAEDERSSRLMRLQGVGCTTASALVATIGDARDFKNGRQLAAWLGLVPGQYSSGGKTRLGGITKAGDGYLRTLLVLGAKSVLAAARNKHDRLSRWAMALEVRRGYWKAVIAIAAKNARMAWAVLAKGENFKLIEA

SEQ ID NO: 103601 - protein, 318 aa, unidentified
MDNETIDFEQVVAKGCGLDVHKETVVATVSGTGIKRETRTFSTFTRSLKELKEWILSLGITHVAMESTGIYWKPVFNILEGSGLTILIVNARHIKYVPGHKTDKKDSAWIAKLLLAGLLKGSFVPPVEIRQLRDMTRYRRKLEGAITAEKNRMIKMLEDSNMKLSSVLSKVHGVSGTRIVDALLEGQTDPVYLASLCHGKVKAEQEDIILALEGNLTEHHKFMIRIIRQDIRQTESLIKELDVEIEKQLLPYAQEIALLSQIPGVGEQTAGELISEIGVDMEVFATDKHISSWAGVSPGNNESAGKKKADEPLTETSK

SEQ ID NO: 103602 - protein, 392 aa, unidentified
MLYIGIDVAKSKHDCFIIDSDGVVYTDNLRITNDRIGFNKLLETILNALDGEPVTNAKVGLEHTGHYSINIKRFLESQGFVVTSFNPLETSAFRKASTLRKTKTDKCDAKTIATMLFSNESIPTSPPSYQIQELKSLTRHRFRLVGYRGKLKVSFARIIDVVFPEFPSFVWSVNQKSSHQLLLELPTPNAIAGCHLTRLTNLIHKSSHGKYGREKAVALRDIAASSIGLSDEALAFELQQTIRMIQNVQAEIDALDRKIKSIVRELDTPLLTIPGISYTLAAIILAEIGDINNFSNPSKLQAFAGLDPSTYQSGKYTASYASMVKRGSTYLRWAMFQAARLVAMRDKTFADYLAKKRSEGKHFNVAISHVSKKLLRTIFYMLKHNEAFVPQS

SEQ ID NO: 103603 - protein, 322 aa, unidentified
MTDFVLGVDIAKRKFDVALLANGKLKHKVFTNNQEGFSELITWLKKYDVDHAHVCMEASSTYGEELATYLHEVGHTVSIVNPARIKGFAQSELLRIKNDKVDAGVIARFCDKMRPDPWTPLPSEVRKLQALVRRVDALLSMRTQELNRIGTTHETVLSSVKGHISFLDEEITALKKEISDLIKKDPNLKTKADLLRSIPGIGEATIAAILSELSLFEKCDRVRKVVAFIGLAPREFTSGSSIKGRPRLSKTGSARMRKALYMPSLVSMQCNPVIISFCKRLTKKAKNGKVIVCAVMRKLVHIIFGVLKSGRPFDPNFGLKMA

SEQ ID NO: 103604 - protein, 388 aa, unidentified
MRRQRKPNDLSRSLIPLDLDTTLIAVVELSLSSWLVAGIVPGVERQPLKKLKTDENALLTLLYRWRDEAVRSGHKISRIAVAFEAGRDGFWLARWLKARGIEAHVIHASSVAVSREHRRAKTDRLDTELLKRAFVGWLRGERDHCKTAAIPTLREEDAKRPSRERESLVGEQSRLVNRMKATLIRLGIRGFNPKLRQAEQRLETLRTPEGEPIPANTLAELKRDMQRRRFICDQIRSIEKERLERLERTPDTEPHAMVRLLARVTGIGIETADLLVHEVLLRNMRDRRAVARYGGLTGSPDRSGGTNREKGMARSGNVRVRRGMIQLAWRFLLFQKDSALAQWYRRRTEHSPKARKTMIVALARKLLIALWRLAREGVIPEGIAMRPA

SEQ ID NO: 103605 - protein, 338 aa, unidentified
MKYFVGMDLHSSNTVLGIIDEKGNRVYKAKVANFLPLILNELELFRRGIVGVVVESTFNWYWLVDGLMEAGYKLHLANPSAIKQYEGLKHTADYHDAFHLANLLRLGILAEGHIYPKQERAIRDLLRKRLMLVRHRTAHILSFQSLYNREKGCRIGGDDVKKLGEEDIDELFDQDYVVLSAKANISTIGFLKKKIEEIEKIALGTMKLLPEFQKLKTVTGIGDILGLTISLETGDIRRFAKVGNYSSYCRCVGSQRLSNEKKKGEGNRKNGNKYLAWAFVEAANYTKRYCSYARRFYQRKTAKTNKIVAIKALAHKLARASYFVMRDRVDYDPMKAFG

SEQ ID NO: 103606 - protein, 400 aa, unidentified
MEVLYPHCAGLDVHKDTVVACVRHMVNGSVRREVRSFKTTTKELLALSDWLAGEGCTHVAMEATGVYWKPVWHVLSDGDFTLVLANAAHVKNVPGRKTDVNDATWLADLLAHGLIRSSFVPDGQTQEMRTLLRTRKQLVRECSRHVQRLQKTLEDANIKLDSVISDIVGLSGRRMIEALIAGETEPGALAAMAHRRIKATPDELEAALRGRVTRHHRFLLQLHLQQIDAVNAAIDQIDQEVDAYVEPFRATVRLLTTIPGIDELSACVILAEIGRDMSRFPTAGHLISWAGLCPKNDESAGKRRSTRMRKGAPWLKTTLVQCAAAAARKKASYLQAQFHRLRARRGAKKALGALAASILTSVYHMLISGELYRDLGPHHFDQRAKAVNTRRLVVRLQNLG

SEQ ID NO: 103607 - protein, 344 aa, unidentified
MQIMYYIGLDVHKRTISYCVKDGSGQIYAEGAIRSTRLDLDEWMKTLPQPWTAAMEATVFSGWIYDHLRPHAAALKVAHPLMLRAIAAAKKKNDRIDASKICDCLRCDFLPECYMAPSVLRERRRTLRYRNLLVRQMVQMKNKIAVLLMEAGVSYNKQRLHKAGYFRELLATNPYIDEGLCALLRVCRETVVRLERTESALVRLLERDCLLRDRVERLMTIPSVGAITALTWALEVGEVQRFTSIRKAVSYCGLCGEEKSSANSVQHTPLSKQRNKHLQTTLIEAAKMAPRYSPGLALLYDKERRKGNANRATLAVARKLVAYLMAVDRGQRKFEVVEASRTAA

SEQ ID NO: 103608 - protein, 373 aa, unidentified
MEHLTTYVGIDAHKKDLYVARLQGAERTPVTWQLPHTPAAVRRLVRTLERDAPGPVHVFYEAGPCGYALQRQLTTARVRCDVVAPALIPRKPGERVKTNRRDARKLAELGRAGLLTPVHPPTPADEAVRDLARARDDAREDLQRCRHRLSKLLLRRGRHYSGRHWTRAHRQWISGLPWAHPAERTVLDDYLLAIDHTEARLLELDAQLTTLAATDPYRTPVGWLRCFRGIDTLSAMLILAELHGMGRFPSPRALMAYLGLVPGEHSSGDRARRGRITRTGNALVRRLLVEAAWHYRHRPAVGVALARRRRGQPGRVIAIADRAQQRLCRRFRAMAATHKPPAKIAVAIARELSGFLWAALHPVTPAPAPGPSH

SEQ ID NO: 103609 - protein, 331 aa, unidentified
MKKKVFIGIDVSKSKLDATYCIGDNLQVSNHFIVNNNPKGFAQILKRLNKLEGDHDLWLVCFEDTGLYSIGLALFFQEQGIDFCQESALRIKLSMGIKRGKNDKLDSREIAQYAYTHKEKLRLTDMPKERLLELKVLLSYRDRLLRQKNALLVAARESYECFGNETTQFILDDSQEIIAQYNQKLKDIERRIKEYIQDDEELRQNYDLATSVVGVGPIIIAYMLVQTNNFRLYSPREYACHTGVAPHEHSSGTDLPQRRTTSKMANKKMKTLLTNGANSAIMYDPQLKLYHSRKVKEGKNKYSVLNAVRFKLIARVFSVVKRGTPYVKMAH

SEQ ID NO: 103610 - protein, 370 aa, unidentified
MSIRNYSLKAAATALSKEQKSQNSPKAKRIVIGVDVHLKSYQAASKIDKSAIGVVAKFPSQTELLLHVEKQLKAAEEVVVVYEAGPLGYVLYRELEARGLRCYVCAPESAQQRSKRRKNNQIDARTLSSNLFNYLNGNERALQLVRVPTPAEEQARAQSRQHDQLVQERKRLGAQGNALLLSQGYGSWANWWRPKAFSQLSQLVSGWILELLKSWVDLLRALDEKIQQAKVALAQRYQGSRPKGVGAASLVQLSAEVLNWNLYSNRRKIACLAGMVPSEWSTGDSQRLGPITKVGVAAIRRIITEAVWRIILFQPQYKPVQKWQEVLRGTNRALKKKAVVAIGRQLMVDLWRLQTGRIRAQELKLVMIDG

SEQ ID NO: 103611 - protein, 416 aa, unidentified
MDTMYERCCGLDIHKKTIEACFRSGKKKTHMSFGTTSAELRKLTMWLVENDCQSVAMESTGSYWKPIFNILELSGTDMEIIVVNARHMKNVPGRKTDVHDAEWIAELLQYGLLRPSFIPDREQRELRELSRYRKSLVGERAREINRLQKMLEGGNIKLTSVVSEVTGYSSRRLLDRLLRSDEPMTEEVISELVHTSLAGKSKELETALDGLLSELQKELLIKVLDHIDDMSRRIADLDDFCRKQMKKYEDALDKLDEIPGIARRTAETILIETGLDMSRFPTAKHFARWAGLAPGNNESAGKRSSGRTTKGNPTLKSTLIQSAKVAARKKDSFFKARYQKIAARRGANRASVAVAHSMLIAIYHILKSGERFKDLGEDYYNQFNKEKKKKYYLKKLTKLGVNLKEATLSISIQTAT

SEQ ID NO: 103612 - protein, 388 aa, unidentified
MNVGADKSEPLTAVHTDLGAIFVSLELSRSSWLITSLSPGGGEKMSKRSVPGGDFAGLMERFAQLQEKARLRTGQSFRIIVVQEAGLDGFWIHRALQNEGIESHVVDAASIATSRRRRRAKTDKIDGETLVRALLAYKRGEPRVCAMVKVPTPGEEDRRHLCRERKALTAERVRHVNRIKGFLFSQGVSGYQPLRRDRRQRLEELQTGDGRAFPQHLKALINRELDRLELLLKQIKTVEAARDALLAVEQTAKPGPAAMLLDIKGIGPEFAAILWSEGLFRHFENRRQIAAYAGLAPTPWQSGAVDREQGVSKAGNPRLRTTLIQLAWLWLRNQPRSALSVWFHERVSRNGGRLRKTTIVALARKLLVALWKYVTAGVVIEGVTMKVA

SEQ ID NO: 103613 - protein, 382 aa, unidentified
MKPQPDNEFAAFVGIDWADRKHDICLQVANTEKREFDVLVHRPDAIDQWACSLRERFQGRPVAVCLELAKGPLVYALQKHDFLVLFPVNPATLAKYREAFTPSHAKDDPTDAEYQLELLVRHRDKLHALKAQSAPMRALTSLVEQRRLLVDETKRITNRLTNTLKQYYPQAVQWFEAKNTNLFCDFLSRWPTLKHVKHARRATLEAFFWEHHVRYPKAVEERLAAIKTATPLTEDVAVITPHRLLAQALVDQLRVTIQAIERFDAEISTVSKTLPDYALFDALPGGGPALAPRLLTAFGEQRERFLAADELQRYFGIAPVTERSGNKSWIHWRWQCPKFLRQTLVEWAAQTINKSFWAGAYYRQQRAKGSSHQAALRALAFK

SEQ ID NO: 103614 - protein, 355 aa, unidentified
MLYLGIDQHARQITISLRDEAGDVVQARQVSTEPKKIHAFFQQLTRERLRKGEAFVGVLEVCGFNDWLIRLLRDYRCDKVILIQPGDRKKRKTDRRDAAALSELLWVNRDRLLHGKPVRGLRQIDIASSTDQENRRLTMLRKEAGQTRTRLVNKIRHLLRRHNLQWEMPTKRLPTLSAIAWLKQVVLPEIDRLEMNHLLADLEHVQQRLKELEGVIAQRSGASKQAAILTTMPGVSHFTATSLACRVGRVERFPRAHSLANYWGLTPGCRNSGENNQRLGNITKAGSAMARWLLAQVTHKVLRKDARLREWFKRIKRRRGATIARVAVMRKLATIIWHMLSKRKTFAECRALAAA

SEQ ID NO: 103615 - protein, 421 aa, unidentified
MSENQRVVGFDCGEDEHSAVLLDAAGEFEERFSVANERGKIQEHLAELLLAVRPGERLVVVVESKRSHGRVVSDVAVELGCDLRQVNTVALNHFRDLEGQPRKNDEWDAYLAARMVFLRMGGCRKATEVTEEERALSRLTRTHRRLVDERRKHLARLRAVLLELAPEMLHSSWEGPQPGRKAMLYLLERWPGFEGLERAQLRSIEKILLRCRYGSRATRVAKLIREMARGISIADEERQAFTLELDLLVRQIRFCDESKDRLRTEIVQRVEHHPIGQKLLGMDGNGPVITGVLVSELLPVARVSSEPKSATYAGVTPLSRKSGKSLDSDKLTQGVNQRVLNALYTSSVVAIKHSAIDRAYYQKKLRGYIGHPKPHVAAFIALSRQRHKLVYKLMTTDAQYDKEVLMAAHLARLEQKQMAAA

SEQ ID NO: 103616 - protein, 343 aa, unidentified
MQTITTIGLDIAKSVFQVHGVDADGNVVVRRQLKRRYVLAFFQKLPSCLVGIEACASSHYWSRELQALGHTVRLMPPAYVKPYVKRQKNDAADAEAICEAVTRPNMRFVPTKTPEQQSCLSLHRTRHLFIRQQTAIINAIRAHLAEFGIVAPVGRRGVEQLLKVVVDDDDTRLPEIARACVAALGTQLLALKAQILAFDRRIMAWHRSNETSKRLDAIPGVGPALATALVASVGDPRAFRSGRDFSAWVGLVPKQNSSGGKDRLGSISKQGDRYLRSLFTAGALAVIRYAKLHGTEHRPWLAALLARRPTKVAAIALANKIARMAWAMMTKGEHYKEPVALAA

SEQ ID NO: 103617 - protein, 411 aa, unidentified
MQYFIRKEGMPMLSIGIDVSKGKSTVCGMKPGGEIVYAPFEVQHTREGMSELVSLLRSSGEEVRAVLESTGSYHCPVVAALLENGIFISVVNSLRMKRFCSQSIRKVKTDRIDAMQIALYGLAYWQELQPTRLPEDTYRELQLLARQYYQMTSMLIKAKVDFNALCDQVLPGMQELMNDHAGRHKLSDFVLRYHHTTHILEMGETRFRKDYCKWAEKKGYRNCERMAALIFATAQNGIPVLPNAPSTQIVITEAIRVLHTVEASRDAILTQMQALAKTLPEYSLVREMPCIGDTLAPRLIAEIGDVRRFHSKRALIAYAGIDAPPYQSGKFCANNRHISKRGNRYLRKTGYEVMQSYVMHKPANDPIFMFIEKKRSEGKCGKLAMVAGLNKFLRVYYGKVTELYRSLPAIE

SEQ ID NO: 103618 - protein, 342 aa, unidentified
MVQAITVGLDIAKNVFHAYGATADGGKAFSRKLRRAQVEMFFSKLEPCLIGIEACATAHHWARTFVAMGHEVRLMPPAYVKPYVKTQKNDEADAEAICEAVTRPNMRFADIKTIDQQSVLVLHRTRTMLIKHRTRMGNTIRAHLAEFGITEAIGREGLARLIDLIVTGEDARITGITRHAMMCLVGQYRLLQDQILDLDRQVMACHRSSEASKRLATIPGVGPLAASALVASIGDASRLKNGRSFAAFIGLVPRQSSSGGKERLGKISKRGDHYLRWLLVVGSLAVIRYAQRHGTKRPWLIKLLQRRTTKIAAVALANKIARIAWVLMTRGGVYREPAAQPV

SEQ ID NO: 103619 - protein, 349 aa, unidentified
MRTFTPPAGIRFYAGADLHARAVFLVILDADGRVVFAKNLAANPDAFLRAVAPFRDGLLVACECMHCWYWLADTCRDENIAFVLGHALSMKAVHGCKTKCDRKDAEAIARLLKGGNFPPAYAYPRERRGLRDLLRARLRLVRQRAHLYGHVHTARRQANLPPVSSDVKYKSKRDACTADIADPFVRRRVETHLTLLEPLDTAIRRLEKEIEDAADQFFPAELAVLQSTPGVGKVLSLTILLEIDTIDRFDTRQQFCSYARLCGAVQTSDNKRTGEGNRKAGNAWLKWAFSEAAVLCAQKDERVGALRNRLAAKLGKAKAHSALAHKLGRAFYHMLHTKEVFDVNRFVRR

SEQ ID NO: 103620 - protein, 434 aa, unidentified
MHREFAQVAIWQDGQVRQAGQVAATPEGLRTFADSLAPSDEVAIEATCNTHAIAKLLEGRVARVVISNPQKTRAIAEAKVKTDKVDAAVLAQLLAADYLPAVWLADDATHALRRQVARRAHIVRQRTRLKNQVQAILHRNLIPRCPAADLFGHKGRRWLAEQTLPADECQAVGALLRQLDFHAQELAIIDAELGRVALGSAEVKRLMTIPGVDATVALSIVAAVGDFARFRSPEKLVSYLGLNPRVRQSGGQPASHGRITKQGRAHARGMLVEAAWAASKTPGPLRAFYQRVRARRGMQVAVVATARKLAVLCWHLIAKGEDYTFARPSLTAQKLRRLELRAGMPSKRGQKGKAAGYSLKAVRARENALNEQAEQAYRQLVADWQAKAPKRESGVAAANGARLSRPSDGATAARQDSAPDPALRSGVDHAHSAA

SEQ ID NO: 103621 - protein, 482 aa, unidentified
MKSKPQKRTKKATDHPTQRHWHEMNRKQRREAMRKIQSEEISLEVVHPNAAGIDIGNESHYVAIPPSRDSQPVQRFGCTTAELKAMAAWLKQCGIRTVAMQSTGVYWIAVYDILEQAGLEVYLVNARDTKNLPGRKSDVQESQWLMKLHTYGLLRNSFRPAQQIRTMRTYWRQRNDLVQSTGRHIQRMQKALTQMNLQLANVLSDVSGVTGQAIIKAILGGERDPHKLAEFRDPRVKASEEQIAQSLEGNWQEDLLFVLKQEQDGYEFCRKQMAECDRQLAQYLQQREDRSQGAPLPEEKRKTRLKKKKGNAPQFDLREGLFRLIGTDLTQIDCIDVMTAMTVISEAGWDMSKWKTEDHFVSWLRLCPDNRISGDKIIGKGRLPTNNRVSIALKMAASSLRLNDTYLGAQFRRLRTRLGAPIAIKAMAAKLARLVYRMLRYGMKYVDRGAAFYEAQHRQVQIKQLKWKAAKLGFQIVQAPAA

SEQ ID NO: 103622 - protein, 452 aa, unidentified
MRLLNGKQGLRRSQFAKELKGADLERVLIIPIDASKVVQKAMILNYFGDVVHTPFAFMVSQTGMKSLIQKVEEAKQACQAERIFVGIEATGHYYEDIVRILTTEGFSVHIINPASTHEERKQHLTYTKTDDIDLYLIAEALVGNKATNAKISAGEYRQLQNLTRARRSEINKRSRIKTEIRTHHDHIWREYQGYSILEEGKIKTTKIFSDFWGKSSLYILAHSPHASQILELGEMGLKRISKEHNLKIRNTSIKKLLFAAHESVSKPVDDLSSEFFLLKQKLKDYEWHTQSIQTYEKEIERILVNTNGLLLLTVPGIGVVTAAEIYCEMGDLTHYTSANQLIKKAGTNPVIKQSGKEEGYRGRISKQGNANLRRAVYTAGKSLSVHNEALKPFYTRLKEKGKKSGSIYIAMGNKFLKIAFSMLKNRKPFKWNNSTFNYKEEVFKKLSLPIAA

SEQ ID NO: 103623 - protein, 312 aa, unidentified
MDGANLTWIGIDVAKASLDLHFIPSGQAHSLTNDSAGHQQLQSLLPEPACCRIVLEATGGYERKLVAQLLDAGYHVAVVNPRRVRDFARCLGLIAKTDRLDARVLALFAKQAEPAPAQKTPEKQAEIQQLVARRRQLINLRTMESNRLETTHVKTARQSIQAILKILERQINGIEKLVESDDDWRQKTQLVKSVPGLGGVTATTLVADVPELGKLNRQQISALVGLAPFNRDSGKHQGKRSISGGRKSVRCVLYMAALAARRCNPVIKAFADRLAQHGKPFKVVLTACMRKLLVIVNALVKSGQAWNPQAAS

SEQ ID NO: 103624 - protein, 357 aa, unidentified
MKIIGVDLHTRQQTIAMLDDETGELVERELPHEGHQVREFYAALPKPVLVGVEATGSLHWFLRLLEELGIEFRVGHPAQIRAAEPRKQKNDRRDARLLLTLLAENRFPAIWMPSREQRDLQTLLRHRDQLVRLRTRVQLSLQAVALNHGLRRGHALWTRTGQHTLRALPLATHAGAQRDTLLALYPALESPIQALDREVEQQARQRAQAQRLMTHPGVGPITALATEVFLGDPRRFADGKAVASYVGMIPSERSSGGRQRLGRLSKQGNSLLRFLWGEAAIHAVRRDPELRRFYRRKLVQKGMGKARMAAARKLGIRLWIMLRDEINYTEFCRRGCSRQQSSGATGAGMPAAGQWSN

SEQ ID NO: 103625 - protein, 398 aa, unidentified
MKTCGLDVHKDTIFCAIYNGKSYLETKEFSTLTPDIRKLGEYLKSEKVKRVAMESTATYWLPVWDLLYDMGLELTLVNPYLVKQMPGRKSDVKDAQWIACLLYKGLLRGSFVPKPIIQELRSYTRTYTKLQGRRTSCLTKMDRILVGCGIRLSSCVSTIGGKSSIKVINALITGENNPDNLVKLVYGNTANKTSGRLKQALTGNLKPHHITRLKWEKQEYDLTELQISECLFEMERICKEHYAQELDLLRTIPGISLVSAIIVIAETGGDMSVFENSGKLTGWTGLRPRNDQSAGKYKSTATTKGNKYLRTILVQIAWAAVRTKRSLFMEKFNRLAMRKSRKKALIAISRKILVVVWNVLQKKNAYNPILTPIYDPEKLTNRMKYHQKEFEKIKKIIA

SEQ ID NO: 103626 - protein, 374 aa, unidentified
MQSQTKVLKNADFTNQNFYIGLDVHKRQWTVTFRLDGTYIKTFTMEPSPKVLIKHLQAIYPNGNYFSVYEAGFCGTSHHEELCALGIKNIIMNPADLPMTHKHKTNQTDHHDSRALAEYLEAGKLKPIHIFSREQQELRSLCRLRNRNRRDVTRCKNRIKGLLMYYGISVPLEYQEKKCWSKRFVNWFKQQQLTTVAGTSSLQFLIEGLEYHRTKLLAVLRKIKQLLKERFKEEWDLLLSIPGIGPLNVVTLLSEIGDIKRFITAARFANYLGLLPSEASSDETIIIKGINPRCNKYLRSMLVEAAWVAIRTSPSLLAYYKKHSYKDSNKAIIKVTRKLAMIIRGVWLNKEPYKEGYISTKSKDLLDNNKPNAA

SEQ ID NO: 103627 - protein, 378 aa, unidentified
MDNVYRSCAGIDIHQNNVVACVLVGPLTSTRPKKYEATFKTTTRDLEALNHWLKSFGVEAVGMESTGVYWKPIWHALINDFKLILANPQRIKNIPGQKTDKKDAYWIAKLTRIDLIPASFIPDEKIQALRNLTRQRIHYIESRNTEKNRVHKILQCGGIKLTSYIKDVFGKSGRNLLDMLMNGEVITLKKIQNSVYTSLKNKTQDLYDAMDGYLSKVDRYLLKQAMMIIDTYNEAIENIEEQIDEQLKIYEEELEVLDSIPGIDKIAASIIIAEIGDDVSQFPTANHLASWAGLCPGNNESSGKKKSTRIRRGNRYLKKHLCQAAFVASRKKDCRFYEKFKKLKYRRGPQKAIIAIAHDILRTAYYLLDKKALYQEVV

SEQ ID NO: 103628 - protein, 348 aa, unidentified
MAKNPATEVQVFAGVDVSARELSVAVRSATMDREEVQTFSNNAAGHQALLGHLLQGKGRARVCLEASGNYSLDLALTLHAHRRMEVSVVNPRRARRFAESLGERSKTDPVDAHVLCQYAVRMPWEPWVPPSVLALHLRGLTRAIEALGVTQTQEKNRQHSLQASRALSPFVIRELQRHLEYLQLRITRLRREALRLIARDPELDRRFRLMLTTPGIGETSALQILGELAVLPATLDARQWVAFAGLDPVRFTSGTTVEKKPRISRGGSRHLRRALYMPALVAIRHEPHLRAFFQRLVAHGKAPLQAVVAVMRKLLHAFFAMFRSDHSYDGSKLCLMELASDSVALRAA

SEQ ID NO: 103629 - protein, 368 aa, unidentified
MQELITGFVGLDAHAESTAIAVAEAGRAAPRFVGTVGARLSELTKALSKLGAPQSLCVVYEAGPCGYALARELARLSYRCEVVAPSRIPRRPGERIKTDRRDALKLAGLARAGELVPVTIPDERDEAIRDLSRARVDAVRARLKARQQLKALMLRHGRRYSGKTSWSAAHERYLATVSFAHPAQDIAFAEYRQAIGEGEARVQRLSQSLTQEVEHWRMHSLVSAVMSLRGLDLIAATTVVAELGDLRRFAHPRELMGYLGVVPSEHTSGSKRRLGAITKTGNAHVRRVLIEAAWNYRYPARISQRLQLRQERQPPEIRAIAWRAQLRLNHRYRRLKARGLHHNKICVALARELAAFVWDIGRHVTPSP

SEQ ID NO: 103630 - protein, 398 aa, unidentified
MDHYAGIDVSLKEASVCVVDATGKIVREAKVATDPTALIAWFGEVKLNLVRIGLEAGPFSQWLYAAMKDAGLPVELLETRHVRNAFKTMAVKTDRKDARGIAELMRVGWFKPVHCKSVNAQEMRIMLNARSLVDSKLKDVESSLRGMLRNFGLKVGRTTATRFADRIKELVAGHPTLEIIAESLLAARAALLREFKNLEKRVRIIARHDAKARLLMTTTGVGPIVSLTYASAIDDPARFKNSKVVGAYYGITPKKYQSGETDVTGRISKFGDKAVRMALYQAAHIVLTKPVKPSALKDWALRLAKRVGMSKAKVALARKLAVIMHRMLIDGKPFNPAAGAAGGLTRRVQEFSGQVNDTSLPETDVPSPGRWTGQTVAHLVGTSTTPNVDWSAFPLRTP

SEQ ID NO: 103631 - protein, 344 aa, unidentified
MVTFGVDAHKRTHTIVAVDDHGKPLGQTTIGTTSKDHLGLVRWAARFGAERRWAVEDCRHLSRRLERDLLGTGEEIVRVPPKLMAHVRDSARTYGKSDPIDALAVARAAQRETDLPVARLDGPERELRLLVDHRESLVAERTRLICRLRWHLHELDPAWEPKARSLDAQRTLAEVLRRLSDQPGLVARLARELTHRCAELTASIKALAVEIAELTQQLAPALLAIPGCGSLTAAKIVGESAGVDRFKSRDAYARYNGTAPLPVWSSNKARHRLSRTGNRQLNAALHRIALTQARWHPPAQALIERRRSGGNSGREAMRILKRRLSDAVFQALRTDQSEHLVLAA

SEQ ID NO: 103632 - protein, 318 aa, unidentified
MFIGIDVAKDTLVVAARPTGTLETVANSAAGLQPLLTTWREHPPTLIVVEATGGYEVLVVLTLSLAGLPVSVVNPRQVRDFAKGTGQLAKTDAIDAHVLAHFAELMQPPVRPLADAETRALEALVARREQLRLMLEAERQRLTQPAAHAPAVRTSLEHTIAFLQQQLAHTDDEIGTAVAAHPVWAARSALLQSVPGVGPMIAQALLGWLPELGHLTRQQIGKLVGVAPFNRDSGRYRGTRRIAGGRAAVRAKLYMGALVAVRYNARIKAFYLRLLANGKPKKVALVACMHKLLTILNQIVRTAMPWDASHHMAAPQLA

SEQ ID NO: 103633 - protein, 333 aa, unidentified
MNVAGIDVSHKELVIVVSVNGKARKAKTFDNTALGHKAIILFLSKLKGEARVCLEATGVYHFDLAVALSRTEGIDVMVINPKASHNFAKVLMKRSKTDVIDAETLAIYCERMPFEAWQRPADETITLRAISRRIAALNKLKTQTKNQLHALSATQESPSLVIEQTEELISLLEKQIQAHRQSALTLIQQHNHLADPFVLIIGIKGIAEASGIQILAELMILPKELSARQWVAYAGLDPRIFESGSSVAKKPRISKAGNKYIRQALYMPALVATRYEPNIKGYYAHLIEDNGLKKVQAICAVMRKLLHAIHGMLKANKEFDGTRFYTLPVEVKS

SEQ ID NO: 103634 - protein, 315 aa, unidentified
MSSQVFVGIDVAKAQLDIALRPTGERWAVTNGEAGIATLVTRLQAIDPQLIVLEATGGYQRAVVAALAAAGLPIVVVNPRQARDFAKATGQLAKTDVLDARALAHFADAVRPTPRPLPDAQTEELRALLARRRQLIAMRTAEQNRLSGASQRLRVDIQAHITWLDTHVAALDDDLDTTLRASPVWREHETLLRSVPGIGPVCTRTLLLDLPELGTLSRQRIAALVGVAPFNRDSGTLRGSRTVWGGRAPVRATLYMSTLVAVRYNPVLKGFYERLRAAGKAAKVALTACMRKLLTILNAMVKHHTPWQPQAVASA

SEQ ID NO: 103635 - protein, 356 aa, unidentified
MSKATTIRRRVTIGLDVSDRYCRVCVLDARGDVACEDRLRTTPAAVRSWFGRYAHARVVLEVGPHSPWLSRLLKGQGHEVIVANPRRVRLIAEAERKSDRIDAETLARLGRADPRLLRPIEHRGEAAQQDLALLRVREGLVRSRTKLIQCARGLAKSFGVRLPASSTPSFAKHVREGGLEALFPGLGVLLGQCDELTASIRRLDREIERLGRERYPETQHLRQVAGVGPITSLAFVLTIEDPHRFAKSRSVGAYLGLTPRQRDSGDARPELAITRRGDEFMRRLLIEAAHYTLGPFGPDSTLRRFGLRLLGQGGPRAKKRAVVAVARKLATLLHRLWVTGEVYHALGAPGADVQAA

SEQ ID NO: 103636 - protein, 339 aa, unidentified
MMIIGCDYHPSFQQVAFVDTESGECGEHRLMHRAEAEEFYRGLRPGPVRVGMEATGHARWFERLLAELQHELWIGDPAAIRAQQVRKQKTDRQDAGLLLQLLRENRFPRIWVPSAEHRDLRQLLWHRHRLVQMQTRVKNQLQALALNEGLRRGKGLWSKAGREQFEALELAPWSARRRQDLLELLDGLHPRIQQLSLAIEQAGEQRAEVQRLMTHPGVGSITALAFVVILGTPQRFRCGKQVGSYLGLIPSEASSGGRQRLGHISKQGNALLRFLLVESAHAVVRYEPQWRRRFLHLALRRGRAIAKVAMARKLAVRLYWMWRQAWDYQQMLQFGSHVE

SEQ ID NO: 103637 - protein, 414 aa, unidentified
MSYKIAGIDVHKRVLMVVVIDASTPEEKPERRRFTTMPSDLHRLSIWLREQGVEEAVMESTAQYWRSVWLELEPHMRLQLAQAFSNRAPRGRKHDFKDAERLVRRLIADELILSFVPGEEQRTWRNMTRMKTQLRRDRVRLQSQMECLLEEMRIKLSMVVSDLLGASGLRILRDLAQGETDPKKLALLGDDQLKCSEEQLVDALTGRPQPMHREMLRLQLERLQLIDRQIEELNSLIAQAMKPHQEVVIRLAEVPGLGVDSAQQVIAEVGVQASTFPSAAELTSWVGTCPGKDESAEENHSSRSAKGNKYLRRVLNQSAHAAVKKKGSHFQAVFRRLLPRLGYKSAIWAIAHRLCRLIWKILHDGVRYIEQGSESDPKLREKRARTLARALRKLGYDVAITPINPSTAQKAMQS

SEQ ID NO: 103638 - protein, 340 aa, unidentified
MNPTTYGLDIAKRVFQMYWVEAGTGEIVNRRFSKQELIEFLSRRSMGRVALEACGSAHWWARKIKALGHEVVLLHARFIRPFVQNNKTDAADARAIWTAAQQPGMRRVAPKTEEQQAMLGLHRMRALLVKSRTMQINQLRGLMYEFGVTFKAGRRAGLAEIRQRIDEVEQAVPGMLFDALRDQLQHIGQLDNEIVKLEKRLAAWQRQEAACRTIAEIPGIGPLTATALVATIGDPASFKSGRELAAFLGLVPRQSGTGGKVRLGGISKRGDPYVRSLLIHGARTVISRAKNKGKWCDELIQRRPANVVAVALANKMARTAWALLARGGPYQRDHVREKSA

SEQ ID NO: 103639 - protein, 318 aa, unidentified
MPPAAPTFVGIDVAKAELVIAIRPSGDRWTVTNDEAGIQTLVKRLDRHAPALVVLEATGGYERAAIAALAAAQLPLVVANPRQVRDFARATGQLAKTDRIDADTLALFAERVRPNPRALPDEAARALDALLTRRRQVLELLIAERNRLEHALPAVRRGITQHIRWLERQLQDVDRDLDDNIQASPVWRAKENLLRSAPGVGPVLSRTLIGELPELGTLPRKQIAALVGVAPLARDSGTLKGKRLVWGGRAPVRATLYMAALVGTRCNPVIRAFYLRLLAAGKPKKVALTACMRKLLTILNAMMRTNTTWRQIDQSQTT

SEQ ID NO: 103640 - protein, 350 aa, unidentified
MLIIGCDFHTRYQQIAMMDDTTGELIERRLDHENGEAHHFYRSLPKPVRVGVEATGPLAWFERLLAELGHELWIGNSAKIRASEVRKQKTDERDARLILELLLTNRFPRIWAPTPAERDLRQLLWHRHKLVRMRTMIRNQLHFLAMSQRLCRRHRLFTKRGRRELEALSLPPWTSRRREELLQLLDRLEPSIAQLEQAVVAEAKARDDAARLMTHPGIGPVNALAFVLTIGPVARFRRSKKLVSYLGFNPSEHTSGGRRRLGAISKQGNTMLRWLLIEAAQSAVRFDPELRQDYLRLKSRRGHAVAKVAIARKLAVRMYWMLRSGADYARLVRMQGSPRGTLVNASSSPA

SEQ ID NO: 103641 - protein, 348 aa, unidentified
MLYAGLDLSRRRLDVCVLNEDGDRLLEIGVSPDADGLRSLTARVARQWPQPVSAAIESMTGARFVHDVLERWGWQVDIADAQRAKGLAPLVAKTDRIDAWVLAELARRELVPAIWLPDPGVRAERERARFRLHLVHHRSALKNRIHATLISFGHALPVSDLFGRAGRQRLERMALPEPWASSVAVSLELIDDLDRQVAAAEAELRRLGAEHASIPLLRSVPGISWILASVIAAEIGDIGRFASAKALVAYTGLVPFVLQSGERDRRGPLTKHGPRYLRWAMIEAAMHASRHPAYRARYERTRRRLGRQRGPKVARVELARQLTTAIWHMLSKGEPFAPPAGPTMYLVA

SEQ ID NO: 103642 - protein, 366 aa, unidentified
MRVGDKCLDLQGTHKMDKQPIQHEVILGVDTHLDTHVGVIIDCCGKMLDVLSIETNITGYHQLLKWARSFGNLQRAGVEGTGTYGAGLAQVLSDHGIDVREINRPDRSMRRFRGKSDPTDAESAARSVLSGNARAIPKLRSGAAEAMRIVSVARRSAVKARTINQLRALLVSAPESVREKLWKTKQEQCVDNCVRLRTLGETRSLKTLATTLRLLAKRWLYLTAELKELDGTLEHLTKLAAKRLRRQFGVGPQTAATLLAVAGDNPERLRSEAVLAALCGVNPLPASSGKTVRHRLNRGGDRSANNALWTIAMVRMRSDPRTRVYVARRTAEGKSTKEIHRCLKRYIVRELYPLILADLSDAAVAA

SEQ ID NO: 103643 - protein, 322 aa, unidentified
MASFLGIDVSSRSLDGWVRPQAVRIAVSNNPAGFEELERTLRKFSIKRILLEATGGYERDVLRFLQDAGYKVIRVHPARARKFADSMGVKAKTDAIDAEVLAHYAEVIPDQPTLQISPDRALLRELLMQRDRLVQQRDDDRRRLKQAQSLVVANFLKANLQHFRSQIRLVEQEINQQAAKLNDERIARLTQVKGIGMVTAGKLVALLPEIGRVESREIASLVGVAPFNHDSGKSLGKRSITGGRFEVRRTLYMALLVAVKYNPALKARYEALRGRGKLAKVALVACMRTFIVRLNAMIKTGTPWRDLILPQPAGTTQVEKAA

SEQ ID NO: 103644 - protein, 404 aa, unidentified
MTAVDVWVGIDAGKASHHAAAVDASGKRLWSVKVANGQQQIEDLVSRAALAGGEVRWAVDMVSPAAALLLAILLASGQKVVYVPGRVVHGMAGVFRGEGKTDAKDARIIADTARMRGDLTELTASGDLVVELTRLVSYRADVMADWVRGINRLRELLTSIFPALEASFDYSTRSALTLVAGYCTPAGIRQAGPDALAAYLREHRAWAKGIDAMAATAVRAAEQQTIALPGEAATAMLVKKIARQLLDTDREIKDTDKLITSRFRDHPQARIIESLPGMGPILGAQFLVATDGRPLEAFASSGRLASYAGLVPVPKDSGRVTGNYHRPKRYHRPLRHVFYLMALSSLRTEGPSKAFYQRKRDENKLHTQALLALARRMVDVLWALLRDNRTWSPIPPSQIAATAA

SEQ ID NO: 103645 - protein, 353 aa, unidentified
MSEKLNSKIAVIGIDIGKNSFHIVGQDRRGALVLRQKWSRSQVEARLANLPPCLIGMEACTGAHHLSRKLQALGHDVRLMPAKYVRPYCKGDKNDYRDAEAIAEAVQRPTMKFVATKTADQLDLQALHRVRERLVSQRTGIINQIRSFLLERGIAVRQGLRFLRAELPDILAKRTDVLSPRMLRIVEDLSRDWRRLDERIEGLSSEIEALARQDQGCARLMSVPGIGPLISTAIVAAIGTGDPFSKGRDFGAWLGLVPKQMSTGDRTILGNISRRGNRYLRTLFVQAAWVVLVKVGPKQWERYGLKSWIEAAKKRLHHNVLAIALANKLARIAWAVLHNGRAFEYVKTNATAS

SEQ ID NO: 103646 - protein, 375 aa, unidentified
MSDYSEAFVAFDTSKLRNAVAIADGGRAGEVRFLGEIENSEAATAKLVRKLAAKYQRLTFCYEAGPTGYGLHRQITGLGHQCQVVAPSLTPKKRGDRVKTNRRDAVNLVKLLRAGELTAVWVPDRRHEAIRDLTRAREAAVNDLRCKRQRLSAFLLRQGRSYPEKKTTWTKTHMNWLASQKFEHPEQRLVLEEMMLAIRQGEERVERWRQAICAAVPDWSLGKLVTALMALRGIDMISASALLAEIGDLSRFQTAPEFMGYLGLVPSEDSTGDTIKRGPITKAGNRRARRTLVESAWSYQHPPRLGQAKQEKVAAAPRAVREIAWKAQCRLNRRYKALLRRGKLKTVAITAVARELAGFVWAAARAANAAQAASK

SEQ ID NO: 103647 - protein, 310 aa, unidentified
MTSTKYIGMDVHKESISVAVMNAAGKIVMECVVETKASMILQCIDGLRGDLHVTFEEGTSAAWLYDLLKPHVTELIVCDPRKNASMREDDQNDKIDARRLAELLRIDHLHPVYHGEHGLRTLKELVRSYLTVTKDLARIKTRVKAIYRSWAIPCNGTEVYAACHRAEWLEKINEPGVRRRAEFYYQQLDALRVLRQGVRRELLVESKKQKAWKRLCQIPAIGPIRAAVLLGILQTPHRFRSKRPLWKYSGLAIETCSSADHRSVNGQLQRSKKTSVRGLNQNCNHDLKNLFKECGAPHSLKNVKLPEMWS

SEQ ID NO: 103648 - protein, 375 aa, unidentified
MKIIGCDYHPSFQQIAMLDTETGEVTERRLYHGNGEAQRFYESLSGPVLVGVESSGNMLWFERLLARLKQELWIGDAAAIHWQNPRKQQLTDKRDAQHLLDLLVEKRFPRIWVPSVEERDLRQLLKHRHTLVQMRTRVKNQLQHIALNQGLQKKSKLWSREGQEWLKKLELAAWTQRRRDDLLQMLEDLDRQVKQMNREAEKAAAARKDAQLLMSHPGVGPILALATVLTLGDVSRFQCGRQVASYIGLVPTEMSSGQHRWLGSITKQGNSFMRFLLVQAGLSAARGDAELGRVYKRLVQKKHHGVAKVEVARKLLVRLYWMLRTQKQYPEVVRMQGSLSHPVAAAKADRLSGRPASRPEPQDQKPKKEKRKQQK

SEQ ID NO: 103649 - protein, 341 aa, unidentified
MLYVGLDVHQKRSSICILNQDGKTVKQELVNGRWPQVIDRLRRIDQPFGICYEASCGYGYLYDQICALPMASGVSVAHPGQLRLIFKSKKKHDRVDAQKIAKLLYLGEVPAVHVPGVDVRSWRKLIEFRQKLLAKRTAAKNQIRAILRGNALTAPRGLCTKKSLATLATLELPAGEKLAMEMALEEIAELTARIKRVEKELKKIADSHPGVTLLRTIPGIGIRTAEAFCAYVDDIKRFSRSRQVGAYFGLIPCLDSSAGKDRFGHITKDGPSTVRKLLCEASWVAVNQDPAIKERFDRIVNGDKDRRKIAIVAIAHHLCRVMAAMLRSGEVWRSHADKQEH

SEQ ID NO: 103650 - protein, 446 aa, unidentified
MLLRARGSVSRQKAFRAASARPSGRAGFATKGLVEMEVLYERVAGLDVGKASVTVCVRTPGRRRGSRHSETRTFKTTTGSLAVMRDWLVESGVTIAAMESTSTYWKPPFYCLEEAMTVWLLNAAHMKAVPGRKTDVRDAEWIAQLLEHGLLTPSFVPPPPIRHLRMLTRYRVQLMGDRTREMVRLELMLEDASIKLSTVASSLKTVSARAILAAMIDGETDARVLAEMAKGRMRKKIPDLAQALEGHFDANHAQLARSILDRLDRVDQSLAELDHAIEAACVPWAHQIELLLTIPGVGPRVAQTIVAETGADMSQFPTAAHLASWAGLAPSMYESAGRRKPAGRRRGNKWLTAMLVEAAGSVGRMHGKNYLAAQHARLTRRRGMSRAQIAVAHSILTSAYYMLKRDEPYRDLGPEWLAQRNDEAHTRRLVAQLEKLGHTVQLDPVA

SEQ ID NO: 103651 - protein, 310 aa, unidentified
MEDVVVGVDVSKDRLDVHVLPSGEAFSVSRDSEGVAALAERLSGLGAALVVMEATGGFETIVAAGLAAAGLPLAVINPRQIRAFAQALGKRAKTDPLDAEVIARFGQALQPEPRPVPDEQARNLSELVARRRQLVEMMVAERNRRRRLVQPKLIKGVDRVLAALQQELTALERDIDQTIRGSPVWLETEELLTSVPGVGDKTARTLLAEMPELGKLDRKQIAALAGLAPYNRDSGRFRGQRRIAGGRSPVRTALYMAATVAARHNPLLKAFSQRLRQAGKAPKQALIAVARRLLTILNAIVRDRRPWQTA

SEQ ID NO: 103652 - protein, 341 aa, unidentified
MKEVTMIGLDLAKNVIQAHGCDGAGKVVFRRRLRRDGVLSFLARQPKCRVVMEACGSSHYWGREIGKLGHEVGLIAPIYVKPFVKRQKNDAADAEAICEAASRPTMRYVAVKSAEQQALAVVFKVRDLLVRQKTQAINALRGHLAEFGVVAPQGPAHVGRLIDAIEDEASGIPEAVCEICAILVETIRRLAGRVRELDVEIARRAKQGDVTRRLMTIPGIGPVSASALEALAPPMDSFRTGRDFAAWMGLTPKQYSTGGKPRLGKTSKMGQRDLRRLLIIGAASVVRQAARRGAPEGSWLARMLAGKPRMLVIVALANKMARIAWALMARGGVYQAPAAAA

SEQ ID NO: 103653 - protein, 368 aa, unidentified
MTNGTTYVGLDVHAQTIQVTMLRPDGERVEWREANEPSAVRRLAKKLLRSAPGNIHACYEAGPTGYSLQRRLQEAGVLCDVIAPSLIPRKPGERIKTDRRDARKLAELLRAGLLTVVHPPTLEDEAVRDLTRCREDARDDLKRHRNRLSKFLLRRDLRWAETKAWTKKFRTWLASLHFHGMASQATFTSYLLAVEQAEQRLQGLEKRLEELAQTEAYRERVGWLCCLRGFKVITAMTVLAELHEFKRFRHPRELMAYLGLVPSEHSSGGSERRGSITKTGNSHVRRLLVEAAWHSRHQPRVTAALRKRREGRPAWVQAIAERALHRLHRRYTRLGARGKEANKVVVAVARELVGFVWAILQGPTPAKA

SEQ ID NO: 103654 - protein, 424 aa, unidentified
MNLTQNDKLNQVTADTLVVGVDIGSQDHFARAFDWRGFEFTKRAFRFSNTGIGFLSFVRWLYELQNKTGTKKVIVGCEPTGCYWLTFQKFLNEHEIQLVTVNPYSVKKCKELDDNSPEKSDLKDPKTIAGLVRDGRFSTSYLPSGVYAEIREASVCRDMIMKQHVRLANQIQGWLQKYFPEYLECYKDWNSTSGLMLLKHAPLPQDIIKLGAGGINQIWREAKVRAAGIKRATTLVEAAQNSVGLEGGEAARLEIWILVNDYISKAEQLDRLDAFLKEKIMEVPNVEKLLAIKGVGLSTVIGFVAEVGDIGRFTDPRQVQKLAGLEITKISSGKRKGQPGISKRGRRKLRRTMYESARALINWNPAFLDVFLYYRNREHRPLGSMQAKIAVACKAIRVFFVIMQTGCDFDEERFRKDILRPEAA

SEQ ID NO: 103655 - protein, 361 aa, unidentified
MAGTMTWVGLDVHARSTHAAAVDVMTGELLRMRFGPGVDGPVAWLGSLPGPVWACYEAGPTGYGLYRAAVAEGIRIDVIAPGKTPRSPSDRVKTDRRDAELLARCLLAGSLKPVTVPPAGVEAARELTRAHDACRRDLMNARHRVSKMLLRHGRVYPKDNTWGQEHRRWLSRQQFEQELSAFVFADLVARVDGLTARKAGLAERISRLATDPEFWLTVARLRAFKGVDTLTALSIHLELGADWQRFEKPTRLGSWLGLTPSLTQSGESSRQGAITKTGSGLARRLLVESAWHYGREPRIGATLENRQQGQPEHVLQIANTAQQRIHSVYRRMKARGKPHHVIVVACARELSCFLWAAATAP

SEQ ID NO: 103656 - protein, 334 aa, unidentified
MKELKSSVGIDISKDSFEVCIKQLAGEKVVIKATHSFQNDFMGFEKLLKWTLAKVLNPIFVMETTGVYHEELTHFLYSNEQKVAVVLANKMKHFAKSLNMKTKTDKADAQMIAQYGLERPLDWWKPMMPQMKNLRDLCRERASLKKDLVRCKCQIHGLKHAHSTLDVVLQVKEQQIEFLDKNIQVIENEIIRLTQEDKEFSQRVKNIETIKGLRLLTIVTVLCETNGFEQFNNIRQVVSYAGLDISERQSGLFKGKTHISKKGNARIRECLYMPALSATSYNEQIKALYQRVIERNPTIKRKGVIAGMRKLLVLIFVLWKKNEAYNPDFQWNAH

SEQ ID NO: 103657 - protein, 360 aa, unidentified
MVIERTSVGLDVHARSVVAAAIDEVSGELTQRRLGASVEEVVAWVTGLPGPVAATYEAGPTGFGLARALRAAGVRCEVAAPSKLQRPVGDRVKTDARDAVHLARLLRLGEIVAVTVPTVEAEAARDLVRAREDARGDLMAARHRVSKLLLRQGIQYAEGKAWTVAHLAWLRRQRFELPGLQVAFDAGYDAMIATLDRRGRLDEAIAQMAGNSEFTPVVDRLGCLRGISTLTGFALAVEIGDWTRLDGRRIGSYLGLVPSEHSSGASRALGGITKTGNGHARRLLIEAAWHHRPTYRPSSPIMRARWDRAGAEARVRGHAGNQRLHQRWLAFQARGKRTVVANAAIARELAGWCWSLAAMT

SEQ ID NO: 103658 - protein, 414 aa, unidentified
MLKIVYRVCCGMDVHKSFVVACIASTNEYGVTTYKSKRFSTFTRDLRRCADWLSENNCKDVCMESTGKYWIPIYNILEPTCNVVLAHPKYVKAIRGKKTDKRDAKWIADIFKHDLVAGSFIPPADIRQLRDLVRYRWKLTNFTTGEKNRAQNCLTVSNFKLDDVFSDVFGKAASAITTRILEDPTEKITDVSGFRTKGMKATNEQVLAAVDGEMCEEQAEKLRIIRSHMDSLELCKLNLESLILSTAEQYLPQLNLVMTVPGIQSFAAIGIISEIGVDMSVFPTSKHLCSWAGLTPQNNESAGKKKTTRISRAGAYIKPLLVQCALCAIRAKQFPELRNRYLAPKKRRGHKKAIIAIARMLLTAIYNMLKKNETYNPEIYRKGDRPPAHREVSVEEAIFILQRQGYLVTAPPTS

SEQ ID NO: 103659 - protein, 402 aa, unidentified
MDQKKRYSRFVGIDIAKNRHVFCVVDRDGQTIQKPRSLANDKQGYHQLRETLKSIGQARTFLVGMEATAHYWYSLHDDLTRQGYHVVVLNPIQTYQQAKKAIRKCKTDKVDAMHIATLIKNGDYKPALVPGPLAMTCRQLTRLRMRLVQQNAKLKQLIWSRLHPIWPEYEALFSNPFCATGRKLLFTAPSPADVLAMDPHELSELFRKTSRGKYGPAQAQKACQAATHSVGMQRGLDGARIGIRTLLSQLEATQPIHEQLKQEIVQLAQRLPEYLFTLPGIDPIRAVSLFGETDPITDFKTPDQLVAFSGLDLTVFQTGQYEAPRRRISKRGSPFLRHTLWHMAYQAVYQEGDLRSYWLRKLSDGLSHKAAVTAAAIKLCRITWRILTDKRDYLIQGPPSQS

SEQ ID NO: 103660 - protein, 347 aa, unidentified
MPIYCGVDFHSRQQFVAWCDTTDGEIHSVKLDHSEIDTLRTFYSSLQGPVIVGLESSGYSQWFEDLLFELQHEVWIGNAAEIRKRARSRHKTDRRDAELILDLLLKNEFPRIYRPNAESRSILQKLRHRHRLVQLRTKAINHLHAIAISAGLSIKSKLMTKDGRRQLKALTLSATHRQQRDEWLALIDHLTPVIRSLEKELVPIAEQELRVSRLMTNPGIGLLTGLALVHTLGPIDRFPTARKVTAYIGLDPVENSSGDRKRIGSISKQGSRLVRYLLVEAAQKAAQGDPDLKRFYYRVMQRRDKPRAKVAVARQLLVRAYIQLRDGIDYAEFRRRAVKVETARCSH

SEQ ID NO: 103661 - protein, 315 aa, unidentified
MTWLPAPTTSKDTIVVGVLMPGQEVPVVDRISNDEEHVRRLVGRFPDRGLLRACYEAGPGGYDLYRLLASMGVTCDVVAPSLIPKGGPDRVKTDRRDSVRLALTHRAGMLTAIRVPSPAEEAVRDLARVRSAVIADRKRAQQRLTAMLMRHGRIWRSTYWTAAHRAWIAAQSFGEPAQAAALAHYRAALATRETELACIDSELAPWARRDPLAAPVGRLCCYRGIAELTALTLAAEVMDWRRFPSARAFMGYTGLVPSEYSSGARTWRGHITKAGSGPVRTALIEAAWAYRYQPAIGVTLRRRQEGGAADTLARS

SEQ ID NO: 103662 - protein, 430 aa, unidentified
MKVLYERVAGIDVHKDMIKVGIRSPGDKPWTRRSEVLQYRTFYGVLQQMAADLRKRGVTHVVMEASGVYTEPVYYALAERDFDEVAVINPAHAKALKGHKTDAKDCLRVAELFECGLLRGSYIPAAGLKEVRDLTRYRMKTVQARTSEIQRLAKALESAGIKLGSVVSDLTGKSATAMVEALIDGERRGQVLADLALGRMRAARKLADLSEALVGRFTDHHALLCRLHLDRIATFDTAVAGLEDKIALKASPWQREQDLLRTVPGFGDVMARAWLGEIGPAPHTYFASHEKLASWVTLCPGNYMSAGKRKHGRTGDAGTYVKPMLVNAAWAAIRTPGRLQAKYGRLVRRFGGEKNPAAKKKAIIAIAHTLLKIAYQVLRSGKPYEDLGADFYTRRESPGQRQAYLMRQLQSSTPAAPSPSPLARPPDPRG

SEQ ID NO: 103663 - protein, 415 aa, unidentified
MALKIVYKICCGIDVHKTFVVACIASTNEKGVTTYESHRFSTYTKGLKDLLQWLLTRNCKDVCMESTGKYWIPVYNVLENDCTIVLAHPKYVKAIRGKKTDKKDAKWIADLFKHDLVAGSFMPPADIRQLRDLMRYRFKLTCFKSSEKNRLQNCLTVSNIQLASVVSDTFGKSAQAILDKILENPADTSFDLEPLVYKSLKKKLPELRDAIDGYITPEQAGKLKVIKAHYENLESRKAELEELILALAAPYQQELAILQTAPGISSDFTAIGIISEIGTNMEAFPSAKHLCSWAGLTPTNNESAGKKKSVRVSKAGCYIKPLLVQCANAVVKSNKHPQIRNRYLRLKKRRGHKKAIIAIARMLLTALYHMLKNGENYNAELYRKSDLPPVDREITVEQAILIARNQGYKIKSAMA

SEQ ID NO: 103664 - protein, 341 aa, unidentified
MKSKFPTDRYFRQCVGIDVSKSKFTACLCMLSWGCPAQFTESIEFANTKTGFNQLVKWARREAEKGKPILFLMEPTGTYYEDLAYHLHKLSFTVYVIPSGRVHAFFKEEGIKTKTDSVDAYGLALMGGCKPYLKEWNPPCPAYRELRQLTRLQVHFKDIRTMLTNHKEALSHQYAPCPIALKQIDAMIKSVDLRIGRNQAAIEELAGNNPEIKEKLDYIQSIKGLGFMAAITILAETDGFANISSRSQLASFAGLDVVAKDSGKSTPARHISKVGNTHLRRIVYLCSLSAAVYNPQMRALYSRISQRNPSKVARVAVMRKLLLLAYTLCKTKQLYDPGKIK

SEQ ID NO: 103665 - protein, 477 aa, unidentified
MTPYKDAFPEPCPPPPTVPEPTVRTLPLQLYNPHAAGIDIGEAEHWVAVPPDRSPQPVRRFGTFTADLDALADWLLDCDITTVAMESTGVYWIPLFELLEARGVQVFLIDPRQAKRAPGRPKTDRLDCQWLQRLHAYGLLAAAFRPADQICVLRSSLRHRQMLLTYGAHHMQHMHKALQQMHLKLSQVVSELTGATGMAILKAIIAGERDPLTLAKLRNPHGHHSEDEIAKARQGTWRAEHLFALQQAVELYQFSHQQLTLCDQHIQTPLATFADKSAGQPFPPKARRHKKANEPRFDARTPLYRLAGVDLTTIEGIEEGTALVILSEIGTDMSRWPSVKHFCSWLGLSPPHKISGGKVLSRRVRPGAQRVAVALRLAARTVHHARTALGAFFRRLRSRLGAPKAITATAHKLARLVYSLFKHGSAYVQQGLEAYESQYHERQVKGMARQARALGYTLVALGTPEGQSLDAVAAPTS

SEQ ID NO: 103666 - protein, 343 aa, unidentified
MESIYYIGLDVHKKSIAYCIKTVTGQIVCQGMVKAERRSLRKWLEDIPGSWVGAMEATMFTGWIYDFLKPYAVELKVAHPAMLKAITAAKKKSDRADAEKLADLLRVNLLPECTMMSEELRELRRILRYRNLIVRTASKMKNKISGLLMEVGAVYDKRKLHGKRYFGQLLERVEDVPESVKDLLKLSRSSMELFEAVQKKLLKILREDSLISKRVELLRSISGVGEVMALTWVLEIGDPKRFSNSGQAISYCGLCSAQHESAGKEHRGPISKKRNKYLQSMLIEAANLAPYWNPQLGILYEKELTRGNRNRATLAVARKLVIYMLAVDRRGKPFMTEKESLVA

SEQ ID NO: 103667 - protein, 323 aa, unidentified
MMSTSVLGIDIAKQKFAAALLVEGKTKHKTCKNSAEGFETLNLWLQKQGIQKLHACMEATGNYGEDLAIYLHDAGHIVSIVNPARIKGFAQSELVRTKTDKLDAALIARFCLAMKPGLWTPPAPEIRSLRALVRRVDSLVDMRTQEKNRIHTAHESVIFLIKEHIAYLDQEIEKIRRQIADLIKQHPDLKRKKELLDSIPAIGKVTIPHILAELDDPGKFSHVREMVAFIGLAPKETLSGSSVKGKPRLCKIGHARLRKALYMPALVSIQCNPVMIAFYNRLKDKGKNGKVIVCAIMRKLVHVIFGVLKSGKKYDPNFLTISA

SEQ ID NO: 103668 - protein, 364 aa, unidentified
MISVHYVGMDVDKEKIVLARLGAGRCAEVQEQVIANTPSAVKKHFTALLAGAEVHASYEAGCFGFGLYRQLSAMGVAVLVAAPGLIPRKPSDHIKTDRRDARTLALALRAGQLTGIYVPTAQDESVRDYLRMYEDLRGDLRICKQRVLHFLLRRDIRYDQGGPWTVRHKNWLSSLEFSDPRDRKTLDMYLSTMQEIEGKCSEAAEEVEQIAAQDRYREQTKKLTAFKGIKTLIALSFVADIGDFRRFPNARQFMAYLGVVPSEHSSGNKRRQGGITKAGNSHLRRLLVEAAWHYRSYHPSSRVLTERRKGVDPQILSYANRAGRRLSRKYMHLLLRGKRSQVAVTAVSRELAGFIWGAMTGQVA

SEQ ID NO: 103669 - protein, 333 aa, unidentified
MYAAIDIHKQVFQAAVLDAVSGELVEARFAATREALGNWAARWQGKLTDVAIEATCGWRWVHRELEPRGFTVQLAEPARARALKGNTRQPKTDRLDARWLAQLLAKKMLPESWLPPKDIERLRDLTRLRQSLRHDRTRWAQRLHAVLQHEGWPCARRSLLSPTGQRWLAALALDAGVRRLVDAHQAMIGAIEEQLAQIDRELGTLARSDPRLVALQALYGIGPVIASHLLAEIGEARRFRRSRQLVHAAGLDPVVLESGDSHRRGHLSKQGSPHLRWALMQAAQQAARRDRSPDHARYVAVQKRIGAQRAALTTARKIARRAYHVLAALEDAA

SEQ ID NO: 103670 - protein, 407 aa, unidentified
MEVLYPRCAGLDVHAGQVTACVRVAEGAEVVYHRRTVATTTRDLLTLADWLTAHACSHVAMEATGVYWKPVWHILEDQFTLILANAMHIRQVPGRKSDVNDATWIADLLAHGLIRASFVPPTPIQDLRDLTRTRRQLVAEIARHTLRIQKTMEDANLKLTRVISDVLGLSGRAMLKAIVAGETDPERLVDLTSGRLTASRAQLVQALQGRITPHHRFLIGLHLTQVEALEAAVAHVEGHLGDTLGPFRSAVTLLTTMPGLGETAARVLVAEIGVDMTRFPSAGHLVSWAGLCPRLDERAGKRHSTRVRHGAPWLKTTLVQGAWAATRAKNSYLQAQFHRIKSRRGPKKAIIAVAASMLTAPYFMLRNRVEYRDLGGRYFEDRHKQQVTDRLLRRLRDLGVSVEVKAA

SEQ ID NO: 103671 - protein, 332 aa, unidentified
MSIIGCDLHSRYQVIAMLETGTGEVITRRLEHEDGEAKGFYAGLGKPVLIGIEATGYTQWFERLAAELGHELWVGDPAEIRARAVRRQKTDTRDAEHLLDLLLSKRFPRVWVPKPEERDFRQLLKHRDKLVKMQTSVRNQLHFLAMSQGVCRKQKLWSVRGRQELEGLELGPWASRRRQELLELLDRLGPRIEELEAAVKAEAARRPEAVLLMEQKGVGPVTALAFVLTVGPVERFATSRKLTSYLGLNPREDSSGGHQRLGHISKQGNEMLRWLLVEAGHTAARLDPELRRVYQRLKFRRGGKVAKVAIARRLAVRLYWSLRRYAAGSHVQ

SEQ ID NO: 103672 - protein, 468 aa, unidentified
MTVKQEGEVGVGDSRKSSKGKKKRRIVKLESLKQLNLNAGGLDIGAAEIYAAVPEGRDEVSVRRFETFTADLNSLADWLEVCGVDTVAMESTSVYWIPVYEILEERGFELYLVNARQVKNVTGRKTDVLDCQWLQQLHTYGLLRGSFRPSQEICELRTLLRHRGNLIRWRAAHIQHMQKALNLMNLHLTNVISDITGVTGMKIVRAIVAGERKPEVLAQYRDPNCKNSEEVIAKSLEGNYSSEHLFVLQQALELYDIYTAKIRVCDDEIEQLYGAFEPQVDIVSKPLKAPKKNRRKNKNAPEYDLRTYLYQMTGVDLTAIDGLEVLTVQTIISEVGIDMSKWKSVKHFTSWLGLAPENDVSGGKVLRTGTKKVKSRANLAFRQAAMGASRGQSAMGVFYRRIRARHGPAVAIVATAHKIARIFYVMLKEHREYISPDPSQYEARQKERSIKHLKRKAAMFGFQMVPAG

SEQ ID NO: 103673 - protein, 377 aa, unidentified
MNFIGIDLHTNRFTCCYRDERSSVENPAKGRVIKTFELNANGLTAFFQTLTNDTYVLVEATITTFSFVRLFKGMVKEAVIANTYELKQVSLARCNTDKIDADKLCRIMKAQVLSGEQLVSAVVIPPAEIQDLRSLFTTCRLYQKQNTQLKNRIHSLLKEQLHGFTQEEIFDKRNREHIRTISPGTAMHFQISQLLERLERDEADAEELKKRILLQAEPFMAQIAILTSMKGVSVFIAAAVIADIIDVSRFRNSKAFTSYLRSAPRVCNSNTSVSIRGTNKKGRKLSATLLTQSLNHVLDSSRKLRRWYDRLCEYKKPGLVRTGLRRRILAEIFQMLKKGEYHYGRDAQKHEAKLAQYRRFLEKQKNQKNNEVLKKNA

SEQ ID NO: 103674 - protein, 403 aa, unidentified
MAKRGLLGVVDDLQDSYEASEESVTIGIDLGDRYSYCCVLSEEAAVLAQGRIRNSAETLQRYFRDISRCRIAIEAGTHSRWIYELLSSWGHELIVANTGAIPMISASNRKSDEADAQMLAPLARADPKLLSPIRSRGKSGYEDVVCMNARDLLVRTRVKLINAVRGIMKSSGSRLPASTTESFITKAVPYIPDLLQPALAPLVENIARLTDHIREFDKRIEHLARTRYPEAARLRQVSGVGPVTALKFVLTIRDPHRFEKSRDVGPYLGLVLRRHQSGAVDKQMRISKASNRQLRVLLVQCAHRMLTRFSPDSDLKRWGTRMEPTVERVQGSELLLLWRENWPCYCIGSGFLAIRIGRCLTRHHLMLYLSPRPEQSVRHSTEEERITGYRCRVPGDCKFFSGS

SEQ ID NO: 103675 - protein, 370 aa, unidentified
MMDAREGFVALDVAKLKNAAAIAEGGRSGEVRYLGEIASTEAATRKLVAMLSEKYERLTFCYEAGPTGYGLYRLIRSLGHDCLLVAPSLIPTRPGDRVKTNRRDAEIMAKLLRAGELTAVWVPDERHEAMRELARARDVAQKDLRVKRQQISGFLLRGGLHYPGKKTWGKAHLNWLASQKLEHVEQRFAFEELLLGMRQASERSERVEQAIRDALPDWSLAPGVTALQAMRGIGLITAVGFLAETGDLARFEHPRQLMAYLGLVPSENSTGERVRRGNITKAGNSRARRFLIESAWSYRFPARVSKEKQTKVEAAPRSVREIAWKAQTRLCGRFRNLTRKGKRSTVVATAIARELAAFIWAINQEVAPQN

SEQ ID NO: 103676 - protein, 350 aa, unidentified
MNVTRIGLDLAKNVYQVHGVDRPGKGVVKRQLKGKDVEAYFKALPPCVIGMEACSGAHYWGRKFAAMGHTVKLMAPQFVKPYVKGNKNDARDAEAICEAVGRPNMRFVPLKTAAQQDMLLLHRARSGTIKARTAQANQIRGLLAEYGIVVPVGIGKLRKRLPEILEDGENGLNGMERAAFAGLWEELRHLDERVAAYDRQITELAREDPRCKRLLTARGVGEMTATALVAAVGDGTQFANGREMAAWLGLVPGQHSSGGKERLLGISKRGDVYLRTLLIHGARSVIRSVKDKTDRLSVWGNEVVARRGKNVAAVALANKNARMLWAMLTRGEDYCPRGNALAPELAAQAV

SEQ ID NO: 103677 - protein, 346 aa, unidentified
MNTQQEFWYAGIDLHKKYAYVTIMDKLGYIQHQGRFNNQDKKLVPALAASQIPIQAIIESTYGWYWLGEALEHAKIPYVLAHPKKVHDVVGRKKTDKEDSKALADLYRTNLLPTAYVPTPEERSLRELLRFRFRLVEQKSSCQRRLRDILAKHNLECEYTDILGKSAKEWLKGLNLPFPYNAEIITLLNLTEHLDNSIAEYTLKVKEQSTDNKTAKLLATIPGIGEILSLLLAVEIGNITRFRNDRALSSYAGLVPSVSSSGDKTHLGETSSKSNPYIRWALAEAITHVIKKDPAYKKFYDRLVERKGKPKARVAVMNKLARAIYFMLNKQVPFKITELPDDKTET

SEQ ID NO: 103678 - protein, 334 aa, unidentified
MQNVTLIGIDLGKHAFHIHCQDKSGKAILRKKFTRTKLMQFLATCPSSTVVMEACASAHFMARRIGGLGHEAKLISPQFVRPFVKSNKNDFVDAEAICEAASRPSMRFVQPRTETQQAMRALHRIRDSLIRDKVKTTNQIQAFLLEFGISLPKGEAVIKRLSRVLAEHDIPDYLSRLLMRLHTHYLYLVEQITSLEAELHQSIEADETAQRLMTIPGIGPITASLPSSQLGDGKQFSGSRDFVAATGLVPRQYSTGGKTTLLGISKRGNKNLRRLLVQCARIFMMRLEHQQSRLAEWVREQLSKKHSNVVACALANKLARIAWAITTQQNEYWV

SEQ ID NO: 103679 - protein, 397 aa, unidentified
MSTIVYVGLDVHKEKIQACSFIPGYGIKPDLVFANDTLSGDYQVAGKYLAGLRRHFGKDARFVCGYEAGCLGFSLCRELSGKFGVECHVMAPSTMSQEPGSRIKTDRRDAEKIAKCLSSNAYKEVRMLDREDESVRDYIRMRDDFKQVQKELKQKILAMLLRRGVRCDTCKVPWTKKFMAWLGSADMGGALAREAMDEYVSGLERVNEKIEKLDRRILELSGAPRYRDNVRKLVCLPGIKEHTALALCCEVGDFSRFKSPKDLAAFLGLVPGERSSGDKTRRTGLTKAGNSHLRRLLTEAAQGALRSKPSYKSKALKARQAGAPEAVVAYADRARARFTGKYRRMASGERLGPGLDFLEARKPYNVVVGAVARELACFACGMVNGLYDGAESASFKD

SEQ ID NO: 103680 - protein, 467 aa, unidentified
MADQISVVGGVDTHTDFHQAAVIDSIGRHLATAAFPTTPDGYRRLLEWLRGHGDVLAVGVEGTGAYGSELARFLRANEVTVVDVDRPDRKARRANGKSDPVDAYAAATAVLSGRASGQPKARDGIVEAIRSLRVVRRSAIKSRTQTINQIRTLIVSAPAEVRERLRGLPTYQLIAQLARSRPGTDLADPTCAVRTALRRLARRYQHLTEEIAEADAELDPLVAQAAPGLVELVGIGTETAAQLLITAGDNPDRLKSEASFAHLCGASPISASSGRTNRHRLNRGGDRQANHALHTIALVRMRYDSRTRLYVARRTAEGMSKKDIFRCLKRFIAREVYKHLTSTNNAQNQLLQTARRSIGASVTPLGVPRRLLEFTIDGEPVRAPEGSTILDACRAAGGRGFDARIAVEHDAPLTDSACVYCGVGCKLTLHVQDNEIVKVTSPLDNPVTHGNLCIKGSFGYQHVQNRD

SEQ ID NO: 103681 - protein, 340 aa, unidentified
MQITTIGLDIAKHVFQVHGIDATEKVVVRKRLRRSQVIAFFAALPPCLVGMEACASAHYWARELTKLGHEVRLMPAKDVKAYVKRNKNDAADAEAICEAVRRPTMRFVQVKSAEQQGRLMQHRARDLLLRQQTQVINALRAHLAELGIVAAQGREGLKQLLTIIADEKDARLPIDARASLIVLAAQLQALHTMIGAIEKRLTVQHRANEASKRLQSIHGIGIIGASAIAATVTDPKAFRSGRDFAAWIGLVPRQDSTGGKPKLGPISKQGDRYLRRILVVGAHSVLRRAKQNPEKYPWLTQLLARRPFKVVAIALANKMARIAWALLASGGHYRPRLVAA

SEQ ID NO: 103682 - protein, 346 aa, unidentified
MSVVRPLLGSCPEQMMGSKSRMQGKDRSEQETKTNSTVGIDVCKLWLDIHILPSEEAFRVPNTKAGSNEIIRRLAHRDVQLIAIEATGKWHRDLHRHLADRGYPVRVVNPLRARLFAEAMGLLAKTDRLDARMLAIFAGSLTETRPPAPEIIEALKELVQARSTAVEEQTSLTNQFKSATTVFLRRQLKLRLTQIAKHIKALEKESLKRIKGEPGLARRYDILVSIPSFGDVVAMTLLARLSELGSCNDKQIATLCGLAPWPDESSDRVGARHIRGGRQLIRNILYLAAITAKTFNPPMKAFFTRLTANGKAKKQALVAVARKLIILANTLIRADRLWHSEAPKCA

SEQ ID NO: 103683 - protein, 369 aa, unidentified
MKQLITYIGLDVHKETIAVALAEAGKRNEVREYGKIANTPAAVKALVAKLARNGHALRFCYEAGPCGYGIQRQLTASKHDCIVVAPSLIPRRPGERIKTDRRDAINLAKLHRAGELTPVWVPDEAHEAIRDLVRARLAAVRTLRQARQQLSSFLLRHGHHYNRPAWTLMHRRWLAGLRFEHAVHHVVLEDCIAAVEAATARRDRLEAHIAGALPDWSLAMVVHALQALRGMALVAAATLVAELGDITRFANPRQLMGYLGLVPSEHSSGGTRRQGGITKAGNGAARRMLIEAAWSYRFPARISREQLLRQEGLAKPIRDTAWKAQERLCRRYRKLARAGKPPTVVTTAIARELAGFVWAIARQAQPTDA

SEQ ID NO: 103684 - protein, 427 aa, unidentified
MNLSSTAALPQRQNFLDVAFDVSKDSLSYLYDLPNGEAGSDRHRAQVAYKTPVVLAELAMLQQMAATQGFAGARIVCEPTSGYEQRLLRLARQNGCRTALVNGQSVYRLQVLESNDYNKTDLKDPGTILLVARLGKTLKDRHLGGDWTALRALNARYERLERSSTQCKNRICKLLSWLFPDLSFQNDWLFDGPAVDPLLELYGFDPFAMQADGRTGFAAKLRRRGLRCTTIERLWEDVSRSVLQELDAAYRAVLVEDLHQLFEDLRRLQARREANRETMIERVDQLRASGEIRLRAEPGLISPFLLARILAETGPLRDFGSINKLLRYAGLNLRQKQSGTFKGQERIGKKGRPRLRRALAQAALKRVVHGQLYGEYYHAKKAAGMCGAKAMTAVARKILKLLFGLDKSGAPFDPVRVFQSAVQPRAA

SEQ ID NO: 103685 - protein, 358 aa, unidentified
MRYRIQGFQASMCKVGTGLCCVAYLIIVGENTMKAVTWIGVDIAKKSFVAAQRTFEGFQTEPFALDPKGLKAFANWLPDEPQLQIVLEATGPYWRAFTEGLNSVAPQIAIAVVNPRRVRDFAKASPHASKTDVLDAQVLVHFAETFTPDVLNPSGDRACRQLRALTRHALQLAQQRDQVRDQHEKVAADPDTPKFVLRSLKQHQKHLDQALKRCWAQARESLHRDPHLQESFRLMLSIPGIGDKTALTLISEYGASLGQTGPKQLTRYAGLDIVFFLSGTSVYRLPHISKQGNWRIRRALYMAALSAIRHNPAVRSYYLKLVAKGRPKKSALVAAMRKLLHQCYGVLKNQIPFDPAYA

SEQ ID NO: 103686 - protein, 369 aa, unidentified
MPVVRGERAARFTFGTPSPRGSIWRAFATVLWKPEQLIDFNSHLQGWETENMPELIHVGIDVSKDALEVACGPQSPTQCFTNDDAGHEALVNVLHVHRVDLIVMEATGGYEAPCACALQAAGLAVAVVNARQARDFAKAMGYLAKTDRIDAQVLAALAAVLANRADRQKLIKALPSDEQQRLHALVLRRRQLVQMLVAERNRLPMSHQAARVSIEALIKAIRKQIVDIEADLSSHIAHHHADLAGLLRSAKGIGPHTSMALIADLPELGKLSNREISALVGLAPFNRDSGKMRGKRMIFGGRTQVRCALYMATIVAMRHNRVIQRFYQRLLAAGKPKKVAIVACMRKLLTILNAMVRTGKQWDETFHFA

SEQ ID NO: 103687 - protein, 341 aa, unidentified
MTETVVAGIDLHSNNLMIGIMDQSGRRVKHQRVECDLEEVDRFLKPFKQRLTSIAVESTYNWYWLVDGLRELSYPVVLANPAKIDQYSGIKDAGDENDAFFLAELQRLKILPTGYIYDPVLRPMRDLLRRRLSLVHQRTALMLSFKSLYVRTTGQILRLSRLKEMSVKEATALYEHPGNQLIAKVQKRHIEQLTESIELIEKAVLGSARELPYYDKLGWLPGVGKILGMTITMEVGEISRFKTAGKFASYCRAVDARRTSNEKRKGDNNGKCGNKYLSWAFVEAANFARRFDERSRRWFDRKAARTSSVIATKALACKLAKAAWHVMAQKVDYDENRVFQE

SEQ ID NO: 103688 - protein, 440 aa, unidentified
MRIMYERCCGLDIHKASIAACALISEKGKPQEETRRFGTMTADLRELAGWLQQKGIRHVAMESTGVYWKPVWNILEPAGFELLLANAQEVKVVPGRKTDQKDSQWIADLHKHGLLRNSFVPPRAIRDLRDLTRTRAILTQEHTSICNRIEKVLEDANIKLGSVASDVFGVSGRAILRALMKEENDAEALADLSKGLLRKKIPQLRRALEGQVTAHHRSLLTGQWSRMEFLEREIVDLETQIAERMKPTPEETALTLPNTAEDAPAPLSPREEAIQLWMEIPGVGWTAACSMVAELGVNMDQFPSAAHVASWAALCPGNNESAGKRLSGKTRKGNVWLRRTMCEVAWAASHTKDTYFAAQFHRIASRRGNKRALMAVAHSILVTAYHMLKHKRHYQELGADFFDAINRDKVRDRLVQRLAKLGFDVTLKSKDSIASDSQKN

SEQ ID NO: 103689 - protein, 414 aa, unidentified
MGGIPVFSLLPFQGGVALSTLYIGIDVSKDFSAAQAIDGKGDKCFYLELAMTADGFDNLLKAITTHGKDISQVTVAMESTGCYHINLFSFLTHKGIRCIIINPLLTANFARLSLRKTKTDKKDALTIAQFLLAHKDSLLKTYLLPDRQDLKDLAREHESLTNLIAGIKNDIRRMLQITFPELESVCNIFSETILDLLRQFPSARLIKIAKPNTIAKALLHEDKRKRISVSAEDIIKAAKATVASHGAAKEIILPEKISTLQYLIEEKVRMKKALVEACEDMMIEDMEIITSIGGISNITASRLLAEIGDYRAFSTYKHLIAFAGLDPSVHQSGKFEGISRISKRGNRHLRYIIYLMTTCVVRGDNIFRTYYQKRRAEGQPFKKAIMATAHKLIRVLFTMLSKRTTYKSKEVNAI

SEQ ID NO: 103690 - protein, 404 aa, unidentified
MRVVHERCCGMDVHKRTVVACVLSPDGQQTRTFGTMTRDLLALAEWLRSLDISHAAMESTGVFWQPIYNVLEDAGLNVLVANARHIKAVPGRKTDVKDAEWIADLLRHGLIRGSAIPSRARRELREMVRYRLSLTRQRAQVAHRIQKVLEGANVKLSSVVTDLTGVSGRAMLEALISSTDSPDTIADLARGRLRMKRPELVAALEGLVGPNQRLLLASHLRNLDFLAEEIERLNAEIEEQLRPFQELVERLDTIPGVGPRVAQAMLAEIGTDVSRFPTGSHLASWARVCPSNDESAGKRRSSHIGAGNPWLRGTLVEAAWAASHAKQTYLAGQYRRLAARRGTKRALIAVAHTILIIAYRIIRDGTTYEDLGSNYYDERDRQATLRRSLQRLERLGYKVTVEAA

SEQ ID NO: 103691 - protein, 422 aa, unidentified
MKTEQSEFAAYIGLDWADRKHDLCLQVGEDGRKRERSVLEHTPNAIHEWAEQIRKRFDGAKVAVCLELAKGPIVSALLEHDFFVIFLVQPSLLAKYRAAFTPSHAKDDPTDAEFALELMLRYPDRVQRVKQESSVMSMLRQLVEMRRGLVDDRVRVTNRITANLKAYFPQVLGLFREKDTGVFADFLQRWPTLEAAKKARRSALETFFREHNVRYQATIDRRIDALKGEQALTTDESVIRPAQLLVEVSLPQLKDLCLAIDRLEEEIGHCCAQLPDHKLFAALPGAGPALAPRLLVAFGEQRERFPNAAAFQQYVGVAPVTERSGNKCWVHWRYSCSTFLRQTFVEWVAQTITRSFWAKAFYEAYRARGGAHQSALRALAFKWIRVLFRCWVDRLPYDESKYLMALQKRQAPLLKHAAATPN

SEQ ID NO: 103692 - protein, 331 aa, unidentified
MFPVGIDVSKNTLDLCILYDGIKGRIKTRNIQNNRHSVENILRWLRLQHCGPEDVHVVMEATGVYHERLATELHDAGFRVSLANPHRSREFARGMGIMTKTDKVDAYMLACYSFLKKPHHWEPPSPEIRYLAALLRRRDVLLGDALREENRLEKYLSTDTPADIISSCRRMAQLLREEVSNIERQIKAHIKASPALRRDYTLLNSIKSVGPQLGMHMLVELRSHNFASAEQAAAFLGVVPIEKRSGTSVRSRPRMSKIGPPQLRARLYMSALCGKIYNKRMRNIYDEMCLRGKPKMVAIGALMRKLVHWCYGVLKTGTVFNDEGLKQVLST

SEQ ID NO: 103693 - protein, 320 aa, unidentified
MTHPPQLVLGIDTHKDVHVAVVLDRLGRYLAAASFGTTDAANTELVAWTQSYGQVTTAGVEGTGSYGYRLAQHLTDQGINVVEVNRPDRARRRRKGKTDPVDAEAAARAVLAGDAHAVPKDRNGAVGELRALVVARRSAIKARTQATNQLRALLVDGDDELRSRLGPLRKAHLARACTQLAPSAGLRLALSSLGRRWLALAEEITGLDAAITNRVRRTAPRLLERHSVGVQTAAQLLITAGDNPDRLHSEAAFAAICGASPVQASSGKTTRHRLNRGGDRAANSALWTIATTASCTTHAAAPTQPNAPPWATAAKRSCGA

SEQ ID NO: 103694 - protein, 399 aa, unidentified
MFVGIDWAAESHDVCVVNPAGKICGRATVAHSQQGFDELTKHLVRWSEQGEILVGIERPEGRLVDAILEAGYAIVLIPTFAMKDLRRRYAVSGAKSDPGDAYVIADVVRTDGHRLRRLEPLSEQTRALRSVVRARDDLVDQRVALGNQLRACLEAYWPGAAVIFADVASEICLSFLERYPTPESAARLGELRLQSFLKKAGYSGRRSPAELLERLRSAPEGIVGAQAEARSDAVRCMARVMRSLLRSIKDLDRAVVAHLGEHPDAEVFTSLPRSGRINAAQMLAEWGDCREAYPEPDAVAMLGGLCPVTHASGKHRDVSFRWACNKRLRLALTTFADNSRHASPWAAEVYRRAVARGCDHPHAVRILARAWVRVIWRCWQDRTPYDPALHGAAVLLEAA

SEQ ID NO: 103695 - protein, 354 aa, unidentified
MLYAGIDYHKRYSQVHVIDHIGRTRATARLANDGLTVEKFFKSLGEPCAAVLEAGWNWGVMFDWLAAIDTVEQVELAHPFRVRAIAAAQVKTDAIDAHTLAQLLRSNLIPRAYIPGVETRRLREIVRQRVFLVRVRTMVKNRIHALLDRYHVPAPAVSDMFGKRGRDYLAKVELPAGAQELLRQDLALLEALTREVRGTEQWLRDSVRGDHRVELLRTVPGLGDLLATVVALEIDCIERFASAAKLAAYAGLVPTTYSSGGHTFHGKLMPQTNRWLRWALVEAAWVAVRLDPYFRTHFANRRAHKPAQSAIIATARRLLEVVWHLLKEDRPYQSRPPTGSQRALKTSSAALATA

SEQ ID NO: 103696 - protein, 393 aa, unidentified
MICVGIDVAKDKHDCFILSSEGEVLADVFTIQNNAEGFDMLLQTIRRCARPEDKIKVGLEATGHYSYNILGFLLDKGLDTYVINPLHTNLYRKSLSLRKTKTDRVDARTIAAMLMSDVDLKPYTDTAYHNEELKSLTRYRFDKVRERAKLKQSVSRLVTILFPELEKLVPSLHLASVYALLIEFPGAKQVAGAHLTHLKAILSDASKGRYGRDMAVTLRDAARCSVGSVMPAKSLELQHTIRLIRELDAEIEDIETAIQSMMDEMQSPITTIPGIGVRMGAMILAEIGDFSRFDSPDKILAYAGMSPSTYQSGQLSLSGPYSHMEKRGSRYLRYALYNATKYVCLWVPAFAAYLAKKRGEGKHYNVALSHAAKKLVRLICALEKSQQSYRNAA

SEQ ID NO: 103697 - protein, 403 aa, unidentified
MSPEHSIDIFLGLDVGKSEHHACALDRDGNKVFDKPLPQLESELAGVFHQLQKLGTVLVIVDQPNTIGALPIAVARDCGCEVGYLPGLAMRKAADLYPGRAKTDKRDAFIIADTARTMPHTLRAVDRNDEVLSALKMLSGFDDDIARDCTRTVNRLRSILTQIYPSLERVFAGSTLTRTPILELLIHYKGPQGLKRAGYQRVLNWMIKRTRKDPTPLVDDIFAALKAQTVTVPGSDAAELVIPQLAANIKALKEQRNTIAEQVEEMLADFPLCEVLMSMPGVGIKTAAQILLAIGDGSDFDSAGHLAAYAGIAPVTRRSGSSIRGEFPARSGNKRLKNALFYSAFAVIRSHEPSRRYYERKRAEGKRHNAAVICLARRRCNVIYAMLKNKEFFREIPPRPVAA

SEQ ID NO: 103698 - protein, 367 aa, unidentified
MSKIIKYVGLDVHKNSIAIAIADQKRHSEVRYYGQIENNMDKLNKVFRKLVSDGSELCCVYEAGPCGYYLYRYLTGIGIDCSVIAPSQMPRKSGDRVKTDRRDAITLARLHRAGELTSVYVPELEDEALRDLVRAREDAQKALRKSKQQLGAFLLRHHIIYNGKTMWTSAHFNWLSDISMSHPAQQVALQEYIDTVDSNAKRVDRLTAQIRDLSEQSRLSPLIKALQAMRGISLIVAATVAAELGDLRRFANPAQMMAYLGLVPSEHSTGEKTKRGGITKTGNGHVRKALIEAAQAYRLPARKSRAIRKRQENLSREVCRIAWKAQLRLCGRYWRLAGKGKKVNVVKTAIAREIAGFAWAIAQEVTL

SEQ ID NO: 103699 - protein, 368 aa, unidentified
MAKRNTFVGLDVHKESIAVAIAEGGRFGEVREYGTVGGELEALDKVLRALRAPGRTLHVVYEAGPCGFTIFRHLTRRSEDCAVVSPSMTPKRAGDRVKTDRRDAMTLARLHRAGELRPIYVPNESDEALRDLVRAREDGVEVTREAKQRLKAFVLRHGLRYRGRAGWTIPYRRWLAGLTMPEPAPQIALQEYLATVEEAEQRVTRLTEQLRHLVPGWRWAPVVDALQALRGVSFITATGLVAEIGDVRRFTRAPELMAYLGLVPSERSSGPATRRGRITKAGNPHAASASRRRAWGYRSIPRIGRVMQQRQAHLPAAVRALAWKAQLRLCGRFRRLNARGKPRVVIATAIARELTGFVWAVAREVPAP

SEQ ID NO: 103700 - protein, 294 aa, unidentified
MLIIGCDFHSRFQQIAMLDPTTGEVIERRLEHENGEAKKFYATLPSPARVGMEATCDAQWFERTLREHHHELWIGDAAEIRAAMVRKQKTDARDALHILDLLLTNRFPRIWVPSPAERDLRQMLRHRHKLVRFRTSVMNQLHALAMGQGLCRKKKLWAKAGRKELEGLLLDPWASLRRQELLQLLDQLDPWIANLDEAVIQAAESRPPAVCLMQQAGVGPVTSLAFVLTLGPVSRFANSKKVVSYLGLNPSEESSAGRQRLGAISKQGNPMMRYLLVEAAQTAASRSSSLSGTF

SEQ ID NO: 103701 - protein, 352 aa, unidentified
MEYVGVDYHTRYAVATRMDAVGTVLSQDRIPNLKADIHAYFASLPEGSRVVVEATNNWAAFMEWTSDLPLTMKLANPSRTRAIASARIKTDSLDSKILAELLRGDLIAESYLAPKEVRDVRELVRYRMTLVRLRSQLKTRIRSVLFKVGERITFADVLCPRARMAISKFSLREIYRREIDSCLSLADSFSIQIGEFEKEIEAVAKVNEDTRLLMTIPGISFFSALLISGEIGDYRRFSSARKLACFAGLVPSVHASGGKIHHGHIIRQSNANLRFALLQAIPHLIRKHDGLAKHYYHISRKKGTKTARIAISRRLLGIMLTMLKNREPFRLDHESSGTGPAVSLPASARASG

SEQ ID NO: 103702 - protein, 322 aa, unidentified
MEQFSFFTGIDVSKLWLDIAVFKPTDGLVYQTRIDNSVKSIRGFLRDLKKHFKAEITEHLFCMEHTGKYGHAFLTASALEKAKVWVELPIQIKRSQGLVRGKTDRWDAARIAQYAYRFVDKAVFWKPADKIILDIKELQVKRNRLVKAHSQLSQENKNDPLFKKPLLALKQGIEAIELKMEQMLEHNQVARNQYDLLTSVPGIGKQTAMALIVVTNGFTRLTESRKLSCYSGLAPFPYQSGSSVKGRTKVSKMGDKKLKVLLNLSAWNAIRSITAFKDYFNRKVSEGKHKMSVINAVRNKLIALALAVIKRNTPFEKNYSFS

SEQ ID NO: 103703 - protein, 368 aa, unidentified
MSNHTDYEVGCDAHKHYSLFAVLDHQGRPVEQTRVNHEPGAIRAFLSRFPPGTPVALETVGNWYWIVDEIEQARCVPLLAHAQMAKRMMGHVHKTDKLDAEGLAILQHLGSLPTVWIAPAEIRDERELPRTRMALSKMRTALKNRMHSTLAKYALSLDTQSDIYAPKWRPQLMQLICSLPDETRRCMQQELELLDQVQEQIRRLEARILERVKITPTIQLIQSVPGPAKILSIVIDREVGSIDRFPSPHHFASYSGLVPKVKASGGKTHYGKMIKAANNYLKCAFIEAANVVVRQQHHPSWRQKYVVALFERTRQRKGHAVAVGTVARYLAEATYWVLKKGEPYREPVPQHPVGRKSAVSPKQGQVPT

SEQ ID NO: 103704 - protein, 385 aa, unidentified
MRKTTARLNAMKRGLPRWERWVLTGTNHAKEAPHTMLHLGMDLSRTRLDVHVMDDEGESLEVSAWPPDRDGLRHLVRHVAERYGGEEVMAVIESMNGARFVHDTLELSGWSVEIADAQKVKGLAPLACKTDKIDAKVLAELSRRDLVPAIWLPGPEVRGARERARWRLHLVRHRTALKNRIHATLMAFGHPCPVSDLFGTAGLALLARLELPEPWASDVKAALSLIDALDSEIDGIEVDLRRLGAKHPYVPLLMTVPGVGWILAYTIACELGDIERFSSSKKLCGYTGLCPRVYQSGGSDHRGSLTKNGPRYLRWALIEAATNAARHPAYKEHYQRTAKRLGRQRGKKVARVELARTLAEAIFHMLKKNEPFAPHLEPSPKKAAA

SEQ ID NO: 103705 - protein, 387 aa, unidentified
MYYIGIDISKFKHDCAVIDDSGEIVTPSWSFTNDAEGFSQLKLLLNSLDTETRIGLESTGHYGMNLKLFLESNNFSFMEFNPLLINRFVKSKSLRKTKSDSIDCMMIAHYLMTVEYKPYPSSFYHTEKLKSLTRFRDSLIRLRSRQLVELTNILDKVFPEFKPFFGSRFSVTALYILSNYSSPEKIANMNSKSYEALRKLSRGRFSTVDFAKLKQLAKNTIGTTEDYLLLQMQIVLDIYRQLDSKIDETEVSIKECVSDMNPPMLSVPGIGIESAAVILAEFGDFSKFKNASQMLFFAGLEPGYFQSGTSETTGKMVKHGSSYLRYALMNCAQTVVNYEPTFAMFYSKKRAEGKPHRVALSHVVKKLLRVIYTLQTKNIAYDADFVR

SEQ ID NO: 103706 - protein, 325 aa, unidentified
MSSYQITVGVDIAKRKFDAVRLENGKYKHKTFDNSADGFATLITWLLTFGEIKPLICMEATGAYSIPLAEFLVNSGHSVSVVNPAKIKAFAKSELSRLKTDKADAKLIARYALEKQPSLWTPPPPTMIELQALLRRIEHLLEIRQMEQNRLDTANPVIIESIKTLLTLLDEQLESTRKQIRQLIDQDPVLKHRAKLLESIPGVGSASIAHLLLALSEHHGFTHAKQAAAYAGLEPRISESGDWTGKTRLSKTGDALLRKALYMPALVAWRHNPAIHVFCERLKTNGKNGKAIACAAMRKLVHIAFAILKSNKPFDPLYKTKLALA

SEQ ID NO: 103707 - protein, 343 aa, unidentified
MKANIIGLDIAKSVFQAHGADTNGKCVFKRKLGRSEVSAFFAKLDPCEVVLEACGSAHYWARVISSAGHDVKLVSPDRVKPFVKKGKKNDAVDAAAICLAATHPDTMFVPIKTEEQQDVLSLHSTRALLVKQQTMLSNALRALASEFGLVVPLGTRRLPELIAKIETSTGLPPAMKQSAMLLFEHYEKVAQSIGALEARIRAHAKSNEDARRLMTIPGVGPVTASLVVASVADIGSFASARHFAAWLGLVPRQHSTGGKTRLGRITKAGNRQIRTLLVLGATSMLNHAHKWNSAAGQWLCKLVERRPRRLATVALANKLGRIIWALLSRKEVYRPVGSSVAAA

SEQ ID NO: 103708 - protein, 331 aa, unidentified
MTAILGIDVAKDSLAVALWRAGQAVEQAEFANTRQGFNDLQRFLKKRRAMPVHACLEATGRYWENLADFLVERGHQVSVVNPARIKAYAHSQLTRNKTDQLDASTIADFCRTQQPALWTPPAAAWRELQELVRHLDDLETDRQRQRNRLHALQQGAHPSPTVTAHLQQQLAFLTQQIEQARQAIQDHINRHPDLKRQRDLLDSIKGIGPLTAAKLLGEYGDMSQFSDVRQVTAFAGLNPRHRQSGSSIRGKTKISKVGRPSIRAALYMPAVVAKRFNPQLAALAARLASRGLTPMQIVVAVMRKLLHLAYGVLKSGHPYSPSFVPPGAAYA

SEQ ID NO: 103709 - protein, 336 aa, unidentified
MNELTTVGIDLAKQVFAVHAVARDGRIVLRRTVSRSKLLETIARLPPSLIGLEACTGAHEWARRFQSLGHTVRLMAPAFVTPYRKSGKNDGNDAEAICEAVSRPSMRFISIKTVDQQALLTLHRVRQGFVAERTAVVNRIRGLLAEFGVVLPQRGESIRHGLHESTERLPDLARRAIRDLQAHMQVLDERIRDYDRELKRLAAADEQARRVQTIPGVGPITASAVVASVGSAKEFRNGRQFAAWLGLTPRQSSSGGKTRLGHISKRGDAYLRMLLVLGARAVLQNAGRYTDRLSRWALAIRERCGYHKAIVAIAAKNARILWVVLAKGESFRAQPA

SEQ ID NO: 103710 - protein, 358 aa, unidentified
MVDKVTKAAVVGGVDTHKDLHVAAVVDQNNKVLGTQYFSTTRQGYRQMLAWMTSFGTLKRIGVECTGTYGSGLLRYFQNAGLEVLEVTAPDRMERRKRGKSDTIDAECAAHAAFSGIRTVTPKTRDGMIESLRVLKTCRKTAISARRVALQIIHSNIISAPDELREQLRNMTRMQLIRTLGSWRPDASEYRNVTNVYRISLKSLARRYLELHDEIADLDVMIAAIVDELAPELIKRNAIGYESASQLLITAGDNPQRLRSESGFAALCGVSPVPVSSGKTNRYRLNRGGDRAANSALHIIAIGRLRTDAKTKEYVARRVAEGHTKMEAIRCLKRYISREVYTLLRNQNRRINRIPITA

SEQ ID NO: 103711 - protein, 367 aa, unidentified
MKEQENKRNKITIGLDLGDRRHRFCVLGEKGEVLEEGSVGNNRAALSELGGRYPEALVVMEAGCHSPWVSRHLEQAGCEVVVSNPRKTRAIYQHERKSDRRDALMLARIARMEPALLYPVRHGSEEAQQDLLRIKLRDSLVRARVALINSLRFTLKSLGYSIANPSTERFHKVIQSALPQSVAQVIAPSVQALEELTLRIKLLQREISDQARSKYPDTAWLEQIPGVGPITALYFVLKIEDPARFKRARDVGAFLGLCPRRDQSGENDPQLRISKRGDAYLRRLLVSSAQYILGPFAPPSALRQYGLALASGATARAKKRAVAAVARKLAVLLLTLWKNKSSYEAFPQRSSKEKMRTNDLERLRCIA

SEQ ID NO: 103712 - protein, 404 aa, unidentified
MVVFCGIDWAEHHHDVAIVDAAGEVVAKRRISDDITGFTQLTELLCVHAERPADVQVALETDRGLLVAALRAAGYRVFAINPKAVDRYRDRYAVSGAKSDAADALVLANLLRTDAARHRELANDSAQVEAIAVVARAHQDAVRVRLRDTGRLRSLLREFFPAALTAFPNLATRTAMQILAAAPTPSQAQALDRDQIRALLGAAGRICLRASDVERLHQIFAAEQLHQPPQVEEAMGVAVQAIVTTLMGTDAAIAELEAALAARFDNHPDAEILRSLPGLGVVLGGRVLGEFGDDPTRFLDAASRRRYAGTAPVTRASGKSRVVLLRRARNQRLADACRWWAFNAMQHSPGAMAYYRRRRAAGDTHEAALRRLGSKLVGQLHHCLEHREPYREDIAWPANLPIAA

SEQ ID NO: 103713 - protein, 402 aa, unidentified
MNAVGIDVSKGKSMVSIMRPFGEIVSAPFEIKHTASDIHSLVELINSVEGESRIVMEHTGRYYEVLAHQLSEANLFVSAINPKLIKDFDNDSLRKVKSDKADSVKIARYALDKWQNLKQYNVMDELRNQLKTMNRQFGFYMKHKTAMKNNLIGILDQTYPGVNTYFDSPARSDGSQKWVDFASTYWHVDCVRKMSLNAFIDHYQNWCKRKKYNFSQSKAEEIYGKAKELVPVLPKDAITKLIIKQAVDQLNSASTTVESLRTLMNETASKLPEYPVVMAMKGVGTSLGPQLMAEIGDVSRFTHKSAITAFAGVDPGVNESGSYEQKSVPTSKRGSSDLRKTLFQVMDVLIKTHPQDDPVYQFLDKKRAQGKPYYVYMTAGANKFLRIYYGRVKEYLSSLPES

SEQ ID NO: 103714 - protein, 378 aa, unidentified
MRTIDTINSTMLVAIELSASSWLVAARVPGSDKPHLHRIDGGDTMGLLAAISSLRDRVARRLNVAIGVVCCFEAGRDGFWLHRLLTAHGLTNYVLDPTSILVHRRARRAKTDRLDAIGMLRVLAAYIRGDRQSCSMVRVPTPDEEDAKRIHRERESLVQERLRIENRIEALLFTQGIRKRPSLRSWKRDLSVLRTGDEREMPRHLRAELDRLNRRLVMILELIREVEAERDQVAEIKPQDQNCRKIAALRCIRGLGENFSAVLTREVFYRSFDNRRQIASYVGITPTPYQSGGMDRDRRISRAGNPRARTTMIQLAWLWLRYQPGSELAVWFRKRVGELTGRTRRIAIVAMARKLLIALWRYVETGVIPAGAEIRVEA

SEQ ID NO: 103715 - protein, 457 aa, unidentified
MPRTIKQRRKCTSSVVSLPVLRPNAAGIDIGAREIYVAVPPHRDPHPVQAFPTFTSDLLELADWLKQCGVDTVAMESTGVYWIPLFQILEARGFEVFLVNAHHVKNVPGRKSDVSDCQWLQYLHTVGLLRASFRPPQAVCQLRAILRHRDNLVQMAATHVQHMQKALDQMNLQLHHVISDLTGTTGLAILDAILNGERDPQVLAQLRDPRIQASSETIAQSLVGDYRPEHLFVLRQSLASYRAYQALILECDKEIQAVLAHFQTQADPASMPTPTQKPHKPQRNQFHFDLHAEHYRILGVDLTRVPGLETLSVHTLLSEVGPDLSAFPHEGEFASWLGLCPHRRITGGRLLSSRTRKVRQRLARALRMAAESLHHSQSWLGEFYRRMRAQHGAPKAITITAHKLARIIYHLLKARRPYDESVFAREQQRHCRRTQARLQRQAKALGFQLVPIDAPTT

SEQ ID NO: 103716 - protein, 345 aa, unidentified
MENMYYIGLDVHEKTISYCVKDGGGRIYAEAEIPATRLGLDMWMKTLPQPWTAAMEATIFTAWIYDHLKPHAAAVKVAHPLMLRAIAAAKKKNDRIDAHKIADCLRCDFLPECYMASTEIRERRRTLRYRNLLVRQAVQMKNKIAVLLMEAGVSYNKQKLHKVGYFRELLATNQDIDEGLKPLLRLCRETVVRLGKTESALVRALQRDSLLMERVERLMTIPAVGPITALTWALEVGDVQRFSSIKKAISYCGLCGAENSSANIIKRTPLSKQRNKHLETILIEAAKMAPRNSVDLAMIYDREKQKGNANRATLAVARKLVAYLVAVDRRQKDFLVVENENRTAA

SEQ ID NO: 103717 - protein, 360 aa, unidentified
MREKNQGQKVAVRGKEVFVGIDVHKESWQVTVRMDAEEVFHGGIPSQFPALRKISDRYKGSRIKVAYEAGPCGFGLYDQLREDGVEVLVVAPSLIPVESGNRVKTDKRDSRKLARLLEGNLLKQVYVLSEEERMHRELLRTRHQIVGHRSDVARQIKSKLLFHGISSESAEKQQWTLKYVQWLRGLSLGSQYLKESLEVLIDLYEYLSRQLMRVNRRVAELSRSDKYREKVKLLRTVPGVGLLTGMEVLVELQDMRRFRSSEEIASYLGLTPSEYSSGEKSRQGRITRSGNWRLRSALVESSWILIARDHWMRMRYMRLKARKGAKRAIVAIARRLVIRLRSILLSNVPYRGGNPLVREA

SEQ ID NO: 103718 - protein, 428 aa, unidentified
MEVIHPRCAGIDVSKKDAKVCIRVQGRGRRGTATTVTTWGSTTAEILALGEHLSAEQVSCVVLESTSDYWKPFYYLLEEALPVMLVNAKAARNVPGRKTDVSDAAWLADLGAHGLLRASFVPPEPIRVLRDLTRARTIIVRARTKEIQRLEKLLEDAGIKLSAVASNIVGVSGRAMLEALIAGQRDPVVLADLAKQRLRHKIPALTEALRGRFNEHHAFMARLYLDRIDAHTADIARLDGRIEEAMTPFQPARDLLMSIPGWSQVVADVFIAETGADMSVFPTAEHLASWAGVVPGCNESAGRVKSGATRPGNRHLKAALGVAALSAARTKDTYYSARYRRIAGRRRPVRSRRNKNRGNSIAGQIALVAIEHKMLTDAWHMLVNGAFYRDPGPDYYTRHHPGRTKSKAIKQLENLGYRVTLEPLIPAA

SEQ ID NO: 103719 - protein, 340 aa, unidentified
MSDIATVGLDLAKNVFQVHAVDVAGSVVLRRRLRRGQVLTFFAGLPPCLIGLEACATAHHWARELIALGHETRLMPPSYVKAYVKRNKHDVADAEAICEAVRRPSMRFVPLKTAEQQSALMMHRARDLLIRQRTMLVNALRGHLAEFGLVEAQGLHKVVRLIAIVMDEMDGRVPDIARQVLKVIVSQIEDIQTRIAGLETQVLAWHKSNPVSQRLATIPGIGPIIATAVAATVADPNTFRSGREFAAWLGLVPRQNSTGGKARLGGISKRGDSYLRRLLVNSAHTVLLCSKAAKADPWLTSLLSRKPRLVVAVALANKTARMAWAIMSRPDLYRHAAVAA

SEQ ID NO: 103720 - protein, 442 aa, unidentified
MAMRKREREDLVFPNAAAIDVGASSHWAAVPPHSTDAPVREVGAMTDDLNGLADWLLACGVDVVALESTGVYWIPVYEVLEQRGLKVWLVDARQVKYVPGRKSDVQDCQWLQKLMSYGLLRAAFRPAADVCVIRAVARQREVLLTSQASWVQRMQKSLVQMNIQLTEVISDVMGQTGQAIIRDIVAGQREPKILAKHRHRRIKASEQDIVRALTGNWREEHLFVLKQALAMYDDIAKHLRECDAKLQTLLSERSANSVELGKAPRAGSKARGEFDVRQQLANWAGADLTRINGLGLDSVMKILSEIGTDLSRFANVKHFCSWLGLCPATKISGGKVLSARTKRSANRVRQALKMAAMSLSHSDSALGAFYRRLCGRMDKPRANTATAHKLARMVYFMLTRGEAFVDEGQQRYEEQQHQRSVAALKRRAAALGFQLNPVGAAA

SEQ ID NO: 103721 - protein, 378 aa, unidentified
MKNDIRFVAMDAHADTLAVSLSEGPGEVRRLGIIPNRPESVRRLIRKLGPVEKLRVCYEAGPTGYALYWQLTEMRVHCDVVAPTLVPSKPGDRVKTDRRDADKLAVLYRGGQLTSVWVPDKDYEALRDLVRAREAAKSDQLRAGHRLHKFLLRHGRRAPQGIKPWTQKHLEWVRRQVHFERTAQEAVLLDYLTEVQHARDRIIRLELAIDAAVATAPPHLRAVIEALQALRGIAQVAAATVVAEVGALSRFSRPRQLMGYSGAVPREHSSGSSTWRGSITKTGNAHLRRIVGQASWSYRHRPAVTGALRRRQEGLSEEVKAIAWKAQHRLHGRYRRLIGKGKPKQQVVTAIGRELLGFIWAIGVHVEKSLGASARRAA

SEQ ID NO: 103722 - protein, 495 aa, unidentified
MRTKQTIIATHRHRGRLLLGAVSPCLSWTQSPASTAYCGNGVNVDLPHLPGGSPAGSMEGSPPGGLKHASQTSFKRAPCRCREGAGIMEVLYPRCAGLDLAKDTLVACVRIHGRPVQQETRTFGMTTRDLLTLATWLAEHGVTHVAMEATGSYWKAVWYLLEETFTLTLANAAHIRNVPGRKSDVKDAAWIADLLAHGLIRGSFVPPAPIQEVRDLTRTRKQLVREIAQHTQRIQKTLDTANLKITGLVSNIIGVSGRAILRALIAGQTDPVQLVDLARGTLKNKRAALVDALTGQIRPHHLRLLKLHLDLIEQLERAVADIDTQLGEALAPFREAIARIDAVPGIDTVVAQAILGEIGLDMTRFPTHQHLIAWACLCRRLDESAGKRKSTRTRTGACWLKTVLVQAAWAAVRTKNSYYRAQFLRLRARRGPKKAIVAVAASMLTAIYYILRDSAEYRELGGQYFERLDRTKATQRLVKRLRDLGYRVQLEEVAA

SEQ ID NO: 103723 - protein, 321 aa, unidentified
MEADSTLRSFVGIDVAKKHWDVHIAPAGVTLRCTADQAGLAQLLEAFRPHAPCLIVVEASGGFERRLAGDLLAAGHAVARVNPRQVRDFARGVGRLAKTDRIDAQILARFAEQVRPRPWEKQPENRAEIEALVVRRRQLVQMAAVEKTRLHQAEKGPVRKSVSGVLDLLRAEIDVLDAELARWIEDDEDWSERARRLASVPGVGEVTSRTLVAELPELGKLDRQAIAALVGVAPLNRDSGEFRGRRMIWGGRASVRAALYMATLTARTYNPVIRRFAQKLEAAGKPFKLVMTACMRKLLVILNTMLRNQTDWNPELLPQNS

SEQ ID NO: 103724 - protein, 383 aa, unidentified
MLAWSSREGSAGGTSWSRKVSTTVLIWRPAGVFAVRNTNGRWGSTPVYNQVLGPDPSNMAEVGMDGKRVIGIDIGKCWLDVASEGAARVERHANERSVILALVATFDPARDVVVFERCGGYERELEGALAGAGVPWAVVHSARVKAFRQVQGIKAKTDAIDARLLREFGRDRLKAGQLRLGRAEDVVLNALMARFRQLKAALHAEQCRRETAAIEPVRASIARTIVQLEAELAIIMAELAGHEANDAQLALKEKVMCERKGVAQATARALAAELPELGRLDRREIASLGGLASRVEQSGRSERRRGLVRGRSAVKVTLFNPARTAMRWDPEIKAFRDRLRARGKPGKVIMVAVMRKLLVRLNAAVRDALNQEEVSNQATLGAF

SEQ ID NO: 103725 - protein, 461 aa, unidentified
MARSRTRQRQVRPSPPGSLPQLNTNAAGIDVGATAHFVAVPADRAAEPVREFGPFTTDLYRLAEWLQACGVTTVALESTGVYWIPLFQVLEERGFEVKLVDARQLKRVPGRKSDVLDCQWLQQLHTFGLLAGAFRPDDQICVLRSYMRQRAMLAQYAGQHVQHMQKALVQMNLQLAVVLEDITGATGMKIIRAVLGGERDPQQLAALRHGKCKHSEATIAAALRGDWREEHLFALEQAVDLVEAYQAKIAACDARIQAQLRRFEDRGTDEPPPAGPKPRADRHDLSFDATIELYRLTGVDLTAIAGLQAHTALKILSEIGLDMTRWPSAKHFGAWLGLAPNNRVSGGKILSRRTTPTANRAATALRVAAQSLHKSKSALGAFLRRKAAHLGMPKAITATAYKLARIIYTMLSTGSAFVDPGQDYYERAYTDRVVKRLSRRASELGYALVKHDSPQALAASG

SEQ ID NO: 103726 - protein, 392 aa, unidentified
MYIVGIDIGKNHHEASIVSPEGKQIGHSLRFATTHKGADSLMSFIFNNIGNSSCIFGMEATGHYWYPIYSFLKARGYTIYVINPIQSDSLRKMYIRQTKNDSIDSFLIAEVIRFGQFTTTSMADENILAMRQLCRYRDSVISSRTEIKLRISTIMEQIFPEYEKQFSSLWLSTSMGILEKYLTPENIENAPIDELFEIIKDKSHNKLTMKKAISIREAAADTFGIKIAQDAFSFQLKQLIDRMNFLDKQIEALDCQILEYYEKFDCYLHTIPGIGMIGAATILAEIGDISRFKNSSSLIAFAGIDPTVRQSGEFNSTHNHMSKRGSPYLRHAIFLAATTCSFHNSPLNAYYKKKRDQGKHHLTATGAVARKLTTIIYAVLRDSKPYEPKKFC

SEQ ID NO: 103727 - protein, 416 aa, unidentified
MQHPKAQFTYVGIDSHKDTHTAAFLDCFFDKLGEIQFENLPSKFPEFLENASKLRQDGTTLLFGLEDISAYGRTLAVFLKGKGQLVKHVNALLVARERKNQTVTQKTDSVDATCAARVLLSKFGELPDAQPDHQYWILRTLVTQRDYIVRNNTSLKNNLHSLLMQSYPNYRSFFENIDGNTSLAFYLRYPSPSTLEGTSVEELTEFLYEPSQGKVGAAKAREILGNLQDTAVPLQEIRDEAVRSVVRRIQSNLAEIKVVESRLAEVLASFETTLTSMTGIDIVSAAQMLSCIGDIRRFPTAAKLARYAGIAPVTYASGKTDKQFVSHRGNRELNSIFYQLAVRLVATTTNNRVRNHFFYSYYHKKMAEGKTKRQALKCVERRLVNIVWTMLTYGEEYVNPPLYDLPKESKIPASRK

SEQ ID NO: 103728 - protein, 370 aa, unidentified
MSHTIICGMDAHDNTLTNRIGVDREAAETMTVRNTQEGREKLFQHLKELAREYEGARILVSYEASPIGFGIYDECVAAGIDCHILAPTKMPKSPRDRKRKDDRSDAQKIFELLKGHVLAGNRLPDIWIPDHQTRDAREIVRSRLDAGEKLTAVKTQVQTLLKRNHVKRPETVRRCWRTSHYRWLEEVELNPGARIALSSLLRQIRSLEEVIKDLDKHIEALSQTERYQLPAEALVVQIKGVGLLTAMVFLTEIGDMRRFSNRRQVGSFLGLAPTCRESGEENDRKGHITREGSARMRKILCQAAWVRTIYDAEEARVYTRIAEKNPKHKKIAIVACMRRLGILMWHLARDAQRKTGVFEDVQQEVAHAQA

SEQ ID NO: 103729 - protein, 408 aa, unidentified
MVTPIVKRCAGLDVHKMVVMVTVILEQEDGSITEQTKEFGTFRKHRRQMCRWLKGHEVELAVMESTGIFWKSIFSSLEESGINTYVVNARYVKKVPGRKRDVSDSQWLATLGRLGLLKPSFIPPKDLRELRLIARHRVKLQGMLAAETNRLHKVLDDAGIRLGGVVSDINGMSARGLIGGLIDGREPAEIVPDVRGRLKKKIPQLLDALDEPLGGRHRFLLQALEQHICYLEQEISNLDRYLFAAMSPYQRQWEILQTIPGVDAISAAMLLVEIGVDMTCFGRAERLASWAGMCPGNNESAGKRKGGRIRKGNWALRRLLCEISNAANKTKSQFRGQYQGLVIRRGHKRAIIAVGHKVLRVVYAMLKSLQPYRDPEIDYTRIVVQRNAPRWLAALKKYGFLPEMIKAA

SEQ ID NO: 103730 - protein, 360 aa, unidentified
MNTVTWVGMDVHARSTHAAAINLLSGEIERMRFGPGVEAPVAWLAQLPGPVHACYEAGPTGFGLYRAAIATGIRMDVVAPGKTPRGPADRVKTDRKDAELLARLLLAGQLAAITVPPAGVEAARELTRLHDACRRDLMTARHRISKMLLRHGRVYPKPTTWKRDHRKWLAGQRFAEPVSEQVYLDLLARVDVLTARKLQLRQDVCQLAADPRWWPTVARLRCFRAVDTLTALSIHLELGADWRRFEKAPRVSAWLGLTPSLNQSGESKTQGQITKTGSTLARRLLIEAAWHYGSAPSIGPVLQARQADQAEHVLAIANHAQRRLHRVYRRLKARGKPHGVITVAVARELACFLWAAAITD

SEQ ID NO: 103731 - protein, 360 aa, unidentified
MRNAVAIADGGRAGEVRFLGAIENTGPATAKLVRKLAAKYERLTFCYEAGPTGYGLHRQIKSLGYECVVVAPSLIPKRPGDKVKTNRRDALSLAKLLRADELTAVWVPDRHHEAMRDLTRARETTVMDLRSKRQQISAFLLRQGRHYPENKKTWTKAHMSWLASQKLEYPEQRLVFEEMMLAIRQAQERRERLEQEIRVAVPDWSLAEVVTALMAMRGIDLIAAATLLAEIGDLARFRTPRELMAYLGLVPSEDSTGETIIRGPITKAGNRRARRMLVECSWSYQHPPRVGPAKQPKVDAAPRAVREIAWKAQCRLHRRYRALIRRGKLKTVAITAVARELAGFIWAAGRAITPAPAAAK

SEQ ID NO: 103732 - protein, 343 aa, unidentified
MEHYAGIDVSLERSSVCVVDGTGRIVREAKVASEPEALVAFFEQLGLPLTRVGLEAGPLSQWLHAGLSEAGYEAVLLETRHVKAALSAMVVKTDRKDARGIAQLLRMGWYRPVHRKSPPAQEIRALLAGRKLLQAKLRDVELSVRGPLRGFGLKVGEVSKGRFAARANELIAGHEMLEEVIGAMLRAREGLRAEFARLHRRMLAVVRGDAVCRRLMTVPGVGALVAITFKTAVDDPARFRTAKAVGAHFGLTPKRYQSGETDVTGGISKVGDATVRTALYEAANAMLTRTARVSALRRWALEVARRRGMKRAKVALARKLAGVLQRMWANATDFRWGEEEAIA

SEQ ID NO: 103733 - protein, 381 aa, unidentified
MSDHSGAGEAFVAFDTSKLRNAVAIAESGRDGEVRFFGEIANTPEATAKLVAKLAGKYEKLTFCYEAGPTGYGLHRQITGLGQACIVVAPSLIPKKSGDRVKTNRRDAVNLVKLLRAGELTSVWVPDEGHEAMRDLTRARNTAVCDLRTKRQQISAFLLRLGRHYPEKRKTWTKVHLIWLARQKFEYPQQRFVFEEMMLAMRQAQERLTRLEEAIRGAVPEWSLSEVVTGLMAMRGLDLISASTLLAEIGDLTRFRTPNELMAFLGLVPSEYSTGDSVQRGPITKAGNPRARHMLVECCWSYQHPPRVGADKQRKVDAAPPRVREIAWKAQCRLHKRYRGLIRRGKLKTVAVTAVARECAGFIWAIGREIAAPQAWPSKRA

SEQ ID NO: 103734 - protein, 482 aa, unidentified
MKKRNIYQNQSQELLSLFGSAGSSAKVMCVPMDYAKRDHLVMFCNGHGDILRKPFSVKNSPEGIEYLIDQMTRSCRRCGIKKEHVFLGGEDANSFAENFINTLRVKGWLVAGVNAHDAKKQRMNLQASTDRIDLMGIATMLLNCRANCCPAASGIYRNLRSLVRHRRKLVVMLTEVKNRAHGIVDRLFPGFLDENKSGIVAFTQSSLFLMENRFSPKQIRRRRRQKLIEILKRFGTSKAEEAACKLQQYAATVLHTPDEYIDTLQISLAQHVKHIRCLKESIVVLEKEIAVNLAQTQGAFLTSVRGIGIVLAAGVTAEIGDPNEQKPLNNLVSYSGIIPRVKQTGGLEGKTYTGSVAKRCNRILKDYVVKSGFHLGLHGPEELKIDYKRRDASGQHADFGIGRRYLRMAMSLMRTSQVYLPPRLRKADSTLEERAGYYLMIWPYLREKWKKYGVLEAAFTKDRPLGMWRQIVQELYDIKLKL

SEQ ID NO: 103735 - protein, 449 aa, unidentified
MREPQEIEDEEHEQVLQRVAAVDVAKASGMVCTRVPHDARPGRRRTRVWSVDATTNAVMELAGYLAAERVEKVTLEATSDYWRIWFYLLEAAGLDVQLVNARDVKAAPGRPKTDRLDAVWLAKLTERGMLRPSFVPPAEIRRLRDYTRLRTDLTRERARYWQRLEKLLEDALIKVSSVASRLTTVSARDMIEALIAGQRDPQALAGLARGRMRVKHAALAEALTGNFDDHHAELARILLDQIDYLASQIGHLTARIEQEIAAIPAAWGIDADGTAGPGAGAAQDAAALPALARLDDIPGISRAVAQAIIAEIGLDMSRFPTPGHLVSWAKLTPRTIQSGAKTRHGKTGKGNPYLRGLLGEAAASAARTDTFLGERYRRIVRRRGKLKALVAIARSILVIIWHLLASRIVRFRELGAGYYASRTDKAKKTRNHLRQLEALGFTVTLAPAA

SEQ ID NO: 103736 - protein, 317 aa, unidentified
MAEVTFPQLIQRACGIDVHLKVVVATIDGAGIQRETRSFKTFTSSLNELKEWLLSNGVTHVGMESTGVYWKPVYKVLEDSIPNVWIVNARHIKNVPGHKTDKMDSEWICKLLLAGLLKPSYIPPKEQRQLRDLTRYRNKLIQQIASEKNRMMRILEDCNIKLSSVVSNTSGTTATSLIDMLCEGKVLTLDDINSVYHGKLSASPEELLEACTGFVEEHHIYLLQMIRKDIDQTQTLVDDLSERIKRLLSKYENVLELLREIPGFSTKVVEDLVSEIGLDMSHFPSEKHLSSWAGLSPGNNESAGKKKAHESLTGTNR

SEQ ID NO: 103737 - protein, 349 aa, unidentified
MGMVGGLDLHRRQITFDVVELESGDEWRGRVWQPDRDRFRRWLRDDVTRRANGGSVALAVEGCTGWRYVVEEIEAAGFEAHLAEPADTQAARGRKRRAKTDRSDARLLRDLLVADELPESWIPPEPVLEWRERVRLYVSLVNQRTVWCQRIHAELYHHGVAVPEGAIRTPKTRAMLADATLQLAPAARERIEAGYRMIDATDLEAQPLKRELQRFGARQPACRALVDAQYGIGGLIAVAVWSELGDCRRFRRSEQVVRHTGLDVTVDSSDRRRAGGFLSRQGPETLRWALYEAAKNSSHHRSPDHQYYAQVKERHDGKIAAISVARQFARRSYHVLRNLDPDVVYAMPN

SEQ ID NO: 103738 - protein, 352 aa, unidentified
MNAITIGLDIGKSSFQVHGVDATGAVALRRKLPRSRVLALFGTLAPAVVGIEACASGQYWAREIGALGHTVRLMPARAVKAYLPRQKNDAADAAAICEAAGRPGIVRSVPVKSVEAQSVLSLLRVRELLLKQRTMLVNALRGHLAEFGKVAPRGRAGVAALTALLSENELPEAVRLACTALQSALAGLEAQVVALDAALRERHRQDRQAQRLAEIPGIGLMGATALSVGTRPAAFKTARDYTASLGLVPGQHSTGGKARLGSITRMGDGRVRRRLVLGASALLKRLRPRNGVAPAALAASALGAWALRLLAHKSWRVAMVALANKLARIAWAVLTRAEAYRPHATPPTAVAA

SEQ ID NO: 103739 - protein, 412 aa, unidentified
MTEIDQFAAHVGLDWADKKHDVCVQFKNGERIFHVVEHTPEALDIWLSELHQKVKGRIAIALELKKGPVVYALQKYPFVTVFPVHALSLARYRQTFWPSGAKDDPQDAELALELMLRYPQKIKAIEPDNADIRLLQQLVEQRRLLVEDKRRFVNRLINTLKQYYPQPLEWFSHRGSLLLCELIIRWPSLQQLKRARRDTIRNFLNAKGGRAIALTEQRVTSIDNAIPLTTDPSVIEANALMATALATQIKVVSEIIKTYDERIETLFDTLPDAGLFKSLPGMGPCMGPRMLAALGDNRDRFNSAEEIQNYAGIAPVTERSGQKSWVHWRWQCAKFVRQTFAEWTAKTVNSSYWAKLYYQRQREKGKSHQSAIRALAFKWIRIIYRCWKTRTQYDEAKYLLALEARHSPLLKS

SEQ ID NO: 103740 - protein, 343 aa, unidentified
MENDIVIAVDVAKTVFEVAVSDRPGHVCKRGRPNRSELLPFFLAYPGATVVMEACGSAHYWGREFQKRGHRVVLLPPHHVRPYVRGNKTDRTDAKGILEAYRNAAIQPVPVKSISQQTLTALHRFRSGWMKERTARLNAVRGLLRELGLFIPVGAREVVPAVWAQIEDADSEIPAALRSVFAEACQEIRDIEARIKKVDHELEVLAEQTPAVVWLLTIPGIGLITATALVAFIGDIRRFPSGRHLASYLGLTPREFSSGLKRRLGRISKRGDGYLRTLLIHGARSVLLHARKQQPDRLRSWANDLSKTRPHNKVAVAVANKLARIVWAVWTRNVPYELMPKAA

SEQ ID NO: 103741 - protein, 356 aa, unidentified
MIVIGIDPHMRTHTAVALERVTGEIVAERTVAARARGHGELVLWARALDAERVFALEDCRHVSGSLERFLIARGERVVRVPPKLMAGARAGGRERGKSDAIDALAVARAFLREPELPVATLAGFEREVRLLADHREDLVGERTRIGNRLRWHLHDLEPSLEIPAGALDRYRWLDRLQEWLKGRDEGSAQVRIARELVVRCRELTRRIKELERELEALLESEAEELLELCGCGTLTAAKLVGEVAGVGRFAGESRLAKYTGTAPLPASSGERQRHRLNRSGNRQLNCALHRIAVTQARVYPPARAYLERRQAEGKTRREALRCLKRHLARTVYRALRAMDERKTTSTVEVAALADLT

SEQ ID NO: 103742 - protein, 361 aa, unidentified
MFTERTSVGLDVHARSVVAAGLDTVSGQRFRARLCPDHGEICRWLGQLPSPVAVAYEAGPTGFVLARALRAAGIRCEVLAPSRLQRPAGDRVKTDSRDAMHLAKLLRLDEFVPVRVPAADEEAARDLVRAREDARGDVMRARHRVSKLLLRQGIVYYGGGTWTDAHHRWLRQQRLGLPATQIAYEGAYEAVVLTEARRDRLDVAITAMAAEPDWAPMVAKLSCLRGISTLTAFALAVEIGDWYRFTGSSIGAYLGLVPSEFSSGAKRSQGPITKTGNVHARRMLVEAAWHHRRPYRAPGVTLRARWDAAPAAARTRGHAGNTRLHARWECFRDRKKPTVVANVAIARELAGWCWSLATLPD

SEQ ID NO: 103743 - protein, 370 aa, unidentified
MRKNNTQQNHKEAKGNKGWQALEGLTIGIDLGDKRSCYCVLDGAGNKIEEGSLSNTATALAKQFGGLKRARLALETGAQTGWISRELEALGHEVIVANARELRAISGSGRKSDRRDAEKLARYARVDPSILRPVRVRGEQAQLDLTRIRARDALVRARTLLVNAARGLAKTRGQRLARSVTASFGSRSQALVDAELAAVLQPLLEQIDALGEQIQRYDDEIEQQAAQGYPETAALDAVPGVGPLTALSFVLTLEDAGRFPHSRDVGPYLGLCPRRRQSGGSDPKMRISKEGDEYLRRLLVQCAHSILGRFGADSALRRWGLRLAEGGGKDAGKRATIAVARKLAVLLHHLWVTQQTYRAFPQNPAEAEPA

SEQ ID NO: 103744 - protein, 414 aa, unidentified
MRIVYKKVAGLDVHKKLVVAATSVLEPDGRITQEKRNFETMTADLLGLSDWLMSHGIIHVAMESTGEYWKPVFNILENNFEVLVVNAQHISKVPGRKTDQSDAEWISELMQFGLLKASFIPPVTQRELRELTRYRSTFIRERVNLVNRVQKVLESANIKLASVASDVMGISGRAMLEAIVQGNINPEAAAELAKGRLRQKREQLAKALEGRVKPYHQFVLSELLCQIDSLDETIARFDEQIEVYCRPFEEAVQHLDTIPGVSRQAAEVIISEIGTDMSRFETADHLAAWAGVAPGNNESAGKRYSGKTRKGNKPLGIILNQVAHAAVHAKNTYLSAQYHRLAGRIGKKKAIVAVEHSILIIAYHIIQRKEPYQDLGGDYFDKRRPEATAKRLIQRLEKLGYQVMLQQQPINSIT

SEQ ID NO: 103745 - protein, 327 aa, unidentified
MAKRTTICAGIDTGKRKLDIALDGSSEQLQIDNTAEDYKVLLDWLRRHRVKRIGIEASGGYEQAVVAELRRQRFVVVVFQPAQVRAYAKFHLLRAKNDKIDAALIAVCTAAVKTIHAPPDARLLPFAEHLTMIDQIGEDIARIKNRLESCRNPRFQQTWKEDIARLAKREKIELKALVAAIREHRDLAERLDLINSVDGIGLPTAVAILVRLPEIGRITREQAAALAGVAPYDDDSGEQFGIRHIDGGRERLRRALYTAALPASFRWNPQLIALYRRLIAAGKQHKRALIACARKLLIFANTVVARGTPWDHERPPIASISAVLQAG

SEQ ID NO: 103746 - protein, 329 aa, unidentified
MVFFGIDVSKGRLDCAVLAAEGGRPLGRRSFRNDAEGAERAATWATQVSGAAAADTHVILEATAAYHEPVAHRLAALGMRVSIVNPAQVRSFAKGIGVLGKTDRIDAQLLARYGQLARPRAWLPPARALLDLQGLLARLDDIEADLRREGNRLEQARTRGCPDVVEQSLLASLAALESSRETLRRAIVAHVAAHGELQADLERLLTIPAVGPKTATRMLALLRARGFEGARQAAAYLGLVPVERQSGRSVRGRPRLSRAGNPRLRAALYMAAVVGIRRNPDLKAQHERLLGRGKCKMAALSAAMRKLVHLCFGVLKGEGGYRAGAATPA

SEQ ID NO: 103747 - protein, 349 aa, unidentified
MNTGTITAVGIDVSKHKSTVAARRPGGEVVLLPFDVEHTAEGLKKLITKLRQLDGEIRMVMEHTGMYWRPIAMTLKEAGFYVSVVNAILIHNFSDNSIRKVKTDRADAMKIANYGLTFWIDLQEYAGEDENRQLLKIQSRLYERTATTAGMLRNGLISLLDQTFPGANKLFRDESRNSRGHVKWIDFVLRFWHKECVAALSLATFTDTFQKWCKRTGYKFSASDAERIHAIARNAVATLPKNDSTKLLITQATNSLNAIYDSLQAIRTEMDRLASMLPEYELVMGMEGIGKVTGPQLMAEVGDVRRFSHKGALVAYAGVDASPYQSGSFDSKRVVSRIFRTLVCRLWHA

SEQ ID NO: 103748 - protein, 345 aa, unidentified
MVVLGADLHKRSHTIVVIDAAGRKLAEKTIAATDEGHLELRRWAAQWPDRRWGLEDCRHLSRRLDAELVRAGESVVRVSPKLMAGARRSTREPGKSDPIDALAVARAVLREPDLPVATLDGPEREVRLLVDHREDLVGERTRHEQRLRWFLVELAIAEPTPRSLGRTVVQLELGAVLADRSEPVARFARDWLARIIELSATIRALEREIEILVRTLASTLLGLPGCGALTAAKIVGEAAGISRFRSKEAFARHNGSAPVPVWSGNLVRHRLNRGGNRQLNAALHRIAITQIRLDGPGRAYLEHRLAAGDTKTEAIRALRRRLSDEVFRRLRADEVARSTDLAAAA

SEQ ID NO: 103749 - protein, 498 aa, unidentified
MATNWLRLAGSTPLESFIKPIRNRAESVELHFMEADEMAKQLGKRKKDGAKADATEGLPPLNLHAAGIDVGSAEHYVAVPPDRDAEPVRKFGSFTADLHRMARWLKDCRIKTVVMQSTGVYWMALYDVLESHGLEVNVANARHTKTLPGRKTDVQECQWLQKLHTFGLLNNSFRPPDEIRVLRGYLRQRENLVAAAATCIQHMQKALTEMNIQLANVISDISGTTGLAILYDIVRGERDPYKLAMHKHSRIRASRQEIARSLQGTWRQELLFVLEPSLDLYQTYQQKIQTCDERIDGQLRSMEPRIDPLSEPIPEPRRGKDARGHQSGFDLRGQLYRITGVDLTRIAGIEVQTAQTIISEVGVDMSRWKTEKHFASWLGLCPDNRISGGKVLKRGTRHVVNRASTALRLAASALLRSQSALGAKFRRLRSKLGAPKAITAMAHMLARLLYRMLKFGHDYVDRGIAFYENKSREQQLKRIAKQAAALRMQLVPLAEVVS

SEQ ID NO: 103750 - protein, 453 aa, unidentified
MCLEDRPVLEPNAAGVDVGAREMFVAVPPGRDEKPVRVFPTFTEDLERLTDWLEQCGVTTVALESTGVYWIPLFEILEQRGIRPCLVNARHMKNVPGRRTDWHECQWLQFLHSVGLLRAAFRPGQDVCAVRTILRHRNELVAAASQHVQHMHKALTQMNLQIHHVISDITGSTGRAIVDAILAGQRDGAELAKLRDPHIKADTETIRKSLEGNWRSEHLFTLGQSRDLYRIYQQQIVNCDLEIEKMLQGFAPRTDPVARPLPPDRKRNRAGIKRRRKNGHPRPEFDLRTEAYKLFGVDVSQIPGLEENALPLFSEVGRDMSRWPSAGNFVSWLALCPDNDISGGKLLWRGARKVKNRAGHLFRMAAYALHRSPTPLGNYLRRMKAKLGPQAATMATAHKIAVIFYTMIKNQVEYDETIWDARDAQREKRLEAKLKRQAKQLGYQLVPIEPKAA

SEQ ID NO: 103751 - protein, 358 aa, unidentified
MVQRKELNFEGQNIYIGIDVHLKTWHVSILTESGCLKKHSQQSSAQALFEHLKKHYPNGNYLSAYEAGFSGFSTYYSLLDFGIECLPVHAADIPTGQYESVMKTDAIDSTKIARALKSGLLRGIYIPKKEVLDDRNVMRLRITLKRQLSGYKSRVKHLLYNNGVIYPECFQNSKSHWSKRYLKWVHEDVQLLSESRNSLDLLLRQVELFCKSLLEITRLVRTLSRNGRYGEAYENIVSIPGIGMITGMCLLTEIGDIHRFRNERQFASYLGLVPTSHSSGEKTSHGEMTFRGNKRLGPLLVESALVAIRQDRALAAAYGEYCKRMLPQEAIIRITRKLSNRILIILKSGKKYEHDRCY

SEQ ID NO: 103752 - protein, 457 aa, unidentified
MSRARKTPKTVKSVAEVDALTMLNPNAAGIDIGLDEMWVSVRADRDAEPVRRFGMNTPDLIAVAEWLKACGVETVAMESTGVYWIPLYEVLEERGFQVYLVNARHAKNLPGRKKDETDAQWLRRLHTFGLLNNSFRPAGEMCAVRAYWRHRADLIEHRAAHIQHMQKALHQMNVRLSPTVKDITGVTGMAIIRAILAGERNPLNLARLRDPRCAQPEAEFVKALTGNYRDEHVFALKQAVALYDAYTQQILECDQELERKFSALKPVHDDDLPPLDTTDKRNTHSKNAPAYDGRSLLYQLLGVDLVAVDGLNEVTAQTILSEIGTDMSRWQDEKHFCSWLGLAPHNDISGGKLLRSRTLKTHNRAGQAFRLAAQAVSKTNTAYGAFFRRMRAMHGPMKAIVATAHKIARAVYCMLRDRKPFHDTSAEDYNQREREREIARLKKKATKLGFTLAPASA

SEQ ID NO: 103753 - protein, 427 aa, unidentified
MPYKIAGIDVHKRMLHVVVSDVQVDGEYDFTRRIFGSLPEALRSLSAWLVEQQVQEVVMESTAQYWKPVWGTLERYWKPICQTREGALATSGRLHLAQALSNRGRRGRKKDFRDAERLVKRLVAHELVLSFVPDVEQRLWRTVVRTKYQLTRNRVQLQNRLEALLEEAHIKLSSLVSDLLGASARRMLAAIADGETNRETLAALADRGLRSTQGQLQDALGVCQELNPVYRRLIRMVLDEVASIDKRIEQLNQEMANLIRLHEDQVKRLAEVPGLGVDSAQQIIAEVGATAATFPSEKHLSSWVGACPGDEESAEVNRSRRSPQGNRHMRRILNQAANAAAKLKGSIFEILYRRYVPRLGHNQTIGIIAHKLCRLVWKILHRGIRYEERGQEVSKASKQKRTRKMIQALRRLGYRIEPDPFQSAITA

SEQ ID NO: 103754 - protein, 524 aa, unidentified
MKKRRIGEDVVTQRSCLLCAEEPVSKTDPGVRRNHPWLHLSEAVFRANSTQKRIFIQAHPRQSILPRGKDVSDEGSIEMEVLYARCAGLDVQKQTVKVCVLIRQEHGQVHKEFRTYGTTTQELLNLADWLKEQGCTHIALEATGVYWKPIYNLLEGGFALLVLNARHIKAVPGRKTDMRDAEWIADLLSHGLLRASFIPSAPQREVRELTRYRVRLTEERAREVNGIQKTLEDTNLKLGDVVSDILGKASRMILQAIAEGETDPGAFASLAVGRVRASQQQLEAALRGTVTDHHRFLLRDHLTQISHLDQAIQRVTTEIARRFTPPEAGEDSQQEAIPPAEPAGDAAQEPPTSAKTALSWAEAVVLLGSIPGISERAAYGILAEIGITMQQFPTAGHLASWAGVCPGNHESAGKRFSGKTRKGDPWLRRLLIQAAHAAARQKHGDLAAQFRRMAGRRGGKRAAMAVAHSMLVIIYHLLSEGTTYEERGEIFFEERDRQTLERRLIRQLERLGNQVTIEPLVQVG

SEQ ID NO: 103755 - protein, 455 aa, unidentified
MSKRSRKTQLRGLSPAPVLEPNAAGVDIGATEIYIAVPADRDSQPVRRFATFTEDLWAAVDWLKRCGIETVAMESTGVYWIPLFQMLEGRGLKVWLVNARHVKNVPGRKTDVSDCQWLQYLHAVGLLRASFRPEQQVCAVRSLLRYRESLVEMAAVHLQHMQKALDQMNLQLHHVISDLSGTTGMAILDAILGGERDVRKLAALRDPRIKADTKTIAKSLVGDYRREHLFTLRQSVTAYRHYQGLMASCDAEIEQMLAEFSDRAEGGTRPLPPSTKHRQKPRRNELRFDLRGHLYRIFGVDLTEVPGINALTAHVLLTEVGRDLSPFRSAAAFASWMGLCPDNRVSGGKVLSSRTRQVNNRLAKALRMAAQSLFRSQSSLGHYYRGMRARLGAPKAITAAAHKLARILFHLISTRQPYDESVFAQQQIKHNQRRQQKLKQQAKSLGFQLVEIETA

SEQ ID NO: 103756 - protein, 387 aa, unidentified
MSEQFNPRTPATAFDHTTTLVSVLELSGKSWEMGASVPGVTRRPLRKIDVRDIGAVIKAIEQWQIAASKAGHTVSRVVVGYEAGRDGFWIARALRERGIEVYVLHPASIAVERRGRRAKTDRIDVDLLLRTLLSWLRGEPRACTMAPIPSEAEEDMREPGREREALVSIRLKVENLIGSQLIRFGIEDFRPRLKKATQKLEDLRTLDNRPLPPKTMEKLRRLMAQHRLLSEQMKEIEVARQQVVTVIDPDHIERMIQVLVRIVGLGVETATTLVHEVFSRQFRDRKALAAFVGMTGTPFNSGGSTREQGISKNGNPRIRRIITQLMWRWLRFQPDSALTRWFNERTGGAKGRIRNIMAIALARKLLVALWRYVENGVIPEGTRLVAA

SEQ ID NO: 103757 - protein, 342 aa, unidentified
MTKLYAGLDVSLEMTSVCVVDEDGALVFEAKVLSEPDAIGAVLAGCGGAFARVGLEAGPLSQWLCNGLTAAGMPTICIEARHAKAAMVAMNRNKNDRNDARSLAHLIRSGWFKAVHAKSTESQELRTLLVSREFFVNKLRDHENEIRGLLRPFGLKVGRVAVREFEARVRTLVDGIPMLELCMDSLLRGRAQMQAQLAALHSALLRVTANDELCRRFMTIPGVGPVTALSFKSTIDDPSRFRRSSDVGAHLGLTPRQYQSGETDVRGRISRSGDAFTRTALFTAAHVMLTRSRQWTSLRSWGVRIAKRSSLKKAKIAVARKLAVVMHRMWRDGTPFHWAAAA

SEQ ID NO: 103758 - protein, 390 aa, unidentified
MQVMHPVCCGIDVHQKSIVCCILDGPLTSNEPKKYQTSFGTTTKELKAALDWILEHQVTHVFFESTGQYWIPLFNIFSDSDLELVLANPQHIKNVPGRKTDVKDAEWIAQLGRCGLINQSYIPSQEVLQLRYLTRYRLSVKQRLTQIKNHIHVILQRGNIKITSYLADIFCKTGQALLTLFINGEVINEDNVESCIHGRIKASTRQLIEAMEGKLSTVDRFLIKECMEEYQLQKKISDELNKEINEYILEHFPEEYQLLLTIPGISDNCCATILAEIGPNVDAFKTDKKLASWAGMCPGSNESAGVKRSSHTTQGNKYLKQALVMSVLSVQRAKEETFSLFYQRISSRGSKMKAIIACGHKMLRIIYKILQSHQPYNSQKALGLRQQTNA

SEQ ID NO: 103759 - protein, 512 aa, unidentified
MIIRPNPSNPPSSKARKRFAAAKREQVQKRQGTPQKKPQKSPRKSKASRSLPVTAPSMPAELKQVNLNAAGIDVGATVHFVCVPEGRDPQPVQSFGAFTADLEAIADWLAQCGVTTVAMEATGVYWIPLFELLERRGFEVQLVEPRRLKHVPGRKSDVLDCQWIQQLHTFGLLCGSFRPDDAICVLRSFVRQRQTLVRSISRCVQHMQKALTQMNIKLQHVISDISGVTGMAILHAILAGERNPQQLAKLRDGRCSNDEATIALALQGNWREDHLFALKQAMDTYRFYHEKLTEVDEKIQAHLETFEDKSQGKPLEPPAVTKKHRVNDPAFDARKYLYTTTGMDLTEVDGLEASTVLTVISEIGLDMSRWPTEKHFTSWMTLCPGVNKTGGRSESKSGRTRPSSNRAATALRMAASTLMRADCALGAYARRMRARLGAPKAITATARKLAIIIYNMLKYGKAYVDRGAEYYQEQYRATMVKNLKRRAKQLGFAVVEVTAQPVAPETTPTPPA

SEQ ID NO: 103760 - protein, 422 aa, unidentified
MLKESHDEEQIIARVAALDIGKAELVCCVRVPAPDSARKRLQEVSTHSTMTGSLIELANRLVELRVERVVMEATSDYWKPVFYLLEAHGLAPWLVNARDVKHLPGRPKTDVLDAVWLCKVAERQMLRPSFVPPPAIRRLRDLTRYRIDLVGVRTAEKNRVEKLLEDACIKLSVVASDIFGVSGRAMMAALIAGQRDPKVLAQMARSRMRTKIGRLEEAFNGHFDAHHAFLLARMLHRIDDIDADIAAVDEQIEAYLTPFASAAARLDEIPGVGPVAAAVILAEIGADMSRFPTAAHLCSWAKFSPGINSSAGRTKGNGSTGHGNRYLARVLGEAAVVAGRTDTFLGERYRRIARRRGKKRAIVAVGRSILVIAWHLLADEDTHFTDLGADHFTKHTNPEVKKHNHIRQLEALGYTVTLTPAA

SEQ ID NO: 103761 - protein, 344 aa, unidentified
MSKVTIGLYIAKSVFHLVFMNQSGRVLRKKKLRRHQMLSYFSQLEPCIVVMEACGSCHYWCRELTKAGHEVKAIAPQYVVAYRKGNKHDYNDAEAIAEASQREGMRFVPFKSQEQQDVQLMHRIRERMIAQQTALSNQIRGLLSEYGIVYARGVATLVKELPLTLEEADNGLSMLARRQFQGLLNDLRELREHIKEMDKELKAFSQSQPVCERLMSMTGIGPLIATALYAGIGQGQAFNSGRHLAAWLGVVPKQHTTGDNPRLLGISKRGNTYLRTQIINGARAALRHIGDKTDKVSEWCRACLARMSFNKACVALANKMVRMAWAMLHYQQDYQPGLINKAAA

SEQ ID NO: 103762 - protein, 356 aa, unidentified
MPKIKQLDFEGQTIFCGIDVHKKSWRVNIRSDEFELEDYSQDPSEELLLKHLHKRYPGASFQVAYEAGFCGFGIQRSLKLSGISCMVVNPADVPLTDKDKKRKSDRIDARKICRHLSHDMLRPIYVPSIKMEHARTLVRQRIRLVMDQTRCKNRIWGFLMFHGLKLKMDKPNDYWSRRFLESLKTLPCLTPLLRQTLDTALEEYLLIRKLVGNMTKQLRALSTQKSFAPLQNLIQSIPGIGLLNSMVIITELQDMKRFKTLDRLCSYAGIVPDTASSADRTTVKGITHRSNDYLRPAIVESSWVIIRKDPAMLHLYNKYCRKMVPNKAIIKIARHLLSRIRYVWNNKVEYEVGVVG

SEQ ID NO: 103763 - protein, 319 aa, unidentified
MAQNDRVVVGIDVAKDKVDACIRALSQRQTFPSTAEGRRALIRWLRKHKVGKAVMEASGGYERDWAKALREARIEVRIVDPKRVRSFAQSAGRLAKNDAIDAEMIAWFAETFDEARGQAYDAAREELVQIVNARQALLEQQTQMQNRCEHTVPIPVRKMHERLLKAIALEVTKLEAVIAALTKASPHFAETAEIIESVPGLGKITSAGLIAAMPELGQVSNEAISALLGVAPYDDDSGKRQGERQIKGGRRKVRNLFYMACMGAATQHNPVLKAFYRRLIAKGKKPKVALVACMRKLIVILNIMIARREKWDAGRYAVG

SEQ ID NO: 103764 - protein, 359 aa, unidentified
MLYLGIDQHRKQLTVNLRNEEGEVVLKRQVSTQWDRVRKFFEELEQQAELEGGFMAIVELCGFNDWLLQMLALYGCHETVLIQPQKKFRKKTDRRDASALSQSLWVNRHRVLGGARAQGVRRIHLPPHEEQENRQLTALRKRTVALRTQSINKVHHILLKHNLQQECPTKGIKTKKARKWLIELPLGDIDRLEMNQLLARWELWDSQIAEIEKKIEERQRRHKTAPVVATIPGANAFSSLGLASRIGSIDRFPRPGSLANYWGLTPGCRNSGEATDRLGSITKDGSPMARFILSQWVVHVLRRDSSMKAWHARIKKRRGSKIARVAVMRRLATIVWHMVKNNEPYHIGGLPKQRQKKAA

SEQ ID NO: 103765 - protein, 514 aa, unidentified
MSEGTAQPPFSRLCPRLLRKHSAWLIRHIPLTQKFHPQPLAPAKMADWVHAHYARVRSPYAAQDKPFASGFTNPYRNGGDIMLKINYMSTLFVGIDVSSKSNSVYAMDFEENKYLSTSFGNNQPGADELVNRIAACMQKHKNLDTLLIVLESTSVYSVHISNFLASSEVLMPYKPYVFCVNPKATANYRKSYIGMEKTDPTDAYLIADFARVGRTKKLEPWRGGQFIALKRLTMHRMHLSECITREKTYMVSNLYLKFSELQLLEGVDKPFGNLYGATSSAILTEFLSPQEIIDMPEEDLLAFLAQRSRNRICDLSKTSELLRKAARDSYRLDKCMYEPLNISLASSFNCIQAYQKEIRLIEQAIEKCIKGMNPNALIILQSIPGIGPVWASGILSEIGDISAFHSSDALAKYAGLYWPKGDSGDFISEDNQMSKAGNPYLRHYFGEAANSIRKHIPEYADFYARKYAEVSKHQHKRALALTSRKFVRLVFGLLAKNQLYTGEKLDTEHNTESN

SEQ ID NO: 103766 - protein, 409 aa, unidentified
MRYYVGVDWADQAHAVWIVDESGTKVAARTVPHTAEGLNEWGRELDQWRAQGIDLWAAIERPDGRVVDFLLDHDVVVYPVNPKALDRARDRFRQSGAKSDAFDARVLADFLRTDHAHLQALQPSSDAARELKLLTEDCQRQIRQQTRLLNQLTATLKAYYPRALEVAELSTALARAFLQTYPTPAAAAALTERQWTRWARTHRLSAARTRELWDILQQPQLPVPAHVVRAKARLMLTLVAQLTPVIVAVDDYREAIEHFFASIPAAQWVRTLPIGKHGIIAPTLWARLGDAPRRWQSFRHLQAHAGAVPVTKRSGTQRIVHFRFACDKSLRYVVDHVAFLSLNSSEWARAYYDQQRTRGHSHRQALRALGAKWLKIIFVMWHRQIPYDEQHHLASMTRHQLRQRQRKVA

SEQ ID NO: 103767 - protein, 420 aa, unidentified
MIPAVIERCAGIDVGKKFLIVCVLTGPANEKPTAEVRKFGTVRAELERLREWLKSEGCTHVVMESTGSYWKSPLNVLEDDPEYRLQIVLANPQQVKAVTGHKTDPHDASWLAHLLRHGMIRPSFIPARPLRELRDLTRRRKQMIRAAADERNRVQQVLEDANVKIGDVLSDVFGLSGQRMLEALVAGESSACEIAQLARGHARKKIADLTAALEGHQMRDAHRFLITHAMRHMAFLAEEIEALDQEIERRIAGGELDQAYQLLQTIPGIRTQAAGTLLAEGGPDMKQFPTAGNFSSWSGAAPGNNESAGKRKRSPTLRGNPHMKTALVESAWSASRTNGSEFQDRYQRLQPRLGHKRAIVAVAHLLAIRIYEVLDSGLPYQNSRARPSPASVRRLVRHHSRRLKHLHRWLADPLRKDRLA

SEQ ID NO: 103768 - protein, 412 aa, unidentified
MSVASATGPAPLFAGVDWAENNHVGCVIDADGTIIERVTVSHDKAGIARLITVLTDAQVSGVGIERGDGPLVSALLTAGLTVFVIAPSQVKALRGRYGSAGNKDDRFDAFVLADVVRTDRRRLTPLMPDRAETSTLRALVRARKDLVGHRIAVANQLRAHLLMVLPGVVGLFAELDAPVSRAFLADFGTQDAVDALTEGELAAWLRGRRYTRRPAGVLLQQLRTAVPGVTGPAGHALAGITRAYLAALDAVMAQIDVLEQQIEAGLHAHPDAIIFTSLPRAGTVRAARLLAEIGDCRARFPTAAALAGLAGVTPSTRQSGHTRIVAFRWAVDKQLRDAVCDFAGDSRRDNAWAAHLYAQARARGKNHNHAVRILARAWLTVIYKCWTTHTPYNPTRHRALQTLLQQDPQPAG

SEQ ID NO: 103769 - protein, 423 aa, unidentified
MKNSTARKLKQVPKGYLVMGVDPHKKRHAAVAVTQDFTTHSKFKFNNSREGFEMALERARAEMVRTGSRGVIFAIETGGHYWRNLAYFLDERGIPFHFINQFTLKRRREGKDLNRRKNDYRDSEVAAQLLCTGEFTDTKLQHGVYAELRAAHNAYRRLVKERTRITNLAKGLLDGVFPEFTQVFKDPCGLTALSVLSICSVPSIIAQMTEEEFVGAIGAKHQGRLMRRKLRALHYAARTSIGIEEGAQSVSSEISFLVEKLRLIRRQIRSIDETLTRLVDGTEEGKYLLSIIGLNYISVAGLLAELGSFRSYRSAKQLIKMAGSNPTESESGGKRSAHTPMSKKGRPVLRYCAWTAVIPMLRFNPDFRAWAEKLRERPVHANPLAGREVVGAALNKLLRLAFALVKKQTFYRVPQLEVVQVAS

SEQ ID NO: 103770 - protein, 364 aa, unidentified
MKTLHYVGMDVHKETIDVVVFRESEEDPFLERTILNQEGVIRKLFKKLMEGGSVIACYEAGCMGFGLQRMLEEMGVASIIASPGKVPRRPTDRIKTDRRDARRLSEQLRARTLEAIHIPSRDDEAVRDYLRAREDVRLELVKTKQRLQKFLLRHGYVYESTRYWTGRHDRWLRGLEFDKGMLKETFEEYYFMIGTLAENLRSMDRRIEEIALSEPYAVRVGRLRSFKGINYLTALSIICEVGDFRRFSHAETFMAFLGLVPGESSSGEKRRQGGITKSGNTHLRKLLIESSWHYRYKSAPSKRLTDRRKGQPAEIIAYADRAMRRLQWKFFRLIMKGKTKQAAVTAVARELAGFVWGMMVGQTA

SEQ ID NO: 103771 - protein, 348 aa, unidentified
MVADWVDYVVGVDTHLEEHVLAVVAAPSGAVLARRAVRANARGYAEALRFAGEAAGGARVWAIEGTGSYGAGLARYLAGRGETVLEISRTPRPERRLRGKDDSLDAARTARAALASETLALPRSGERREALRLLLIARRSAVDVRREALGQLRGVIVTAPDGLREQLRGLPVGKLLERCSRLRQSSSASADEVATRLVLRSLARRIQAATVEAAELEQEILGHVRALAPRLLDEPGVGPIVAAQLIVAWSHRGRLRSEAAFARLAGVAPIPASSGQTTRHRLSRGGDRQLNRALHTVVLHRRQHDPATQAYIERRVAEGKSRRDATRLLKRYLARNLYRLLQQEPLMT

SEQ ID NO: 103772 - protein, 353 aa, unidentified
MRFYNNSHKHYCGVDLHTKTLYLCILDSDGKILMHKNIPAKPVPFLKAIAPYRDDLVVGVECMFSWYWLANLCLEQGITFLLGHALYMKSIHGGKTKSDKIDSEKIARLIRGGNFPMAYVYPPEIRAVRDLLRRRRMLVRFRSEVLAHIKLTHHQYNSDFFEKNINKPGNRAAIAELFDDPAIVKNVQVDLAVADAMHEQIKQLENHIIRHARAFDPRTYHRLQTVPGIGPVLALTILYEIGDITRFPTVQSFCSYARLVKCPKESAGKLYGYGGQKMGNAHLKWAFSEATALIMRESAQAKAFVAKHEKKHGKGKAMSMLAHRLGRAIYFVIKRKDAFDVNYFFSGSGMKQH

SEQ ID NO: 103773 - protein, 320 aa, unidentified
MMSEVVLGIDVSKKTLDVALIFDNRTFSKQFQNSAEGFKLLAVWLASLEIKQVHACLEATGVYGEAVALFLHEHGHQVSVVNPLRIKGYAQSNMQRNKTDRLDARLIADFCLTQKPDAWQPPSAAVKHLQSLVRRVEVLEEMRQAEDNRLANESAEIKPSVERMMTLIKEEINQIERQIKQHIDRHPDLKEQSELLQTIPGIGAKTAHLLLSEIEFERYNSGRAIAAQAGVVPRQKQSGTSLKQTGLSKLGNARLRKALYFPAITAKRHNEIIKEFAERLHKRGKTPMQIVCAAMRKLLHIAFGVLKHKRAFDASLAFSA

SEQ ID NO: 103774 - protein, 327 aa, unidentified
MENNYIGIDVSKETLDVAVIQDERRNHRQVTNNGAGFEQLRRWLNKLKATNGHVCLEATGQYSDAVATDLYQAGYRVSVVNPAQVKGYAESQLRRNKTDKQDAYLLADFCRTQQPQLWTPPSPEWLELRSLVRHLADLVDARQQIANRLSAGHMAALVKAQSETQLKLLDQQIAEVKKAISDHLDHHPTLKHDKDLLTSIPGIGDLTAAKLMAECRELAHFDDVRQLVAFAGLNPQHHQSGTSVNRPSAISRRGNSTLRAALYMPAIVAKRFNPILHDFAERLAARGVLGKSQIVALMRKLLHLVFGVLKTGQPFDPHWSNPKPANP

SEQ ID NO: 103775 - protein, 476 aa, unidentified
MAHQRKVRSALVPIPMLSQETLYVGVDIGKFRHVAGFLSRTLLARHERFEGCPTLAFEQSREGFRTLVDRIRELVPLEQATVLLEHTGHYHRLLEQYLLEMDITVYRIHVQERPKGMLKTDKRDALNLANTLYAQLELGVQVADKMQLVRQAVAPTKAATQLKGFIQHRYELSHHGTQLKNKLTAICDELFPEFTQIFRDPNLPTALTFREQFPTPSALATASLSALRALRSRNFPSDAQLLKLQQLARETIGTKDVDRLQGLLLEQTLLLKELRLVQEHLALLQTEICAIVTNCREGQILLSIPPIGHIQAATIIATIGTIANFEKASELKSYFGWAPRRHQTGVTFDRTKLTRAGVRPVKQMLFLMATCATTMDCEWSRLYQRLLPRLASYDERIKGYRGKLKVIGRIAGQMASMIFALLKTDQELLSQVPAGQEPPPPMLYDPAVHRRHQEGHYRSLKPGTLPRKIIQLPKHT

SEQ ID NO: 103776 - protein, 321 aa, unidentified
MKTVLGIDQAKKKFDVALLRNGKYKSKVFENNPAGFSALLDWLNKNNVETFHACMEATGTYGEALARVLHEAGHSISVTNPARIKAFGQSELLRTKNDKTDAKLIARFCEKMEPTLWQPSPVEVEYLRGLGRRRDALISMRTQELNRQETSNETVNSSVQAVLECLEKEIEQISKLIKDHISKHPDLKHKHDLLNSIPGVGPATIEAILSEINAFEGFETIEQVVAYMGLSPKEHTSGTSVKGKSAICKIGNARLRKALYMPALSAIIHNPIVRALYDRMKAKSKNGMVIACACMKKLVHLIYGVIKTNKPFDPAYTLKTA

SEQ ID NO: 103777 - protein, 357 aa, unidentified
MDGSSEQPKMTAGLDLGDRYSYLCLIDTASGEVMEEGRLRTTPETFKRRFASERPMRIAIEAGTHSPWVSRVLEECGHEVLVANARKLRLIYANKQKTDEIDAENLARLARVDPKLLYPLKHRGEDSQAHMALIRSRQALVGCRTQLVNHVRGAVKSFGGRLPKCPAVSFHKRAAEHIPEALWPALEPLLETIGSLTQRIRDYERKLEMLAKERYPETDLLRQVEGVGTLTALTFVLTLEDPYRFEKSRSVGAYLGLVPATDQSGDRNPQKRISKEGDEMLRKLLVGSSHYILGPFGSDSDLRHHGEKIASRGGKNSKKRAVVAVARKLSVLLHSLWLSGEVYEPLRNTHHSGGQAA

SEQ ID NO: 103778 - protein, 407 aa, unidentified
MLFVGDDWAEDHHDVEVQDEHGRAIRTARLPEGVDGMARFHDLIARFLPDRADPSQVLVCIEVDRGPWVRALIAAGYQVYGVNPKQSARHRELMSLSGAKSDKADAHTLADMVRTRRHQLRQVAADSDLGEAVKVVARAHQTLIWERTRHTLRLRSALRDYFPAALQAYKVLTLTGADALELLAKAPTPATAAKLTIAQISAALKKARRRDIPAKAAAIQQTLRGEHLGQADVVATAYAATVRSTVAVLQVLNTEIKTLEGEVEAHFGQHPDAEVYLSQPGIGAVLGARVLAEFGDAAGRYADARSRKNYAGTAPITRQSGKTKTVHARFIHNDRLLDALHMQASAAILHDPSVRAYYDQLRAREIGHNAALRQVGNRLVGILHGCLKTTKHYNQTIAWAHRLPDAA

SEQ ID NO: 103779 - protein, 429 aa, unidentified
MKKSLRCRPVLAKGRAVVGIDVGKRKHAATALTPQGELIAQLSSFPNTRQGVDQLEKQVLRKAGGPGKVLVGMEATGHYWMCLYHELTRRGYACVVLNPLQTNARSSARIRKTRTDKIDSLTIARLILSGEAKATRVPDPKTTELRLLVRHHRRLIHAAADMERYAHSLVDRIFPEYADVFCKVFLSSSQKLIRQIGLAPAKLVHNADEVRQLLRRAGRGRIASQTIDQLLAAAQQSIGTRQAEDLAESQLRSIFDYLATVRQQIADIEQQLGQRVKQLDSPLFSLGINSPLVAAIHAETDPIGDFTRPEQYVAYAGLDPSLHDSGDTIQRRGKISKRGSPLLRHALFLAALVVSGRHDYFRRIYRKHRSRGKTHRNALVIVARRLARVIWRLLTDRRPFTARPPKTPSPFTKPGKPVGSTAKAVCASH

SEQ ID NO: 103780 - protein, 367 aa, unidentified
MKKVSTAAEKTTKIFRDHKLTIGLDLGDRWSWYCLLDEVGEVLLEQKLSTTPKAMREVFGAIPRCRIALETGMHSPWVSRTLSELGHEVIVAHARKVRLIGESRKKDDRLDARTLARLARIDPQLLCPVKHRSARAQADLTVIRARAGLVRARTALVNTARGLAKSYGERLRGCNVRNMNPEKAEGLSPELQRALEPLLEGIESLSERIREYNERIEKLAQDSYPQVALLKQVKGVGTLIALTFLLTLEDAHRFRKSRDVGCYLGLQPGRRNSGQSEPQMHISKEGDPYLRTLLVQGAQHILGPFGADSDLRRWGLKLAERGGRNGKKRAIIATARKLAVLLHRLWVSGEVYEPLRNSNQRAMLAAA

SEQ ID NO: 103781 - protein, 365 aa, unidentified
MHKLNSAATLIQRTATEAPRDHMYYIGLDVHKKTISFCVKDAAGCVYQEGKIGSTRRELDAWVKTLPQPRMMAMEATIFTGWIYDYLLPHAEKVKVAHPLMLRAIAAAKKKNDRIDASKIADCLRCDFLPECHMASTEIRDRRRTLRYRNLVLRQMVQMKNRVSGLRMESGVSYDKQRLHKMGYFTELFSTSEEISDNIRPLLRLGREHILRGQRLDRALISSLERDPLLSERLRRLRTIPGVGPITALTWALEIGDFTRFQSVKEAISYCGLCSAEKSSADKVMRMPISKQRNKHIQHVLVEAAKLAPRYSHELALLREKEIQRGNKNRATLAVARKMVAYMLAVERRQQNFVPAEEMAGKAVA

SEQ ID NO: 103782 - protein, 409 aa, unidentified
MEVLYARCCGLDVHKSSITACVLIAQSGKPLKHIRRFGCTTRELRELVVWLQEFGVEHVAMESTGVYWKPVWNVLETHFQIVLANAQHIKAVPGRKSDTKDCQWIAELLQHGLLRGSFIPPLVIRDLRDLTRARTSLSQEHSRIASRIQKVLEDANLKLASVASNTLGKSGRAMLAAIIGGEQSPERLADLALGHLRAKIPQLQAALEGQVRDHHRFLLQSLLRQLYFIETEIELLDARLEQLGQHLAEALNRWVTVPGVDRVAAWSFIAEMGADVSHFPTAAHLASWAGVCPGNNESAGKRISSKIRKGSPWLRRMACQSAWAAARTRNTYLSAQFKKLAARRGRKCAIIAVAHSILVIGYHLQRKGCAYTDLGGNYFDRLHAEGLKRYLVKRLESLGHSVTLQPRIA

SEQ ID NO: 103783 - protein, 360 aa, unidentified
MKYIGLDCHKKYDHATMIDTETGEIKATRLIHLKDDFAEFIGEKANTRLVMESCWNWCKTYELVKDLVEEVTLAHPLRVRAIASAKIKTDAIDSSTLAELLIANLVPQAHLREAENRIRQRVIRHRAFLVVMRTRVKCRIHDLVDSQLLSREVLEAKPHSLFTKKGLKWLCSLELTSEEDRKMFGSYLRLLEVINQEISASNDMIKDIYNKDKDAQILTTIPGIGITLATLISTEIDGIERFSSPSKLCSYAGLVPSTRSSGGKTYHGRLTSEGNRWLRWALIEAVVPASYADDEIRERLNALRKIKSENVAKTIMARWLLKIVYHVLKESRPYMAAYPASRRPGRLLFALASSNGELRS

SEQ ID NO: 103784 - protein, 405 aa, unidentified
MTMMIGVDPHKGSHTAVVIGPGEEPLGELRVESSPGQAEDLLKWAAQWPERTWAVEGAAGLGRLLAQQLVAAGELVLDVQPKLAARVRLLQAGDTGKNDPHDAQSVAVAALRSRACRPVAAEGHTVVLKIWARRHRDLARARNQVACRLHAVLCELVPGGVRKQITAGQAASVLERVTLSGPIGAARRELAAQFLEDLRRIDGQLREANKKLAAAVRTSGTTITEVFGVGPVNAGTIIGDVTDVNRFPTRDHFAAYNGTAPTEVSSGGRKVYRLSLRGNRRINHAIHMAAVTQIRHSHSDGRAYYEKKIAEGKKHKEALGCLKRKISDAIYARLCADARMAARPVGEGPGGQTGNGSDSSAAGSHPEHRLFGQATPGPATTLRPPARPARQQTRTRRLKDLEKTR

SEQ ID NO: 103785 - protein, 356 aa, unidentified
MSNLSKLDFTGQHIYIGMDVHKKSWSICILTDHFTHKTFSQPPDANVLIGYLKRNFPGAIYHAVYEAGYCGFWIHDRLRELGIECIIVNPADVPTKGKERAGKTDKVDCRKLARSLRNGELQGIYVPSRIKVEDRTLIRTRRNMVKKQTRCKNQIKSLLSFYGIRVPEDINECHWSYKFINWIDEIRMEKASGNIALKVHLDELNNIRQIIASLNRGIRALSRTDEYRANVWLLRSVPGISTLTAMTLLTELYHISRFRSLDKLASYVGLIPNTDSSGEKDTTTGITDRRNPTLRVMLIESSWTAVRKDPALLMAFEHLCKRMTRTRAIVHIARKLLNRIRYILKNQMEYVPAVVQ

SEQ ID NO: 103786 - protein, 316 aa, unidentified
MTTTHHIGIDVSKERLDVAVHETGETFACRNDSQALGELAERLRALAPALIVLEASGGYEHEALFALLAAGLPAARVNPRQTHNFAKATGYLAKTDVLDARVLAHFASAVRPTLSTAPTAAQLALRELVERRQALVEMLVAERNRLRLTRTTAARAHVERHITWLRQQLDGMDDELRQLIVGSETWRELDRLIESVPGIGTVTAVSLLALLPELGQLNRREIAALVGVAPFNHDSGKHRGSRRIAGGRPAIRTVLYMCAVAGVRCNPVLKGFYGRLKAQGKPSKVALTACVRKLIVMLNAMVRDQKPWDADRSVVA

SEQ ID NO: 103787 - protein, 346 aa, unidentified
MMIIGCDYHPSWQQICWVDTLTGETEEKKLDHASGEAERFYRQLPGPALIGMESTGNCQWFVEMATTAGHDVWIGDAAKIRASEVRQQKHDRRDAALILKLLLEGRFPRIWTPSGEEKDLRQLLIHRHKLVRIRVQVKNELQHLAMNQGVTKKGKLWSKTGEKVLRELPLKPWASRRREDLFKVREMLNGQVDLLDRAVVEVAQKNEKARLLMTQPGVGPITSMAFVLTMGDVSRFPRGKQVASYLGLIPREYSSGGKQRLGSISKQGNGFLRMLLVEAAQVAVRCDPQMRQEYLHRCHRKAKGVAKVAAARKLAIRLYWMLRTNTGYPEVVRVESSSRVPVVSAS

SEQ ID NO: 103788 - protein, 315 aa, unidentified
MYYLGIDVSKKTIDCCLISDSIFYERRFDNIEDGFRRLDDWIQEYTAEAVHCCCEATGIYHEAIAAYLRQKHTVSIVNPSKIKGFREAEQTRTKTDRQDARLIAEYCRRMQPQAWQPPTEEQEYLQAITDYIARLKQQRAAEQTKHQTAPDTIRHHIQTTIDHLNRLIATVQNELKDFYRQNPIYNEKKNRLKTIDGIGESAASALLAKLTRYDFANQNQFVAYLGLDPKIKDSGTSVKGKPRISKQGQKSARKALYMPALVAYRMNAFPAFTARLKARGKPPKLIIVAIMRKLAVIAYQLYKTGKDYDRSRYRN

SEQ ID NO: 103789 - protein, 323 aa, unidentified
MKKKDYQYLQFVGVDVSKAKLDLAFGDGGQALSIDNTQKQIVTQLIERIENPKTTIVVMEATGGYESLLVTLLHQHHIAVAVVNPRRVRDFADGIGMDAKTDPIDAKLLAFYGQVVKPAAQAAKSAEEKKLKALVERRRQLLGLVNQENNRLQQTTDQEIQGYIQQSLETLKKQVKEIDERLKECVASNTANARKVEILQSVKGLGPVAVSTLLAELPELGQLNRGQIAKLVGVAPLNRDSGKSSRQRRTSGGRSYVRRVLYMATLVATQFNSKIKAFYQRLLASGKPKKVALVAAMRKLLTILNTLIKKDELWNTEPNKTSV

SEQ ID NO: 103790 - protein, 475 aa, unidentified
MKRNNKSKKRNNESNRGNNQPPESEAKHPGGAGLPRIRPMVAGIDVGSKEHWVCAPIGEGGTEMRVFGANTPELVAMADWFQQLGVESVAMESTGVYWIPLFELLESRGIEVILTDTRHLTRVPGRKTDFQDCQWIQLLHSCGLLQGCFRPGDAICQLRSLVRNKAVLVAERSDWLRRMQKCLEQMNVRVHRAVSDIDGTTGMAILRAIVAGERDPVKLAKHRDPRCRKSEASIARELTGNWRSDHLFNLEQGLKMYELIEERIGDYQREIQKQMQALRCEQADRNPLQPVKNKEKAKAIKRRGQEPMREVLHGLAGADLTTIDTIGVETAEVVISEYGTDLSRFPTEKQFVKHLRLAPRQSITGGKPMRKGKGSKGATRAGNALRMAATVARNSRTAIGAYYRRLAARKGSDVAVFATARKLASLIYRMLRWGQPYVDEGVAEYEKRYQAARIRHLQAQANQLGFQLAPQTTTP

SEQ ID NO: 103791 - protein, 344 aa, unidentified
MDQISRIGMDTSKHVFQLHGVNDAGVPVLRKKLRRNEMVAFFKKLAPTVIGIEACGASHHLARLLHSFGHTVKLIAPQLVKPYVKRGKNDAADAEALCEAMSRPTMRFVPVKTTEQQAALMLVGVRDRLIRNRTQLANTIRGYAAEFGLTAAKGMAHLVPLLERIQADETLPALARELFASQAGEYAQLQTQIDEVEAKLTAWHRADECSRRLAQIPSVGPVGAALLKMKTPDPEQFRSGRQFAAWIGLTPRDHSTAGKVRLGGITRAGDEALRSVLVLGATAVIQQALRSGKASPWLAELLKRKPPKLAAVALANKTARIAWKMMLTGEAYNAKCAAALAGAA

SEQ ID NO: 103792 - protein, 322 aa, unidentified
MNPKNYGGIDVAKKNFVIGIYGQDKTKTGANTPKGHAKAVEYLQKHNVDLVVLESTGGLEVPLANALHAADIRVVIANPQRTHQYAASFSLGKTDHLDAKMLADYAQALDSRKMADDMCYAPPSEEALALEALVKRRSQLVEMRKMEKNRLEQTHASQKASVVAMIKHLGELIAALDKEIDQSNRGGFNGKGEVLSEMKGVGRITCATLLSMLPELGKVPHKRAALLVGVVPPPRQSGEKEKKSGCVGGRMVVRNALYMAALTATRSEPKIKAFYEKLMSRGKAFKVALNACMHKLLRILNARMRDYLASLKETEESELQGA

SEQ ID NO: 103793 - protein, 411 aa, unidentified
MSYAWYVGIDWGTALHQVTVLDTERRVVSEQKVAHRGEALAELVTALTTRCAGDPSRVAVAIEVPRGTVVETLVEHGFHVFAINPKQLDRFRDRFTVAGAKDDRRDAFVLATSLATDPAAFRRVHLDDSLVIRLRELSRLEAELQHEFTRLTNRLRDQLHRIYPQVLALSPAVDEPWIWALLDLAPTPAAAAQVTRPAVSDLLRRHRIRRVTAEGVLATLQTPPLWVAPGTLEAVSEHIESLLPRVRLVHDQRARTLRRLEQVLESMAADQPGQPGEQRDVTILRSLPGVGRQVAATLLAEAAPLLAQRDYHALRTQGGIAPVTRQSGKRAYVDMRYGCNQRLRLALYHWGRVSVQVDDHSRQHYDRLRQRGHSHGRALRGVVDRLLAVLMAMLTHQTPYDPTRRHAASPA

SEQ ID NO: 103794 - protein, 316 aa, unidentified
MDQVSVGIDVSKATFVVAVTPTGERWATDTAPAAIDALIARLQALTPAVVVVEATGGYERALVAACAAAGVPVAVVNPRQVRAFAQALGHTAKTDAIDAAVLATFGARVQPAPRPLADAATQALAALMTRRRQLIEMIGMERRRLEQAPPTGRITRDLRTHIRWLERRVSDVDDEIGTTIQASPVWRVQEDLLRSVPGIGPITARTLLAELPELGTLDRRAIAALVGVAPMNCDSGQHRGQRHIWGGRRAVRATLYMAAVSAARHNARLAPFYRRLRTAGKPAKVALVATMRKLLTILNALLKHQSRWNADVAATV

SEQ ID NO: 103795 - protein, 372 aa, unidentified
MNNTTVYVGMDVHKESFTLCDYLIETEKASHTRRTPADYKEVLKYLEFLRTIYGNDTNFICGYEAGCLGYTLYHQLTDHNVNCVILAPTTMLEPRSGKRIKTDKRDAELIGKCLAQHNYSPVYVPTATDEETKEFLRMRDDHKLALKKVKQQILSFCLRHDYRYDGKNHWTAAHVNWLKSLKPEALYKEILDEYLLTYTTLSDKLERLDKRIEELASKDEYRESVKKLCCFIGVQTHTALSVLVEVGDFKRFASANQFASYIGLVPGEDSSGDDKARLGITKAGNRHVRQLLIESSQSYSRGQIGYKSKALKARQAGNTSKVIAYADKANERMRRKFYKMVLGKSKKHNVAKTAIARELACFMWGMMTDNIA

SEQ ID NO: 103796 - protein, 457 aa, unidentified
MQNKGYLGIDVSKGYADFLLLSNEGRVMEEGFQLHDNKDGRQKLKDLIGQWQQKGLKELYCGVESTGGYEDNWFHFLRPLSKEQPVFVCRINARGVKAVSDASLKRTITDSVSAENIASYLFKFPDKLDYGNSKVAVKEELKDGRQHTTYIKMLTKQKVQLNNQFEKLLYQHFSEIMIYCRNGIPIWLLNMLVKYPTAKMVQKAGIARLAAIKSISNEKAAAIIRKAKDSDQDVSAHIAHVMSATAKEILHKVSLIKEEKQYLIGLFKKTPEVLLISSIPGVGLDSAVAIALEIENIERFDTVKKLASFFGVHPTFKQSGDGMWGNHMSKKGRSEIRAVLYMTSMAAIRYNPLLKQLYARFRVKGMKHYQAIGVVMHKMLRIIYGMIKNKTEFSAETDAKNQAQATEKQKENEQKIKENNSINKQKKHRFQEATTEAPISRIAGQKIKKQIASQTSE

SEQ ID NO: 103797 - protein, 340 aa, unidentified
MNTTQVAVDLAKSVFQVAVSSTPGRVDEEHRLTRARFQRFFTEREPSEVLMEACGTAHHWGRELEALGHTVSLLPPADVRRYRDGNKTDRADTKALLEAARNEAIDAVPVKTLDQQTITALHRLRSGYMQTRTARINAVRGLLREFGITIPVGARHLVPRVRVAIEDGAVPTDLVPALEDALTEIEEIKRKSQGIERRLKGLAQHMPEAALLMSVPGIGVLTATALVAYVGDVRRFRSGRHFAAYLGLTPREHSSGLSRRIGRISKRGNRYLRMLLIHGARSVLRAAKLTEHPDGLRTWALGIAARSGYNTAAVALANKLARIAWRRWRDGQVFEVRITA

SEQ ID NO: 103798 - protein, 430 aa, unidentified
MPYRITGIDVHKKMLAVVVSDVEVEGEYHFERRRFGSNPEQLRSLAAWLLEQEVEEVVMESTAQYWKPVWEALERHWKPLRQKQEGASRRSGTLHLAQAQSNRGRRGRKRDFPDAERLVKRLVARELILSFVPDTEQRLWRTVTRRKYQLTRDRVRLQNQLESLLEEVHIKLSCLVSDLLGVSAQRMLKALADGETNPAALAALADRKLRATPEQLCDALGACTDLKPVYRRLLKMVLEQLQFLDQQIGQLDQEMAMLLHQHQDAVTRLAEVPGLGVDSAQQILAEVGPTAATFPSAKCLSSWVGACPGDDESAGVNYSHRSPKGNRHMRRVLNQTANAAARTKGSIFEIVYRRSVPRLGHNQTIGAIAHRQCQLIWLILHQGVRYEERGPAVTKQSKQRRTARMIRQLRALGYRIELPNPQHSSPPQEQ

SEQ ID NO: 103799 - protein, 346 aa, unidentified
MMIIGCDFHPSWQQIAWLDTETGDCGEQKLVHASGEARMFYQQLAAPVLIGMEATGNSQWFIELVEDLGHEIWIGDAAEIRASYVRKQKTDKRDAAHILKLMREGRFPRLWTPDREQRDLRQLVLHRHKLVEIRSRVKNELQHLSLNKGVQRKHKLWSQAGQKMLRELALKPWAACRREDLLGLLAVLNPQIGKLDGAVQQAAEENPQAKLLMTQPGVGPNTALAYVLTIGDVSRFRRGKQVASYVGLIPREESSGGRQKLGAITKQGNRMLRSLLVEAAQIAVQHDPGFRKQYLHRCHQKPKGVAKVAAARKLAVRLYWMLRTKVAYPEIVRIESSPRVPLVGAS

SEQ ID NO: 103800 - protein, 394 aa, unidentified
MFLVGIDIGKNKHSFCIIEKETGELIVKPKFFDNNNIGFEELISSIQNLSNQDILIGMEDTGHYHFALLKFLLDKKYQVALINPVTTNLTRKLQGGITKTDKLDTLTICDVLSSSQRVKSYRITKVDRFDMYEQKQLTREHHNLKEQLNVLKNRLQKSIDIVFPEFNSLFDSKYGTVYVNILKEFGSADAVARADIRTIRKCFDTKGKGRRIALTAEKLKEAAKNSIGFPSTAEVVQIKHLINQVKLIEEQISEIDKKIEEFSISNNSPILSIPGISHFSGTSILAELGDIHNYSKPSQIIKFAGVAPITYESSQFTAQHNAITKKGSKYLRKTLYQIITPVINNNEVFKTYYQLKLSQGKSHRCAQGHCVRKLMRVIFQLLSTNTQFDPVLLF

SEQ ID NO: 103801 - protein, 347 aa, unidentified
MDQYVGLDVSQDETHICVVDRDGNKIWEGNCPSTPEGIGEAVKRHAPEAVKIGLESGHLSTWHWHGLTDMGLPAICIDAYHAHGVLRLQMNKTDKNDAHGIAQIMRCNWYKEVTIKSFGNHESRALFRTRSNLVSMRTDVVNQIRGMLKTFGILIKGIAGVSFENRIQEIIDEGTAIAPPLQIQLDMLRMIKQKIDDLDELVLDHAYACQKCRILMSIPGVGPMTAANFVLAVYDADRFKQSKSVGAYFGLTPRRRQSGDMDYNGRISKRGDRVIRHQLYEAANSILTRVKKPSSLQAWGLRIAKRSGMKKARIAVARKLAVIMHQMLQTGELFCFNPATGERAVYA

SEQ ID NO: 103802 - protein, 411 aa, unidentified
MNPVIGLDVAKGESQVQAYLERKKPYKKSFKVKHDLDGLASLLDFIKELEDISGERPPLVMESTGHYHTPIVQYFEDKGYLIIIVNPLISYKAKSSSLRKVKTDIIDANHLCELYYKEDLEPYKKRGIQLANLRNLTRQHDNITGMFVQTKLQFQAVLDQVFPEYSNVFGDLYSDVSLKILHAFPTSEDILKANNEVLATKIKEFCNSPSLEWANKQAEKLMTAAAQNPFQKALYSSLALSLDMYINMLFEYKKHLSMLENEIDALSKSIEESKIIRSIPGIGEKIAATIVSEIGEIERFNHPKKLVAFAGLDPSVFESGTFKGTYNRITKRGSSRLRQALYMAVKCAIRDCRKQKTTDEILPRNKKLRAFYDKKREEGKPFRVAVIACANKLLHWIYALLKSKTSFQDLA

SEQ ID NO: 103803 - protein, 430 aa, unidentified
MKSNTQNAKIEAITEKTLVLGIDVGSETHYARAFDYRGIEYSKKPFKFSNTEAGFVTFKEWILDLKERHEKDKVVPGMEPTGHYWFNLGKFLQDNEMKPVLVNPHHVKKSKELDDNNPTKNDRKDPKVIAGLVREGRYMIPYLPDGVYADLRTASNIRFQLQSELTRIQNRISRWFNIYFPEYKTVYGKPDAKSGMLILKAAPLPEDILTLGIDGVNQIWRDAKLRAVGKARAKTLIEAAEHSVGSKEGAVSARMEIRMLLEDYESRNMRLQEVMVLIEELVKQIPMAEKLLEIKGVGIKTVSGFLAEVGDISRFNSPKELQKLAGLALVENSSGKHKGETTISRRGRKRLRYLLFEVAMSLVAKNPEFRELHNYYTARRLNPLKKMQSLMAIAAKLIRVFFAMLTKGVDYDPKKMVSDIKRPAVYLQAA

SEQ ID NO: 103804 - protein, 371 aa, unidentified
MSSQENSTYVGMDVHKAAINVAVVNEGRSGFKAEWQIANETRAVRQMIKKLTRMAPGEVKAAYEAGPCGYTIQRQMRKEGIDCVVVAPSLIPVKPGEHIKTDRRDARKLAVLLHAGMLTDVHPPTLEDEAVRDLTRSREDTKQDQMRARHRLAKMLLRHGFVFNDGKNWTKQHHRWLKQVRFGEEISQRVFDSYLLVVEQVEERLKSIDEQLEVVAKGGRYRERVGWLRCLRGVDTVTAMTILAELHDFQRFTNPRELMSFLGLTPSEHTSASRVRRGSVTKAGNSHVRRMLVEAAWNYRYRPSVSVYKRRLREGQPTRVLAIADRAQERLYRRYFKLREGYRKPNNVVAVAIARELVGFIWAVLQHREAA

SEQ ID NO: 103805 - protein, 349 aa, unidentified
MNFYQGQHAFYCGVDLHARTLYLCIFSQAGDKLLHREVAAEPVTFLEAIAPYRAGLVVAAECMFAWYWLADLCAQENIPFVLGHALYMKAIHGGKSKNDRIDSEKIATLLRGGTLPVAYVYPKGLRETRDLLRRRMHLVHRRAEAITHVVNTNSQYNLPPFGKKLIYAKNREALKIAQRFADPSVRKNVEADLAVIDRHDEVIAELELYLERTVKVEDGQTYYLLRTIPGVGKILALVLLYEIHDIRRFADVGNFLSYARLIRPDHESAGKKCGFGQKKIGNAHLRWALGEAVALVVRDSDQAKKWLARRQKKSGKGKAMGILAAKLGRAIYWMLRRKEAFDPKCFWQS

SEQ ID NO: 103806 - protein, 343 aa, unidentified
MNITTTGLDLAKSVFHVVCFNNQFKEVKKRMLRRSQVLHFFTQLPSCRVAMEACASSHYWGRELRALGHDVKLIPPQHVKPYLRGNKNDYNDARAIAEASTRPGMPFVAIKSTEEQDMQAIHRMRSQCIRDRTALSNSTRGLLGEFGIALPKGLATLRQSIHGILEDADNGLSDRFRKLLARRYDQFVALDDHIAFYTNELEILSQQDDACQRLQTIPGFGPVISSAFRSVIGDGRAYDRGRDASASLGLVPRQHSSGGKNVLLGISKRGDRYLRSQLVHGARAVVIQAARKDDPLSKWINRIREERGWNKAVVATANKMARIGWAILRHNTIYQPDSEQSIH

SEQ ID NO: 103807 - protein, 365 aa, unidentified
MKKSSKKRVSSKTMGEGVAAIGLDLSDRTGRYYAIDDEGLRIEEGTVRLRSAELQRWAMGIAKTVIAIEAGTHSPWISRLLSGCGHEVIVANPVKVTLITQNVNKTDPVDAEYLARLARFDRDLLFPIQHRGEQAQIDLQLIRTRNMAVQVRTKLIGHVRGAIKSFGERLPKCSTEAFVNTTRELIPEALRETLRPIYVQIDQLTKTIHGYDRQVQRLVEQRYPEVDRLTQIKGVGALTGLAFVLVLEDAQRFGKSRSVGAFLGLTSRKDQSGESDPQRGITKAGDRLLRMLLMQSAQYILGHFGDDCDLRRHGERIAARGGKRAKKRATVAVARKLSVLLHRLWVSGETYEALRNSGAGMELAA

SEQ ID NO: 103808 - protein, 364 aa, unidentified
MMDDTRAPMSDATTVLALDLGKFKSVACVYEPASGTHRFETIATSPSAVHDLLVEIAPARLVIEACSIAGWVADLARTLGIDLQVANVTAEAWKWQRVKRKTDRDDALKLAKMSTMNQLPTVHIPEPAVRQHRALIKYRHALVDRRTGIKNTIRSLLDSQGLSWPARSRGWTIAALKQLWALSRPLAECDALNLWRGELHLELRLLEQVGVLIAEADRKLDALSAKDTRVLKLKTITGVGNRLAELVVSTIDDAHRFKNGRQVSAYAGLVPKQYQSGTMNHHGRITGHGPGLLRRMLVQVAWGMQRREGRGKAVFEQLCHGSRSRRKRAVVALARKILVWCWAMLRDGSVWDPNRATLASPAIT

SEQ ID NO: 103809 - protein, 398 aa, unidentified
MNTTICGLDVASTSARAALLDGQGVIVHELDLPATRAGEDHLLGLLPPGSVVIMESTGRYHLRWARRLVAAGHDVYVLNALLAKRLATSANALREYKSDPLDARHLAHVGRLHRETIRTYRFQENPARQRLRELCQVRTTQRRILTEVLAVAHHYLGLLLPEAQSLELHFAQNKAAVRLFLSVDSLERLRGLRLSTLEKHLGAKAAAFHALLRTPLNAAALFEAYLPALHAQLRLIEALHDLLAQLALDIRQAARDSGRWRHIQLAETLPGFGEKSTPAIIACLPDGWEQWGDKRTTANKLQAYFGCDPRVRTSGKWQGRVKMTKRGHELARTALFQAAFCALRVDADLHATYQKQIAAGKHHKVAISHVMRRQLRRLVAVLKDNTPYVPNQSLAHAA

SEQ ID NO: 103810 - protein, 343 aa, unidentified
MKIKRIGVDLAKNVFQLHGVDYREQVVLQRRLKRANWLKVLLDKAEPGCEIGMEACSGAHHWGRLLQSKGDRVKLIAPQFVKPYVKSNKNDANDAEAICEAMSRPSMRFVEVKSVEQQDIQATHRVRSELITHRTAKGNQIRGLVAEYGLVAPQQMQTLRMAIAQWLEDGDNGLTGRFRVLLNGLWTDLKALDDRIGELDHEIKLIALNHPVAVRLQTLRGVGPMIATALIAAVGNGQQFVNGRQMAASLGLTPRQHSSGNKERLLGITKRGDSYLRSLLIHGGRSVVYAARNKEDRLSQWVTGLAVRRHTNVAAVALANKTVRMAWAMLRDGTEYEPDRVAA

SEQ ID NO: 103811 - protein, 355 aa, unidentified
MPNKNKKSARPEHLSCTKQCLGLDVSKDKLEACVSRMCSDQSVKIQGTREFSNTPQGWKAVALWANRFRKDAAIPFVVVLEATGVYHEGVAHHLKEGGFAVIVTLPNKSKNYARSLNVKTKTDSVDAQVLARMGLERKMDIWHGPSGTLRTLKRLVRERDALLEHKTAVANQLHATCHEHQANRHTIQRRGQLIAFVSKQIAAVEAQIAQVLNEDANLKERIDNVCTIKGVGVLTAVCVVAEANGFDLIENKSQLTSYAGYDVTERTSGSSLRGKARISKKGNSHIRKALHFPALTASRHEPKLKNLYDRVLERNPKVRMIGAVAVQRKLLVLIYTLYKTNKPFDNMYEEKKAAA

SEQ ID NO: 103812 - protein, 355 aa, unidentified
MGTISLGVDLAKCIFSVCEMDGIGRVLRRREFRRDAFATYLAQLPAGTVVAMEACSGAHHWARRCREYGLVPRLIAAQFVRPFRKNPVAKNDPNDAEAIATAARQGNMRFVPVKDIDQQARLSWHRVREGYKAEHLAIGNRLRGLLAEFGIVVPNRDAALHRVLGDLDAYSELPGELKELLRSLAEHWMQVHAAMAACDVRIERHARQDPRCVRLRAVVGVGPLTADAMVASIGNAREFKNGRQLAAWLGLVPTQHSRGGHARLGAISCRGDGYLRTLLIQGARSSLERAKRVGLDKATPEQVWIRSLACRMPFGKVIVAIANKHARQLWAMLAHDLDYDPVACAKHPMQQRAAA

SEQ ID NO: 103813 - protein, 400 aa, unidentified
MKDFNAESVTQDTHTAVHLLQAQSAERLYPAYIGLDVHKETIAWAIAREGRTEPEYRGEIANRPKAVEKLVARLNKEFDGEVLLWCYEAGPCGYVLHRQLLGLGQDCQVVAPSKIPKQPGERVKTDRRDAIKLALLLRSGTLTAVWIPDSEQEAMRDLTRARGDMKVQERKAKQQLNAFLLRNGHPWPANKKRWSSIHFNWLESLRFEQPHQQVVLQEYVNAVKAATQRVTDINKLMEQALPEWSMAPVVASLRALRGIDTLAAMILLSELGDISRFESPRQLMSFLGLVPSEHSSGPSRRQGGITRTGNTHARRILVESSWTYRFPARQTPHLKRKAADASDEAKAIGWKAQKRLCGRYRTLSQSGKNTKVVCVAVARELVGFIWDIVCQEMPKVAAAQ

SEQ ID NO: 103814 - protein, 356 aa, unidentified
MSKSITMFSGQTIGLDLGDKSTEAFVLDEAGEVVETFRVRTTKAALGRALGRYERSRVVLEVGTHSPWISRLVRELGHETIVANPRRVRLIAENDSKTDRMDAELLARLGRVDATLLSPVVHRGESAQRDLVLVRARDGLVRARSQLVNQVRGFAKSLGERCPSSSTEAFPARVRKALPEDLFPGLGTMLAMIEQLTAEIRSMDREVERLCKERYPETAVLRQVKGVGPITALCFVLTLEDPHRFAKSRSVGAYLGLRPRQRESGDQRPQLRITKAGDGLLRRLLVTSAHYVLGPFGPDTDLRRFGLKLAERGGTAAKKRAVVAVARRLAVLLHRLWLTGEEYQALGYAAGVAKAA

SEQ ID NO: 103815 - protein, 425 aa, unidentified
MSIGERPLGDCTALSLRTSNEHIADWSPFLGHDSRILGFLLLHARCFVGQRKYKLILSNNMQTVNRSRTLFVGVDVHKDTHTAVGLTPFGEKVFEMKIGNEAEDFISLVEKTKVEAEKSGLVPSFGLEDVHSWGERLSLFLVEEGLPVAAVAPILVDHRRQKTTHPEKNDSLDAQGVAQVMIQRIDSLPLYKLTEEAKKAKQIRELSLEREWLVKERSRLKNQLHILLHRIHNTGYRTKFKDPFSKKALRSWMRSVPKNTDAILAQRMKRAVRRLLDLREEIQEIEEELEAMMKENQQTLSTASGCGVVISAEIIGEIGDVSRFHSPGALAKYAGCAPREHSSGKTIRWRKTRSGNRRLNRSFHRMALSQISRSGNDAARAYFKRKISEGKTKAQALVCLRRQLVNVVWMMMKHRTEYVYPQKIY

SEQ ID NO: 103816 - protein, 359 aa, unidentified
MTATMTYVGLDVHARSTHAAAIDVASGELRRARFGGGSEQVIAWLQALPQPLSGCYEAGPTGFALYRAAEVAGLRLDVVAPSKTPRAPGDRIKSDRKDAELLARLLLAGQLKPVAVPPPPFEAARHLARAREQVRGDLMRCRHRVSKLLLLHGRVYQGSAWTKTHRRWLEAQRFEQAATELAYLETLAAVDGLVARKSALDERLSRLAREGDWWPTVARLRCFRGIDTLSAFVLCLEVGDWTRFSRPAKLASWLGLVPSLDQSGESRRQGAITKTGSGYARRLLVEAAWHYLPRPSVGPALAERRAGQPDHVIQIALRAQRRLHRLYQRLRARGKPGNVTTVAVARELACFLWAAAVAE

SEQ ID NO: 103817 - protein, 435 aa, unidentified
MKVKQVSVFRERGLRAGVSRRAEPQCLVANLNTERKTDTMKNYILLKSEPVQSQMSTSTGGAESSVLFIGLDVHNDSIAVSIAPSDRTEVRRYGIIGGEHDDVLKLVKKLQAAHPGATLKFCYEAGPRGFALCRCLRSHGLDCILVCPSKVPRKPGERVKTDRRDADQLARLFRAGELTGLYVPEPADEAMRDLIRARYQVGKAQHRARQQLKMYLLRHNIRYGGQTSWTPAHLRYLAQIKMPFPVQQIVFQEMLDVITEATVRLERYDREIERAVPGWRWEPVVRALMALRGLALLHAATLVAELGDFHRFDQPGPLMNYLGLVPSEHTTGSDRQQGGITRMGNGPARRVLVEAAWQYCVPARISPHLKKRQAGLPKAITDIAWKAQLRLSHRYQHLTRVGRKKSQVAVTAVARELSGFVWAIARQIQPRDAKP

SEQ ID NO: 103818 - protein, 417 aa, unidentified
MSNPLIVGIDVHSRTNRTCLLDREGEPWGKRVSTANNRPGTQTLIGRLVEALQQGQFDSLRVALEATNWYWFPLYQALSQDPALAPWPQTFYPFNPRVTARYKDSFSDKDKSDDSDAYIVADRLRTYNRQELPAPFAPDLRYLSLRFLTRYRYHLVKDLVREKNYCMSLLYLKANEYREAHPFADVFGATSQAVIEEFASCEEVAAMPLAELAVWLDTQGKGRFPDPAKVARELQQVAQDAYPLDPQLQQPINYVLTWSLALVNFVEHQVQRVNTAIAAAMRDIPHTLDTIPGFGPVYSAGIIAEIGHAERFDHDEAKVAQYAGLHWRKHESADFKAEDTRLTKRGDAYLRYYFCEAANAVRMRDAEYAAYYTRKHDEVRTHQHKRAVTLTARKLVRLVVRLLTTNQPYQPRRQSSA

SEQ ID NO: 103819 - protein, 403 aa, unidentified
MNMNAVGIDVSKGKSMVAILRSYGEIISKPFEVKHTVSGIRSLIEQIQSIDGESRIVMEHTGRYYEPLVRELSKADLFVSAINPKLIKDFGDNSLRKVKSDKADAVKIARYTLDSWTELRQYSLMDEIRNQLKTMNRQFDFYMKHKTAMKNNLISILDQTYPGANTYFDSPAREDGSQKWVDFSATYWHVDCVRKLSLNAFIDHYQKWCKRRKYNFSRSKAVEIYEASKELVSILPKDNLTKLIIKQAVEQLNTASQTVEQLRTMMNEAASKLPEYPVVMAMKGVGKSLGPQLMAEIGDVSRFTHKGAITAFAGVDPGVNESGSYEQKSVPASKRGSSTLRKTLFQVMDVLIKTKPQDDPVYLFMDKKRAQGKPYYVYMTAGANKFLRIYYGRVKEYLSSLPE

SEQ ID NO: 103820 - protein, 391 aa, unidentified
MVCVGIDVAKDKHDCCILDSDGMVRADCFTIPNNMDGFKQLLQTIRNCTKKSDKIKVGLEATGHYSYNILGFLLDNGLPTYVINPLHTNLYRKSLSLRKTKTDRVDARTIATMLLSDVDLKSYTDTAYHNEELKSLTRYRFDKVQERAKLKQSVSRLVTILFPELEQLVSSIHGTSIYALLSEYPGAKQISEAHLTRLANILVTTSRGHYRKDRATHIRDAARTSIGSVMPAKSLELKHTIKLIQELTSEINEIEDAIRKIMDELKPPILSIPGMGFYSAAMILAEVGDFSNFNSPDKVLAYAGCSPSTYQSGKLTNCYAHMEKRGSRYLRYALYTATKYVCYWNPVFTEYLTKKQAEGKHYNVALSHATKKLVRLIYALQKSGKAYLAIT

SEQ ID NO: 103821 - protein, 417 aa, unidentified
MLKIVHRICCGIDVHKKFVVATIGKTNEAGTTDYETREFSTFTENLVQLRDWLVSSKCKEVCMESTGKYWIPIFNILETNCNVFVANPKYVRGIRGKKTDKRDSVWLCDLHKHGLVQNSFIPPWRIRQIRDLMRYRYKLTNFQSSEKNRMQNSLTVSNIMLSSVVTDTFGKSSMRIVNHLLENPEDTSFDVAPLMHKGMKATAEEISKSIQGTLTKPQAEKISVCLSHLDDINKYQAIIESAVLELAEPYMGQIKLLLTVPGIKDIYTAIGIIGEIGVDMSVFLSSRHICSWAGVVPANNESAGKKKSVRCARAGTYIKPLLVQCAHAAVKSKECPYFRIRFEQISRRRGKKRAIIAVAHMLLNCIYHMISRNESFNYDLYRIDNAPKPRSAPEITKEQAIALLESLGAQVIIPTDT

SEQ ID NO: 103822 - protein, 343 aa, unidentified
MDHFAGLDVSVKETSVCIVDDTGRIVREVKVASEPEALLQVLTTPAYHFKRIGLEAGPLSQWLFSALAEMGLPVICVETRHMRAVLKAQINKTDRNDARGIAQMMRAGLYRPVHVKTLRSQKLRMLLTHRKLLQSKAIAIENDLRATLRNFGLKVGVVGATKFESRIRELVENLPDLVVLVEPLLIVRRVLHEQLDILHRRLLAVVRNDDVCRRLMTIPGVGPVVALTYRVTVDVPARFKNSKAVGVAFGLTPARYQSGESDRTGGISRCGDEMMRMMLYEAAQTMLVVSTKWSWLKAWAMKIVKNRGMKKAIVALARRLAVIMHRIWIDGTEFRWTKEVAAA

SEQ ID NO: 103823 - protein, 331 aa, unidentified
MYICVMDLDGNILVHRNIKHNDFSFFLKLVEPYRQDLTVTCESCFVCFWLADACEDAGINFVLAHAYYVKSIAGNKHKNDKEDAKELAECLRTNRIPPAYVCPRDLRPVRRLLRRRNKYVKNRSELSGHSTCEVMAAGHQPLNISANSKERWREGIRSSFDHPVDSFTAEAELFMVESYDRIIMQMEQRIEKHARDFKHQDYRLLRTVPGIGKILALTILYETIDIKRFPSEKDYVSYSRLVCGTNESGGKDFGGKGRKMGNPYLKWAFMQAAILCKRADPQLNAYHSKLERQKGKHTANAILAAKFARAVYFMLDRKTGFSREMLMKGRR

SEQ ID NO: 103824 - protein, 411 aa, unidentified
MTRLFCGIDWAESHHDIALVDHGGDQVAKLRISDDYPGLCALLELLARHGDSPDAPIPVAIETPRGLLVAALRATGRKVYAINPLAAARYRDRGSVSRAKSDAADARILANILRTDIKAHRPLPADSELGQAVAVLARAHQDAIWDKGQLVNRLRSHLREYFPAALLAFHGSGKLGLDSAYARAILTSAPTPAAAAKLTRGQLRALLNRAGRLRRSVDEEVERLRELFRSEQMRQLPLVEKAMGNQTTALLRQLDAACTSSDVPSNATEEAFLSHPDAQIITSMPGLSVMSGARVLAEIGDDPTRFADARAVKAYAGAAPVTRASGRSHIVVARTVKNRRLAAVGYMWAFAALRSSEPRAHYDRRRDGGERHTPALRNLFNKLLGCLYHCLRNRTLYDAEKAFPERLTLAA

SEQ ID NO: 103825 - protein, 343 aa, unidentified
MKIIRVGVDLAKNVFQVHGVDRNEKAVWRRKLNREEWLKVLLERIEPGCEIGMEACGGAHHWARKLEAHGFTVKLIAPQFVKPYVKSNKNDANDAEAICEAMSRPSMRFVSIKTVEQQDIQAVHRIRAGLMEQRIAKANQIRGLVSEYGLVAPKEIAHLRAAIPCWLEDAENGLSSRFRRLLNGLWQDLLLLSDRIAELDQEITVIAASDPVAKRLQQLRGVGPMIATALLATVGDATQFANGRQMAASLGLTPKQNSSGGKDRLLGISKRGDSYVRCLLVHGARSMIRTAKDKDDRLSQWVMRIATVRHPNIAAVALANKTARIAWAMIVHGSDYQPGLVTA

SEQ ID NO: 103826 - protein, 440 aa, unidentified
MNQEDRSRLEEFRQFRKEVRGSTEYLLVGIDVAKDKHYAFFGTAAGKTLFRRLVFENSIEGFRKLLGQAEAMKVQEGLTKVVFGMEPTGNYHKPLGEHLIRCGHGVVLVSGVAAHENRKTLDGRWDTNDSRDAANVADLMSQGKCLFYEFPVGVLQDLRNLLSLKRRLKRMEHGHRVRIRNHLVAKYFPELDRYYDQSESTALAIVRWCLDPSEIAGLEYKRFVQMVSSVRGRSSQEKRLQTIWKMAVDSVGCEAGPTVEFEAQVMVEGLKQIRESIRQIDEKIQEICSQFPEYEFLLSIPGFGPDVSAKVLGAIGDPFRFQNGRQVLKMAGLDLSAERSGKGSERVVPVISKKGKADLRYALYQAALIASIRDRHFMVYFTHQLSGREREPGIKTKMRVKLAAKLLIIAWTLMKKKEPFDPSHLRVESQSSFAAAGRES

SEQ ID NO: 103827 - protein, 350 aa, unidentified
MNVNHYIGFDVHKKSVSYCVKLADGQIVEESRLRATHDALRQWAGKRPEPWHGAMEATLFSGWIYDTLKPFAAELQMGHPALMKAIGASKKKNDKLDARKIADLVRCNLLPACYVASAEIRELRRMLRYRTLVVGQATRMKNKVSGLLMEVGAEYNKQQLHGKQYFTELLDTLEEVPESVKDLLRLSRGALETFETTQEQLVVRLQKEPLLAQRVLLLKSIRGVGPVTSLTWILEVGDPQRFSSVAHAVSYCGLTSALDSSADKQQRGPISKQRNAHLQTVLIEAAKLAPRWNPQLAAVHAREVERGNRNRATLAVARKLVAYLLAVDKSGQPFQPRTPLAAETEVEKVA

SEQ ID NO: 103828 - protein, 317 aa, unidentified
MSKSSTVVAGIDVAKAHLDIAIHGCKQSWQVANMAEGFGKLVRLMRQHQVSRIGLEATGGYEHGVVEHLRAAGFSVVVLQPKQVRAYAEINLRRAKTDRIDAALIAAFVSEHGAVRETPDPRLTALAERLTYLEQIEEDMARIKVRLEHVRDPDLRQSWTDDLARLKQRRATIIARLLTLLRHHQDLASRLDLLLSIEGIGPRTAIALLIRMPELGRISRGQAAALAGLAPFNNDSGKRSRPRSIAGGRTRLRTSIYAAALPAAFRWNAALVRLYNRLKTAGKPHKLALVACARKLLTFANTVLARGTPWIKAPAPV

SEQ ID NO: 103829 - protein, 353 aa, unidentified
MNNKKYVGMDVHQATISVAVRDSSGKLIMESVIETKAATILEFIRGLNGSLSVTFEEGTGTSWLYDLLKPQVTELIVCDPEERFAERRQQDKVDARKLSELLRAGMLSPVYRGEQGVRTLKELARSYLTLTKDLTRVMNRIKGLYRSWGIRCAGRDVYTASHRDDWLAKLSEAGVRRRADRLYQQLDHLRPLRQQARKELVAESHNHPACKLLCEVPWLGPIRVALVIALMQTPHRFRTKRQLWMYSGLALETRVSGEYRFAGGELQRSKKRATPRGLNENHNHDLKNVFKSAATRASTSAGPFQDFYTGLLAKSMKPSMARLTLARKIAAITLVVWKKGARFDATQLKSQAA

SEQ ID NO: 103830 - protein, 396 aa, unidentified
MPATTRHARVPALPESTTGQARLLYLALDLGERHWTLALTVGRGQRPRVRTIPAGDLERLTTELAAARRRFGLPPEARVVSCYEAGRDGFWLHRALLASGVTNVVVDAASIEVPRCARRAKTDRLDARKLVTMLVRYIEGERPVWHVVHVPSEADEDRRHLERERETLVADQTGLVNRIQGLLATQGVRLALRGDVPAQLAAVRRWDGTPLPPELCARLEREWMRVEAVRTALRALTTARHRRVTTPTPPAADTAAVHLTRRLAALGAVGETTAWLLATEMFSWREFRNRRQVGGFVGLTGTPDQSGDRIREQGLTRNGSVELRARVIELAWGWLRYQPASALSQWYRQRYGGGNARLRRIGIVAVARRLLIALWRYAMGGPPPAGAHRKDDAVAA

SEQ ID NO: 103831 - protein, 310 aa, unidentified
MDKVIVGVDVSKDQLDVFVLPSKQSFAVSRDDAGMDDLVDRLKALLPSLVVMEATGGYEAVVAAKLGGAGLPLVVVNPRRIRDYAKSLGRFAKTDRIDAETIALYGEGAKLEPRPIPDEAAVELGELVARRRQILETMGVERNRRRMLTKKRLLKGVDRILAALQKELSDVEHDIDDIIKNSPVWRDKDELLQSVPGVGPKVASLIIAELPELGSLTRRKIASLAGVAPFADDSGKHRGQRHIRGGRGPVRSALYMAALVGSRHNPVLAAFYSRLIAKGKTAKQALTACMRKLLVILNAIIRDNRPWQTA

SEQ ID NO: 103832 - protein, 400 aa, unidentified
MDKDRIVAGLDVHKDTIYLCVMDNTEAVIFAKVYGTLTPDLELVCSEMVSHGVTEAAMESTSTYWVPVWNALCESMSLKLVNPYFIKQLPGRKSDVKDAQWIAECLLKNLIRGSFVPDKTVQDMRKYNRRIFDLNEDLTYNSNKQDAALQRCGFRLSNYVSRVNGKSYQKCVRAIITGITDPEELVKLIHGKTLRKYGRNIIKDAVTGDFHQADICLLKQYAELIGVIERQIEECRNALISMCQEHFPKQFKRLQSIPGVKERAASAIIAETGADMKPFEKATNLVGWCGLKPRNDISNNKVKSNRTTHGNRFLRQILIEISWVASRTRKCFFSNFSYVQCTQRHKNKMKIQVAIARKLLVAVWHMLTKDEDFIDVYLKRLEKQAEWQNDLQALESLLVG

SEQ ID NO: 103833 - protein, 384 aa, unidentified
MDVHTSNYTLCSLDPGYGVEKDNYFAEVQFTNDFIKNVVNYVSNLKKKLKDCEFVCGYEAGCLGYSTYKDLTKVGIKCVLMAPSTMAVQKGGKKVKNDRRDARVIAQCLAYQTYKEVYVLSEHDEAVRGYLRMRDSHNKALKRIKQQIIAFCTGHGLFSPTKSNWTVAHLKWLKDLKFNDPVEQEILNEYLSSLTFLSDKIKAMDVRIEELASEKQYCENVKKLRCIKGIETNVALTLLAEIGDFNRFSKPTDFASYLGLIPGEQSSGDKVRGTGITKAGNSTLRRKLTESAKGYWRGRIGIKSATFKKLEKELPKEVTEYALKANTRLQRKFFNMTHVKGKNMNVAASACAREMACFVWGLITNHYDKAPAVPKTDEELLDLN

SEQ ID NO: 103834 - protein, 424 aa, unidentified
MVQDEDSSLKEFRQLKSEIRESRDYLVVGIDVAKERHYAFFGTAAGKTLLRKLVFDNTDEGFKKLLLHAALLKARHALGKAVFGLEPTGDYHKPLGEYLITHGHTVVLVGGSAVKRNRELLNGRWDRNDTKDAANVADLIIQGKCLFYEHPSPFVRELRSLLSWKRKLKKLEHACMVRLRNHLVAQYFPELDPYYRCSEGPAIVRWCFDPHEIASLPFSAFARLVSSRSGGEQQKMRLSEIHTKAARSIGCALTPAASFEAEHLLTTIAHVKTMITEIDLAIETVCKRFPEYPCLLSIPGFGPDVSAKVLGAIGNPHRFDNGRQVLRTAGLDLSGDKSDKRNATPMVISKRGKADLRYALYQAALVASTGNHRFIQYFTSKLAGREKEKGIGTKMRVKLAAKLLIIAWTLMKKRGVFNPGCIKS

SEQ ID NO: 103835 - protein, 349 aa, unidentified
MDSMSLTGRDVIGGVDTHQDLHTAAVVDAAGEVLATQAFATTRAGYRAMLAWFRSYGELARVGVEATGTYGAGIARHLAAAGIPVLEVTGPDRAARRGRGKDDRLDATAAARAALTGQRVQVAKDRSGAIEALRVLRTTRKTAVRCRRATLQQLHNTIVAAPDELREQLRHLTRMRLLRTCAAWRPDLVAYRDPAVATKIALRSLARRVLDLGDEIADLERLIAPLVAELAPGLLALPGVGTQNAGELLVTAGQNPERLRSEAGFAMLCGACPIPASSGKTTRHRLNRGGNRQANSALHMIVVCRMRRDPRTKAYVSRRSAEGLGKREIMRCLKRYVAREVYHVLVPST

SEQ ID NO: 103836 - protein, 369 aa, unidentified
MVENTLFLGLDVHKKTISVATVDGSARAEVRFYGTIENTPDAIRLLCKKLSKEGRRVHACYEAGPCGYNVQRHLTRLGHRCDVVAPSRIPRKAGDKVKTDRRDAMTLAQTLRAGQLTEVWVPDQAHEAMRDLVRLRSQAMRDLRKTRQHLLSFLLRHERISPFGHWTKMHRRWLGELKFAHPAQHLALEEMLHRIERAEELCERLKQAIGELVPQWSLAPVVQALQALRGISLITAAVLVAEIGSFERFDNPRQLMAYLGLNPSEHSSGATVRRGAITKTGNGLARTSLVEAAWTYRFPARITQIIRDRLKALPEPIRAVAWKAQVRLSARYRALIARGKSAPIAIVAVARELVGFIWAIARMVEPKFT

SEQ ID NO: 103837 - protein, 350 aa, unidentified
MLIIGADYHPGFQQIAYVDTETGELQERRLQHREEAEKFYREFAAQGKKVRVGMEASGHARWFERLLGELQFELWIGDAAVIGTKRVRRQKTDRQDAQLILKLMLKDDFPRIWVASWENRDVRQLLWHRHRMVQARTRIMNQLQAVALNEGLRTKKRLWREAGREQLLAIRLAPWASRRRQDLLELLDQLNPSIAKLTEAVEQEVEKCPEAQRLMTHPGVGPLTALAFVLVIGTAERFGCGKQIASYLGLVPSEDSSGERRRLGHISKQGNSLLRFLLVEAAQVTVRSNQEWRSKFFHLAMRRGRKIAKVAMARKLAIRLYWMWRKKWNYEQLTKFGPHAGQPGNPHGVE

SEQ ID NO: 103838 - protein, 384 aa, unidentified
MTQHHDGAPVGGHSGTILVVFELSKSKWRLGIILPGSEKMSRYMVDGGDTGSVARLLAKARAAAERQGLAGVRVVSAYEAGFDGFWLHRWLASEGVENRVLDPASIEVNRRKRRAKSDKIDLAQLMRVLAALERGEPRVCSVARPPSVAEEDAKRRTRERTRLVRERIGHTNRIKGLLHGQGVRDVEPMRSGFTASLSGLRTGDGHALELRLIGEIEREHERLRVVLAQIAASEAQSRQALKTAEAGTNAAQVAQLVRLRGIAFRSAEPLVDEAFYRRFVNRREVGGYFGLGGTPYDSGASRREQGISKAGNPKARAVAVELAWLWLRHQPESELSQWFFKRVGDVKGRNRRIAIVALARKLMVALWRYLETGLVPEGAVLSEV

SEQ ID NO: 103839 - protein, 390 aa, unidentified
MIDCYNQKLGEITFPNRPADFPKLVAKVKKCNTDGKTIVFGLENAYGYGRALAVWLIDKGYLVKDVNTAISHRQAKHRGAMYRKSDSDDAEAIALATLNMLDKLPDAYPNDAYWSLGQLVHRRDNIMKQRTRLVNQLHEQLCIAYPSYKQFFNDISRPTALYFWEHYPSRKYLKGKSVEDLRAELVPVSHNKCSTRTCEKILDAIAGDKVKNNAYQDARDMVTLSIVSDLQHYDKQLAEVDKMLEQMYKMLGCTLTTIPGVNVITAVKILAEIGDIKRFSNANKLAQFAGIAPLHLSSSGKGKDLATKQGNRRLQATIYFLAIQMVQISSKGTPRNPVVRAYYEKRKAEGKTSQQALICISRRLISIIYGMLKSGTEYRMPVMENTGETV

SEQ ID NO: 103840 - protein, 356 aa, unidentified
MNQLASSRRDSGEPEQLSGQCKPVSCKEGPKRREKEMEKERVYVGIDVAKASMDAAEYPSRRQWSFTNDEKGISQTVGRLRELSPALVVMEATGDVELPLVAALAVAGLPIVVVNPRQIRDFARAMGRLSKTDAIDAQVIAYFAATVQPKPRPLPDIQTQELSAILARRRQVIEMIVAEGNRLGVASKAVREGIQDHIAWLQRELANIDNNLTQSIRESPVWREKDELLRSVPGIGPVVSATLLGDLPELGTLNRKQIAALVGVAPLNRDSGIFRGKRSAWGGRAKVRAVLYMATLTATRYNAVIRGFYQRLCGAGKEKKVALVACMRKLLTILNAMIKSGAPWRCVSAPVFGPCS

SEQ ID NO: 103841 - protein, 342 aa, unidentified
MEVSTIGLDIAKSVFQVHGVDGSGATVMRRQLRRRQLLGFFAKQPPCLVGMEACATAHHWAREIGALGHEVRLMPPHYVKPYVKRNKNDAADAEAICEAVTRPTMRFVAVKSTEQQGVLMLHRTRELLVRQRTMLVNAIRAHMAEFGIVARVGLPQVKALLAVIADEEDGRLPPLARTCLAGLAAQLMSLEREIAAAERRIHAWHRANEASRRLETIPGIGPITASALAASIADPSVFKNGRELAAWIGLVPRQSSTGGKERMGRISKQGDHYLRWLLVAGSMTVIRHAKRRGTANPWLAELIAGKPTKVAAVALANKMARMAWALLSHGGTYQEPVVAANS

SEQ ID NO: 103842 - protein, 338 aa, unidentified
MTIHIGVDLHQRFCYMTAVNASGEKLRQAQVANDGAALRAWLQPLPAPRQVVVEASGFWPAFARAVAPETERLVMVHPQRVKAIAAARLKNDRVDSETLAHLSRADLLPEAWMADAGTQQLRMRVRLRIALGQQRARAKNQLQAVLHQEGFIKPVTDVFGKRGRAWLAGIDLSLAARTVVATWLGEVDYLDGLIAAGTRELEQLAAADARARWLQSVPGIGAYSAMVILAEVGEIGRFQNKRALASYAGLTPVVRESAGKRKRGGIGHHGSQTLRWIMLQVAQVAARYCPAAKAYYARLRRRKPAQVAKIALAHKLLTAVWALLRHGVCFDESVFARG

SEQ ID NO: 103843 - protein, 344 aa, unidentified
MKIAVLGIDLGKNVCSVVGLDPSGAVVLRRRVRRDTLIDLVAKLPSCIVGMEACCGAHHLGRLFAAQGHDIRLMSPEYVRPYVKAQKNDDRDAEGIAEAATRPTMRFVEMKTEDQLDMQTLHRSRERLVGERTALINQLRAILLDRGIVVPQAKRKLEQYLVILMNEHGGEGLSARMRMLVADIRAQWQELDRRIGEFDAEFVRWAKENEDARRLVTIPGVGVTISTALIAAVGKAETFEHGRDLAAWLGLVPRQWTTGGKPRLMGISKRGNKYLRKLLIHGTRAALPYVAEKDTALGRWAKSLLSRVHQNVAVVAFANKLARICWAVLRNGQRFAAKGAPLAV

SEQ ID NO: 103844 - protein, 399 aa, unidentified
MECRNTPAERPRPAPGQALSRSLVALDQNSTIIAVIEMSQSSWLVAGMLPGIERQARKKLDPSPERLLALLHRWQDEAVRAGRTITRIALAFEAGRDGFWLARWLEARGVEAHVIHASSVTVSREHRRAKTDRLDTELLKRGFLGWLRGERGHCSMARVPTIAEEDGKRPNRERDCLVGERTRIVNRIKSTLARLGIRNFKPTLRKAAERLATVHTPEGVPLPPNTLAELQRDMARLGFVVSQIREIEQARQKRLEQQPESGPHAMVRLLARIVGVGVETADLLVHELLSRPMRDRRAVARYAGLTGSPDESGARRREQGLARAGNARVRRGMIQLAWRFLMFQKESALALWYRARTADSRIGTRKTMIVALARKLIIALWRFVTTGEPLEGVVLRPAS

SEQ ID NO: 103845 - protein, 341 aa, unidentified
MSEVSTIGLDLAKRVFQAHGADACGRVVFRKRLRREQVLTFFAGQPACVVAMEACSSAHYWARAIGELGHVVRLIPPAYVKPFVKRQKNDTTDAEAICEAAQRPTMRFVSVKSETAQANAVVFRARDLLVRQRTQAINALRGHLGEYGVVVAKGPSHVAKLIAHVEDPAAGLPEAARTVLRVLIASLQFLSERIDLLDREVARRAREDKEVRRLTTIPGVGPVIATAVAALAPPAGAFRRGRDFAAWVGLTPSQRSSGGKQKLGATSKMGERTLRRLLIIGASSVVRQAIKYGTPSGSWLARMLGRKPRMLVIVALANKMARTVWALRATGKIYRAPVVAP

SEQ ID NO: 103846 - protein, 402 aa, unidentified
MIGIDPHKGSHTATAIDETENVLGTVRVRSGPTQVEQLLGWVAQFTQRTFAVEGAGGLGYLLAQQLVAADEHVVDVQPKLAARVRLLSSTATNKNDPNDARSVAIAALRSPSAVEVHAEDHTAVMKVWARRHRDLGRLRTQVACRMHAVLCELIPGGYSGEISANRAEKLLGEIEPQGAVVTARHELGLELLADLRRIDEQKRDVRKRIAAVVVASKTSVTEIFGVGPIVAATVIGYVGDVSRFPSKDHFAAYNGTAPVEVSSGPRKIYRLSRRGNRRLNHAIHMAAVTQVHNHHSEGRTYYDRKITEGKTGKEALRALKRRISDALYRQLQIDAMSARVVTIMGSGGQSGNGSKACVTDSHPEGRLFGQATPEPDATLQPAAKSVNSKAPESPLQGAQKAS

SEQ ID NO: 103847 - protein, 411 aa, unidentified
MQVVHEKCAGLDVHKKTVVACVITPKDKGGWEKEIRTFSTMTKDLLNLSDWLTSKGCTHVAMESTGEYWRPVFNILEGNLEVILVNARHIKAVPGRKTDIKDAQWIAELLQHGLLRASFIPPVEQRDLRDLTRHRSNFVRERVNLVNRVQKVLEGANIKLGCVASDVLGVSGRAMLGAIVDGNSSPELMAELAQGTLRQKQDLLVEALEGRVRPHHKFILAQLLGIIDGIDETISQFDREIEDYCRPFAEAVELVDTIPGVAKRTAEIIVSEIGTDMSRFPSAEHLAAWAGLAPGNYESGGKTLSASTRKGNRFLRTILVQSAHALARTKTYLAAQYRRLSARRGKKRAAVAVAHSILVIAYHLISRHEPYRDLGDDYFDQKRPESVKKRLVKRLEKLGYQVNLEPIPVVS

SEQ ID NO: 103848 - protein, 354 aa, unidentified
MNNIKYIGIDVHQATSVFAVIDSQGKLICESILKTEASAIIDLLKGQRGSVQVAFEEGTYAHWLYDVIKPYVAKVIVCDPRKIKMDGNKTDRIDARKIAELLRLNALSAVYHGEQSAQTLKEYARSYISLQQDSTRIMNRVKAIYRGRGIGCRGTALYSPGKRKEWLGKLKDKGAQCRARRLLEQLESFGKLRLEAQKDLMRESRKLKDYKILKGIPGLGQIRIALILAFVMTPHRFRNKRQFWTYIGLSVVRRGSSEYEIVNGELQRKKKKPLPRGLNHNYNRVLKDVFKGAALTASYRGAFKELFDRRVADGAIENIVLLTMARKIAAITLALWKKGERFDIERHQLSEQRI

SEQ ID NO: 103849 - protein, 353 aa, unidentified
MAPLPSPTAPLKCVVGIDIAKDSFVACVGHSTLDQQLHFGKETTFANTASGFAVLLSWVAKQQISGSPLWFVVEATGVYYEELAYFLADNQQLLSVLLPNKVKHFARSTELKSKTDQLDARLLCRLGLERALPAWQPPTPALRQLRALARERQVLVRQAAQLKTRAHAYQHSYQPDSRTLARLVAQQQLLAHQLKALDQDLADLLKAEPELARKLDQLTSIPGIGLTTAIVVVAETNGFVLVENERQLASYAGLDVVQHQSGLSARATRISRRGNVRLRTALYLPAVSSLRYNPQQIAFYARLRARQPSGKPGVIAVMRKLLVLCYSLWKNDCAYDPHYHPAHLAEKEVAPTT

SEQ ID NO: 103850 - protein, 343 aa, unidentified
MQAITTVGLDIAKSVFQVHAIDGEGNVIVRRQLKRRGVLAFFQKLPPCLVGIEACASSHHWSRELQGLGHTVRLMPPAYVKPYVKRQKNDLADAEAICEAVTRPTMRFVATKTPEQQSCLMLHRTRHLFIRQQTAVINAIRAHLAEFGIVAPVGRKGVEELLDVVADANDKRLPEMARACVAALGAQLRALKAQILEFDRQIMAWHRSNATSKRLDAIPGVGPALATALVASVADPKAFRSGRNFSAWVGLVPKQNSSGSKERLGSINKQGDRYLRSLFTAGALAVIRYAKIYGTRHRPWLTALLARRPTKVAAIALANKIARMAWAMLARGERYKEPIALAA

SEQ ID NO: 103851 - protein, 391 aa, unidentified
MSDDNRVVIGMDPHKRSVTIEVMTSDEQILGGGRFATDTEGFAAMLAYVQRWSDRVWAIEGCEGIGRHVAQRLIATNEPVVDVPAKLSARVRVFATGQGRKTDDTDAHSIALVGVRMGGLRAVVDDAQLELLRLLVDRRRRIGEEHTRMVCQLHQLLLELIPGGAKRDLSAAQARRLLAGIRPRDLVGKTRKQHAMELVVDLERIYQRKKAANKELIAQLKTAGTGLLALHGIGPSGAARLLVEIGDITRFPDRGHFASWTGTAPIDASSGDRVRHRLSRGGNRQINMVLHMMAVVQLRNRTEGRAYFDRKVAAGKSPNEAMRCLKRRLSDIVYRTMLDDLVATKATGPGGHRGASLKSSAAGSHPHTGSSDKSLPGPAKTKPRTPARKAS

SEQ ID NO: 103852 - protein, 352 aa, unidentified
MEIIALDAHKRYSQVCVQNQTGQFLCEKKINHSNGQIAQFLSKWTAGSAVALETVGNWYWIVDEIEQAGMKPYLVHAHKAKLMLGSINKTDKLDARGLNKLQRTGTLPTVWIPPGEIRDKRELPRTRMLFANLRTRLKNRIHSVFDKYGLHTDFDGISDIFGGQGREQMSLTIKQLPSETRYTLRCLLRELDMVENQIKRIEKRMKKVFLATEQVRRLMTLPGIGFILAVVIASEIGDISRFSTAQRLASYAGMVPRIHSSGGRTRYGKLRSDVNRYLKWAYSEAGNSTAVNHKRFSRRHVSRLYRRIRERKGHAKAVGAVGRHLAEASFWVLSKNVDYKEPKLNSVSPTVA

SEQ ID NO: 103853 - protein, 459 aa, unidentified
MSRKPKKAKRAGQGGAVPSLSCIEPNAAGIDVGATEIFVAVPQDRDPGPVRSFETFSEDLHRLKSWLQHCGITTVAMESTGVYWIPLFQILERAGLEVCLVNAQHVKHVPGRKSDVIDCQWLQYLHSVGLLRASFRPEERICAIRSLLRHRDSLVQMAAAHVQHMQKALTQMNLQLHHVLSDITGQSGLAILDAILAGERNPAVLAQLRHARVQASQEVITKSLVGDYQREHLFTLRQSLQAYRYYQSLITTCDQEIAEQLQNLDSRTPPDASPLPPEPYPHRPRKNEFRFDMRSELYRIYGTDLTAIPSINALTGYTVLAEVGTDWSKFRNGDAFASWTCLCPQNKKSGGKILSAHTRRSANRVNRALRLAAQTLERSTSYLGTYYRKMRARHGAPAAITAAAHKLARIIFHLVTTGQAYDESLFAAEEQRQRKRLENKLKRSAQQLGYQLIPLGQTA

SEQ ID NO: 103854 - protein, 330 aa, unidentified
MLYGGLDVHKDFVQACWVNQDNQIVREEKFETTVAGIQALCTIAQGSHCVVEASTAVYPIYDALQNAHITVESAHPLKLKAISSAKLKTDKVDARMLAHLACANLIPPAHLPNQATRELRDLIHQHILLTRESTKIKNQTRALLLKRGIKPDKNMFTKKNQKKVIEQTQGVAKLALEQALARLGFIQKQRQTVDQCIEQQAQTNPDAVLIKTIPGIGWFSALLLASAIDGIERFPDAEHLVSYAGLSPSTRQSGNVTRTGPISKKGNSNMRSALVQCAWMAIRCSKRFRKKFMKIGRKKNAKTAITVIARKMLTITYFMLSRREVYSETA

SEQ ID NO: 103855 - protein, 382 aa, unidentified
MNVVIACCAGLDVHKKTIAACVRRIDGDGQVVEQTLSFGTTTAELLALLDWLTKEGVTHVAMESTGVYWKPVFHILEGHLDVMLVNAHHIKHVPGRKTDVKDAPWIAELLQYGLLTPSFVPPAEIRGLRDLTRQRTILVREKATLANRVQKVLEDANIKLASVASDPLGVSGRAMIRGLIAGEVNPARLAQRARARLRKKIPQLREALDGRVTEHHRFLLKMLMEQIEHLERQIEQFDSRIATAMAPLAAVAKRLETVPGLGTRAAEGIVAEIGTDMGRFPSGGHLASWTGICPGNDQSAGKRRSGRTTKGNQWLRALLVQVAWAAVRTKGTIFQAQYGRWIKRMGKKKALVAVAHKIVVLIHRLLSTGTDYQERYTEEAAA

SEQ ID NO: 103856 - protein, 407 aa, unidentified
MNAVGIDVSKGKSMMAALRPMGEVVLPPKEYPHTEVGLERMALDILALGEDTRALMEATGRYHEPVAAALHEYGIRVTVLNPLFIKQSGGGSIRKVKTDKADAMKIAKYALDNWVDLREYTPMDAIREQLKLCSRQYNLYMKNMVALQNNLTSLTDKTFPGVNELFSSPDRADGSQKWIDFVTTFWHCECINLVSEAAFTERYRKWCKRKGYHFSERKAAELYMDSMGHVTTLPRNSSTKLLITTAAKELASAKATLAVLRAEMTRLARQLPEYETVRAIYGVGETTAVQLMAEIGDVRRFPRRSSIVSFAGVDPAVDDSGKHISKSNPTTKRGSPHLRKTLYQIVCTYLRKAPFDEPVYQFLDKKRAEGKPYFVYMTAAQNKFLRIYYARVKECLVAADTKEFSED

SEQ ID NO: 103857 - protein, 419 aa, unidentified
MSFKIFKFNCCGLDIHKTWIFACIGITDSNNRTEYKQARFSSFTKGLNELCDWLAKYNCNDVCMESTGKYWIPVFNILEQRSLWVTLSHPKYTKPMKGNKTDRKDAKWICDLYMCGMVKPSFIPPADIRELRDLVRYRFKLTCMITGEKNRAQNCLTVSNLKLDDVFSDVFGKSSRSITEQILQHPGETFDVAPFVNSRCKTPIVEIQAAIDGAISKEQAVKLRQCLDHIDELNKHISEVEQEILRLSDKYEVALNLIRTVPGFDKNPLTAIQVLSEIGGDMSVFPTAKHLVSWAGCCPRNDQSNQKIKSTRISRAGSYFKPVLVQVANALIKSKKHSEFTNRYKRIKARRGHKKAIIAICRMILTAIWHILSDLKPYTPEGFLESRPVKEEKVLSTSQALNLLKQRGYIIKDKPLAVF

SEQ ID NO: 103858 - protein, 344 aa, unidentified
MVTTIGIDPHKATHTAVAIDDDETVLGEITIRADKDQTTKLLDWAASVDGDGRVWAIEAATGLGYLLSQQLVASGETVVDVPPVLASRIRVLSSGKSQKNDPNDARSVAIAALRRESLAEVRREDDAAILRMLAKRHRELTALRTQAVCRLHAMLAVLKPGGMGHRLSAKQASRMLGGIRGLDAVGEQRRQMAKAHISDIRRLDRDLEAVKAQIRTAVTAADTTVTDIYGVGPVVAAFLIGYSPPIERFDTSDRYAAYNGTAPIEVSSGGKVRHRLSRRGNRTLNHAIHTAAVTQISHQTPGRVYYDKKLDEGKTDKEALRALKRRISNAVYRRLVADARRRSV

SEQ ID NO: 103859 - protein, 314 aa, unidentified
MSENPEIFVGIDISKDTLDIGFQPSRHTGELPHDEQGISEATRRLREAEPRLVVLEATGGLETELAASLMAAGLAVVVVNPRQVRDYAKATGQLAKTDRIDALVLADFARAVRPEVRPMKDALTRELDDLVTRRRQLVEMRVQESLRLGRAAKVQQKSLKSHIAWLDKRIEEIDTDLRQRLRASPAWRTKDDLLRSIPGVGATTSATLLAKLPELGTLDRKGIAALAGLAPLANDSGKQRGKRVIWGGRAEVRCVLYMSAVTAIRCNPVIHAFAQRLKAAGKPVKVVIVACMHKLLSIMNAMLKSNTPWNPKIA

SEQ ID NO: 103860 - protein, 333 aa, unidentified
MKHWIGIDVSSATLDFALLDEHGVHLESLQVSNGRTAVMTLMNSWKKRYGVDTGECLVCLEPTGHYTLMLLNLIVEQHWHAWLAHPLDIQKSMGIKRVKNDKVDALRIAQYARTFREKTRLFTAQNLKLDKLKHLLTRRQHLVRVRAMYKKHLSDLNRYMDKDIKKAFDQLDKRLTVALDRAVIRVEQLIMAQIKADDITSEQYNLLLTIPGVGPQLASYLIALTDGFHRFTNPRELACHAGVAPFERSSGSSIRGRTQVSHQANKILKTMLHMAALANVQREGELKVYFQRKVSEGKKPILVVNAVRNKIIHCVCAVIRNNRPYEQRQLVQN

SEQ ID NO: 103861 - protein, 389 aa, unidentified
MEIRTVNNLPSAAAHDDAVRCLLAIELSKKSWIVAVNTPLSDKISRHTLKSGDGKELLDLCERIRTRVARETKKRVEIVSCYEAGYDGFWLHRLLEAHGIRNYVIDPASLQVDRRARRTKTDRVDVERQLRSLMAYLRGEPKVWSVVRVPSVAEEDDRRLHRERSRLINERIQHVNRIKGLLAIHGIYNYQPLRRDRMQQLERLRTADGRTLPPRLKAEILRELQRLELIIGMIKTIETERDAIASAKTETEHTSAKKIHDLAKIKCIGPEFATTLVGEVFYRSFDNRKQLAGYVGLTPAHFQSGSMCRDQGISKAGNAKARTVMIELAWMWLRHQPDSPLSVWFRDRVGKLKGRIRRITVVAVARKLLIALWRYLETGLVPEGAALKV

SEQ ID NO: 103862 - protein, 363 aa, unidentified
MHERTFIGLDVHARSVWAGVLDGLTGEVSCLAVPVATKPLVAWVCAQPAPAVAYEAGPTGYELARALDAAGVRCLVAAPSRIPRTPGDRVKTDRRDALRLARLLRLEELVAVRVPTPAEEALRDLVRACEDLKMKSDRRIARQRIRSFLLRYGKRYPSPGARWSHRFEVWMRALHFDEPAAQAAFEHLLGAYFVRDAQLSTVDRQIEELASLDPLAPGVARLRAFRGIDTLTAVTLTTETCDFRRFPSASSYMAFTGLVPSEHSSGASRHQGSITKAGNAHVRRVLVEAAWAYRHRPAVRGTLAKRLEGQPPEVAAYSWKAQCRLHSTYRKLAARKGPNKAVVAVARELSGFVWGAMTERMAV

SEQ ID NO: 103863 - protein, 312 aa, unidentified
MPDNHVNYTGIDVSKRWLDCAFTDTECVRLTNDAAGFRRIIARVRALGSRVVLEATGAYHQPLVCALWAAGIEACVVPPGRVRAFAKALGWRAKTDRIDARLLRRYGEPCHPRLWKPPPRERTQLRVWVDARRALIEQRVGWNNRPQTTGDGSMRRICREQLDLIARQLDRLDVQIQAHLDQQPHLRQQAERGQQILGVGPITAWTLLAYLPEIEEPDVSENELAALTGLAPDPNESGARKRPRHIAGGRWQVRCMLHMAARTARRHNPILRDFGDRLEKHGKPYKVVITAISRKLLLLVRKLALDQDFSLA

SEQ ID NO: 103864 - protein, 342 aa, unidentified
MERVYVGLDLGSSSFQQVGLNEGGVVRGEREFRTSEANLIKAFVDLEGELHVHLEAGELAPWAVSIITPLVHRVVCSHPQANAWIAKDADKCDRLDAYKLADLLRLNRFKEVHYPPQQSRRDFKTLVQHYDELTQQQARLKTKIKARLRMQGVIVRGEQPFSATGRKAVLTAVKSVAVRTAISQLYAVLDQSLESQTEARLLMRRAAQAFPEIRIFETAPGVGPIGACRFSAYIHTPQRFSTTRKLWKYCRLSVSHRSSNGKPLRRPRLDHNGCGRLKDVSRKAFEAALRTKSDNAFKRAYQRALATTHDATHARLTVQRKIVSTLRAMWINQTPYREELMR

SEQ ID NO: 103865 - protein, 400 aa, unidentified
MTSTDGIDLYLGLDVGKGEHHATALTPAGKKVFDRALPNNEPRLRELFTKLQGKHGAVLVVVDQPATVGALPLAVARDTGCRIAYLPGLTMRRIADLYPGEAKTDARDAHVIADAARTMSHTLRDLVPSDETVAELEMIAGFDDDLAGESTRIKNRLRGLLTQIHPSLERVLGPRLDHPAVLALLERHGSPAQLRKAGRRRLITLLRPKAPRMGERLVEDIFTALGEQTVVVPGTEAAALVVPSLAASLTAVLDQRKLLAARIEELLEAHPLSPVLTSMPGIGVRTAARILVDVGDASTFPTAGHLAAYAGLAPVTRASGSSIRGEHPSRRGNKQLKRAFYLAAFASLSQPESRAYYDRKRREGKHHVAALVALARRRIDVLFAMLRDGTLYQPQTAATG

SEQ ID NO: 103866 - protein, 355 aa, unidentified
MTGTKYIGMDVHQATISMAVLDEAGKLTMELTIATQAKALLDFLRGVSGTLKVVLEEGTAAHWLYTLLKPQVAEVVVCDARQNAQRRGEKKSDRLDARQLAELLFLGKLKPVYHGDALGPALKELARSYRTLVGDTTRVMNRLKALYRGRGIGCAGTRVYSAHFRDQWLGQLNEPGVRSRAQGLYQQLDALLHWRQEARAALLAESRRHSAQKILRTIPALGPVRVAMLLALLQTPHRFRGKRQLWAYAGLALVTRSSADYQLLDGQVTRARKPALVLGLNANHNHTLKALFKDAAASALAHPGPFQEYYATRVAQGMKPELARLTLARKIAATVLTLWKKGESFNAEQMKTQAA

SEQ ID NO: 103867 - protein, 402 aa, unidentified
MNAVGIDVSKGKSMVAVLRPFGEIVASPFEVNHTIEELGKLAKMLRKLDGETKVVMECTGQYHLPIAYALDEEELFVSTVNPIITHNYDNNSIRKSRNDKSDAIKIASYTLTNWLNLPKYIPEEDARHMLKAYSRQYSKYKKIHTMLKNNLIALLDSAFPGANNLFSSPPRKGDGHEKWVDFVSHFWHCKCISSLSEKAFTERYRKWCKRAGYNFNKAKAEDVYIESLGHFYVIPKTETTKRLITQAASQINTISETVETLAREMKALAATLPEYPVVMEFRGVGDILGPQLIAEIGDVYRYFKKSSLVRYAGLEPVENQSGKFNGNQSISKQGSPHLRKTLFQVMDCLLKHAPADDLIFQFLDRKRSEGKHYYSYMTAGSAKFLRVYYARVREYLEKTYTE

SEQ ID NO: 103868 - protein, 330 aa, unidentified
MLENVVVGLDLHLKNIQGTIMGMNGEVLSQERFRTDKESLRRFLYGVPVGSKVALESVGFCWPWIDFLEELGYAPLLANPVKVKMRAEDVKTDKVDSELLANLTRMGWLPTCYVPSAELRWLRSLLRHRAFRRKMSTAVKNRSWSELRKRDVKLGINLGTCKGRDLAASLGVFEVDQDMELLEVVEGQIKKIEALLRKRYGDLKPVNLLMSIPGIGFLTALTIYAEICDVTRFSSPEKLAHYAGLVPRVRSSGEHTRLGREVKANRWLKWILIETAWSHINWCRDGKLAKVYEGACRRKRDRRKAIKIVARKLVNVVWAVWAHEKEFTLE

SEQ ID NO: 103869 - protein, 447 aa, unidentified
MKKTNKKKDVVNMPLVNPNAAGIDIGDTIHAVAVPEGRDNLRVRSFGAMTCDLLEIIEWLHKCKVDTIAMESTGIYWKPIFGMLVKEGFEVYLVNSKQIRNVSGRKNDEDDAIWIQKLHSCGLLKSSYLPDDEQETLRTLVRYRRTLTSDCNRFILRIQKSLELMNVKLHTVIRDITGKTGMAIVEAIINGERNPENFLIYVDKGIKADNATIVKSLQGNWRIEQLFILSECYHSYRYYRERIAMCDAEIERQLQAYQAAYYPDMPVDKNVRSKKQATKNKPKFNTSSYLKAIYGVDVMAIYGISDILALEILSETGTDMSKWQTEKHFVSWLNLCPNNKISGGKLISSMIMKKKPNVASQAFRNAANAVQRSDNWLGDYFRRMKAKGGNKYASVATANKIATVFYKMVRQKQEFNPVELQEYRERYKLAKINYLERKLTDLKKDVA

SEQ ID NO: 103870 - protein, 354 aa, unidentified
MKQQAIQYLAFDVHQSTSVASLRNEQGKIVMQATVPTEAKAILTLVRSAGSRVHVAFEEGTQAQWLHDLLVDHAERVTVCNVRGRGELTNKSDRIDADQLSELLRLGALKPVYHGTPEILTLKELVRCYICLVQDSTRVMLRTKAIFRGRAIPTPGVSVYRPSQRKKWLAKLDGGTRTRAASLLAQLDVLLELRPKAKTAMIAAARRQPGWKVLRSIPFLGPVRVAVILAIMRTPHRFRTKRNLWPYAGLAVVTRSSADQEIRDGKLRRSRKAPLTRGLNRNHNPILKSMLKGAAAAAIARPGPLRDYYEASLARGVKEDMAMVTLARKIGAVLLRLWKKGELWDPKKLTMQAT

SEQ ID NO: 103871 - protein, 378 aa, unidentified
MSVYVGIDVHRKRSQVAVVAEDGQVQVNRNVVNGAEPILKLIGGLPTGTPVAFEAAYGWGWLVELLEDYGFAPHLVHPLRCKAIASARLKNDKVDAAILAQLLRADLLPEAWIAPPEVRQLRALLRHRVALVRLGTRLRNRIHAVAADHGYDRPGSYWTGPGRGWLAELPLPAVSRQVVTDSLAFIDALAPTIQALDAEVHARAKADPRVKVLTALPGVGEFTAMVLLAEIGDITRFPNARRLASWAGLTPTVRGSDLTVRHGHISKQGSPYVRWVLNQAAQTAKRHPEFAATYQGIARRRGKKIATIAVARKLLTRAFHLLADAGTAGEAASTEATQNSTCVARGARARPQTGRVAKARARSPQRHEPATSRARSFD

SEQ ID NO: 103872 - protein, 398 aa, unidentified
MDLPVYYELETNNGNRDYRIQIGGHYMNYNTVYVGMDVHKESFTLCSCKYEDEKASHYQRTPASYKNVLRYLAFLRTIYGEYTRFVCGYEAGCLGYSLYHQLENFNVECVILAPTTMLEQRSKRRIKTDKRDAEIIARSLAQHNYSPVHIPTETDNQTKEFIRMRDDHKAELKKIKQQILSFCLRQGYQYDGSGNWTAKHVKWLRSLEPAGLYKEILDEYLLTYTILTDKLNRLDQRIEELASKEEYKESVSKLTCFLGIKIHTALSVIVEVGDFQRFVSARKFAGYLGLVPGQHSSGDDRNGLGITKAGNTHVRRLLVESAQSYTRGKIGYKSRVLRSRQAGNSPQVINYADRANERLRRRYYQMVLKDGKKYNIAKIAVARELACFIWGMMTDNIY

SEQ ID NO: 103873 - protein, 351 aa, unidentified
MTIIGCDLHTRYQVVAWIDEETGEIRTRRLEHENGEARAFYAGWPRGARVGIEATFPALWFERLVGECGHELWVGDAARIRASEVRQQKTDTRDAEHMLDLLRTDRFPRIWVPSLAERDVRQLLVHRMKLVRTRTMMKNQLHALAMSQGVCRKSKLWSVKGRAELEGLALFPWTSRRRKELLQLLDQVEAAIRPLDVAVAQEAQARSEAVRLMTHPGVGPVVSLAYVLTVGRVERFRNSRRLVSYLGLNPREHSSGGRQRLGAISKQGNSMMRWLLVEAAQTAARLDPELRRAYQRLKFRRVSGVAKVAIARRLAVRLYWMLRARVDYAQLVRMSGSPSSAVVPHPAGSKV

SEQ ID NO: 103874 - protein, 352 aa, unidentified
MSIIAFDSHKRYTFARVEDNNGEHAQEFRIEHRRGNIAAFLAGRQPGSPVAVETIGNWYWIVDEIEQAGMEPKLVHARKAKMMFGCINKTDRLDAKGLNVLQRTGTLPTVWIAPAAVRDKRELPRTRMVLAADRTKLKNRIHSALDKYGLQDAFEGITDIFGVKGRRVLGGVLDQLPPHSRYTTELLLEHLDQTEQKIKAIEAQMNKLFKETEQHRLLKTMPGIGFILAVVVLQEIGDIGRFACAERFASYSGVTPRVHASGGKVHYGRLRPDTNHYLKWAFSEAGNSVAVNRNRFPARHVSQLYNRLRSRKGHAKAVGAVARHLAEAAYWILTRNEVYRERGLSNVSPTGT

SEQ ID NO: 103875 - protein, 509 aa, unidentified
MVGHPRDTVCASSRDRWAVLGLLVAPSGDFYSKTVAHAGWHFQLACCSRAAQGSCQSSDSTRLLLCSVPWDTHLLSLGDITQRRSYMNDSTLCIGADIHLKEIVLRGVDKASGQEVVKRFRVTNNLPGAESAVTIIHQAATSLGYTHIEIAWEATGMLWLPFHRFLATNTLLQPFAPDLVCFNPKLVAKFKEGLDLRGRKDDEHDAYDVAARLRFGELPLSYVPDDFWQGLRRLTRYRYKLSRNLSREKMRFQSYAFLKCSDWKRVKAFSDVFGATSIDLLTRFTAAELRDLPHHQLADLIARRGRGHFDDPDATARAVQQALCSSYPIEPQLDELITFSLATIWDHIRFINRLMKRLDKQIARAIDPVPNPIITVKGLGPVITAGILAEIVDISRFPEHKHLAQYFGLTWHKRSSGGFVSQNTRLTKIGNVYGRYYFILGANALRRFNLEYNAYYWRKYQEVSKHQHKRALVLSARKLVRLVHALLTKNVPYVRPRMPIHLQEDVLLQ

SEQ ID NO: 103876 - protein, 351 aa, unidentified
MWIIGVDYHPSVQQIAFVNTDTGECGERRLSHSDGEAEKFYRELKAAGCKVRVGMEATGHARWFERLLAELGFELWVGDPRQIKAKRVRKQKTDRLDAALLLQLLLEDRFPRVWVPSAENRDLRQLLWHRHRLVQMRTRIMNQLQAVAMNEGVRRKKALWNKSGRARLESLPLAPWAARRRRDLLELLDRLNPTIEVLSAAVEQEAKQRPEVLRLMTHPGVGPITALAFVLIIDSAERFACGKQIASYVGLIPCEDSSADRRRLGHITKQGNTLLRFLLVEAAQAAVRRDPDWRRCYTRLAMRRERRIAKVAMARKLAVRLYWMMRKEWNYEQSKKFGSYAGESKYGHGVQ

SEQ ID NO: 103877 - protein, 351 aa, unidentified
MSHKTAATVAQPIGIDTGKNTLHLIGLDDKGAIVLREKVARGRITARLANVPRCLIGIEAGMATHYVARELSALGHDVKQVPPAYAKPFRQGHKNDFRDAHAIAEAVQRPSTRCVPVKTDDQLDLQALHRVRSRLVGQRTAVINQIRGFLLEHGIAVRQGLRFLRQQLPDILAKRSDVLSPRMIRIMEDLSGDWRRLDERIEHVTEEIEVLAHGSEGCRQLMTVPGIGPIIASAMVAAIGNGAAFAKGRDFAAWLGLVPKQMSTGDRTILGRISKRGNRYLRTMIMQGARVILLRPANWAKHSFGPWLTAAANRLHHNVLATALANKLARIAWTVLMQARSYEARVEPRTA

SEQ ID NO: 103878 - protein, 341 aa, unidentified
MQITTIGLDIAKNVFQVHGIDAAEKVVVRKQLRRGQVLKFFAALAPCLVGMEACASAHYWARELTKLGHEVRLMPAKDVKAYVKRSKNDAVDAEASCEGVRRPTMRFVQVKSAEQQGRLMQHRARDLLMRQQTQVINALRSHLAELGIVAAQGREGLKQLLAIIADESDERLPIDARASLIVLAAQLQALHTMIGSIERRLTVQHRANEASKRLQSIHGIGIIGASAIAATVTDPKAFQSGRDFAAWIGLVPRQNSTGGKPKLGPISKQGDRYLRRILVVGAHSVLRRAKQNPEKYPWLTQLLARRPFKVVAIALANKMARIAWALLASGGHYRPRLAAAA

SEQ ID NO: 103879 - protein, 354 aa, unidentified
MIIIGADYHPSFQQIAFVDSETGELQEQRLEHPEAAEKFYRELAAQGMKVRVGMEASGHARWFERLLADLNFELWIGDAAEIARKRERKQKTDRQDAQHILRLLLKDDFPQIWVPSWENRDLRQLLWHRHRMVQARTRMMNQLQAVALNEGLRYKKRLWRDAGRKQLEAFRLAPWASRRRHDLLALLDRLNPMIAELSQAIEQEVEKCPEAQRLMTHPGVGPLTALAFVLIIERADRFQCGKQIASYLGLVPLEDSSGNRRRLGHITKQGNSLLRFLLVEAAQVTARSLPEWRSKYVHLTMRRGRKIAKVALARKLAVRLYWMMRKGWNYEQLKKFGSHAGQPGNRDGVKYNIE

SEQ ID NO: 103880 - protein, 415 aa, unidentified
MKVVYPICCGVDVHKSFLIGTIITTTGGVEPHYQKKRFSTYNNDLHRFCNWLLSNNCKNVCMESTGKYWVPVFNILEERGIATTIANPKWVKAVKGNKDDTKDSKWIGDLFRLGLVPGSFIPSKEIRILREFTRYRYKLVSMKSSEKNRFQNAFTVCNVALDSVVSDMFGKSAAAITNYLISEDSFDPEYCKSLLQRSLKKKADSVIESIEGYSITNEQKLRMKIIRSHLDYIQSAIADVDSAIDAMVAKHENLIALLQTVPGIDRNSAITIISEIGTDMEQFGSSKRLCCWAGLTPGNNESAGKKKSVRITRAGVYLKPALVQVAHAAVKATNNSYYRLKYEQISKRRGKKRAIIAIARMILTAVFQMLSTGEAWNPSDLFKVDMPQPLKEKQLEKAVKQAMKFLEKQGIFVPA

SEQ ID NO: 103881 - protein, 309 aa, unidentified
MEIVVGIDVSKERLDVAILPQEEVFAVGNDHAGIDELVERLKGIGVDAIALEATGGFETLAVAGLSSAGLTVLVVNPAQVRAYAHAIGRRAKTDPIDAAVIAAFVLATKPEIRPLRDAETQALSELVARRRQIVQMVVAEKNRLRMALAKQAQKSIKRLLTALRRELESLDADLDSHIRKSPVWRVREALLTSVPGVGPTTARTLLAELPELGSLDRRQIASLAGLAPWTRQSGKWKGKSFIGGGRSKVRAVLFMAALVASRYNPDVKAFRDRLVAAGKPKIVATVATMRKLLTILNAIIRDGRPWQNA

SEQ ID NO: 103882 - protein, 345 aa, unidentified
MEHYVGLDVSLKLTAICIVDRTGKIQREGVVHSDPESIAEFIKSNAPHVSRIGLEAGATSTWLWTELNRLGLPVICIDARHAKAGLKMQINKSDRNDAVGIARIMQCGWYKEVRVKDLDSHAVKALLVSRALLVKIKRDLENQIRGLLKNLGLVIGPSKMNAFALRAAELTEHRPELAAAVAPLLNARAAIELQIADLDRKVMKLARSNAQVRQFMTAPGIGPITALCFLATIDDPTRFKRSRSVGAYVGLTTRRYASGEVDWTGRISKCGDKMLRGYLFEAANVLLTRVAKWSALKAWGVRLAKRSGLRKAKVAVARKLAVILHRMWIDGTEFRWSKETAMQTA

SEQ ID NO: 103883 - protein, 358 aa, unidentified
MTMVGIEGMETKVEVILGMDTHLDFHVAVVLDHLGRRLGELSVPTTAKGYEKLLCWVEGFGPVRCAGIEGTSSYGAGVARYLKAQGIEVLEVERPKRRRRSSRRNAEKSDPLDAEGAARAVLAGKTSGVPKSGEGRVEMIRALRAARRCAMKARTQAANQLQGLRVTAPEELHHRLRGLSTKELVVVAARFRLGDDPHDVAAATKFALRSVARRYKALSAEIAELDAQLDRMVRQAAPELVALAGIGTDHAAALLIVAGDNPERLRSEASFASLCGVSPVEASSGKVVRHRLNRGGTRDANRALYMICLARMRRDRRTKEYVTRRSAEGKSKREIIRCLKRYVAREVYRVLVSSPVQC

SEQ ID NO: 103884 - protein, 427 aa, unidentified
MEVMHERVAGLDVHKATVVACVRIQSGRQVKRECRTFSTTTDDLQALLRWLTQQHCSHVAMEATGVYWTPVWKILSDGDFALVVANAAHVKNVPGRKTDLNDAMWLADLMACGLINASFVPQEPLQELRSLMRSRKQLGREQTRHVQRIHKALIEANIRLDQVISDLMGASGRRIIEAMIAGVRDPSRLASLASRQVKATPQELRDALHGRLTDHHRFLLKLHLGQYDALAAAIRDIDVEVDAKITRLDQQLNAGRGAKAVPFRDLIKLLCTIPGISVLAAITILAEIGRDMSRFPTASHLISWTGLCPSQHESAGKRQSTRLRKGNPWLKVTMVQCAWAAKRQKNSYYRAQFFRIQSRRGPQKAICAVSASILTAVYHILKDGTEHRDLGADYFKRRSAEDQTKRLVAQLGKLGYEVHLQPTAQAA

SEQ ID NO: 103885 - protein, 385 aa, unidentified
MAQVNDLSRSLTAFDPISTLVVIVEMSKASWLVSGAVPGVERQPLKKLEPDAGALLRLIERWRNEAVRAGRPISRIALAYEAGRDGFWLARWLIARGIEAYVIHSASVAVSRERKRAKTDRLDAAMLMRVFLGWLRGERGHCGMVAIPTMEEEDARRPSRERECLVNERSRITNRMKSALARLGVRGFKPHLRKAPERLAGLRTAEGTGLPANIIEEFRRDMARLALVREQITSIEKTRAERLERAPDTGPHAMVRLLARVIGIGIETADMLVREILSRRLRDRRAVARYAGLTGSPDESGLKRREKGLAKAGNARVRRGLIQLAWRFLVFQKDSALARWYRMRTEGPSGARKTTMIVARKLLIALWRLVTTGEVPDGVELRPAA

SEQ ID NO: 103886 - protein, 339 aa, unidentified
MEYVGLDIHKEFCQACVMNDSGKVISNSRFPSTRDALDGFLSGFKNAKFVLESTGIWEFFYEIIEEKGFEIVLAHPLKVRAIAEARVKTDKVDAETLAHLLRADLIPRSHVPSRDMRNLRQLVRQRAYLVRQATSLKNRIHAELLRNGIRRPENLKSPFTQKSIRWMRSLNLPTVSSNLDCLERVNEQIEKLNSLLLDEFSMRRNAQLIATIPGIGFYGALLILAEIDDIHRFSHPSKLSAYAGLVPTVSQSASSVRYGGISKEGSAYLRWILVESVHVHLINHPESRLSKFYKRIERRRGRKIAIVATARKLSHIIYWMLLNKEKYHGQGSNPVSKPA

SEQ ID NO: 103887 - protein, 339 aa, unidentified
METYAGIDLHSSTNYLAVINEKDQRLFGKRLPNRIDAVLSALQPFKESLKGIVVESTFNWYWLVDGLQEHGYTVHLANPSAIKQYEGLKHTDDTWDSFWLAHMLRLNILPEGYIYPKEDRPVRDLLRRRLLFVRHRTAHILSLQSMISRNLGTRMSSRAINRLGKTDAPILFDQPHLALALTMSSAAIQFLSRRIADIETVVTDYIALKDEFRCLLSIPGIGKILALTIMLEVGDINRFPKVGNYSSYCRCVKAERLSNGKKKDTNNRKNGNKYLSWAYVEAANFAIRYCPHAQGFYQKKRAKTNGVVAIKALSNKLARASYYLMRDRVPYDPERLFHA

SEQ ID NO: 103888 - protein, 459 aa, unidentified
MAKQVRQKNAARKADQLEGLPPLNRNAAGIDVGSAVHYVAVPAGRDAEPVQEFGSFTADLHRMARWLQACKVDTVVMQATGVYWTALYDVLESYGFQVHVVNARHTKTLPGRKTDVLECQWLQKLHTFGLLNNSFRPAEEIRVLRSYMRQRENLVQAAGTSIQHMQKALTEMNIQLGNVISDLSGTTGMKILRDIIKGERDPRKLALHKDARIQASRAEIARSLEGTWRPELLFVLEQSLELYDTYVEKIQQCDRRIEEHLKAMEAKADPAQPVPEPRRMRRARQHEPRFDLRGQLYRISGVDLTQIDGVSVQTAQTVISEVGLDMSRWPSEKQFASWLGLCPDNRISGGKVLKRGTRHVVNRASTALRLAAWSLLRSQSALGAKFRRLRSRLGAPKAITAMAHLLARLIYRMLKFGHQYVDKGIEYYETKYRQQQLQWITKQAAALNMQLIPLTGVDG

SEQ ID NO: 103889 - protein, 349 aa, unidentified
MVTLGTDAHKWSHTVVAADEQGRQVGQVRVTATPEGHLRALRWAGRWTQRRWAIEDCRHLSRRLERDLLAAGERVVRVPPKLMAGVRRSARTLGKSDPIDALAVARAALREPELPVACLDGVERQVRLLVDHREDLVAERTRAQQRLRWHLHELEPGWEIPAGGLDRAVWLDAVAARLGAHQGVVAEIAGELVGRCRELTGRVNQLERRLRRLVTPLAPKLLSLDGCGALTAAKLVGETAGVGRFRSRAAFAMHNGTAPVPVWSGNHQRHRLNRGGNRQLNPALHRIAITQLRRDGPGRDYLQRRMAAGDTKTEAIRALRRRISDEVYRRLHADQHPPGRQPTCLRPAT

SEQ ID NO: 103890 - protein, 399 aa, unidentified
MLAVGIDISKSKSVAAILNQDGSMHTSPFEFHHTQPELDAFIKYILNSNQSATILMENTGHYHYPVLKAFREAGLPVCMVNAYQIKKFGDMDLRKAKTDKKDAVRIARYALEKSYSLVPYTSMEQKYEDLRFLARQYNQRMLTLKTNKVFLLNLLDETMPGITNILPLTTRTPETSLSVLFINRFKSYDRIKKMGKSRFLDAFEKIARKSRNRQTKTYGLAIYEAALRNITTRGENEYTLAAQDQCLELVCESQKAADSIILKMQTLAETLPEYAVLRSMAGVGDRLGPLILAEIGDIRRFHSGKALNAYAGNDAPPYQSGTFESHNRHISKRGNAALRKYCFEVMQALKLTRPQDDPVYLFLLKKEQEGKPYNVAKMAGVNKFLRIYYARAMETLKQQ

SEQ ID NO: 103891 - protein, 500 aa, unidentified
MNKHKSNPVKSVYRNQCIEIRTVFEKASSPRKVLCVALDYAKSKHVALCCDGLGDILKKPFSVENSTEGVEFLCKEIQATARRRKIKKDTIFLGGEDEPAYVANFVAALTRKGYLVLRVNAREAANQRENLLASTDNLDLLGISKCLLSRRASPASSADNQAPVYRDLRELSRQRHDYVRQRTAASNRIHAIADQLFPGFLIASKSGVTPFLTASLALMENRFSSTEFARRKQKSLSNTLRINRVRNPGETAFKLITLAKDALPPAPDRIATLQQSLRCLVELYRCLDASASLLRLQAAALLTTTPYVMLTSIPGISFVLASGIAGELGDPARLPSADSLSAYAGIVPAVTQTGGPDSSAVHLSTRARCNHLLKDWVVQGSQKIGLCGPPEHKERFLRRSANGQHAAYAGARTLLRLTRSLVTQETPYLPPTARRQGASPSDITEGFLTTWIKLVEKWRVIPGWQDMLTDENNPMGFWRRVVAEIHGIELSLQPVKPGKD

SEQ ID NO: 103892 - protein, 337 aa, unidentified
MNVTLLSIDLAKNIFQVCGVNQAGKQVFNRAVRRPKLPALIAQYSGTPVAMEACSGSNYWGRRFQAAGHKVLLIPPNHVKPFVKGNKNDRNDAFAISEAARRPNMRTVTPRSLEQTDLIMSHRIRERRIRARTALINQSRGLLNEYGIVVPQGASVLRKALPLLLEDAENGLTCIARVHLQSLLDEWRGLDEQIKVLDQSIRQSARELPAARRLTGIRGVGDMIATAAVAKLGAGDQFHSGRQFSACLGLVPKEHSSGGKQKLGGITKRGNNYLRRLLVQGAWSIIRHVDVSEDRMSRWAREVIARRGKHKAAIAIANKLARIIWAMTRRESEYVAA

SEQ ID NO: 103893 - protein, 395 aa, unidentified
MEAVKPAVLSASEKPQASRSTADRPCLGVQNTVTERDRRASVGISPNSRQNRAATSAVPSSHLQDRVNTISIAPISPPIFVGIDIAKDKFDVHVRPLSTKWTLKNDPDGFEQLVELLRQFPTLKLLVVEASGSYERPLVCHLIDAGIPVAVVNPRQAHDFAKGLGHRAKTDPIDASHLAHFAETVRPRLATKTPENQQDLQDLVTRRRQVIQLRTIEKNRQYTTHGKIPLKTIQLSLDLYAKQLEMIENAIAQLFESNDDWNDKCQILTSVPGVGDNTARHLLAEIPELGSANRAQVAALAGLAPYNHDSGKLKGRRCIAGGREDVRTALYMATLAARRFNPVIVEFAKRLKAAGKPYLVVHVACMRKLLIILNALLKTGLNWNYKLPQEPLAIS

SEQ ID NO: 103894 - protein, 347 aa, unidentified
MRKIAYLSIDVHARNCVLGDMDGNGKFRGNRSFTTCEINIIKALKTVKAKSKYLVMEAGPLSNWAAQVANDHVTEAIICDPRENALIYKSSKKRDKVDTKKLCRLLRLGEFKAVYRPETDQRAIFKAAVQHYGDLRDQLVGLKNKIKAMYRQWGVIDVFTDSVYSTSGRDKFLNQVNHHPICFQLKRLYDLMDHTAAIKQDAQKSMTSLGRNYPEIKEFKKIPGMGPIGAHTFDAYIQTPHRFAKRSRLWRYCRLGVTDHSSDGKPLGYKRLDKSGVSELKALSYRAFLSAIKGDNEVKRFYLNSLQRTHDRKHARLNTQRKILSVMLSIWKKGTAYRPELFLDPSI

SEQ ID NO: 103895 - protein, 339 aa, unidentified
MKDQDVSDVVRTKKRTAMRYIGIDVSKATFVVAYSSDKGGEIRTFNNTTAGIRQFIGTLPKDGSIHCVMEATGNYSALLLYMLNVAGITVSMENPLKVKNFAKAMLSTIKTDKSDARLITLYGEKMNPRPFKVQGEAILRLRQKRTVIRQLTKQITAMSNLRGSLACLPVPDKGATHTVDETIKFLEKKRDRLQSELTDLVEVEFSRQLALLTTIKGIGITLATALIITTGGFTYFQNAKQVSRYLGICPTYEQSGTSVNIRGHINRNGDAYTRGLLYIAAWPASRFNAQCKETYTRLRQNGKSGKLAMIAVANKLVRQAFAVVAHDKEYVDGFVSNRP

SEQ ID NO: 103896 - protein, 343 aa, unidentified
MDYFAGLDVSVKETSVCIVDDAGKIVREARVASEPEALLQVLANNTYRFKRVGLEAGPLSQWLYSVLTEVGLPVICVETRHMRAVLKAQINKTDRNDARGIAQMMRVGLYRPVHVKTLRSQKLRVLLTHRKLLQSKAIAIENDLRATLRNFGLKVGMIGTVKFEARIKELVENVPDLAVLVEPLLIVRQVIREQLGILHRRLLAIVRDDDVCRRLMTIPGVGPVVALTFCVTVDIPARFRNSKAVGAVFGLTPAKYQSGENDRTGAISRCGDEMMRMMLYEAAQSMLVRSAKWSWLKAWAIKIARHRGMKKAIVALARRLAVIMHRMWVDGTEFRWTREVAVA

SEQ ID NO: 103897 - protein, 426 aa, unidentified
MNCTQNYKIDQVTEQTLVVGIDIAKRTHYACFVDDRGRVLRKSFPIFQSKEGFRQLYEAIQEAMQAFGKLKVIVGVEPTGHYWLNLAYFLEEHGVPLVMVNPAHVCRSKELDDNLPTKHDAKDALVIARLAKDGRFLVPRLLHEIEADLRVGSTLKEKLRKEQAAVKNAIVRWTDRYFPEFWTVFRDVGKTALSVLEWTPFPADMAGQSAEELIQVHRQSEGLKSPQKAKIQALIDAAKNSIGVTEGTTMARFEIAALVRRYRQFEAEIAALDAELKALVQTTMEYQWLKTVDGLGDATIIDLLAEIGSFTHYRDPRQLVKLAGLTLKENSSGQRKGQKQISKRGRKRLRSVLFRAMIPLIRHNEAFRELHDYYTTRPVNPLTGKQSIVALCRKLLNVLFAICTKKQAFDAERMKQDVLSQVHRAA

SEQ ID NO: 103898 - protein, 343 aa, unidentified
MQAVTTIGLDIAKMVFQVHGVDAEGKVIIRRKLKRRYVAAFFQKLPPCLVGIEACASSHHWSRELKALGHTVRLMPPAYVKPYVKRQKNDAADAEAICEAVSRANMRFVETKTPEQQSCLMLHRTRHLFIRQQTAVINAIRAHLAEFGIVAPVGRNGVEALLDVVADSSDKRVPEIARGCLAALGAQLRMLKAQILQFDRLIMAWHRSNETSKRLDEIPGVGPALATALVASVGDPRAFRSGRDFSAWIGLVPKQNSSGGKEKLGSISKRGDRYLRSLFTAGALAVIRYAKLHGTEHRPWLTALLARRPTKVAAIALANKIARMAWAMMAKGERYKEPVALAR

SEQ ID NO: 103899 - protein, 418 aa, unidentified
MEVEHDEQEIIQRVAALDVGKAELVCCVRVPGPGRPRMQEVRTFLTMTRSLLAMSDWLTSLGVSRVVMEATSDYWRPPFYLLEGSFETWLVNAGDVKHLPGRPKTDRLDAVWLCKVAERQMLAPSFVPPPPIRILRDLTRYRVDLVTARTAEKQRVEKLLEDAQIKLSVVASDIFGVSGRAMMAALIAGERDPKVLAEMARGAMRAKTARLVEAFIGRFDDHHAFLLTTMLARIDALSADIAAVEERTEEQLVPFADAVARLDQIPGIGPTAAAVIIAEIGVDMTRFPTPAHLSSWAKFAPGVKESAGRKKGSGATGHGNRYLARVLGEAAVNAGRTHTFLGERYRRIARRRGKKRAIVAVGRSILVIAWHLLGDDNAQFHDLGPDYYDSRVNLNRKMRNHVRELQALGYNVTLEPAA

SEQ ID NO: 103900 - protein, 343 aa, unidentified
MQITTIGLDLAKSIFQVHGVDATGQVVVRKSLRRSQMLPFFTKLAPCLVGMEACGTSHYWARELIKLGHEVRLMPPAYVKPYVKRGKTDAADAEAVCEAVTRSTMRFVPVKSPEQQAALSIHRARDLLVKQRTQLINMMRGLLAEFGVDIPKGLERALLMARQIVDGKAPEVPFEAAKVVGTLSQQALDTHVRLREIDRDLAVWLRGNDVARRLMTIPGIGPVGATALAASVTDPHQFRSGRQFAAWLGLTPLQKSSGGKERLGRITKMGDKYLRKLLIVGMTSRVRRARQNPTVDPRLADLLARKPTRVATVAMANKTARIIWAIMARGETYRAGHRPALAA

SEQ ID NO: 103901 - protein, 414 aa, unidentified
MDVVHRRCCGLDVHKQSVVACVLLGDPSGQPQPQIRTFGTYTNDLLALGDWLAEQSVTHIALESTGVYWKPIWNLLEDRFALLLVNPRHIKAVPGRKTDVQDAEWLAELLRHGLLKASFVPDRAQRELRELTRYRTSLINERSAAANRLQKTLEGANIKLASVASDVLGLSSRQMLAAVVAGTPLEANGLADIAHGKLRNKLPELEQALSGRVGPHQRFLLAEQLAHIDSLDASLERLSAEIAERMRPFDQLIDRLDAIPGIGRVIAEVLLAEIGVDMSRFPTANHLASWAGMCPGHNESAGKKRSGKTRKGSPWLRAALVQAAHAAAHSKQSYLAAQYRRLTARRGTRKAAVAVGHSILVSVYHLLSHDCPYVDLGPTYFEQRDPRAQRRLVHRLEALGYNVQLTPLAESPAA

SEQ ID NO: 103902 - protein, 320 aa, unidentified
MAQRSFCGIDVAKDRLDVMVLPEELCWSVVNDAAGWAELVAKLRGLGIAASGIEASGGYERGVVRALLAAGMSVRQINPFKLRQFAKACGVLAKNDRLDARMIALFVATLPTRSAQRYAPVERLAELVTARRQLSDDKVAAENASRQFEDAALRRLYGGRIARLAADIALLDKRLAQIVASDAMLARRYALLVSMPGVGPVLAVTLLALLPELGQMNRKQVAALVGVAPYDFDSGRLKGMRCIWGGRAPVRRVLYMAALIGYRCNPQLRAFHDRLAAAGKKAKVVLVAVMRKIITILNAMLRDNVPWVDRSIGRHILPAA

SEQ ID NO: 103903 - protein, 359 aa, unidentified
MDAQEGAVRRIIGGVDTHKDLHVAAVVDEQDRVLGTQSFASTRQGYRQMLAWMRSFGEVQRVGVESTGSYGAGLLRFLQQAGVTVLEVTTPDRQDRRRRGKNDDFDAQNAAHAAFAGIRTVTPKSRDGMIEALRVLSACRKTAVTARRIALQMIQNTIVCAPESLREMLRRMTRMQLVRTLAAWRPDLTAYRDVEAAYRISLKSLARRYLELHDEIADLDAMIAAIVDELAPNLVARNSIGHRGAAQLLLTAGDNPQRLRSEAGFAALCGVSPVPASSGKTARHRLNRGGDRAANSALHIIAIGRLRTDARTQAYVAKRIGEGHSKLEAIRCLKRYIAREVFTLIKQRQREINQTQIAA

SEQ ID NO: 103904 - protein, 343 aa, unidentified
MDHFGGLDVSVKETSICIVDGTGRIVREVKVGSEPEALLKVLGNPAYRFKRIGLEAGPLSQWLFSALAEAGLPVVCVETRHMRAVLKAQINKTDRNDARGIAQMMRVGLYRPVHVKTLRSQKLRMLLTHRKLLQSKAIAIDNDLRGTLRNFGLKVGMVGTVKFEARIRELVEDLPDLVVLIEPLLIVRRTLREQVVILHRRLLAIVRDDEVCRRLMTIPGVGPVVSLTYRATVDVPARFRKSKSVGAVFGLTCSRYQSGEVDWSGKISRCGDEMMRVMLYEAQSMMHSKKWCWLKAWAMQIARRRGMKKAIVALARRLAVIMHRMWVDGTEFRWTREKAAAAA

SEQ ID NO: 103905 - protein, 312 aa, unidentified
MYYIGIDVSKKDLSVFDGKKDLKFTNKKGLKSFKKYLKKKYNLSEIAIIFEPTGVYSLYLKEFCAENSIKAYIINPKKSHNFTRALGKRSKTDKIDARILYQFHKNIDLKDIKVPKIDQQAKTLASYLVSYEFVLKQRISLSNHLESLRNKSLISLMKKDLKRAKMLEDKLFHDIKEYVSKNQNLREDYKRLLTISGVGEKTAIALLTLFKTYQGTNRAQITALAGLDPVKRESGTSVKDKAKISKNGKGIYRKIFYLPTICATVHNQKIRVFYQRLLTHHKTKKLAVIASMRKILLIAHAMYRDKTEYIAI

SEQ ID NO: 103906 - protein, 337 aa, unidentified
MDYFAGLDISMDETHVRVLDREGMVVRESKAESTAQAVANELAKAPSCRRIVFETGRMAPILFHGLNQLGLPVVCVESRQAYQALKSLATHKTDRNDARGLAHLARTGFFKPVHVKSLRAHALRSLISARKKLVGQRVTLENQIRGLAVVFGIRLPRALTTAFIDQALKASEGVAGLSAAMRGLSAARVAVMTAVAAIDADIRRMTRASAACRRLMTIPGVGQLTALAFVAAIDDPSRIRRSRDIGAYLGLVPRRYQSGEVDYTGGISKCGDGRVRTLLYEAANVMLTRYKGQLKLKDWAFAIAKRSTMRKARVALARRLAIIMHAMLRDGTEFAPA

SEQ ID NO: 103907 - protein, 347 aa, unidentified
MKRIAVDLAKSVYQVAESVRAGQVSQRRRLSREAFRRYIQEQVEPVEWLMEACGTAHHWGRFAQSLGHRVVLLHPRYVRPYRRRNKTDRNDCDAILEAARCQGIQPVPVKSHEQQQLQQLHGLRETWKKSRTQRINLLRGILREAGIEAPASTAAFLRRANELIERPELARLRGLLQIVLGEINLYQQCMADCERQLQQWHADDAIVRKLDEVSGIGLLTASALQAAVGQPERFANGRQLSAWLGMTPREFSSGNSRKLGHISRQGNVYVRTLLIHGSRAALLAAQRCQARTPEKLTHLQRWAVETAARIGHNKAAVALANKLVRICWAVWCHERRFSGDWQSTRPA

SEQ ID NO: 103908 - protein, 381 aa, unidentified
MKPETTDTIHDTPFSQCLYMALELSHGKWLLGFTIGFGQAPRLRSIMARDRKALAEEIDLAKKRFNLAADIQVRSCYEAGRDGFWLHRYLAAQGVDNRVVDSASIEVNRRKRRAKTDRLDVSKLLTMLMRYHNGEQKLWSIVHVPSPEEEDQRQLHRELMALIAERTRHINCIKGLLVSQGVVFPIQTDFLCRLEAVQLWDGSKLPVGLHARLAREYERLQGGKQQIRELEHSRVEAVRTSSTPAVEQVRQLLRLKAIGMNSAWVYVMEFFSWRNFRNRREVGSLAGLTPTPYRSGESAHEQGISKAGNRRIRAMAIEIAWVWLRYQPNSQLSIWYRERFAKGNSRVRRIGIVALARRLLIALWQYLETGVIPAGACLSKP

SEQ ID NO: 103909 - protein, 350 aa, unidentified
MTSLTEIAEIVIGVDTHVDTHTAAVVETSTGAVLAETTVSTTPTGYQELLDLAGEHSPLRVWAIEGTGGHGAGVSKLLERESEVVIELDRPHRAKRRNGAKSDPLDAVRAAREAMTRPHHASPRTGQERQSLSVLLAARRSAVTAATAAQRQLFSLTIAAPERIRTKLRDLTLPEMVAIAARFRVQPSWDVETATTARVLRDLARRAQALQAEADEHEKRIRAIVRSWRADLLAEKGIGPIIAATVLCAWSHPGRVRDEAAFAMLAGAAPLPANSGKVTTRYRLNRYGDRQLNRALHTIVLCRQRYDQATKDYTERRTSEGKTPREIKRCLKRYIARDLYRLLENPPLPA

SEQ ID NO: 103910 - protein, 365 aa, unidentified
MPTRKLPNPDDFRGQKFYIGIDVHKKSWAVTVRSLNFVVAHFTQPPSPAALLSQLQRKFPGGEHFSTYEAGFGGTSAHEELCKLGIKNIIVHPGDIPRTDKEKKNKTDVHDSRSLAFHLEKGNLHSIYMLSRQQQEFRALFRLRESKARDVARAINRLKACQLYFGIDYSSTFEGYISARVISWLRKLRMTDEAGDFTLKKYIDDLVHQRNELGKITKALRSQAKKEYSLPYKCLLSVPGIGFTTAIGLLAEIGDFNRFKDPAEYCSFLGLIPWQHSSGESIRVKGIQPRCNKHLRPLLVEASWLAIRNDPSLLKYYRKHAVKNSRHAIIKVARKLALIAKGVVQKLQLYRADYFPLSNQELVAQ

SEQ ID NO: 103911 - protein, 498 aa, unidentified
MKTHASNLKSENVSPVSPATPAKPARRGRKPAKSPATDGLEQINLHAAGIDVGSAENFVCVPASAVKPGEASVRSFKVFTADQDALVEWLQDCQVNTVAMEATGVYWMSLFDKIEAAGLEVLLVDPHSVRQVPGRKSDVMDCQWLQQLHTYGLLRGAFRPAAGVRKLRVLCRHRADLVCEGASHLQQAQKALVQMNVQLHLVVSDINGETGLRIIEAILAGQRDPVELATLRDPRIKKSTVPEMVAALTGHYAEEQLFALQQNIDAWKFFQRQLAACDLQIEAALKAMAAAEKAGVPPAPPKTVPAAAPGSTGARKKRSRPLHGNNALTVDLSEQVRRVCGVDLMKVCGLNLLSVLMILAEIGTDMGRWRSAKAFSSWLGLCPGTKISGGKQLSRRTRHVVNRAAILLRLAALAAGQTDTWIGRFYRRKRAHLGAPKAITATAHKLACVIYHLLKYQEEFVPLDVAIYDIKAQEHRMRRLRKQAEELGFELVSRKEAA

SEQ ID NO: 103912 - protein, 334 aa, unidentified
MKQVNQVGVDVDSEALVSMMRRGGQRLPLARFANSAGGHKKFIRWATKGARPVRVCLEATGIYSLEFALALHHAKNVEVMVVNPRAMKDFGRASMQRAKTDAVDAGVILDYLERMPFTEWQPPTPEILELQAINRRIVQLNTELTREKNRHHASEFAGASADAIAHDIEVNIHHLERRIARMQDSGLQRVRSVPALAAKLAHLVSAKGIGEASAMRILAELLVLPDDLAAPQWVAHAGLDPRPYESGTSVHPPRRISKVGNAHLRAALYMPALVAIRHEPNVKAFYDKLIAAGKKPLQAVVAVMRKLLHAIWGMLKHDQDFDGNKFFKLTEKTA

SEQ ID NO: 103913 - protein, 402 aa, unidentified
MNCVGIDVSKGKSMIAVMRPFGEVVVSPFEVRHTANELSELAGLLKSLDGETRVVMESTGNYHAPVAWLLHGAGLYVSVVNAMLVHDYGNNSLRRGKTDKKDAVKLANYGLDHWLTLPRYVPEEDTRLMLKTCYRQYQQYSKVQTMLKNNLISLLDTAFPDANRLFTSPPRADGSEKWVDFVATFWHCECVCGLSKKAFTAKYQKWCRKHGYNFSQDKALDIYASACGRFGVMPKTNTAKLLVEQAISQLQTTSAALAALKQEMQSLAASLPEYPVVMGMFGVGPTLGPQLIAEIGDVRRFHSKKALVAFAGIDAPPYQSGQIDVRSRSISKRGSASLRRTLFLVMGVLLQCAPMDEPVYQFMNKKRSEGKPYRVYMMASANKFLRIYYASVKAYLDSLEHD

SEQ ID NO: 103914 - protein, 370 aa, unidentified
MEEGIKFFVGLDVHKDTIAVAVAETGRAPARLVGSIAHDVNQLLKRLARYGEPAQVHVVYEAGPTGYGLQRALARRGYQAQVIAPSLIPKRAGSRVKTDRRDSLRLAELSRAGELRAVWIPDPADEAIRDLARAREDAVNARTQVRQQLKGFLLRHDVRYARRTSWSKTYYRWLATLNFGETGVQTAFTDYWQAVSAADERVGRLTTALVGSIAGWRFASIVAALQALRGIDQINAIGLVAEIGDIGRFAHPRQLMSYLGLVPTEASTGERVVRGSITKTGNAHARRLLTEAAWNYRFQPRIGMRAQRRAEDLPQAIRDVAWKAQLRLSGRFRRLHTRGVHLNKVCTAVARELAGFVWAVARARSELPQS

SEQ ID NO: 103915 - protein, 412 aa, unidentified
MKVVYKVCCGIDVHAKMLVVCLILANGQKQTRTFSTMTDDLLRLRDWLEAAHCTHVAIESTGVYWKPVFNILEDVLEVILINPEHAHALRGRKTDVKDAEWLADLLRHGLLKASFIPPPEIRELRELTRYRESLVREQSRVANRIQKVIESGNIKLGQVASDALGVSGRAILWALARGETDPVKLASLAQRKLKQKVPELRRALQGCLTVNQRFVLRESLKRWEELEASDRRVTQEIDRYLQDRPKLARAREKLDGAPGLGPRVAEMVVAEIGVEMKANFPSDAHLASWAGICPGNKRSGGKRMSGRTRKGNTYLRSALLQAAWGASRKKNCYLSSQYSRLVKRLGRKKALVAVAHSLLVIIYHILERDQTYTELGGDYFDRHNVEQQRDYFIRRLRLLGFKVNLEELAEAA

SEQ ID NO: 103916 - protein, 286 aa, unidentified
MTPTSLPDSSPSCSTEVILGVDTHRDTHSAAVVSALGALLDSQTFSATADGYRSMLGWARQYGVVRRAGVECTGSYGAALSRMLQGEDVEVFDVNQPDKRARRTRGKTDTIDAEAAARAVLSGSASVIAKTADGPVEAMRLLRLARDSAVNARTKAINQLKGVIVGADPQLRESLSGLGPATLIRRCAALVEPDDATEVQQTLIYTLRLLAERILRLKAEAYELHKRLKALISGHNPGLLELPGVGPDSAAALLIAAGDNPERLRHEASFAALCGVSPVEASSGNT

SEQ ID NO: 103917 - protein, 321 aa, unidentified
MNKDKEIYGIDISKDVFDVFNGSVGHYQLTNNLKGFKKLLKQLPLNAQVVMEATGYYHYQLAQYLALHSIKVSVVNPLSVKRFIQMKLAKVKTDKSDAKAIYDYGMFNELPDYNPQCDTHAECLQLVSLLDSYIKKATAAKNKIHGEKTLGSPSKLALQSLNRHLKHLKGEIQNIENRLFELVKQQQQNQLALLQSIPGIGPKTALFLILITDGFNKFEKASQLCSYVGITPTIRQSGSSVRGRSRISKVGNKKLRSLMFLAAFSACKHNNSCQALYDRLINKGKSKKLALIAVANKLLKQAFAIAKSGLPYDANFVSKLA

SEQ ID NO: 103918 - protein, 368 aa, unidentified
MNTVKFIGLDVHKKTITIAIADQGRENQPRSYGAIANDLGALDKFCRKMVSTAGRLYFVYEAGPCGYGIYRHLTDKGFDCMVAAPSLIPKKSGERVKTDRRDAAKLASLHRAGELSAVYVPDPAEEAMRDLSRARQDAVNATKKAKQRLKAFLLRNRIVYSGRSAWSKAYFRWLADITMAYPAQQVALQEYIHAVHEGIQRVERLTDQIRQLVPGWRLAPIVSALQAARGVSLVVAVTLIAEIGDLSRFHKPSQLMAHLGLVPSEHSSGQSTKRGSITKTGNSHARRALVEAAWAYRMPARVSRLLLKRQQDVPEHVCRIAWKAQLRLCTRFRRLAARGKVKQKVVTAIARELSAFLWAMAKQVQPAG

SEQ ID NO: 103919 - protein, 419 aa, unidentified
MFKIFYKNCCGLDVHKTWIYACIGITDADGKTVYHESRFSSFSKGLRKLAKWLQKYNCKLVCMESTGKYWIPVFNILEKTCDVTLAHPKYTKPQKGNKTDRKDAKWICDLFMCGMIKPSFIPPAAIRQLRDLVRYRSKLTNMLTGEKNRAQNCLTVSNLKLDDVFSDVFGKSSRSITEYILDHPGETFDVTPFVDGRCKAPIEEIQAAVDGSVSKEQAAKLRQCLKHIDELTAHKQKIEEEILQIAEPFSTYLDLLRTVPGCDSDKMTAITILSEIGYDMSVFPSSKNLTSWAGCCPRNDRSAKHTKSTRISRAGAWIKPLLVQISNALIRSKKHPEFSERYRRLKARRGHKKAIIAICRMLLTAIWNILSKLEPYTPDGFINDRPADKKKTMSTAEALKLLKSRGYIITDLPDGSVTT

SEQ ID NO: 103920 - protein, 317 aa, unidentified
MKTTYTHYWGIDVSKEWIDIAIENKVIRVEQTQRAIKAFIKRNKGYTENALAVLESTGGYEKLAIHCFSEAGLQVHLAHPNRVYAYAKAKGRLAKTDKIDAILLSNYGSFIELTDIRAQPSKEQEELQFLWARIEQLKAMHHQEACRLGVATTKAVKKSQEALLGLIKKQINEMEQLALKIIKANPELIEKYDLLSSMKGVGQTLALALLIDLPELGRVNKKEIAALVGVAPITHQSGKREGKAMTKHGRGGVRKILYMGALSACRHNPKLKEFYNRLLGAGKLKKVAIVAVMRKMVVILNAMLQTKTRFNAVAVEI

SEQ ID NO: 103921 - protein, 350 aa, unidentified
MTTLPLRITGGVDTHLEVHVAAALDHRGALLGVESFETTPAGYRALHDWLSGFGRLEQVGVEGTGSYGAGLTRSLHGEGVRVVEVDRPNRQRRRRRGKSDPQDAIAAARAAQSGDAYGEAKTRNGNVEAMRVLRVARTSARKARTQALNQMRSLISTAPDDLRGELRALNVYRLLERCSVYRPGTGRDPRTLTKLTLRLLARRALCLEAEVAELDRILESLVVDTAPELVARVGIGVECASALLVAAGDNPDRLRNEATFAHLCGASPIDASSGKQERHRLNRGGDRQANSALWKIVITRMVYDPRTRDYIERRTKEGLTKKEAFRCLKRYIAREVYNHLPHHQLALDSP

SEQ ID NO: 103922 - protein, 396 aa, unidentified
MAGPLKVVGGVDPHADTIHVAVITLTGKAVADREFATTADGYRSATAFLTATGVVVRVGVEGAASYGAGFTRALKTAGIDVVDVDRPARFDRRRAGKSDRLDAYHAARAVLAERSNPVKGPAIEGVRALHLARRSAVKAQTAAMNQMIAILVMAPDTVRARYRRLHGDRLAIALTRRRGALDPVSADTLLALKALADRYRQLAVQVEALTARLDHAVRQVSPALRAAFGVGPDTAAQLLITAGSNPERLYSERSFAALCGSAPVQASSGKTHRHRLSRGGDRAANSALHRIALVRMANHPPTRAYVARQTANGHSKREIIRMLKRAIAREIYRLLTHPADVPNYADLRAVRQAKNITVTLAAQHFDVWPAVISRLERGLRRDDDLARQYRTWLAAA

SEQ ID NO: 103923 - protein, 315 aa, unidentified
MSPQVLSAVIYVGADVAKLSVALQLPDQSWSHANTPEGHAALVTRLQTLAAPAHVVCEATGGYERAMVGALHRAGVAVTVLNPRQARDFARACGHLAKTDGIDAQVLADYGAKLHPQADPAPAPGEEAFAELVQARRDIVGLLTAEAGRREHTTLPALRKLADARQRQLEKQLAKLDALLDAHVAANPKLAAKAERLSAVAGVGRVTVLTVLALMPELGTIEDPKAAALAGVAPINHDSGQYRGQRHIAGGRSAVRRVLYMAALSASQHNPILGAIYQRHRQNGKPHKVALTALMRKLIVLLNRLLRNPDFVLVG

SEQ ID NO: 103924 - protein, 437 aa, unidentified
MNEHADVVELQVEVEQVERVAAIDIAKASAVVATRLPAERGGRRVQRVWQVAAHTAAIEELADHLVCQGVQLVVMEATCTYWKPYFYLLEARGLRCWMVNARDVKNVPGRPKTDKLDAVWLAKLAERGMLRPSFVPPKPIRQLRDLTRLRKTLTQDRTRYRQRIEKILEDAQIKLSAVVSDLFGISGRAIVDALVAGERRPPVLAELARGSLRGRKSTLIEALTGQFEEHHAFVIGLLLEDHDRLDAQIHRLSQRIEQAIEAIDPAPPPGGGDPCPGLVERLDEIPGVGRTCAETIIAEIGVDMSAFPTAGHLASWAKLTPRTVQSGAKNTHGPSGKGNRWLKGPLAEAAVCSSRTKTFLGARYRRIAKRAPAKKAIVAVSRNILEIAWVLINDPDARYTDLGPDWHERHVNRTRRTRQHVRELEHLGYSVTLAPAA

SEQ ID NO: 103925 - protein, 337 aa, unidentified
MKYSAIDLHSNNSVVTVTDEEDRVVVEKRLPNDLGKILGFLLPWREELVGVVVESTFNWYWLVDGLQAAGFKAHLANTTAIKKYEGLKHSGDEADARYLAHLLRLGILPTGTILAPEQRAVRDLARKRMQLVRSRTAHILAVENITARQYGARISSNQVKRLSAETVDQMPLPEDVALAIKANVAVITTISAQIDVLEKRLQERVGARAEYGLLTSVPGIGKVLATTILLETGPIERFAAVGNFASYARCVDSVRTSNGKKKGEGNTKNGNKYLAWAFVEAANFALRYCAEAKRFYERKKAKTNNAVAIKALAHKLARACFHILKERKPFDVTRCFA

SEQ ID NO: 103926 - protein, 338 aa, unidentified
MKLYAAIDLHSNNSVLVILDETDRIVLQKRLSNRLERILAMLVAYREAMEGIAVESTYNWYWLVDGLMEAGYRVHLVNTAAVKQYEGLKYREDADDARWLAHLLRLGILPQGYIYPRAERGVRDLMRQRSRLVQQRSQQVLSIENSLSRELGERSAANQIKRWQDTDVDRLPLADTSRLAVKSRLAVMRCIDEQIDRLEAAILETAKLRPDYQGLLTVNGIGKVLALTIALETGDVSRFPSVGDFSSYCRCVGSEHLSNGKKKGSGNVKSGNRHLAWAFVEAANFAVRYEPTIKRFYQRKSAKTRPVVAIKAVAHKLARACYHVMRDRVPFDVQRAFA

SEQ ID NO: 103927 - protein, 338 aa, unidentified
MAILYVGIDLAKSVFAVHGVNEAGKAELVRPSVARAKLLELIATLPPCVVGMEACTGAHHWARLFMNHGHTVRLMAPKFVAPYRLSGKRGKNDAADAAAICEAVQRPNMRFVPVKSTEQQARLMVHRARQGFVEQRTATLNRIRGLLSELGIVLPLKAATVRREAALVLEDLPGRANLVIGDLLSEVHRLDERIEQYDRQIVLMARDDERARQLMGLSGVGETTATALIAMIGNGHEFKSGRQLSAWLGLVPGQYSSGGKTRLGRITKAGDAYLRSLLVMGARAVLNAAKGKSDSVSRWAVQVAERRGYWRAIVAIAAKNARMAWAVLSRGERFVMPA

SEQ ID NO: 103928 - protein, 461 aa, unidentified
MIRRLVGVDLGIASAHTVRVLTEDGREVCRRRCEPTVDSLRRVETAALAGAPAGTVLEVVMEPTGPAWLPIAVFFTARGHRVFRVSSGKAADLRRFLSRHAKSNGIDADTLARLPLVDPAGLYPLELPGTEAAALDRRVRATDRLTVLAAQHKVRIKDLTRQLLPCSPLTGDLGVADLAVLERWADPRALLAAGPARLTALIVKASNGHLGADRAQQWRAAAAAAVELYGDHPAIAWTDLAAEVGTEVRLLRATLGELAAHARERETAYRYADLGGLARSLPGVGDVGGPVLVAGMGRPGRFPNGAAFKSYTGLAPRAAETGNTDRKGQPMSKAGSSLLRTTLIRAADTARKQDPQLARIYYTQMVERGAEHLKAVCVVAGALAERIWTVMNRQMPYVICDIDGTPVTPEQAKQIIAQNFTVPDEVRRRRRSSKTPSRKPAQQPTISSKGGRPPSKPHTAA

SEQ ID NO: 103929 - protein, 351 aa, unidentified
MSIIGGLDVHRAQITFDWVDRDSGEAHRGRIAPATRAGLRAWLGELPGAEGGFAVEGCTGWRFVVEELQAAGLVAHLAEPAETSSLRGPKRRAKTDRTDARLLRELLEQGRLPCSWIPPAWILDLRTTVRLRKTLVDQRTAWQQRIHAALFHHGLPRPTQELLSHGTRAWLEQAPLPAASRQLLGVALGQIDGLDAELDPIDQWLRSLARSQPGCRALIASHYGIGAITAPTILAELGDARRFGGGDQVVRATGLDVTVYASDGKRSPGHLSRQGPEVLRWALFEAAKAAARPRSPDYPYYQQVKARQGGNRATLAVARKLARRVRHTLVGLGEAALAPVDGLPLPVPEAA

SEQ ID NO: 103930 - protein, 338 aa, unidentified
MKITTVGLDIAKSIFHSYAINHTGRLIRKKQLKRQQLLAYFAKIEPCIVVMEACGGANYWAREFIKQGHQVKLIAPQYVKPFVKGNKNDYNDAQAIAEASQRSSMRFVPIKSVEQQDLQNFHRQRERIKKERTALANQIRGLLAEYGIVFKKGITAVKSDLPFILEDATNGLTVLSRALFNELLEEFSMMCELINNCDKKIKLANKNNDVCTRLVDILGIGDITSSALYAAAGDGKDFVNGRHLSAWIGLVPGQHSTGGKPRLLGISKRGNSYLRTLLIHGARVVLRHSEKKNDRFSLWAQALLKRRGHNKACVAVANKLARMAWVIMAKGETYRPAM

SEQ ID NO: 103931 - protein, 440 aa, unidentified
MAMRKGEEKVFPNAAGIDIGASSHWVALPADRAQETVREFGVMTGDLTEMAQWLLANGIDTVALESTGVYWIAVYEVLEQHGLDVWLVDTRQIKYVPGRKSDIQDCQWLQRLMSWGLLRAAFRPDADICAIRAVSRQREVLIIEQASWVQRMQKALVQMNIQLSEVISDVMGMSGQAIIRAIACGQHDPEQLATLCNRRIKARRAQIVRALQGNWRAEHLFVLGQALGMYDDIERHLRECDAKLEQMLTSAKAQDVDIGKPARAGTRARQQFDARQRLANWAGVDLTRINGLGADSVMKILSEIGVDMSCFKTVKHFCSWLGLAPGSKISGGKVLSSRTKRSANRARQAFRMAAMSLSHSDSALGAFYRRLCMRMDKARANTAVAHKLARMVYFMLTRGEAYVDEGQQRYEEKQRQRSVAALKQRAKALGFEVNPVLVAA

SEQ ID NO: 103932 - protein, 413 aa, unidentified
MERMLERCAALDVHQASVSVCVRVPGECDQRREFNERFGTTTPDLLALCDWLRGHSVTHVAMEGTGVYWKPVYYALEGEFELLLVNAAHVKQVPGRKTDTKYAAWLCQLLECGLLRASFVPPRPIRELRDLTRYRKTLIRDRASEANRLHKVLEDAGVKLSSVASNVLGVSGRLMLDALCQGSNDSVALAELARGRLRSKLPALQRALESRFRDHHGFLVAQILGHLDYLDEAIAACSARIEEQIAPFASALTLLETIPGVGRRNAEVIVAEIGVDMSVFPSSHHLAAWAKLSPGNNESAGKRKSGSTGKGSPWLRSALVESALAATRTHGYLRAKYWRIRQRRGHQRAVIAVAHAILEISYQMLTTGELYHELGDDFFERRDNEHAKQRHLRALERLGYQVTIDAVPEPEAA

SEQ ID NO: 103933 - protein, 362 aa, unidentified
MQDNAQIQCSNRPVVGGVDTHKDLHIAAVVDEHDRVLDNQCFASTRQGYRKMLAWMQSFGEVTRVGVECTGTYGAGLLRYLQQSGVHVVEVTAPDRADRRKRGKDDQIDAQNAAHAAFAGIRTATPKSRDGMIESLRVLKVCRKTAVSARRVALQIIQTNIVSAPDELREPLRNLTRMQLIRTLAAWRPDLTDYRNVTSAYRITLKSLGRRYLELHDEIADLDTLIAALVNELAPELVARNAIGYESAAQLLLTAGDNPERLKSEAGFAALCGVSPVPASSGKVTRHRLNRGGDRAANSALHIIAIGRLRTDSRTQDYVKKRIAEGHSKLEAIRCLKRYIAREVFGLICKRNRQVNQAQIAT

SEQ ID NO: 103934 - protein, 482 aa, unidentified
MKPKPEEKTKEATCHPKQPHWHEMNRKQRLETMRKIQSEDLSLEMVHPDAAGIDIGNESHYVAVPPKRDSQPVRRFGCTTAELKAMAEWLKQCRIRTVAMQSTGVYWIAVYDILEEAGLQVYLVNARETKNLPGRKSDVQESQWLMKLHTYGLLRNSFRPSQEIRRLRTYWRQRHDLVRSAGRHIQRMQKALTQMNIQLANVLSDVSGTTGQAIIKAILAGERDPHKLAVFRDPRVKASKEQIARGLEGHWEEDLLFVLKQEQDGYEFCQKQMAECDRRLEQYLQQREDRSQGACLPEEKRKERLRKKKGNAPQFGLRADLFRMTGTDLTQIDGIDVMTATTILSEAGWDMSKWKTEDHFVSWLRLCPDNRISGERIIGKGRLPTNNRISIALKMAASTLRMSNTYVGAQFRRLRTKLGAPVAIKAMAAKLARLVYRMLRYGMKYVDQGAQFYEAQHRNRQINYLKWKAAKLGFQIIDAPAA

SEQ ID NO: 103935 - protein, 346 aa, unidentified
MGIDPHKQTHTAVAVDGATDCVLAELTVRARSQGFERLVAWARRLGEERLFAVEDGRHVSGALERHLIARGERSVRVPPRMMGESRRTDRIWGKSDPVDATAVARAALRHPDLPEATLAGAEREIGLLVAHRESLVRERTDKICKLRWLLHDIDPELAPVPRSLNRFVTLDRLALTLEKMARGIDVEICLDLIARCREITTRANELERAITALVLTHAPALLQIPGCAALTAAKIVAETAQVGRFPTEGHFARYAGTAPIPASSGARHRQRFNRRGNRQLNTAVHRIAVTQIRMHEPAKDYIARKRAEGKTKTEAIRALKRHITRVVFKTLTSMNQPTDRLTAVAA

SEQ ID NO: 103936 - protein, 388 aa, unidentified
MHIVTDRPHAPTAIRTDLGAIFISLELSRSTWLITSLSPGGGEKMSKHTVRSGDVAGLWARFSRLKDKVQVRTGQTVPIIVIQEAGLDGFWIHRLLQDKRVESYVVDPASIATSRRRRLAKTDKIDGEALVRALLAYKRGEPRVCAMVRAPTPQEEDRRRICRERKTLTAERVEHVNRIKGLLFAQGITDYEPLSRKRRERLEELRTGDGRPLPEHLKAQIGRELDRLELTLQQIKSVETERDAMLSPSDEGTRAPGAMLQNLKGIGAEFAGVLWSEGLFRSFSNRRQVAAYAGLAPTPWRSGSVAHEQGVSKAGNPRLRTTMIQLAWLWVRHQPRSILTLWFHQRVALNGGRARKVLIVALARKLLIAFWKYVTTGVVLEGAETTAS

SEQ ID NO: 103937 - protein, 352 aa, unidentified
MRRPKHQVTREEDLFVGIDLHKHRWHVTIRTVDLELFSASIPGTWEALQRILARYTGHQLQAVYEAGYFGFRLHDRLVAHGIPCLVTPPSLVPQEYGNRVKTDRRDSSKLAHLLAKGMLKRVWVPSEEELYHRQVIRRRRQLVRDRVRTQSRIKAELRFYGIHLEEPRGNWTQIYFETLRRLRFGNRWMQESFNRLLEQYEFLSAQIDKQTQLLRELSETARYRERVEILQSIPGIGLISAMELLLELQDVSRFRRAEQLAAYVGLTPSQYSSADKVRMGRITGIGKNTLRSLLVEASWTLIRKDQAMREKYERIKIRSGGKRAIVAVARILLLRMRRMLLDKQAYVLQLAA

SEQ ID NO: 103938 - protein, 343 aa, unidentified
MLREKVAQSELNGKSSMLEKYDHYVAVDWSMRIMAIAHMTTRRNVPQVFERPTNLKELKTYLSTLNGRIVLTIEETTTSQWLFLELFDHVDRIIICDPYRNRLLSNGPKTDKIDAGKLCLLLYNGLLSEVFHSTSDLYELRLLVGAYVDHVRAGVRSQNQKSALLRGHQDQSPTALFILRRLDSDIEQYRATKEEFEKHFATIVRKNTLLRNLTCVDGIGKIGATKILACVVDARRFPNRSKYYGYCGLARHEKTSGGRNYGSRRPRFNHMLKDVYKTAASAVIGSTKPLHEYYEALRSKGVPEHNARHAVARYIARVTLAIIKSGQPYDPYRWRQNIIEQDH

SEQ ID NO: 103939 - protein, 347 aa, unidentified
MSISMIGLDTAKSVFQIHAVNEAGKVEIKRKLRRSELIAFFEKQESCTVVMEACGAAHHWARMLTGLGHTVKLIAAEAVKPFVKKGKKNDAADAAAICEAASRPDAKFVPAKSVEQQGILALHAARSLLVKQQTMLANAMRGLATEFGVTVPKGIRKLDELMTLVDTDENIPKQAKQAITGLHDYCNDLSEGIETFEAEIVAHARTDETARRLATIPGIGPITASLIVATVVDISLFKTARQFAAWLGLVPRQNSTGGKTRLGRITKTGNREIRKLLVLGATSMVYRADGWNSAVGGWLRTILERRPVRLVTVALANKMARIAWAVMTRKEVYRSKGGVAVAPQATA

SEQ ID NO: 103940 - protein, 371 aa, unidentified
MSNVAKCIGLDVHKATIAVAVAEGGPGGEVRFVGTVANDDDEVRKLVKRLATPGATLSFCYEAGPCGYGLQRLLIKLGQPCIVIAPSMMPRRPGDHVKTDRRDAMTLARLLRAGELTAIWVPDEAHEAVRDLIRARRSAQEDATAAKQTVRSFLLRHDRRFEGRSAWTKMYWRWLSEQRFDYPHQQLAFEELQKRVLEAQARVVRLESALGEAVASWHFAPLVRGLQALRGIKLVSAATLVAEVGDLTRFDNPKQLMAYVGLVPSEHSSGARTHRGRITRAGNAQARTTLVEAGWSYRLPAREERRYRERVADLPEEVQAIGWKAQVRLCQRFRRLSATGKPQPKVTTAIARELVGYAWDIARRMAPAMTN

SEQ ID NO: 103941 - protein, 424 aa, unidentified
MQQSAPEDFGAYIGIDWADQTHFVSLREANSQEVKRYKLEQRPEVLSQWVNELQQRFPGQRVAVALEQTRGALIYALMSYEFFVLFPVNPKALARYREAFNVGGAKDDPTDSDLLLELVTLHRSKLRAWRPDDELTRTITLLVQYRRDLVDMRTALTHRLGALLKLYFPQALQWAGELDTFQACDFLQRWPTLAKVQRTPAARLRQFYVSHNCRTVAVIEKRLQQIPTAQPLTTDGAVITTSVTMVQAIVNQLRPLMESIKELDKQIAELFAKHEDFELFSSFPGAGEVLAPRLLSALGAHRDRFESAEEIQQLSGIAPVTERSGKTCWVHHRFACPKFLRQSFHEFAAQSIAQSAWAHTYYKRRRERGNGHQAAVRSLAFRWIRIIYRCWQMRVPYSEQTYQQALRRRGSPIARLIPLADQAS

SEQ ID NO: 103942 - protein, 333 aa, unidentified
MSSIAPTRQVTVTRIICGVDIASSSLAARVGQDGAEATFQNSTEGIAGLAAFCHNHDVELVAMEATGGYEQRAFAQLSESDLAVTIVNPRAVRQFAQSMGRLEKTDSIDAGMIAWYAETKKSQPLCLAPQTQLELRARVTRLRQLTELRTTQLNQQRLVTNRAVQAGFRKMLAFVAKQIQELEKSIAALIDADPLWRELDQAFRTIKGVADRTVARIMAEMPEIGTLSNKTTSKLAGVAPLAQDSGKHQGKRAVRGGRAAVREILFIVASVVGRHEPDFVAFQKRLRDAGKPPKVIRIALAHKLLVRLNAKAREVRQRLAILDPTASPLLAAY

SEQ ID NO: 103943 - protein, 428 aa, unidentified
MSYRIAGIDVHKKMLAVVVSNVEVESEFQFERRMFGGNPEQLRLLGAWLLEQEAEEVVMESTAQYWKPVWGALERYWKPIREKREGAKRRSGTLHLAQAQSNRGQRGRKKDFVDAERLVKRLVARELTLSFVPDVEQRLWRAVTRKKYQLRRDLVRLNNQLESLLEETHIKLSSLVSDLLGVSARRMLNALANGETNPAALAALAHQRLRATPEQLCDALGACTELKPVYRQLLKMTLEHLQILEQQIGQLDQELATLLHPHQDAVQRLAEVPGFGVDSAQQIIAEVGPAAATFPSEKCLSSWVGACPGDEESAGVNYSHRSPKGNRHMRRLLNQAANAAVKVKGSIFEVIYCRSVPRLGHNQAIGVIAHRQCRLIWLILHNGVLYEERGPAVTTLSKYKRTWRMIRQLRQLGYRIELPNPQASQAQA

SEQ ID NO: 103944 - protein, 353 aa, unidentified
METAYDGRQVVGMDLHRRRSVLVRMTEDGQRLGVARITNSPAGLCRVIAQAGASPRVVLEGTYGWYWAADTLAAAGAEVHLAHPLGVKAFTYRRVKNDERDAADLADLLRMGRLPEAWIAPPEVRELRELTRYRHKLVGLRTSCRNQVHGVLGKLGVPVTCSDVFGVAGSVWLDELRLPQPYAGKVTSLRQLAGELTTEITMLSEVIADLLAGHRGCQVIQQLPGIGPALAAVIVAEIGEVRRFGSAAQLCSWAGLTPRHRESDTKITRGHVTKQGSRLLRWALIEAVQHVPAGSLPGTVKQRIIARRGKQAKNIAKVAAARRLLTLVYYGMRDGQVRCLSQNPAGSPPARAA

SEQ ID NO: 103945 - protein, 348 aa, unidentified
MNATRKTVVGVDTAKSVLQVYTVEQETGEVINKPIKRAQFLQWFANRAPCLIGMEACGGSQHWARKLQAMGHEVKLMSGKMVKAFVCGNKNDAADARAIYMAAQQPEVKAVAVKTESQQAVLAMHRIRQQLVKVRTAQINELRGLLGEYGEVFGQGRKAFDTGMGAALERLTERLPAPLIDTLRDQWHELTRLDERITRIEASLRAWLREDCGAKAIAEIPGVGLLTATAAVAAMGDAKAFRSGREFAAWIGLAPGQTGSGGKVRLLGMSKRGDTYLRTLLIHGARAVLQHAKTPGPWLQKLSQRRPRNVVIVALANKIARTIWAVLAHARAYDKDHVSMRPLAAAAA

SEQ ID NO: 103946 - protein, 398 aa, unidentified
MKKPSTKEMPWKTTYVGIDAHKKEHVICILYPGDPHGHLVRIPNQPREVRRLVKKIVKRAPGEVRMCYEAGPCGFTLQRQIQEAGAQCVVIAPALIPVKAGERVKTDRRDAYKLAVYLQSDLLTEVVPPTPAEEAARDLCRCREAARIAQSRARQQLSKFLLRRGCIYSEGVAWTQKHERWLHTLSFPDPLDQEVFEEYVAEVAHGTQRLARLDQRLEALAREAPYAEAVGWLRCFRGVDTVTALTFVTELYSFGRFGSPRELMAFLGLTPREHSSGEKQKRGGITKTGNRRVRRVLVEAAAHYDKRSPKSGAVRKRRQGQPAWVINVAEQAEERLHKRYEQLRHQGKERNVAVVAVARELAGFLWSVVYVQAEEVHPDRESAPGHGRPVDCAAAAGA

SEQ ID NO: 103947 - protein, 418 aa, unidentified
MKSMEITAVGIDVSKSKSTVAIRRPGGVIVARPFDISHSNHDLEKLVSILKTTGGDIRVVMEHTSNYWKPIALTLKEAGFYVSVVNAMLIHDFSDNSIRKLKTDRADSLKIVNYALTFWNELPPFNDEDETRLVLREQSRMYERLASTVTSLRNGLIALADQTFPSIDQAFGHAIKNADGHEKWVDFFSIYWHRDCVLRLSIEKFTESYRKWCLRRNYKFRTNTAHKLYALAQDAVPTLPKNNGTKALVLQACKSLNAVCEAKQSTQEEMNRLASLLPEYEVVMQMEGTGPITGPALMAEIGDVRRFKNKKALVAFAGIDAPPFQSGNFESKSRHVSKRGSPHLRRAVFLVANIILTLSHKDNSVFCFMDKKRAEGKHYYVYTIAGSAKFLRIYYARVTEYLRTQEIPVAASCLNGNS

SEQ ID NO: 103948 - protein, 373 aa, unidentified
MPRYSTAFGMDVHLRSTTVCALDAETGEAVARRFRGNPWGEVAEWMSGFPGPSLAAYESGYLGFAPQRELSALGVDCVVAAVSKVPRSAADLSSKNDRNDAARMAKAILSHDITPVWVPSPEIEGLRDLAGAHDAATARLAAAKQRLLAFLARRGYVYGGTTPAGNPRKYWTYGFLRWLDGIRPADDGGIRALAALRNEVEAADEAREALLAEYRAAVAAGPLSAEVEALQSIKGCGFVLAAAFASEVGDFSRFRSGRQVTAYFGLAPKQRSSADSVRLGGISGAGNALVRRLAVEGSWRYAQAGHQPKLMPKGSGVPLEIRMHGRKGSERLLRRREEMLERGMPQAKANAATAAELVRWLWALGMMCREAGE

SEQ ID NO: 103949 - protein, 440 aa, unidentified
MPESRQAWKGIKVERQNESNIDPRFFAGVDLGSGEHAVHVVDESGKRLDGFTGEHGGAGQAALADRLRRICGGSPELMGVALETPRAALVELLLEQGFAVFAINPKQLDRFRDRHSPSGAKDDARDARVLAGSLRTDRASFRRLNPESALTIELRDLSRLDEGLKRDFRRGCNQLREQLHRYYPQLLGLCPAADEPWFWALLKRAPLPAAGAKLTPANIRQVLALHGIRRLSGDDIAAALRTPPLQVSPGTAAAASRHALMLVPRLDLLFRQIGETLAAMESTLGSMASDSEHQGHRDAAILLSLPGIGPVTGAAMLGEAAEPLRNRDYHALRSLAGSAPVTRQSGKRLVVGMRHGCHPRLRNALHGAVSCHVRWDPRAREQYQRLKAAGHNHARAVRGVGDRLLRLVVTLLKNGELYDPQRRLLPETKTVAATGQPVIC

SEQ ID NO: 103950 - protein, 347 aa, unidentified
MNSVGIDLHRNRSHIAVIDEHGEQLLSRRIVNDRDTFLELLDAIEGDSRIAVEATYGWEWLAELLEDAGYDVHLAHPSRTRAIAAARVKTDAVDARTLAHLLRADLLPEAYIAPRELRDLRELLRHRAALTAMRAALKNRIHAILAKHGVTRQHSDLFGKGGRRFLAELELREAPRRRLDSLLCLIDDFDREITATTKEIEQHANADDRVDVLTQIRGVGRYTAMLIIAEVGDISRFPSARHLCSWAGLTPTVRSSDGKARLGRISRQGSPALRWALVEAAQKSTTGGDRLREHFERITARRGRKVAKVAVARHILTLSYYGLRDGEIRCLARRSRASTTEKLAASA

SEQ ID NO: 103951 - protein, 386 aa, unidentified
MYFVGIDISKYKHDCFICTETGEVIKENLSFTNTNEGFTQLLNLLKSLDNSQEIRIGFEATGHYGMNLKLFLEKNNYSFMEFNPALVKRFISTQTLRRTKTDKKDAMLITKYLISADYKPHPKQFYHKYSLKSLSRMREKLVKQRSYYEVQITNVLDIIFPEYKPFFNNVFSKTCLYILNKYKTSDKIKNMKDFDSIRKISRSKFTSANFIKLKELAKNTIGISNDIFETELESLLILHSQIEVEINKLENKIESIIKELNPPILSIRGIGIISCAGIISEFGDISRFKSADACVAFAGIEPSISQSGTESHTGHMVKHGSGHLRYFLMNAADYVFMHESIFTEFYYKKRSEGKSHRVALTHVAKKLVRIIYKLESENITFNSNIN

SEQ ID NO: 103952 - protein, 341 aa, unidentified
MHAITIGLDIAKSVFQVHGEDANGKIIIQKKLRRSQVEEFFRKQPTCLIGLEACGTSHHWARTLRELGHDLRLIPPAYVKPFVKRNKNDARDAAAICTALTRPDMRFVAVKSIEQQASRGLERSRMLLVKQRTQLMNSVRGQLAEFGIIAAVGRRGFEQLATRVASGEADIPSLALDVLRLLIQQTDALTAAIATLEDRIMAIARDHAVMRRLTTVPGIGGLTAHAVVTAIGDGRQFSSARDFAAWCGLTPRQHASAGKQHSRGISRQGDDSLRRLFALGASNLMRHARSRSDRATEWQRGILARRPVKVAVLAQAAKNARVAWALLVSGETYRRATPAAA

SEQ ID NO: 103953 - protein, 353 aa, unidentified
MMVIGVDPHKQAHTAVAVDELGRRKAQKTARARRDGHRELIAWARQACPDGRTWAVEDVRHVAGGLVRELLAAGEQVVFVPPKLMAGARRGGRERGKSGPIDALAVARVALREEIALPAARLDGPVLEVRRLGDYRDDLVAERTRVVNSLRWMVHDLDPALAPPPRSLGSARARARLEAGLRALPGSAGRAVALSQLARVAALSAEITRLEQDLTPLVTALVPGLLALPGVAVLTAAKVLGEAGDIRRFTSPAAFARHNGTAPIPASSGTGEDGPHRLNRGGNRQLNAAIHRIALAQARCHPGARVLLERRGRDKHETRKASFRVLKRHLSDAVYRALKADAWRLDDPSRQAA

SEQ ID NO: 103954 - protein, 425 aa, unidentified
MNYKQNEKINQVKESTLVVGIDIGSTTQYARAFDWRGIELGKVFPFSNSREGFESFKAWMQHLQDKYKKLDAIVGIEPTGHYWFDLGAYLEDEGILLVMVNPYAVKQTKELDDNSQSKNDRKDPKVIAKLVTEGRYSAPYTPDGVYADLRIMVANRKRLIREMTQIKNRFARWFAIYFPEYTDVFGDYEAQSSMLLLKKVCTPEAIVELGAEKINQIWRDAKLRAVGMKRATTLCETAKRSIGLKKGSSAARYEMKLLLEDYEYKKAQLDAVMEEIEKLCRKIPESEQMLAIKGIGVITVAGFLAEVGDVRRFESPRQIQKLAGLSLRENSSGKHKGQTTISKRGRSKLRAVLFNAAIPLIAKNPEFKSLHEYYTTRANNPLKKKQSVIAISCKLIRVFYAILVNGVTYDSQKLLSDIHRQPQVA

SEQ ID NO: 103955 - protein, 346 aa, unidentified
MAHYAAFDVSDKETAIHVLDEHGKLVWKGKRPSEPEALAAALRRHAPELVRVGLETGRLTPWLFHALKGLGVPVVCPDARHARAATALQRNKTDARDAETLAQLVRTGWFREARVKSWAAHAVRHLVGARAQLVGMATDLSNQIRSLLRTFGLRITGRAGGTFERKVREQITGSPEVAAVAEPLLAAWRAMRDQIAALDRKLIEAARSNATCRLLMTCPGVGVVVATSFAAAVEAPDHFRRSRAVGAYLGLTPRRHQSGESDHSAGVSKRGDKLLRSYLFEAAACLLIRVQRPSALKAWGVGLVQRLGFKRAAVAVARKLSVVLHAMWRENRPFQAWPTPAVAAAA

SEQ ID NO: 103956 - protein, 352 aa, unidentified
MALPTLPHPQVLVTLGVDTHADSHVAAALDQAGRPLGTRTISTTPGGYAALLGWARRFGTVDRIGVEGTGSYGAGLARWLRAHGQLVIEVDRPDRAARRRHGKADDLDAHAAARAVQAGTATGQPKAGDGTVEMIRSLRLARRSAVKARTQAANQLKALLVTAPDGLRAQLRRLPPAELVTTAARLRAATKPATPTDAAKLALRSIARRWLLLTQEITALDTQLERLVAMAAPALVAVKGVGTETAAVLLVAAGDNPERLRSEAAFAHLCGVAPIPASSGKTTRHRLNRGGNREANWALYLIAVGRMAWHGPTHTYVERRTKEGKSKPEIIRCLKRHIARELYGILVSRPAT

SEQ ID NO: 103957 - protein, 343 aa, unidentified
MDHFAGLDVSVKETSICIVDDTGRIVREAKVASEPEALLEVLGDPIYHFKRIGLEAGPLSQWLFSALAEAGLPVICVETRHMRAVLQAQINKTDRNDARGMAQMMRAGLYRPVHVKTLRSQKLRMLLTHRKLLQSKAIAIDNDLRGTLRNFGLKVGVVGTVKFEARIKELVENLPDLAVLVEPLLIVRRVLREQFSILHRRLLAIVRDDEVCRRLMTVPGVGPVVALTYRATVDVPARFRNSKAVGAVFGLTPSKYQSGEINRTGAISKCGDEMMRVMLYEAAQIMLVRTAKWSWLKAWAMKIARHRGMKKAIVALARRLAVIMHRIWVDGTEFRWTREVAAA

SEQ ID NO: 103958 - protein, 346 aa, unidentified
MSGSDIAVLGIDLGKNICSVAGFDPAGNIVLKRRMRPNSITKFTSRLSKCVVAMEACCGAHYLGRRIAAQDHDVRLMSPEYVRPYVKAQKNDERDAEAIAEATSRPTMRFVELKSEEQLDMQTLHRVRSRLVGTRTKLINQLRAILIERGITFVQGRRKLELAIDELLAGEVSGISERMVLLITDMRQQWRELDQRIASLDREFLDCTRYDEATHRLTSVPGIGPLTATALVAAVGDASSFQRARDLGAWLGLVPRQQTTGGKPRLLGISRRGNTYLRTLFVHCARAALPWLAKHQTRLGLWLRNLLMRSHRNVAVVALANKLVRIAWATLRYKTPFRNQSIAQET

SEQ ID NO: 103959 - protein, 331 aa, unidentified
MNQLGTDVSNDTLDATRTGGGQVKRRQFANTAAGHRQYIKWALRGTDRARVCLEATGIYHLQLALALYRHPAIEVMVVNPRAARRFAEAHMVRAKTDPIDADGLLLFVQRMPFRPWQAPREEVLQLQSLARRVGQLDKELTRERSRLHAARKAGPHTRPVQQDIQAHIKQLQRRKDAMQAQAEAVVQSDPALADDARLIDTIPGFAECSITRLLAELAPLPADMQAPQWVAQAGIDPRPGESGTSVRSARQISKQGNARIRAALSMPALVAIRHDANVAAYYEHLLACGKSKMTAITAVMRKLLVAIWGMLHNRQAWDGEKFYRLNLPQTA

SEQ ID NO: 103960 - protein, 419 aa, unidentified
MERLIERCAGLDVHQASVVACVLIHETGKRAKKLIRSFGTMTDDLQALRAWLTEHGVTHVGMESTGVYWRPVYAVLEGGFELIVGNARHMKNVPGRKTDIKDAEWIAELVCCGLIRPSFVPPKPLRELRELLRYRRKLVEVQAAERNRLQRLLETANIKLGSVATDVFGVSGRAMLRALIEGEASPEEMANLAQGRLRRKRAELVRALAGHVEEHHRFLLAMQMQRVEATERDIEQLDGCIAEKLVPYQFAMTLLMQIPGVDWVVAAVLIAEIGIDMSVFLSVHHLAAWAGLCPGSYESAGKHKSAAARKGNVHLRTILVGAAMAAKNTKGSYFRDKYHRLKARRGAMRAALAIAHKILVAAYHMLSRGVGYRELGEAYLDQLDQTRTAANLKRRLERLGYVVSIQPKEEAPQPQEAVA

SEQ ID NO: 103961 - protein, 341 aa, unidentified
MQVTTIGLDLAKNVFQVHGIDAAEKVVVRKQLRRGQVIKFFEALAPCLIGMEACATAHHWARELTKLGHQVRLMPAKDVKAYVKRNKNDAADAEAICEAVRRPTMRFVMVKSAEQQGRLMQHRVRDLLMRQRTQLINALRAHLAELGIAAAQGREGIKELLAIVARDGDSHLPVDAHASLIVLAAQLQAVQTMIGSLEKRVVRQHRLNEESKRLETIPGIGVIGATAIAATIPDPMIFRSGRDFAAWIGLVPRQDSTGGKQKLGPISKRGDQYLRRILVVGAHSVLRRARQQPEKYPWLIQLLARRPFKVVAVALANKMARVAWALLAKGGTYRVPQLKAA

SEQ ID NO: 103962 - protein, 349 aa, unidentified
MNYYAGIDVSLECSSVCVVDGAGKIVRESKVASEPEALIGWFGKLGLSLERIGLEAGPLSQWLYAALRQAGLAVELLETRHVRNALKTMPVKTDRNDARGIAQLMRLGWFRPVHCKSMEAQETRALLTARRLVKGKLHDVEMSLRGILRGFGLKVGPTAKTAFEARIRELVAGHPTLQSIAEPLLAVRGVLRRELAGLEKRVRTMARCDPRARLLMTTPGVGAVISLTYASAIDDPARFKSSKIVGAFFGMTPTRYQSGETDVSGRISRIGDAGVRAVLYEGAHVILTKPVKGCTALKSWAMRIADRAGMKKAKVALARKLAVIMHRMLVDGTPFIDAAKAAAAAAAAA

SEQ ID NO: 103963 - protein, 410 aa, unidentified
MIFVGDDWAEAHHDVYVCDQAGTRLAAKRLPEGIEGMARFHDLVATHADGPGEVIVGIETDRGLWVQALVEAGYVVYAINPKAASRYRDRHTLSGAKSDPGDAKMLAELVRTDRHNHRQVAGDTALAEGVKVIARAHQTLIWERTRVTNRLRCSLREYFPAALDTFDELAARDTLAVLAVAATPTQAAKLTPAKIRTVLRQAGRQRNIETRADTIAAGLRTDALRAAEVVEAAHGATTRASVAIIAALNTQINALADELADHFEQHPDSDIYLSLPGVGVVLGARALGEFGDDPNRYANTKSRKNYAGTSPITRASGTRSVALARFARNNRLADALDQWAFSSIIASPGARAFYDRRRAAGDSHHKALRALANRWVGILHGCLDHRTRYDENTAWAHRIDTDLNKIAQAA

SEQ ID NO: 103964 - protein, 427 aa, unidentified
MKYESIRHRQYCQIVNEIRGSDQYLVVGIDVGKDKHHAFMGTATGKSLHRKLIFENNIGGFSRLLRTADEIKLQNALCKIVYGLEPTGNYHKPLAEHLIRCGSHVVLVSGEAVKKNRSLLDGRWDKHDTKCAANIADLVSRGRCLYYDRTLPGVVEIRSLLSLRRRLKKEEHSLRMRIRNNLLAQYFPELDRFYSACESESLAIVRWFLYPDTIAAMEFGEFFHLVTTSHRGLAQTIRLRKIHGQAKESVGCPRRVAGEYEAGLLVEKLNQVREQIKKTNDLIEDFCLEFSEYSYLLTIPGFGPYISARVLASIGDPFRFKNRKQLIKMAGYDLCATRSGRTSDNAVPVISKKGNSELRYALYQAAKVASGKVDLFRTYFTELLRGRERERGIKTKMCVKLAAKMLIIAWTLMKKKEPFDPAYLTFE

SEQ ID NO: 103965 - protein, 336 aa, unidentified
MKEQQIKHEEVQIKKFINRLKLEWNEIYCCYEAGVTGYPLYRYLKSLGVNCILVAPGKIPRQNTDKIKTDKRDAIKLARLMRSGELESIHVPSEEDEAVRDYLRSRDSLRLDLGRNRQRLMKFLLRKDIKYSTTKYWTVSHYKWLNNLHFNNEILQETFNDYYSRVRVQEENLNSMDKKIQEIAESEPYREKVGILRCFRGVDYLTAMFLLCEVNDFKRFKTAGSFMSFLGLVPGEYSSGSKRKQTGITKTGSPRLRRILTEAAWQHRFPGTGSKIITARRSGQPALVVALSEKASLRLHKKFRNLQLRGKTPQVMITAVSRELSGFLWAAMNLVA

SEQ ID NO: 103966 - protein, 356 aa, unidentified
MKNHHSFNDSVILGVDTHLDIHVGAVLSYDGKLLGTKVIQTNQVGYEELFDWVLTFGSVERAGIEGTGTYGAGLTRFLIKKGLDVLEINRPDRSKRRLKGKSDPLDAENAARTVLSGSAKAVPKLQSGACEALRIISVARRSAVKAKIQVINQLRALLVSAPQDIRDMLWKSKPLECVTACMSFESAEKSPLLLALCCTLRSLAKRWLALAEELTQLDELLDNLTQEYAGSLRRQFGVGPQTAAILLAVAGDNPERLKNEAALASLCGVNPLPASSGKTIRHRLNRGGSREANNALWTIALVRMRSDPRTKVYVQRRTGEGLSTKEILRCLKRYIVRELYPLILTDLGRAQLRALT

SEQ ID NO: 103967 - protein, 410 aa, unidentified
MEVLHPHCAGLDVHKDTVVAAVRHMVGGTVRREVQTFKTTTKDLMALSEWLSAEGCTHIAMEATGIYWKPVWHVLGDGEFELVLANAAHVKNVPGRKTDVNDATWLADLMAHGLIRGSFVPDAHTQELRALLRTRKQFVRERSSHIQRLQKTLEDANIKLDSALSNVMGLSGRAMIEALIAGESDPDTLAGLAHRRVKAPPEELREALRGRVTKHHRFLLQLHLQQVDAIDAAISEIDREVDANVEPFRTAITILITIPGVSDLSARVIMAEIGNDMSRFPTAGHLISWAGLCPKNDESAGKRRSTRMRKGAPWLKTTLIQCAWAGARKKASYLQAQFHRLRARRGVKKAIGAVAASILTAAYHMLAHGTLYHDLGPDHFDRRAKATQTRRLVTRLHNLGYAVQITPLAA

SEQ ID NO: 103968 - protein, 348 aa, unidentified
MDTIGLDLHKRESQLCIGHNDGTVEECRIVTSRERFTAVLGGRPRARILLEASTESEWVARHLESLGHEVIVADPNVAPMYATRSRRTKTDRRDARTLMEACRLGAYRVAHRVSAARRHVRAELAVREALVRTRTRYVSIAKALVRRDGQRVASSEAHLVADRIAALPLSETSTAELAPVVTVLGPLNEQIVAADRRLAARCTTDPTMALLATAPSIGPVTAAAVVATADDITRFATAHQFEAFLGLVPGERSSGEQRRIGRITKAGNARVRYLLVEAGWRILRSKTPETAARRAWAVRIAARRGNRIAVVALARRLAGILFAMWRDGVPYDAARLRTPPMVPDARAS

SEQ ID NO: 103969 - protein, 336 aa, unidentified
MIGLDLAKHVFQAHGADASGKVVFRKRLRRGRVLEFFAGKPACVVAMEACSSAHHWARELARLGHIVRLIPPAYVKPFVKRQKNDTADAEAICEAAQRPTMRFVAVKSEAAQANAVVFRARDLLVRQRTQAINALRGHLGEYGLVVAKGPGHIVKLVDHVENPNSDVPEAARLVLRTLVDALRFLSERIDHLDREIARRAREDDEVRRLTSIPGVGPITATALAALAPPADAFKKGRDFAAWVGLTPSQHSTGGKQKLGTTSKMGERTLRRLLIIGASSVVRKAVRQGTAAGSWLGRMLARKPRMLVIVALANKMARIAWAVQAKGEVYRAPAVVV

SEQ ID NO: 103970 - protein, 361 aa, unidentified
MKKPAQHLIPEVPRRQAKVEMTIGIDLGDVWSHYCTLNQDGEVVDRGRFRTTPKSIEKWFTDVPSARVVMEAGTHSIWISAQLQELGHEVIVANVRELRAISHSDRKSDQVDAEKLARYARLDPNILRPIAHRTVAQQEALTLIRARALLVRLRTAAVNAVRGLTKSCGYRMPASATTCFAQRSLAVMPHGLAQALGPVLQQIAEMTVKIKQYDRQIQQLGQTEYPETQALLKVHGVGHLTALTFVLTLGSKERFERSRDVGCYLGLRPRRSQSGDHDPQLGIKHAGNAYLRSLLIECSNHILRPHGRDSALRQWGLHLAGRGGKQAKSKAVVAVARKLAVLLHHLWSTQATYMPFYEQAA

SEQ ID NO: 103971 - protein, 423 aa, unidentified
MKPLSDRPFTAHVGIDWADAKHDVCLQAAGSERREFDRIAHQVGSIDQWAKSLHQRFSGPIAVALELAKGPIVYALQKYDFFVLFPINPATLAKYREAFKPSRAKDDPTDAELALDLLLRHPERFTSLEPQSVAMRTLLSLIEQRRQLVDDKTRVTNRLGNALKQYYPQALDWFEQRDTILFCDFLRRWPTLSTVKRARKASLKAFFYAHNGRRPQLIDNRIDSIRAATPLTDDMGVIAPYRLQVLVLVEQLRVTLQAIDRFDRQIAAVAATLPDYALFSPLPGAGPHLAPRLLAAFGEQRERFMSADELQKYSGIAPVTERSGKKRWVHWRWQCPTFVRQTFVEWAAQTINKSFWAGVYYRQQRDKGSSHQAAVRALAFKWIRILYRCWQAGTPYDESTYLNALRQRGSPLLKQLHPTAQNA

SEQ ID NO: 103972 - protein, 346 aa, unidentified
MKILALDLGKYKTVGCAYESESGAHQFKRGFTSPAGLTRMVQEVKPDRVVIEICSIAGWVCDRLWELGIEVQVANTSDDAWRWRKVKQKDDRRDALKAARLSAVNQIREVYIPALAVRQWRALITYRQQLIRRRTKIKNHIRDLLLREGQILARGSSCWSEVGIELLAAQARSFSECGPAELWRGELQLELEQLREVQRQVVTVTAQLDKIGAGDTRVKLLRTVPGVGPRLAEAIVALLDQPQRFRKASQVSGYIGMVPKALDSGETERRGHITRQGSRVVRSLLVEVAWAGLRHNAWVRQTYQRLSGGKKARKKIAIVAVGRKLLVRCWAMLRDNRAWDWQPQIT

SEQ ID NO: 103973 - protein, 427 aa, unidentified
MNFTQNEKLKQLSERSIVIGVDIASELHYARAFDWRGVELGKVFKFENSAEGFKDFYAWIEHLKRQAQKDCTVVGAEPTGHYWFGLASYLKEQSIKLVLVNPFHVKRSKELDDNHPSKTDAKDPKTIAKLVIEGRYNESYIPEGIYAELRIAMACRMRIQKEMNSIKNRVQRWLKIYFPEHETVFGKFDATSSMLVLQVAPLPRDVERLGAEGINRIWRDNKLRAVGMKRAKSLYEAAQKSIGCTEGESCSRMEIQLLLQDYHTKTAQYEAVTETIDGLCRQIPEVAKLLEIKGVGLVTVAGFLSEVGDIRRFNSPKQIQKLAGLALRESSSGKHKGQTTISKRGRARLRAILFQAVMPLVAKNAEFAEIHTYYTTRPKNPLKKKQSLIALSCKLIRVFYALLTKGIDYDPKKLIQDIHRPVEYLAA

SEQ ID NO: 103974 - protein, 413 aa, unidentified
MDILYACCAGLDVHKETVVATVRRRLDNGKVRQQTRTYGTLTDQLLEFADWLEAEGVTHLAMESTGVYWKPIWNLLEERFEILLVNAQHVKHVPGRKTDVKDSEWIAQLLQCGLLRGSFVPPPPQRALRELTRQRRQLVHSKAAVANRIQKVLEDANIKLGSVATDVLGVSGRDMLRALVAGEDDPVKLAELARRKLRAKIPALRLALRGRVTDHHRFLLGLLLDELTHLEGLIERLTARITEVLPAPFAEAIERLATIPGIDVRAAENILAETGIDMGVFPTAGHLASWTGMCSGQRESAGKRQSGRTRKGNQWLRTTLVQVAWAASRTKHTYLSAQYRRLAGRRGKKRALVAVGHTILVMVYHLLREGTTYAEAGADYFDRLDTDRLTRTLVRRLERLGHEVVLKPKEPAA

SEQ ID NO: 103975 - protein, 490 aa, unidentified
MKSQPSKKAQTNKNQSKKARGKPTLSQWNEMNRKQRREMMRKMQSENLSLEVVHPDAAGIDIGNESHYVAVPPSRDPQPVRCFGCTTAELKAMADWLKQCGIRTVAMQSTGVYWIAVFDILEAAGLEVYLVNARETKNLPGRKTDVQESQWLMKLHTYGLLRNSFRPSLEIRTLRTYWRQRQDLVRSAARHIQRMQKALTQMNNQLANVISDISGVTGQTIIKAILDGERDARELAAYRDVRVKASAEEIAQALEGNWQDDQLFVLQQELAGYEFCQKQMAECDRQLAQYLGQMEDRSQGATLPTETRKQRRKKKKGNAPRFDLRQDLFPMTGTDLSRIDGIDVMTAMTVLSEVGGDMSKWKTENHFVSWLKLSPDNKISGGKVIGKGRMPTNNRATGALKMAASNLRESDTYLGAQFRRFRSRLGPPVATKAMAAKLARLVYRMLRYGMKYLDQGAGFYEAQYRKQQVSYLKRRAAQLGLQIIEAAVAA

SEQ ID NO: 103976 - protein, 344 aa, unidentified
MDATTVGIDLAKNVFEIALADERGHIVERQRLSRARFDRFFVNRTACRIVMEACGSAHHHARRLSSQGHDVVLLPAQYARAYIRRNKTDAADAAALIEAARCPDIRPVPIKTVDQQALQQLHRLRSQWMAARTSRINFLRGCLREFGVCIPVGAQRAIQSVRDVLSNQHSPVPALLHHSLLELLAEIDSLEQRCKHIERELARLNEQDPVVERLLQIPGVGPLTATALRASVVDIQRFPSGRHFASWLGLTAREHSSGERRRLGRISKQGDPYLRTLLIHGARAVLLAARSAQRRGSSLDRLRTWALDLQERRGHNKAAVALANKLARIVWATWRHERDFANRT

SEQ ID NO: 103977 - protein, 388 aa, unidentified
MMKQNIIFGIDVSSKSSTVCVVIDRIKQGETFKITNDSFGYQDLLDRLNQYLITPLVVFEATGVYSLSLQAFLEDYHIKYLKLNPLKAKKLMDNNLRHNKTDKVDAYRLALIQFNAPQKLRAPQPKEYHELQNASRYYEELAQALIINKNQLHRNLQSAFPQIESILSTSSGRVYWTIVSLFPHAQYVLNHNENQVFQSLLAISGIGRQRAHYLTTRLYALARQAYPYDNESSITIRAIQRNIANLLSLSAERDNVINYMEKLAMQANARSLNIYESIPGIAKTTAVRLVAELGDLRRFDTSAQIDALVGIDPGRYQSGEKDSHLGITKHGNHLARKILYRTITQMETVKATQPCHITDYYDKKKRSSNSRGYKKIGSIIFPVDDLSI

SEQ ID NO: 103978 - protein, 374 aa, unidentified
MDVHSTNYTLCAMEPVLDGEDRIFTNIQVTPDYENVIQFIDNLKERLGSSDSYSIECGYEAGCLGYSLYHQLTKAGVKCTILAPTTMLTQQGKRVKTDKRDAAMIAQCLSYGGYHAVHVPTDKDTSVKEYLRMRDDHKLALKKIKQQINAFCLRHGYIYDGHKWTLKHLDWLKKLNLSELYRETLNEYMTSYEEQTAKIERFDKRIEELAADSDYHENVRKLSCLLGIQTYTALSLIVETGDFKRFRKGNTYAAFLGLAPGESSSGEKISRTGITKAGNSRLRTLLIEAATGICKGRVGHKSKALCARQAGNPEEVIAYADRGNIRMRSKYKRMIRHEKKRNVAVAAVARELACYVWGIMTNHIEPREEGKKAA

SEQ ID NO: 103979 - protein, 316 aa, unidentified
MRNSERFVGIDVAKGSLEVAVRPDDNRWTVSNDEEGISDLVDGLRKLKPTLVVLEATGGLEIPLVAVLGHAKLPVVVVNPRQIRDFAKATGRLAKTDAIDADVIAHFGEAVRPKVRPLKDAEAQELADLLARRRQLVDMLTAEKNRLNTARKQIRKDIQAHITWLEKRLKDVNAALSKAIKQTPAWRQKDAILQSTPGVGPVLSVTLLAGLPELGSLNRREVAHLVGVAPLNRDSGQYQGKRSVWGGRAEVRSVLYMGTLAAVRCNPVIRSFYQRLTGAGKEHKVALTACMRKLLVILNTMVKTGAAWRSDYASST

SEQ ID NO: 103980 - protein, 375 aa, unidentified
MKEKLRFLGLDVHAETIAVAVAETDGEVRSLGTIPNRAESIRKLIKKLGPAEKLRACYEAGPTGYVVYWQLAELGIHCDVVAPTLVPVKAGDRVKTDRRDAEKLARCYRSGDLTAVWVPGEGSEALRDLVRTREAAKQDQMRARHRLSKFLLRSGQRPPSGVRPWTRPYLIWVAQLRFAQIAQEATRQDYLHEVEHMRERVARLEQAIMEAVKLASPALQQVINDLQALRGIADISAVTIAAELGQVSRFGSARQLMGYCGAVPSEDSSGKRIRRGSITKTGNAHLRRIVGEAAWSYRRPPGIWYGLRRRQESISEEVKEIAWKAQHRLHKRYMKLGAAGKPQGKIITAVARELLGFIWAIGTRAETTVSQRTAA

SEQ ID NO: 103981 - protein, 371 aa, unidentified
MKKSITFVGLDVHKNSIEVALADAGREGEVRHYGAIDGDLDSFCRLVRKLVGTGKELHFVYEAGPCGYEIYRYLTAKDFDCAVVAAPAGDPTKGGRKRIKNDRRDAMTLARLHRAGELTYVFVPRADDEAMRDLTRAREDTSNAQRVARQQLSGMLLRLGVRYNGKTSWGLAHFRWLAQIKMPTPAQQVVIQEYIHAIKETTDRLERLTSQIAELAPAWRMFPVLQAYQALRGVSLIVAATVVAELGDLTRFDNPKQVMAFLGLVPSEHSSGEKTRKGGITKAGNGHARRVLTEAAHAYQFPARVSRAILQRQEGLDKAILDIAWKCQVRLCSRFRRLMAKGKNRKTVVTATARELIAFMWAIAQQVPVAA

SEQ ID NO: 103982 - protein, 338 aa, unidentified
MGYFVGIDLHGDNNYIGILDEEDRRVFKRKNRNDIKEITRVLEPYQEEIEGIVVESTFNWYWIVDGLQEAGYRVHLANTAAMQQYEGLKYVDDTRDSFWLAHMLRLEILPEGYIYPKEIRPVRDLLRKRMMLVQQRTAHILSMQTMVNRNKGIPISSETIKKMSDEEVEGLFGDEHLVMSAQCDHEVIEVLSEQIDKIEKAVHKEVKLKKPYKKLLTVPGIGEILAVTIMLETGEISRFKEVGKYSSYCRCVSAKKVSNGKNKGKGNRKNGNKYLAWAYVEAAHFHVRYCEEAQKWHQRKASKSNAILATKALSNKLARACYYIIKEQANYDKKRMFG

SEQ ID NO: 103983 - protein, 369 aa, unidentified
MLLALAIGLSGFTEKEHAMFDPGKTALRVVGIDIGKTSFHVVGLDRRGAIVLRQRWSRGQVEARFANLPCCLIGMEACVGAHHLSRKLQALGHDARLMPARYVRPYSKGQKNDFRDAEAIAEAVQRPTMRFVATKSVDQLDLQALHRVRERLVSQRTGTVNQIRAFLLERGVAVRQGPRFLRIELPRLLAAPSEVVSPRMGRLIEGLADDWRRLDERIEGLSREIEAMARQDAGCARLMSVPGIGPIIASAMVAAIGTGDTFAKGRDFAAWLGLVPKQISTGDRTILGSISKRGNRYLRVLFVQAAWVVLVRPKNWERHGLKSWLEAARRRLHHNVLAIALANKLARIAWSVLARGRGFEASRLDHAIA

SEQ ID NO: 103984 - protein, 344 aa, unidentified
MKVSVLGIDLGKNVCSIVGLDESGAIILRRQVKRETLIGLVAKLPPCIVAMEACCGAHYFGRLFADQGHDVRLMPPEYVRPYIKAQKNDDRDAEGIAEAATRPTMRFVEVKSQDQLDMQTLHRSRDRLIAERTALINQLRAILLERGIVVSKGKYRLERYVVGLPVEQNANGLSSRIQVLIADARAQWLELDRRIAIFDKEFAAFTKENEDARRLATIPGLGVTIASALIAAIGKGEAFEHGRDLAAWLGLVPRQSTTGGRPKLLGISKRGNKYLRKLLIHGARAALPHIAARDTALGRWAQGLLARAHKNVAIVALANKLARIAWAVLRRGEKFTAKGLPVAA

SEQ ID NO: 103985 - protein, 353 aa, unidentified
MTDCRGRVVAGVDAHTDEHHVAVVDAQGRLLGAAGFPTTAEGYAGLIGWVRGHGDVDRVGVESTGAYAAALVRALHAGGIRVVEVNQPHPHARQRRGKSDPIDAELAARAALSGTATAVPKQTSGIVEAIRQLRVVRVGALKARTAALQQLDDLVITAPEQLRQELRNGRTLKAKAALCLKLRPDIERIHEPAQAAKLALRSLARRIRELDTEIFELDRQLEQLVNAAAPRTVQLFGVGTQGASQLLVTAGQNIQRLRNEAAFAKICGAAPIQASSGRTKRHRLDFGGDRQANRALHMIAVCRLRHCKRTRAYATKRTADGLNRREILRCLKRYIARETYHTLRADLEALNTT

SEQ ID NO: 103986 - protein, 368 aa, unidentified
MRTEIHIDIEAFRLTIKVLNLFAIINLKHKFMKTTENSYETFVGIDVSKLTLDVTILKPLSKKLSHRVFDNSDEGHLKLKKWLSAPHEVAFPRTLFCLEHTGLYTRSVDKFLREREACVWMESSLHIKKSLGLTRGKNDKIDSQRIAEYAYRFSDKAIMRDPCTSGLQILRDLLTTRDRLNKSLKSIMVSINELKRVDIHQAINLETFQLAAIRGLKTSIKEVEEAMFETVENDKQLKIHCEMATSIPGVGKILAIKLMIYTQVFTRFESVRQLACYCGVAPFEHRSGTSINGKPGVSKFANMDLKSTLHLASLSAIQHNPDLKAYYHRKVNEGKSKMSVINAVRNKLLSRIIAVINRQTPYVVLSQT

SEQ ID NO: 103987 - protein, 316 aa, unidentified
MTTPAFAGIDVAKARLDVHLLPAGTAFAVANDPDGIADLVARLRPLGCASVVLEATGGLEAPALAALAAAGLPVSAVNPRQARDFAKAFGRLAKTDAVDAATLALFAERVRPAVRPLPDAQARAFQALLARRRQLVEMRVAEQNRLGAAADPAVRQDLRAHIAWLARRGAALDAELHAAIQASPVWRAKDDLLRGVPGIGPGTARVLLAELPELGTLTGKQVAALAGLAPVARDSGTRRGQRSIAGGRASVRSVLYLAALSAARFNPALRAVRDRLRAAGKAAKVVLVAVARKLLVLLNAMLRDGLPWNPNLAKIT

SEQ ID NO: 103988 - protein, 366 aa, unidentified
MKKISTVQVFGNEVFKEQKLTIGVDLGDRWSFYCVLDEAGKILLEQKVATTLEAMKQIFEKIPRSLIALETGTHSPWVSRLLTELGHEVLVAHAQKVELITKSNRKDDRHDARTLARLARIDPELLGPVRHRSAKAQIHLTVIRARAELVSARTALVNAARGLVKSYGQRLPKCGTQQVSRELGAGLPAELREVLEPLLKEIESLNERIQEYDERMEKIAKEEYPEVSLLQQVKGVGTQISLTYVLTIEDPYRFPKSRTVGCFLGLRPGRRNSGESEPQKGISKEGDRYLRTMMVQGAHYILGPFGEDSDLRRWGLKLAERGGKNAKKRAVVAVARKLAVLLHRLWVSGEVYEPLRNSQKAMRAVA

SEQ ID NO: 103989 - protein, 420 aa, unidentified
MKAPVITDFAAIVGIDWADKKHDVCEIAVGSQKYELSVISNKPESLQEWAMALKKRYPKQSIAVICELKKGPLIYALSKYEHITLFPVNPSTVAKYRKAFTNSGAKNDPGDAQIQTEILLLHMDKLKPILPESVDIRTLMQLVEYRRKVVQNRVDLSNCITATLKNYYPQVLDWFKEKDTIIFCDFIAKWPSLADAKKARKQTLLQFFNQHNSRYPSVNEQRVTDIKSALPLTDDNGVIEPNKLLVEVLIVQLKCFVEGIMRFDKEIKTLYQSQNDRFIFDSFPGAGAQLSPRILVAFGSNRERYLEATELQKYSGVAPVVEQSGQKKWGHWRYSCPTFLRQTFVEWAGISIRYSFWAKAYYEQQISKGKPHNTIIRALAFKWIRIAFKCWKTNTPYDESKYLNALKKRGSPLLKFAIEG

SEQ ID NO: 103990 - protein, 394 aa, unidentified
MKTKLFAGIDVGKDKHRIVVKDENYKITESFEFKTDYKGFGKLERRIPVAAVIGLEATNEYDKPLVSFLRAKGYEVYVFNPRKTKNFAKINHIATKTDKVDAKMLADFMVMGLHKTQMQAVNKYPEIKQLTRARLKLLNDQNKYKQRVLNRLYVIFPEYEHLFSENFGVTFTRLLEKYTYPENFSSLDAEKLGKEMIKISKGILREDRAEKIIAAAKKSIGIRNEVDGYIEEIRINLKYIQELEKDVKGLDRKIRERMMDVDQKLTTIKGINVSLAATIISEIGDIEKFKNRRALFNFTGMVPGIKQTGKYERNRNHMSKHGSKYLRTAIWQAAISCINHNKVFRMYFIKKHSIDKKQKMTAVGAVCRKLTYQIYRIMKYDEGFDMEKAVQVSI

SEQ ID NO: 103991 - protein, 428 aa, unidentified
MNEVDRNRLEEFRQLRREIRHSQEYLIVGIDVAKDQHHAFFGTATGKTLLKRFVFDNTYEGFRKLLDQTEAVRVGHQLSKVVYGMEPTANYHKPLGEGLIELGRTVVLVSGVLVKKNRESLDGRWDKHDVKDSANVADLISQGKCLYYEYPSPELRGLRELLSLKRRLKKQEHSYRVRIRNHLIAQYFPEMDRYYERLGAEGLSIVRWCVAASEMAQLDVGSFIERVTSQRISGEKRRRLEGIWGKAAESIGCHGVPGLAHEAKVMVEGLKQIREMIKETDKKIEGLCKQFPEYEYLLTIPGFGPDVSAKVLGAIGDPDRFENGRQVLKLAGYDLSADRSGKDSDKAIPEIPKRGKAGLRYALYQAALIASTRNQAFMRYYTRKLRGREKEKGIRTKMYVKLSAKMLLIAWSLMKKKEAFDPTYLKVE

SEQ ID NO: 103992 - protein, 381 aa, unidentified
MTPAAPHNEPGNTTEATLFVAFELSEKTWKLGFTTGHGQKPRERTVTARQQERVLDEIAQAKRRLSLPETAPVVSCYEAGREGFWLHRFLQAHGITNHVVDSSSIEVNRRRRRAKSDGLDVRKLLSMLMRYYHGERHVWQVVKVPSVAAEDHRHLHRDLETLKQERASTMTRIEGLLSSQGLRVVSLTKLPEQLEALRLWDGSPLPPGLRRRVLRVYAQYTFRSEQIAAVEAERRTQLQTSSEASIDKVRQLMLLKGIGINGAWLLVMEFFGWRAFKNRREVGGLAGFTPTPYQSGESTREQGITKSGNRHVRWMTTELAWSWLRFQPDSALSVWFRERFGGGGKRLRRIGIVAVARKLLIALWRFLETGALPKGAVLKER

SEQ ID NO: 103993 - protein, 391 aa, unidentified
MSTYFVGIDISKYKHDCCIINAADQSIVAKFTIRNDKEGFNELLTSLQSLSTPDDIKIGFESTAHYALNLELFLEKAHHSFMEVNPVLISEYKKSTSLRRTKTDSVDCESIARWLMTVEYKPHSKGFYHAYSLKSLTRLRDRLIRQRSFYLVKITNVLDHTFPEFKPFFQERFSKTALYLLENYGSAEKMARMNSASYDNLRRISRGKFTPQKFLELKALAANTVGVNNSIFDTELTCLLTLYKEAAKQVSVLEAQITELIEEVHPHYMSIPGIGPISAAVIYAEYGDISNFSSPAQMLAFAGLEPGISESGTESHRGRMVKRGSSQLRYTLMNCALPLIRFDMTFAAYYAKKRSEGKPHRVAISHVAKKLVRVIFALERQNTDFVATALR

SEQ ID NO: 103994 - protein, 348 aa, unidentified
MVADELDYVVGVDTHRDEHVLAVVVAPAGAVVARRAVAADARGYAQALRFADSYASGRRVWAVEGAGHYGAALARYLSGRGETVLEAGRSPRGERRLQGKDDGLDAVRAARAALGHELASPRAGQRREALRLLLVARRSAVDVRREALVQLRSVIVTSPDRLRDELRRLPVQRLLDRCSRLRRSKTATPDELAVRLVLRTLARRIEAATVEASELEREILAHVRALAPQLLDEPGVGPIVAAQLLVAWSHHGRVRSEAAFARLAGVAPVPASSGQTTRHRLSRGGDRQLNRALHTVILHRRQHDPATKQYIARRVAEGKSRRDATRLLKRYLARHLYRLLDQQTPLIA

SEQ ID NO: 103995 - protein, 426 aa, unidentified
MKNLDVLSALFVGIDVSAASNVVCAIDFHSNKLLAFSVSNNHPGAAEIAERICALMDSSSFKTVIFALESTSFYNIHIANFLASDQSLMPFNPFVYCLNPKMTANYRKSFIGMDKTDPKDAFLLADFARVGRINTHPWRGSQFLALQRLTRHRLHIVEAMSREKAYMVSNIFLKFSELSVLKEDQHPFTSNYTATAEAVLTEMLTVDELVNMHVEELISFICNASRNRFHDPEKVAAILQKAARDSYRLDRCLYEPLTISIASSFNLLSAYQAEIKSIEKAIEKTIRGLNHSEYQCLLSIPGIGPVYSSGILAEIGSISAFHSQDAIAKYAGLVWKQNQSGNFQAEDTSLSKAGNRYLRYYLIEAANSVRHHIPEYNHFYHKKLAEVKTHQHKRALALTSRKLIRLIYGLLDKNQLYSQMRVVSTT

SEQ ID NO: 103996 - protein, 327 aa, unidentified
MAKRTTICAGIDTGKRKLDIALDGSSEQLQIDNTPEGYKTLLVWLRRHRVKRIGIEASGGYEQAVVAELRRRRFVVVVFQPAQVRAYAKFHLQRAKNDKIDAALIAACTAAVKTIHAPPDARLLPFAEHLTMLDQIGEDIARLKNRLETCRNPRFQQTWKEDIARLAKREKIEFKALVAAIREHRDLAERLDLIVSVDGIGLPTAVAILVRLPEIGRISREQAAALAGVAPYDDDSGDHAGVRHIDGGRERLRRAIYTAALPASFRWNPQLMALYRRLIAAGKEHKRALIACARKLLIFANTVVARGTPWDHERPPIASLTAVPQPG

SEQ ID NO: 103997 - protein, 343 aa, unidentified
MQATIAVDIAKNVFEIAISHHPGKVAEHHRLSRTKFLRFFAKRQSSRLLLEACGSAHFWARELSKLGHEVVLLPPHLVRPYRQRHKKTDRTDAKALLEASRNDEIRPVPVKTLEHHSLTALHRLRSGWMSTRTARLNAVRGLLRELGHFIPQGANQVVPRVRELIEDAESDLSDSVRLVLHEACCEIRELEQRSKIAQKQLEVLAPTIPAVEHLLSVPGIGKLTATALVAFVAEIHRFPSGRHFASYLGLTPRVNATGYSRRLGHISKQGDGYLRMLLIHGARSSLAAAKKYKKKDPLSVWALEVQQRRGHNRATVALANKMARIAWRVWRQDRDFWLERQAA

SEQ ID NO: 103998 - protein, 477 aa, unidentified
MNKKQGDNLQPPKAKSKRRRRNKGMCLEDRPVLEPNAAGIDVGAREMFVAVPPGRDENPVRVFATFTEDLERLTDWLEQCGVTTVALECTGVYWIPLFEILEQRGIRPCLVNARHMKNVPGRRTDWHECQWLQFLHSVGLLRAAFRPGQDVCAVRTILRHRNELVAAASQHVQHMHKALTQMNLQIHHVISDITGLTGRTIVDAILAGQRDGAELAKLRDPHIKADTETIRKSLEGNWRPEHLFTLGQSRDLYRIYQQQIVNCDLEIEKMLQGFAPRIDPGEKPLPPDRKRNRAGSKRRRKNGHPHPEFDLRTEAYKLFGVDVSQIPGLEENALPLFSEVGRDMSRWPSAAHFVSWLALCPDNDISGGKLLWRGARRVKNRAGHLFRMAAYALHRSLTPLGNYLRRMKAKLGPQAATMATAHKIAVIFYTMIKNQVEYDETIWDARDAQREKKLQAKLKRQAKQLGYELVPIEPQAA

SEQ ID NO: 103999 - protein, 344 aa, unidentified
MSQLTRIGVDTSKAVFTLHGVDAADRPVLRINLRRAQMIPFFRKLPPAVVAMEACGSAYYWARELAALGHTVRLVPPQYVKPYVKRGKNDRNDAAAICEAAGRPGMHFVPAKTVEQQAAGMVLKARDTLVGQRTALINTVRGHAAEFGIVAAKGAAKVHELFSAIEHRSDIPPVAKEMFVLLRQQINDINARIAELDVKLNASHKANPVSQRLATIPGVGPITALTLAIEIDPAQFESGRHLAAWAGLTPKEHSTGGKQRLGGISRAGNERLRRLLVAGATAVIQAASKPDSQQMTEWLRALLARKPRKLAATALANKMARIAWKLMTSGQTYRRDATLGVAKV

SEQ ID NO: 104000 - protein, 344 aa, unidentified
MQIAVIGLDLAKNVFQVHGIDDAGQAVLKRKLRRSEVLPFFAGLDAALVGIEACHTAHYWGREIAALGHDVRLMPPQFVKPYVKSQKNDAADAEAIAEAVQRPTMRFVPIKSADQQAVLMLHRTRDLLIRQRSSLISAIRAHFSEFGIVVGQGIRNVERLLALLETAGDQRLPALAAEMLGILAAQLRYVAEQVKEVEVKLLAWHRADETSRRLQSVPGLGPITASAIVATVGDPKQFKSGRQFAAWLGLVPQQRSSGGKERLGGISKRGDGYIRRLLVHGARAIVGWRKRSATHKTPWIERLLARRPTNVATVAYANKLARIAWAIMMHGNRYNPALAFATIP

SEQ ID NO: 104001 - protein, 403 aa, unidentified
MDYDLLAYDVYAGFDVGKFTHHVVALHVKDQQKVLSRRIPQDEEEIRSVLKELTPYGRLLVAVDQKGSFGRLLVATAKDMGHDVGFLTPSDFHAFSKGYTEVKSDAKDAYIIADIAMRLTARLHPVDDLDEEIESLKTMTTLRAALVRDSTQAKNRIRSLLVQTHPAFEASLGKDSLDKAVYLHILARYGGPEGILKAGRRSLGAFISKQPYYKNKADGIVGRIFSALALQTVRLPGASAREETVGFLASGLISRKQAIADLEKKIEASYRCFPESIVLNSIPGIADVLGPVLLAEIGDISQYRDAGHLAAYAGVAPSKRQSGKTIDGAKKRTKCNRQLKNALCESARISVSCDEWSRWFYEKKRAEDKKHKQAVLALARHRTDIIYAMLKNGSLYEPKRMTP

SEQ ID NO: 104002 - protein, 386 aa, unidentified
MQKLNDLSRSLTPLEPDGTLIAVIEMSLSSWLVAGIVPGIERQPLKKLVVDENALLKLLHRWREEAEKAGHMIKRIAVAFEAGRDGFWLARWLGARDIEVHVIHASSVAVSREHRRAKTDRLDTELLKRAFLGWLRGERDHCKMVAIPTIKDEDGKRPNREHESLVGEQSRIINRIKATLARLGIRGFNPKLKKAAERLEGLRTPEGEPIPPNTLSELHRDMERRGLVRDQIRQIESARLNRLEHAPGKGAHAMVRLLARVMGIGIETADMLVQEVLSRNLRDRRAVARYAGLTGSPDESGKKRREKGLARSGNPRVRRGMIQLAWRFLMFQKDSALAQWFRARTENARGSRKTMIVALARKLLIALWRLVREGVVPDGVILRPAQ

SEQ ID NO: 104003 - protein, 341 aa, unidentified
MMIIGCDFHPRFQQIAYVDLETGEFFERRLSHPEEAERFYRSLAGTQVRIGLEATGNFGWFRRLINELGYEFLLGDPSAIRAASPRRQKTDKRDARHILQMLLEDRFPVVWQPPAENEQLRQLLLHRCRLVRLRTRITNQLDSMGKNEGLLGCKSWSAERRRRIEALPLSGWYMRRRTDLLDLLDELEKRIEPLEKAVVEAAEKNQQACLLMTHPGVGPIVSLVYVLTIGDWKRFPRSKELASYLGLIPAEDSSADKRRLGHISKQGNTLLRWLLVQAAMGAQRSDSSWHRRYLRLSLNKHHGVAKVAIAHKLAVRLYWMLRSGQNYKQVMERGSHLGQPV

SEQ ID NO: 104004 - protein, 428 aa, unidentified
MNNQEIVRHEQYRQIVSEITGSDQYMVVGMDVGKDKHHAFVGTARGICLFKKLVFENNLEGFGRLLTTVDQLKTQNCLETVVYGLEPTGNYHKPLARHLVRCGCNVVLVTGQAVKNNRQLLDGRWDKNDSKDAANVADLVSRGKCLYYDCPSPQIDELRGLLSLRRRLKKEEHSLRMRIRNSLLAQYFPEMDKFYSACESESLAIVRWCLDPDKISAMEFSEFFNMVTGTRRGIAQTLRLRKIHGLAMESVGCPMGPAAEYEADLLVEKRQQAAKQAQRTDGLIKGVCLEFPEYSCLLTIPGFGPYISAKVLAAIGNPFRFDNRKQVIKMAGYDLSAERTGKTAEKAVPVISKKGNGELRYALYQAAHVATGKTDLFRAYFTKILRGRERERGIKTKMRVKLAAKMLVIAWTLMKTKQPFDPGYLNTD

SEQ ID NO: 104005 - protein, 331 aa, unidentified
MTSLPNRTNDAPLSVGVDVAKATLEVGFSDREATLAPANDEAGHAALLAHLAELRDQGAAIGLIVLEATGGLEVEVATALQLAGYAVAVVNPRQARDFARAMGVLAKTDRIDARVLALMGQTLLQRADLAKLVKPLPDEQQCMLQAMVTRRRQLLGMRIAEQQRASGPDKRMRRSLNIILKALDRELARVDKEMQTFIGEHHAELAALLDGVKGVGKATISTLLAEVPELGKLNGREVSALVGVAPINRDSGTMRGKRTIFGGRPAVRKVLFMAALVASRYNPVIKAFYQRLLAAGKPKKLALTACARKLLTILNAMARSGKPFDAAIHLG

SEQ ID NO: 104006 - protein, 421 aa, unidentified
MLQMWGHFILSNGSFIGKPFKIVHSDPRSRDLAVAKIKEAQETYSLKSRCFLESTGIYHIPLLCFLRDKGFDCSVLNPIITKNSTNINIRKLHNDKFDSKKAALVGLNVSLKTSIIPDDSVVDLRNLVRDYYYFKDLQSAVALKLTAELKVSFPAYAKVFSKVTTQSSLKLLSSYPLAEDMLTAPKDDIVKIIRSTARFGEAYALRKYDTIIAAAQDAAVFGRALPSNAVRIRLYIDTYQEYQKHLDALLKALHETVDRLQDTLIYDQICLLQSLRGIGFLSAIVLIAEMGDFKLFSSPKKLYAYFGLDPAVKQSGKLNGDKVHMSKRGSSLARRVLHMVALNNVKVDKGSGTPVNPVVYDYYTRKCSGKKKTVAMGAVMHKICNIIFAMLRDNKPFEVITPEEHCRRFAAEHPDKIRKAA

SEQ ID NO: 104007 - protein, 356 aa, unidentified
MSLPMEEHELILGVDTHLDMHVAVLIDEVGRVIATHSFPTTAHGYEQLIAWVGSFGQLSRAGVEGTGTYGAGLARHLLERGVKVLEINRLDRSRRRLRGKSDPTDAENAARAVLAGDANAIPKAQCGEVEAMRAVTMARRSAVKAKTQAINQLRALLVTAPEAIRATLWKVKPEHCIARCARLQALGDTPLLKALTDTLRLLARRWLSLAKELRELDSALEQLTKRVGRRLLAQFGIGPQTAATLLVTAGDNPDRLHSEAALAALCGVSPLEASSGKTTRHRLNRGGDRAANNALWTISMVRMRSDPRTRAYVSRRTAEGLSSKEIQRCLKRYIVRELYPLILADLADTVPRPNLT

SEQ ID NO: 104008 - protein, 371 aa, unidentified
MKKSSMFVGLDIHKSSIEIAIAEAGRDGEVRSYGAIDGTLGALDKVVRKLVSKGSEMHFVYEAGPCGYDVYRHLTAQGFDCAVVAPSKIPRQSGSRIKNDRRDAQMLARLHRAGELTAVYVPCVEDEAMRDLTRAREDAKAMERNAKQRILAFLLRHGHSYRGKSPWSRAHFRWISLLKMPHPAQQIVLQESLDTLAECTRRVDRLTEQIQTLSPQWRLFPVTQALQALRGVSLIVATTTIAEIGDLTRFEGPPELMSYLGLVPSEHSSGRTTRRGSITKTGNGHVRRVLVEAAWAYRLPARVSRKLLIRQEGVSQEVCAISWKAQLRLCARYKRFIAKGKSHQLVVTAIARELCAFMWAIANEVQGPVKV

SEQ ID NO: 104009 - protein, 340 aa, unidentified
MNNLNTIAIDLAKNVFQLCILSPERKVTVNKQVSRQKLIELMANQKGAVVAMEACYSSHYWARLFDSMGHEVRLIPAQHVKPFVRGNKNDHNDAIAIAEASWRPNIQFVPLKTVEQQDIQALHRIRDKLISRRTSIINQTRGLLSEYGVIIPVGLIHFAHSLPTLIDPADIRISLRMKHQLIDVKNEYDTLSERCLSIDKQLKAYVNQNALCQRLMTLPGIGFINATALYASIGNACQFAKPRELSVWLGVTPRQYASGEKSYNTGITKRGNPYLRKQLIHGARSLIHRAKKKHDKLSIWINQIVERRGKNKAAVAIANRLARLAWILLHRNEDYRAFAA

SEQ ID NO: 104010 - protein, 325 aa, unidentified
MRKVGQTGVRRSDVPCFVGIDVAKAQLDIALRPSGERWAVPNDASGVATLVDRVQTLHPTLIVLEATGGLERAATSALAAAGLPVVVVHPRQARDCARATGQLAKTEALDARALAHFADVIRPTPRPLPDAQTQELRALLGRRQQLIVMRTAEQNRLAGTNARLTKAITAHITWLNADIATLDDDLETLLRASPLWRANDDLLQSAKGIGPVCAHTLLLELPELGTLTRQQIAALVGVAPLNCDSGTLRGRRTMWGGRAHVRTVLYMGTLVATRFNPQIRVFYERLLAAGKVRKVALTACMHKFLTILNAMLKHRTPWKPQEVQN

SEQ ID NO: 104011 - protein, 388 aa, unidentified
MQVAADRTDASTAIQTDLPAIFASLELSRSTWLITSLSPGAGEKMSKHSIRAGDVAGLLVRLAQLKEKARGRTGRDFPIIAIQEAGLDGFWIHRVLQSEGIEGHVVDAASILTSRRWRRAKTDGIDGETLVRTLLAYKRGEPRVCAMVKAPTPEEEDRRRICRERKTLVGERVEHVNRIKGLLFAQGVSDYEPLKRNRRARLEELKTGDGRPLPAHLKAQISRELDRLELVLPQLKAVEAERDALLKPVSEGCPTPAAMLAQLKGMGPEFTAILWSEGLFRSFSNRRQLAAYAGLAPTPWQSGSVAHEQGVSKAGNPRLRTTMTQLAWLWLRHQPTSALSVWFQERVQSNGGKMRKTTIVALARKLLVALWKYSISGVVIEGAAMKTI

SEQ ID NO: 104012 - protein, 410 aa, unidentified
MQTLVERGCGLDVHQATVVACLLIVRKDGKVRKQMRTFGTTTRELLSLREWLLSEGCTHAAMESTGVYWKPVYAILEGGLEIVVANAQHVKKVPGRKTDVKDAEWIADLLCHGLLRSSFVPPKPIRELRDLTRYRRKLVESQAAERNRLLKLLETANIKLASVATDVFGVSGRLMLEALVEGKSTPQEMAELAKGRLRQKIDELGPALEGKLEEHHRFLLRLQLHRLEAAEKDLAVLEQRLQEKLKPYEGQLTLLDEIPGVDWTLAAVIIAEMGVDMSVFGSVSQLASWAGVCPGNNESAGKRKSSRIPKGNVYLKTALVEAANAAAKAKGTYLRDKFYRLKARRGYKRAAVAVAHKILVAIYHMFSHQVCYNELGDAYLDKRNKHHLTRNLVHRLERLGYTVTLEQKAA

SEQ ID NO: 104013 - protein, 315 aa, unidentified
MSIVYVGLDLGSSNFQQVAMNEAGVSRINRDFTTSEANLIKAFTDLRGEIQVHLEAGELAPWAAAVIAPLVTRVVCSHPQSNAWIAKDADKCDRIDAYKLADLLRLNRFKEVHYAREQSRREFKTLVQHYDELTAQQARLKTKLKARLRMQGVIVRGEEVFSARGRQAVLEQVKSPAVRAAIKQLYAVLDQSIASQTEAQMLMLRAAQAFPEIRIFRTAPGIGPIGACRFRAYIHIPNRFSSTRKLWKYCRLSVSHRSSNGKPLRRPRLDRMGCDRLKDVSRKLSRPRCAGVTIMGLSGLIIARSRPPMTRRMRG

SEQ ID NO: 104014 - protein, 341 aa, unidentified
MAEVVTIGLDIAKSVFQVHGIDAAGAVVLRRQVRRAHLLLFFAKQPKCLIGIEACASAHYWGRELSKLGHLVRLMPPSYVKPYVKRQKNDAADAEAICEAVTRPTMRFVEIKSPEQQSVMVLHRVRMMLMRQRTQLSNAIRAHMAEFGLVAPIGREGLQNLIRLVETSDARVPEEASACLQLLATQLKLLNSQILATDRRIRTSARATETGRRLMGIPGVGPLLACALVATVPDPKAFKSGRNLAAWVGLVPKQNSSGGKQRMGGITKHGDRYLRQLLVVGALTVVRYAQRHGARRPWLVQLLSRRATKVATVALANKTARIAWAIMTSGESYREPMVQAA

SEQ ID NO: 104015 - protein, 394 aa, unidentified
MLLDPPFDGQTAIHTQFGAIFISLELSRSSWLITSLSPGNGEKMSKHSVVAGDIAGLLARFAEFRGKAELRTGKRYPIIVIQEAGLDGFWIHRVLEGEGIESHVVDAASIATPRRRRRAKTDKIDGEALLRALLAYKRGEPRVCAMVVAPSSEEEDRRRVCRERQTLIGERIAHVNRIKGLLFSQGISGYEPLRRDRRTRLEALRTGDGRALPAHLKAQISRELDRLELLLEQITAVEAERDALLAAVSGDVRNQPEGPQPVAMLLALKGIGAEFAAVIWSEGLCRRFSNRRQVAAYAGLAPTPWRSGAIAHEQGVSKAGNPRLRTTMIQLAWLWLRHQPNSALAQWFKERVKRNGGRLRKTTIVALARKLLVALWKYVTAGVVVEGAVMKAVS

SEQ ID NO: 104016 - protein, 375 aa, unidentified
MSCSIVYLGLDVHKESITIAVLPADAPAPTRVERLPNDLVKLRRFFSRLAEAAELRACYEASGAGYVLQRAMREWGYSCEVIAPSLIPTRPGAQRKHDKHDATQLARLYRAGELTTVRIPTEAEERVRDLVRCRETFQRELLKSRHYILKFLARRGFIFRDGSNWGTKHFVWLRQLGSANSPLAHEDRLVYSEYLALLEYKLARRTDLDRQIELLALTPALAQAVGYLQCFRGIQLHSAMVLACELVDWRRFSTPGQLMAYLGLVAREHSSGERERRGSITKAGNRHCRHVLVQAGWAYRHQPRTSAALKARQKGQPANVITHAWKAQHRLHKLYTHLAYRKSPQIAVVAVARELSGFLWAVMRELEPATTAPLA

SEQ ID NO: 104017 - protein, 378 aa, unidentified
MKKNNTCSQSPKQRTKSGKKKGGSKGMEVTIGMDLGDKTSRYCVLDSKGEVLFERSTATTKKGMARAFGAMGRARIAIEVGAHSPWVSRLLKSLGHEVIVANARRVRLICESNSKDDRLDAKTLGRLARVDPELLSPIRHRSEEAQGHLMVIRVRATLVEARTQLVNAARGLAKAFGERLEGCDTDQMGVERLKDQPSALQKALRPLLTEVESLTERIQECNRTIEQIARTQYPETARLRQVSGVGELIALAFVLTIEDPQRFQRSRDVGGYIGLRPKRRDSGHSQPQLRITKEGDPYLRQLLVQGAHYILGPFGPDTDLRRWGRQLAARGGKNAKKRAIVAVARKLAILLHRLWVTGQVYEPLRHSQGDPAAQPAAA

SEQ ID NO: 104018 - protein, 343 aa, unidentified
MKLQVLGIDLGKTVFHLVGLDSAGRVVIRKRCSRTQLLAFTANLQVQLIGMEACSGAHFLGRALREQGHEVRLMPAQYVKPYVQTNKSDYLDAEAIAEAVQRPRMRFVPIKTEEQLDLQALHRVRERWVMRRTAVVNQIRSLLLERGLTLPKGRSHLDEQLPRILEDAELNLSDSFRVLLAQLQLELEQLAARVEEMDRVIQKTARENEACQRLTEIPGVGPVTATALIAAVGNASAFRKGRNLSAWMGIVPGEYSTGGKQKLLGISKRGNKYLRRLFVQGARSVLQQRHKQAPGLSSWLAQLLGRAHQNVVVVALANKLVRMAWAVLCKNERYRAPVFAVTT

SEQ ID NO: 104019 - protein, 429 aa, unidentified
MKYNTQNAKIASIKEETLVLGIDVGSETHYVRAFDWRNYEFSDKPLAFSNDEAGFLTFMAWVEDIKEKAGKTAVIPGMEPTGHYWFNLGKFLQDSGMRPVHVNPHHVKKSKEMDDNNPDKNDRKDPKTIAALVNEGRFSYPYIPTGVYAEIRSLSNLRFQTQEEITRIRNRIARWISIYFPEYKDVYGELDAVSGMMVLREAPLPMKIKELGAEGINQIWRNAKLRGVGMKRAKTLLSAAEHSVGSQEAPEAASMEIRNLLEDYEKYSRRMDDLMVKIEEKIKEIPYVDKLLEIKGIGLKTVCGFIAEVGDLSRFDDPKQVQKLAGYAIVKNSSGKHAGESHISYRGRKRLRYVLYEAAISVIGKNSEFREIHQYYQTREKNPLKKMQSVVTVACCRQPPLTVIRAILSGQTGTSPAINRYAAKGSLHE

SEQ ID NO: 104020 - protein, 342 aa, unidentified
MLHYGLDIHAKYTTYYAVDDQGNRVAEGRVANDRDVFAALFSAHPGPRRAVMESCIVWPRVHELIADLVDEVQLAHPLLTKYIAWNHVKTDRLDARALALLLRGDLVPRAYLAPREIQQARSLVRHRLSLTRQRIALKNSVHYILLRCGHQRQETDVFGKRGRSWLQQIALENTDRRMLDQKLRAVDFFTELVAEADHEIQCFFLPHPAYALLQTIPGIGPLIAAICIAEIGDIGRFPSAKQVVSYAGLVPSEYSSGGKVRRGHVTRVGSSILRWAAIEAATGFAPRVSAARLRHERLRQARGAGVARVAAAAHVLRVVHGVWKSGRPCRAGSATPVPALVT

SEQ ID NO: 104021 - protein, 371 aa, unidentified
MSHYREAFVGIDVAKLKNAIAVAEFGRDGEIRYFGEVEASDVSMRRVIQRIAAKFDRVHFCYEAGPTGYGLYRLIKSLGHECIVVAPSLIPRKPGDRVKTNRRDALVLARLLRAGELTAVWVPDEGHEAMRDLVRARTAAVETLRVHRQQISAFMLKHGRIYPRKKGWTMRYLIWLQEQRFDHPAHQIALQEMVDAVRVSRERVDRLEKVIEEFVPNWSLAPIVQALQALRGVDLVVAVTFATEIGDVSRFESPRQLMGYLGLVPGERSTGETTKRGGITKAGNSRVRTLLVESAWTYRFPPRIGSKKLYKLEKVPSSVREIAWKAQSRLSARYRLLTSRGKKSTVVCTAIARELAGFMWAVSKEALQPRL

SEQ ID NO: 104022 - protein, 333 aa, unidentified
MQNFYFIGIDVSKKKLDICVMSNSKVLKEEQVSNHPQAIATVIAGIKEELSMSNDSFIICAEHTGQYTYPLICACKSAGSKLWLENASQIKYCSGVTRGKNDKVDARRIAVYAMRFFDKAKPYQRPSEELMRLKQLEAERSLYLTDLAKYKAQLSDQEGFMEDKIFKRKAKRLKEMIKSLEKTLKEIAQEMADVIVSSEELSRQMRLLKSVEGVGPVVAMNMIIATEAFTRFDNPRQFNCYVGVAPFAYTSGSSQHSRNRVSQRAVKYIKCLLHMAAVAIAHKKTGDLKTYFERKVAEGKNKMTVLNAVRAKLVARMFAVIRNNRVYQPILSV

SEQ ID NO: 104023 - protein, 355 aa, unidentified
MSSEKYIGLDVHQATISVAVMDSQGKVIMESILETKASTILEFFAGLHGSLFVTFEEGTWAAWLYDLLKPHVTEVLVCNPRKIPLLKQGNKSDKIDAGKLAERLRLHDLKPVYHGEIGVRMLRELARSYLTVVKDLSRIMNRLKALYRSWAIPCAGRDVYYRRHRSQWLEKIPEAGTRRRAEQLYQQLDMLQHLRQQARRELLAESRKHAITTKLRQIPSLGPIRSALAVALIQTPHRFRSKRQLWTYSGLGLETRDSGEYHFVKGQPRRRKKQATIRGLNKDYNHDLKGLFKGAATRASVKPGPFQEFYQRSLAKGIKPTMVRLTLARKIAAITLTLWKKGEDFDIHKLNSQAA

SEQ ID NO: 104024 - protein, 345 aa, unidentified
MNKFSKIIGVDLAKSVFQLALADDHYHLQQNKRLNRTQFHTFFVNLEPAHIVMETCGTAHYWARTLIAMGHTVSLLPAQYVKPYVRRSKTDRNDAIALIEAARNHAIKAVPVKSEYQQSIQSLHRLREQWKHTRVARINSLRGVLREFGVLVPIGPRAAIKTTQAALESLPALLLPSIQDILTELLTLQDNISTLEKQLKQIVKEDVVIQGFMQINGIGILTATAMRASVQSPAQFKNGRQLSAWLGITPREYSSGNHRYLDRISKRGDKYLRTLVIHGARSVMARIKVLQRSQQKLTALQQWAVQLEQRVDHNKATVALANKMLRILWATWMHQRNFDGNYITQ

SEQ ID NO: 104025 - protein, 379 aa, unidentified
MYRILKIGMDVHTTNYTLCALESKFGTDDQVLANITVGPEHRNILDFIRRIKEKMDPKGQDQIDVECGYEAGCLGYSLYHTLTAYKLKCTILAPTTMLSEQGPRIKTDRRDAALIAACLSNGGFHAVHIPTDEDNAVKEYIRMRDDHKVALKRIRQQIGALCLRFGSIYSGNCWTGVHLNWLRTLKLPEMIREILNEYLATHDHLTATIDRLDKRIQEIAAQTQYREKVRKLECFLGIKTHTALSLIVNTGDFQRFRKGNIYAAYLGLAPGEHSSGESGGKRGITKAGNTHLRVLLTEAAEGICKGQIGRKSKVLLARQSGNPVEVIAYADKANIRLRSKYYRLIRHGKKRNVAVTAVARELACFVWGMMTDNIHGNAA

SEQ ID NO: 104026 - protein, 312 aa, unidentified
MTDQIFVGVDVAKDWLDIHHASQGATRINNSPAAARSFAARCAKEGAWVVVEASGGYDPHLRDALESAQVRFSRVNPRQARDFAKAMGVIGKTDRVDARMLAELGARLTPAPTQPLPPERRALQAQATRRRQLVEMRKQEATRLQQTADPVARADIRGVIALLDRRIAKIDARMTKLVAADPELAAIDRRLRTAPGVGPVVAATLIAELPELGQIDRRSIAALAGLAPIARDSGRRSGPRSIGGGRPVVRTILYLAALQASRRAPEFIHFREHLQAAGKSVKAAIIATARKLVVTRNAMLASGTDYRPAAVV

SEQ ID NO: 104027 - protein, 345 aa, unidentified
MKITTIGIDLAKAVFQVHGADEHGKAGLRKQLKRKDVLSFFANLEPCLIGMEACGSAHYWARKLSELGHTVRLMAPQFVKPYVKTNKSDRNDAEAICEAVGRPNMRFVPVKTAPMQAVLALHRARQGFVKARTAQGNQIRGLLAEFGIVIAKGIGHIAQRLPEILEDGENGLPGMMRELLKRLGENLKDMDRQVEELERQIKLWHRDNEASRKLEAIPGIGPIIASAFVATVGDAKNFENARQVPAWLGMVPRHEGTGGKVKMGGISKRGDVYLRTMLIHGARAVIAHIERKPEHADEWLKKLLARRNKNVAAVALAAKNARTAWALLAHERSYQHDYVATRPAA

SEQ ID NO: 104028 - protein, 341 aa, unidentified
MKVSTISIDLAKNVFQVMGFTHRRKTVFNKRLNRVQLAEFMQMHPPCRVIMEACYSSHYWGRTFSSMGHDVGLIPAQHVTPFVRGNKNDTNDTLAIFEASERPFIRFVPIKKQAQQEILMLHSLRERLLKNRTSASNQLRGLLTDFGIIFGLGHKAFSDKMKELLASESLSVTIKWVITDVYTEYSSLITRLKEIEKKLKMDIEVNPLGKILLSIPGIGHLNASAFVASIGSGQAFLSAKDFAVWLGITPKQYASGHKSVMTGITKRGDCYLRKQLIHGARALLSHAGKKQDALSVWICQLRARKSFNCTAVATAHKLARIMWTLLQKQCCYTPQLAKVAV

SEQ ID NO: 104029 - protein, 327 aa, unidentified
MMIIGCDFHTRYQQIAMLETQTGEITERRLEHESGEARAFYAALPAGTRIGMEATGYSRWFERMLAELGHELWIGDAAEIRARVVRKQKTDARDALHILDLLTANRFPRIWISKPEDRDAWQLLRHRDKLVRWQTAARNQLHALAMGEGLCRKKKLWSARGRQELEALPLGYWATRRRKDLLQALDRLAPSIEELDQAVKQQAEQRPEAVLLMRQAGVGPVTSLAFVLMVGPVGRFANSRKLVSYVGLNPSEASSGGQQRLGSISKQGNSLVRFLLLQAAQTASRMDAELRRDYQRLVFRRGKAIAKVAIARKLVVRLYWQLRKAGA

SEQ ID NO: 104030 - protein, 338 aa, unidentified
MGVYGGIDLHSNNQVVALVDEAGELVYRRRLGNELERVVHELAPYRERLVGVAVESTFNWYWLVDGLMAAGHRVHLTNPGAMQQYSGLKHGDDDSDAEWLAQMLRLGLLREGYIYPKAERGVRDLLRQRGRLVQQRTAQVLSIQNQVQRSTGQRLSGAAIKAASAEEAASWVVDREVALSLTANLEVMRCVDQQVTVLERAVLRQVKERREYAGMQTVPGVGKILALTVVLETGDIRRFAAVGNYASYCRCVGTQRISNGKRKGKGNAKNGNRYLAWAFIEAAHFAVRYSEVIRRFHQRKEARTHPLVALKTVAHKLARASYYILRDGVSFDLAKSFG

SEQ ID NO: 104031 - protein, 340 aa, unidentified
MEAIAVIGIDLAKSVFQVHGVDAQGQVMVRKRLSRAKLLPFFVKLPRCLIGMETCASANYWARELMGLGHEVRLMPPQYVKPYVKRSKNDASDAEAICEAVTRPTMRFVGVKSPEQQSVLVLHRTRSILTRQRTQTSNALRAHLAEFGIVAPVGRQGLDRLIAVVGDEHDARLPMPARRCLAMLVEQHRLVLAHLLATDRAIRADSRASELGRRLQEIPGVGPLVASALVATVPDPHVFKTGRGLSAWLGLVPRQNSSGGKERLGGITKAGDTYLRKMLFVGAMAVIRHAERYGTRRPWLTKLLSRRSPRVAAIALANRIGRTAWALMTSGERYREPVVA

SEQ ID NO: 104032 - protein, 319 aa, unidentified
MSAQTVIGIDVSRDWLDCFCLPEKQRFRFQNSPDGHARLLEILQSMPDGFKIGFEATGGQEWALWRVLISMGLNAVQLPPAQIKAFALSMGKRAKTDKIDAELIARFLALRPEAGRTPPDEKLQLLRALTVRRAQMGEARKRLSAQISARRKQGVSAELEDMDSSLKAFLESQISELEQRIESVIAEAEELSVKAELLRSIPGIGPVSVAMLLAEMPEPGRMTATEAAAMTGLAPMAHDSGAMRGKRVISGGRRSLRHVLFQAGLAAACHNPVLKAVAKRMKERGKPHKLVIVAIARRLVTIANAVLKTGVPWRISSAA

SEQ ID NO: 104033 - protein, 333 aa, unidentified
MSTTMNLPSTPAAGQAVYVGIDVSKDKLDLARSGSDAVETFSNDAAGIARIVALLTPLKPAVVVIESTGGLERPLVQALLEADLPAALVHPARVRYFAKGLGILAKTDRIDAVVLRRFGELAAPRLLEKRSKNQGELRDLVACRRQLCATRAQQYNRRSTTASKAALKSIDAVVKTLDKQIDSLDGQIRDLLDADDDFKHLDELLRSVPGVGPTLSATIAADLAELGHADRQRVCALAGVAPFADDSGTTRGRRSIRGGRTDLRCVLYMGTLAAIRSNPVIKTFAQRLRAAGKLAKVVIVACMRKLLTLLNAMIRDGLRWDQLDVVKKLSTTH

SEQ ID NO: 104034 - protein, 398 aa, unidentified
MTESSDYESVQVFIGVDVGKDTHHAVAINRSGKRLFDKALPNDENKLRSLISDLKQHGQILLVVDQPATIGALPVAVARSEGVLVGYLPGLAMRRIADLHAGEAKTDARDAAIIAEAARTLPHALRTLKLADEQIAELSMLCGFDDDLAAQTTQASNRIRGLLTQIHPALERVLGPRLEHPAVLDLLQRYLSPEKLASLGEKKLAAQLCKLAPRLGKRLAADIAQALAEQTVIVPGTNAAAVVLPRLALQLITLRKQRDEVALEVEQRVLAHPLYPVLTSMPGVGVRTAARLLTEVACRAFASAAHLAAYAGLAPVTRRSGSSIRGEHPSRRGNKALKRALFLSAFAALRDPLSRAYYTRKMSQGKRHNQALIALARRRCDVLFAMMRDGTFYTPQGS

SEQ ID NO: 104035 - protein, 421 aa, unidentified
MPNIEIGVDFMVKENFIYVGIDLHKETHTAVMIDCYNQKLGEITFPNRPADFPKLVTKVKKCNTDGKEVVYGLENAYGYGRALAVWLIDKGYLVKDVNTAISHRQAKHRGAMYRKSDSDDVEAIALATLNMLDKLPDACPNDAYWSLGQLVHRRDNIMKQRTRLVNQLHEQLCIAYPSYKSFFNDISRPTALYFWEHYPSRKYLKGKSVEDLRAELVPVSHNKCSTRTCEKILDAIAGDKVKNNAYQDARDMVTLSIVSDLQHYDKQLAEVDKMLEQMYKMLGCTLTTIPGVNVITAVKILAEIGDIKRFSNANKLAQFAGIAPLHLSSSGKGKDLATKQGNRRLQATIYFLAIQMVQISSKGTPRNPVVRAYYEKRKAEGKTSQQALICISRRLISIIYGMLKSGTEYRMPVVENAGENR

SEQ ID NO: 104036 - protein, 426 aa, unidentified
MKVLHERVAGIDVHKDMIKVAIRSPGEKPWTRTAEIPEFRTFYGVLQAMARELRGRGVTHVVMEASGVYTDPVYYALRELDFTEVMVINPAHAKALKGHKTDAKDAIRLLDLYECGLLSGSYIPDPDLREVRDLARYRMKTVQARTSEIQRLQKTLETAGIKLSSVLSDVTGASATAMIEALISGERRGSVMAGLAQTRLRTAGKMADLSMALAGRFTDHHALMCRLHRDRITIFDDAVKDLDAKIAPLVARYAREAELLKTLPGFGDVIVAGWLGAIGPAPHQHFATASRLASWATLCPGNYMSAKKSKGGRTGDGGAYIKPLLTQAAWAAVRVPGRLQARFHRLVRKFGGPRNKGAQKRAITAIAHTLLKIAYSVLKTGKPYADLGADFYTRRESPDARQGYLMRQLQKLNPGCVITIIPAEAA

SEQ ID NO: 104037 - protein, 395 aa, unidentified
MFFLGIDIGKNNHVASMVDDCGKTVLRSFSFSNTTDGAESLLAKLTKHEINSSNLVVGLEATGHYWLSVYSFLHTQGFKQHVINPIQTDGWRKGIEIRKRKTDTIDSVLIAELVRYGNFIETSLPNEAVLSLKNLTRFRTYLIDSISDLKRKVICVLDQVFPEYEELFSDIFGAASKEVLLKYSSPSELENLSVDKLAELLAKFSRKKLGLEKANELSLAAKNSFGVTFCRDSFTFQLRIMIKQIKYIESQVKDTELEISCIMHKLATPITTVPGIGDTLGAVILSEIGDINKFDNSKKLVAFAGVDAVVKQSGKYERKETQMSKRGSPYLRRALFQAALAASVSKHSDPVLSAFYKKKIAEGKHHGTAVGAVVRKMCNIIFHVLTQNRPYEVRN

SEQ ID NO: 104038 - protein, 356 aa, unidentified
MPSITPDTAAIEVVGGVDTHLDTHTVAVIDLVGRVLGTEQFPATTAGYTALLAWMRGHGRLARVGVEGTGAYGAGLTRQLRNAGVEVIEVDRPDRKTRRSQGKSDPIDAVQAAKTALAGHRTGTPKQRDGRVEALRNLRVARRSAVEQRADTQRQIKTLIVTAPDELRARLRGLNVKQLIATCATLRPDRADAATPATAVKLALRCLARRHQQLSAEITDLDELLEPLVAAINPDLLAVHGVGPDVAGQLLVTAGENHDRLTSEAAFAMLCGAAPIPASSGKTSRHRLNRGGDRQANAALYRVVLTRLRWDPRTRAYAERRTKQGLSKKEIIRCLKRYVARELYQHITTNDLELAA

SEQ ID NO: 104039 - protein, 314 aa, unidentified
MAKTQNNIEFEQVIERGCGIDIHKKVLVATIRGTGIKEETRLFDSFTESIEQMRDWLKGKKVTHVAMESTGVYWKPVYNILEEDFEILLVNARHIKNVPGQKTDKKDSKWITKLLLSGLLKGSFIPPKSIRDLRDLTRYKRKVVEQVSSEKNRIHRLLEDANIKLSSVVSNLNGVTATKIIDAMIAGEEDVKELVKLRHGKMQSTIEELSASLKGKLTAHHKFMLQTIKESIDSKKQIIAKLDEQIDKQIKESELNLDAELLATIPGVGKDGAAYILAEVGNDMSQFPDEQHLASWAGMSPGSNESAGKKKAQK

SEQ ID NO: 104040 - protein, 425 aa, unidentified
MNKDILSTLFVGIDVSSSSNYFCAINFEGKHLLDFSIANDLPSSEIAIERIFNALKGNDLKFVTIVLESTNVFSFHIANLLASNNSLFNFNSKVFVINPKESSNFRKTYSDMDKTDPKDAFVLADMARCGRINQQPYKASQLFALQRLTRQRFHLVKTITREKAYMMSNIYLKFSSLYIAKKEEEPFSNLFGTTSKSIIADFTPDDIVNMSDEDMINFVMEKGKSRFSNPEENVKLLKKIARDSYRLDKLAYDPINVAISSSFNTIKALEDNLKVIDKAIEKNIKGLCDNEFTILKSIPGIGDVYAAGIISEIGSIEFFKDNNALAKYAGLTWRKTQSGNFEAETTRMTKTGNKYLRYYLIEAVSSLKNHSKDFNDFYTRKYNEVSRGAHKRALALSARKLVRLIFGLLHHNQLYSATKLDNRND

SEQ ID NO: 104041 - protein, 335 aa, unidentified
MKKNKIVIGIDISKNKLDVCIIEDPTSKQHHYFIVSNDKKGINSIFKELKKYKVEDDSLLFCFENTGVYGMHLCNELQTKKVQFAMVPAIEIKRAKGLVRGKSDKADSKDIAMYAITHEHKLNLTSLPETDLLKLRLLLTEREKLIKAISLFDATRENEDFIDKSITKEVLCLNKKTMAFLKKQLVELEKSMQKIIKENEKINKQFELARSVPGVGPQTALNLIITTRCFSTFEDWRKLACYAGIAPFEYSSGTSIRGKTKVSSMGNKKIKSLLNMAALSAKKYDKQLKDYYERKTSEGKNGMSVMNALRCKIISRVFATVKRGTPYVNILKYSA

SEQ ID NO: 104042 - protein, 449 aa, unidentified
MENQARMIKSSDGNKLAIVNPNAAGIDIADAEMQVCVPEDRDGDNNRRFGSFTKDLNTIVEWLIGCNITTVAMEATGIYYLSLFLKLQDAGIEVLLANPADVKNMSGKKTDAADAEWLMVLHRYGLLRPCYQPGNAARQIRNLTRQRSNLIRMADKEVLYMQKAMEQMNIKLSTVLSDITGLSGRRIITAILQGQRNIYELAALAEPNCKASQEDIALSLEGTWDVDLLFMLKQSLAAYDFFLSQVGECDMEIERLLSLYGAQIEAGSAELIRCKRKNKRSKNAPRMDIENFAYQLWGVNVFEIPGLKDTAVMHLIGELGHDFVDKFGSAEKFSSWYNLTPNNKISGGKILSSKIMKRKNPVGQIFRTAVAPLARDKGEMGNYYRRIKSRSGALQANVATAHKMAKIFYTMVKTKTSYNASKVGLGERELAERKIAKLECLLMKLKNVS

SEQ ID NO: 104043 - protein, 344 aa, unidentified
MNIASIGIDLGKTTFHLVALGERNKILLRRKFSRSQLLAYTANLPASLIGLEACAGSHFIGTVLREQGHQVRIIPAQFVKPYRKSNKNDFIDAEAIAEAVTKQNMRFVQIKTQEQLDWQAMHRVRDRLMQRRTALINEIRGFLLERGLTFAARPIYLRKNLPTVIEDAEQNLSPRLRWLLDRLWQEWKQTEIDIKAITDEIERISNHDARCRRLRQIPGFGPLVSTATVAAIGNGSAFRRGRDFAAWVGVVPRQYSTGGKQKLFGISKRGNIYLRRMLIHGARAVLLRVKYNTEGFGQWVHRLAQRAPRNKVVVAIANQLARIAWAVLSSGKEYRHQPLQLAAA

SEQ ID NO: 104044 - protein, 391 aa, unidentified
MPMYFVGIDISKYKHDCCIISAADQQIISKFTITNDKDGFEQLLTALNSLSNPEDIKIGFESTAHYALNLELFLENAHHSFMEVNPVLIKEYKKSTTLRRTKTDSVDCESIARWLITVEYKPHSKGFYHAYSLKSLTRLRDRLIRQRSFYLVKITNVLDHTFPEFKPFFNERLSKTALYLLENYGSAEKMARMNSASYDKLRCISRGKFSIQQFLRLKELAANTVGVNNSIFDLELNTLLTLYKSLSDEINTLGTEIIKLIEEVHPHYMSIPGIGPISSAVIYAEYGDISNFSNPGQMLAFAGIEPGINDSGTESHGGRMVKHGSSQLRYVLLNACLPLIRFDLTFATYYEKKRAEGKKHRVAITHVAKKLIRVIYALERQDVDFNAQKLR

SEQ ID NO: 104045 - protein, 347 aa, unidentified
MRKIAYLSMDVHARNIVMGDMDADGKYRSKRPFTTSEINIIGALKAVKAKVKYLIIEAGPLANWVAQTANPYVTQVFICDPRENALIHKASTKRDQLDAQKLCRLLRLNEFKEVYRPENDQRAIFKAAVQHYNDLRDQLAALKKKIKAMFRQWGVIDVFGDSVYSASGRDKFLKQVKQRSIYLQLQRLYELMDHTAAMKQDAKDTMFALGRKYPEIKEFKKLPGIGSVGAITYDAYIQTPHRFARRNRMWKYCRTAVTDRRSDGKPLGYKRLDKAGIGELKALSHRAFMSAMKSDNEVKRFYLQSLQRTHNHKHARLNTQRKILTVMLGIWKKGQPYRPELFLDPSA

SEQ ID NO: 104046 - protein, 390 aa, unidentified
MASLSTATLDTPRPSTGVRDMPDPGPNNEEPAKGLDTAESTTDSDGRQGMSYVGWDWATQTHDVTVLDDEGRARDRWAFEHTESGWTSTLQRLRRHGEPCELPVIIERTSGLVVDRLLGAGHPVVPVHPASFYAARPRWGAAGAKSDPGDSYKLADYLRTDGHRLRRLEPTEPGLRELQALVRLRDDQVRARTAATNQLAATLDAHWPGPRDLFRSLASPIALAFLADYPTPQAAAHLGEARMGAFCRRHAYRGGKSPAELLARLRAAPVAPIGLPAVTLAAIITAQIDVLRALQAVIINIERVIADRVAAHPRARLLEHLPGVGTINLAQLLAEVGPILDRVGSAEQAATECGAAPVTKASGKTPASTSDPQPIPEPAKRSPRSPTTPE

SEQ ID NO: 104047 - protein, 315 aa, unidentified
MAMHVIPNRIGVDVAKDELVLYDQAADQVFPLPNTKAAIRRWLKGLPENSHMALEATGIYHLELAEQAHAAGHLVFIINGYQLNHYRESMGRRAKTDASDARLLADYLQANQRRLRPWTPPPKAYCTLQRLLRRRATLVQARVALQQSWKEGGSLKALIKPVLAHMDRLDQALQKRLRLALREAGLQAERARCQALEGVGELTATALVMAFLRGDFRTSDAFIAFLGLDLRVRQSSKREQRRRLTKRGDAEVRRLLHNAAMAASRSPRWHQVYEGYLQRGLKKTQALVILARKLARIAFALMKHKTLYQSEGQIA

SEQ ID NO: 104048 - protein, 314 aa, unidentified
MNKQATWIGIDVSKDRLDAAASSGERLSVSADDLQKLVSWVGKRRPDLIVLEATGGYEREAVAALLAKGWAVAVVNPRQVRDFARATGRLAKTDAIDAAVLAAFAQAVQPEPRRLRDAQTEALRDIVVRRRQLLDMKKAEKNRLETALSPIVRDGVQRHLAWLDGEIAQADDDLDQQIRQSPSWRADEDLLTSMPGVGPILARTVIAELPELGRLNRRQIAALVGVAPFNRDSGKMRGTRTTWGGRGSVRRVLYMATLTAVRFNPVLKVAYDRLRQAGKPPKLALVACMRRLIVTLNAMLQTRQPWTLPQTTVA

SEQ ID NO: 104049 - protein, 319 aa, unidentified
MLVGIDVAKADLVVAVRPTGERWTVANNEAGVGALVERWRGEAPRLIVLEATGGYELLCVGALAAAGLPVVVANPRQVRDFAKATGQLAKTDRIDADVLALFAERVRPKVRPLPDADAQALDALLARRRQLLDMLQAERNRLGQVSGRGRQPVKKSLKAHIAFLERQLRIADTDLGAMVRESPAWREKDDLLQSVPGVGPVMSLTLLADLPELGRLSRREIAKLVGVAPLSRDSGTLRGRRFVQGGRATVRAVLYMAALVAAKRNAVIRAFYQRLLAAGKPKKLALVACMRKLLTILNTMARTGARWTVGYTPPAVAPA

SEQ ID NO: 104050 - protein, 338 aa, unidentified
MKYCGIDLHSNNSVVVVSDEQDRIVFNRRLPNDLAQILAALEPHHQHELAGVVIESTYNWYWLVDGLMDAGCRVHLAHPAAIKKYEGLKHSGDFADAAYLAQLLRLGLLAEGYIYPRAERGARDLARKRMQLVRYRTAQILSIEGIVMRQTGARMKGEAVKRLTAEQVDEFAFAPDVALAVEANRAVSQALGQQIEALERRLKERVSLRPEYRLLKTVPGIGETLATTIMLETGSISRFAQVGNFSSYCRCVDSLRESNGKKKGEGNTRNGNKYLAWAFVEAANFALRYCPQAKSFYDRKKSKTSRVLALKALAHKLARACYHMLREQKPFNVHLCFG

SEQ ID NO: 104051 - protein, 325 aa, unidentified
MSTKASTPMEWVGIDVCKTKLDVYILSDKTYRVFENTEDGIAELIVWLQSYSEVGAVCEATGGYEAEMARQLYASGMHVSVVNPRPVRDLARALSKLAKTDPIDAYVIAKYGEVTEPAPTVVASEVADELKQWVTRRQQVVEILSAEKNRRTLLPKGIARDDVNEHIEWLEEKIKKLDKKIDTLSESTAEWRATKQILRSPKGIGPVISASFLVLLPELGKLNRGQIAALAGLAPFNRDSGNFRGQRKIWGGRGSVRALLYMATLSALRSNPPIRLFYQHLLEKGKVKKVAIIACMRKLLICLNAMVKNNEEWDDYKVTALLQKA

SEQ ID NO: 104052 - protein, 281 aa, unidentified
MSQNNITNNNLTIIYAGVDVAKATLELHLGGVIHNLANETKDHTRILKLLADAEKAQAGTKVHVILEATGGYEAALVRALHEAGQPVSVIQPSRVRHFAYAKNQRAKSDPIDARILTQFGEAIRPAPTAPPSAAQIHLGVIVSRRAQLIETRIAELNRAAHYTDKMLCRQSRGLLALLDRQIGACDKAIAAQIAADETMKARAQRVRQVAGVGPVVAAVLQAGIPELGTLTPCEAAALAGLAPYDCDSGPRKGSRRIWVGRAPVRCALYMAAMTAIRPDPF

SEQ ID NO: 104053 - protein, 312 aa, unidentified
MTQIICGVDVSGATLDVRIDRDGVAERFARTAAGIVALAEFCKAHGVGLVVMEATGGYERMPFGLLWAEGVPAAIVNPRAVRRFAEAMGRLEKTDRIDAGLIAWYAATKRIVPELPASRTQERLEGLVTRLRQLTELRTAQTNQRRLIKDAMLLDGFADLLGCIGRQIRSLEQQIAELIDHDPLWRRLDAAFRSIKGVANRTVARLMADMPEIGTLSGKAISKLAGLAPLARDSGQRKSPRSVRGGRSQVRSILFVVAEIVRRHDPDFAAFHKRLNDAGKPKKVIRIALAHKLLVRLNAKARECRAQLAIAA

SEQ ID NO: 104054 - protein, 352 aa, unidentified
MTVTNLARSITGGVDTHLDVHVAAALDDRGAVLGVESFATTTDGYKKLLGWLSDFGPVELVGVEGTGSYGAGLTRHLQAERVCVVEVDRPNRQRRRRKGKSDPEDAITAARAALSGDAAGEAKTRDGNVESMRVLRVARASARKGRTQALNQMRGLISTAPEPIRAELRGLNVFRLLERASTYRPGAKRDIVSLTKFSLRMLARRALTLEEEISEIDAILEPLVNETAPRLVGALGVGPDTASTLLVTAGDNPDRLRSEAAFAHLCGASPIEASSGKQQRHRLNRSGDRQANSALWHIVITRMVYDPRTTEYIDRRIAEGLTKKEAVRCLKRYVAREVFSLLPHEKLGLDSP

SEQ ID NO: 104055 - protein, 370 aa, unidentified
MAESNDTPEPISAFVGIDWADAKHDIYLHPADGSTASHEVIDAKPEALHDWILKMREHFSAAGKIYVCLEQSKGALIHQLMQYDFFVLYPINPKTLARFREAFRPSGAKDDRSDADLLCELVRLHTHRLRPWKPDDEQTRKLNAFCQNRRQAVGSAVRLLQQVREQLKLYYPLALELELNTVLACDFLQRWPTLEELRQAKPQTIRKFFYAHNFRRGDKIEQFVQKLQKQTPVTSDRAIIEPAAMQVRLLAAQLRVILNSIPEFDQTIAEIFHSHPDAAIFESFPGAGPQLAPRLLTAFGTDRDRLESAEQMSVISGVAPIKIASGKSFATHKRWACPKFVRQSFHEFAGCSIKFCAWGKSILPGPARQK

SEQ ID NO: 104056 - protein, 358 aa, unidentified
MSEITRVGVDLAKNVIQVHAVDVAGKVVTNKALQRDKFMLWCAQLPAGCLIAMEASSSAHHWARKLVALGLDARIIAAHLVEPYRLQGKSGKNDANDAAAICEAASRPTMRFVAIKTVAQQGMLSVHRLREGLKEERTACTNRIRGILAEFGLVFAQSSKVLRENLSSVIEDANNELAGIARLVIERAQSQWAELDAHIEWCDQRIAAHVKQDEHAKQATQLLGVGPVTASAVVATVGDFKQFKNGAQFGAWLGLVPKQNSSGGKNNLGSITKRGDMYVRMLLIQGAKAAVLTAHRRDDPISKWAYQLREKSGWQKAVVALANKNARILWAMFARGTPFDAHHVSVKPGTAQAAMSAA

SEQ ID NO: 104057 - protein, 347 aa, unidentified
MLIIGCDFHPGFQQVAIFDNRTGEIQEKRLQHRAEAEQFYRALAGQEVRVGMEACGHYPWFERLLEEMGMELWFGDAAQVRASVVRRQKTDRRDAEQLLQLLMEDRFPRIWVPSLEVRDVRQLLVHRHKQVQARTRTKNQLQAMALSCGVQKKRKLWTKAGREELQQLPLLPYAAERRQHLLKALDGLEAEIVELDRRVAEEARQRSEAVRLMTHPGVGPVTALAMVLTLGPAERFGSAKQVGSYFGLIPSEESSGGKQRLGKISKQGNSFLRFLLVEAGQTAARLDPHLKRFYRRLAVRKNRSVAKVAVARKLATRLYLMLREEWTYAQLCQAVMQVSPSHSVAGE

SEQ ID NO: 104058 - protein, 411 aa, unidentified
MHNRQNYLYVGVDLHKEHHTAVIINCWQEKLGEIQFENKPSAFSKFLLEVETYVCDGITVVFGLEDVGGYGRALAKYLVDHEQVVKEVNPALSFLERKSEVMIKKNDSWDAECVARILVNKFNQLPDAKPNDLFWSIQQLVSRRNALVKAQSALKNQLHIQLNHHYPSYKKFFSELDGKTALAFWQQYPSPSCLEGANIKQLTAFLLDVSNNTCSVKKASDILKLVKEDGHTMKEYQETRDFLVRSIVRDIEFKKTEMKYIERELKQLVKLLDYQLDTMPGIELVTASALIAEIGDVRRFLNANKLARFAGIAPVYFGSGGKGKVHKSKQGNRALHALFYNLAVQQVQVAKGSKTPRNPVFHAYYQKKLKEGKTKGQALVCIMRRLVNIVYGMMKYKTAYELPVVEEKEVV

SEQ ID NO: 104059 - protein, 404 aa, unidentified
MLFVGVDWAEDHHDACVMAEDGTVLAKRRVPDSVAGIGDLHGLVAEHADEDEAVVVGIEIDRGLVVWSLLAAGYKVYAVNPMASARYRDRHTTSGAKSDPGDAKVLADLVRTDRHNHRPIAGDSDLAEGVKLLARAHQNAIWSRQRQLNALRSALREYYPGALEAFGTDLASTDALAVLAIAPTPELGRGLSRSKIASALRKGGRQRNVERRAAEIQEALRAEQLEAPELITRAHGLITHSALALIATFNAQISELEAALSEHFEQHPDAKVVLSLPGLGTVLGARVLGEFGDDWTRFSGPKSRKNYAGTSPVTKASGHSKVVLARFARNRRLGNACDQWAFCALTTSPGARTYYDQLRARDKTHRQALRQLANRLVGILHFCMERDVLYDERVAWPEDSRLAA

SEQ ID NO: 104060 - protein, 352 aa, unidentified
MRTSQKTAGIIATIGIDIGKNTFHLVGLDQRGVIVLQQKVSRGQLERHLVNIPRCLIGMEACSGSHHIGRQLAALGHDARLIPAQYVKPFLKGHKNDYRDAEAVAEAVQRPTMRFVTIKTPEQMDLLALHRVRSRLVGQRTGVINQIRGFLIERGITVRQGAAPLRRVLPDILSSNTGVLSPRMVGLIADLAQDWRRLDERIAAVSAEIEALARQDENCERLITVPGIGPIISSAVVAAIGNGAGFKQGRDFGAWLGLVPKQESTGDRTILGKISKRGNTYLRMLFVQAAHVVLGRRSSAAMRGLWPWIEQASKRLHRNLLAIALANKLARIAWAVLARGHAYQTRIVANAA

SEQ ID NO: 104061 - protein, 340 aa, unidentified
MQATTIGLDLAKNIFQVHGVTADGTTLFNRPVRRAQLLKFFEKQEPCLVGMEACATSHYWARELTKLGHEVRLMAPGYVKPYVKRGKSDAADAEAICEAVTRPTMRTVPIKTPEQQAVLCQHRARELLIGQRTQLSNIIRGLVGEFGYTLRKGLSYIRAFAEELKNGRGPDLPDVAADVIASLCKQLLTLHRRILTLEKKIFQAARRDRRVKLLETIPGIGPVSASAIIATVGTPDNFKSGRDFAAWIGLTPLNKSSGGRERLGKITRMGDQYLRKLLVTGMTSRVRAAKAHPERADRWVANLLERKPVRLATVAMANKTARIIWAVLTRNEPYRNLSAA

SEQ ID NO: 104062 - protein, 358 aa, unidentified
MAEHSEAPHVVGGVDTHKDLHVAAIVDRQDRVLGVESFPTTRHGYRLMLVWMRSFGDLQRVGIECSGSYGAGLLRYMQAAGVEVLEVTAPDKHDRRRRGKNDHFDAESAAHAAFAEGHTVTPRSRDGMVESLRVLRVCRKTAVQARRIALQMIQTTIVCAPDRLRDPLRQMTRMQLIRTLAAWRPDLTAYRKVEEAYRISLKSLARRYLELHDEIADLDDMIEAIVKELAPELLEQTAIGLNSAAQLLLTAGDNPERLRSEASFAALCGVSPVPASSGKTVRHRLNRGGDRAANSAIHIIAIGRLRLDPRTQAYVAKRIASGSSKLEAIRCLKRYIAREVFSIIMWRHKEINQSQIAA

SEQ ID NO: 104063 - protein, 351 aa, unidentified
MGKSNAVFVGCDLGDKFTEVAVLDDTGAVVETARVRTTRCALEKCLGKYKRARVVVEVGVHSRWVREVLSALGHEVIVANPRQVRLIWKRRTKTDRTDAMVLARLGRFDVSLLAPVQHRSRSSQLDLAAVRSRDLIVGVRTKLMNHVRGTLKQFGFRVPTCSANTFPRHAEAALPDELVPALAPALAIIRVMNDHIAAHDKQVTELATQVYRHTERMSQIPGVGDLSALTFALTLDDPTRFKKSRFVAAFLGLTPAKEQSGSSDPQRHITKAGDPLVRKYLVQCAQHVLGRTTADSDLRRWGLHLAARGGKNGKKRAVIAVARKLAVLMHRLWISGERYQPFGYAAPAMTP

SEQ ID NO: 104064 - protein, 377 aa, unidentified
MSQFSKFVGLDAHKETLAVAIADHDGSKPRFYGEIPNTPDAVKKLLALVSPHGEAVSFCYEAGPCGYGLYRQITSAGHVCDVVAPSLIPTKPGDRVKTDRRDAENLARLHRAGELTGVWVPDDEQEAMRDLTRAREDIKHLERQAKQRLNAFLLRHGFGYDGTTSKWTRAHWRWMERIKLPHRVQQLVFQAYIDSVRQQQQRVADLEQAMEKALAGWKLAPVVEGLMALRGCRLVSAMTVVAELGDLTRFDDPRQLMKYLGLVPSEHSSGAKVQRGGITKTGNGHVRRVLVESAWTYRFPARKTALLQRRAERTLPAVQAIAWRAQKRLCGRYQALSARGLQKNKVCVAVARELSGFMWAIARELMGSESVRMNAGH

SEQ ID NO: 104065 - protein, 359 aa, unidentified
MQRKEISFNGQSIYIGIDVHKATWSVTVLTEHSNLSKTFSQEASARKLFDFLKKNFPDGRYLAVYEAGFSGYSTYYELKSFGIDCIIVNPADVPTKDSERKTKTDAVDSAKLARCLKNGDLTPNYIPSKEYLDDKDVVRTRSMFQKQLSGYKSRVKHLLYRNGVEYPERFERLGTHWSKAFIKWLREDVSLLSDGRMSLDLLLDQVESLRRSVLVATKAMRTLGQTARHKENLEHLLTIPGIGEVTAMTLLTELCEVGRFSNERQFTKYIGFVPNVHSSGEREGVGEMTHRGNTRLRTMLIESAWKSIAKDVTLAAAFGRYRQRMTPNEAIVRIARTLSHIAFAVVKNNTVYDPGRHLE

SEQ ID NO: 104066 - protein, 394 aa, unidentified
MKLVGIDVGKNSHHFCVMDKETGEFNVAPSSFSNNKEGFDFLINSLKPYSKKSILIGMEDTGHYHVALLKFLLSNGYTVALINPKTTDLTRKMEGGITKNDKLDTITICDVLDTPERKKQYRITKVDRFDLYEQRQLTRHHHNLKEELNVYCNRLQKSIDLVFPEFNTLFSSKYSIVYMNLLKTFGSAEAIASTDIRTIRKCFEIKGRGNRISLTPEKLKECAKNSIGISSEVETIQIKHLVSQITLIKEQIAEIDKKIEEFSITNNSPILSIPGISHFSGTSILAELGDIGNYSKPSQIIKFAGVAPYHYESSQYNAQHTGITKKGSKYLRKTLYQIILPVINNNPVFKKYYLLKISQGKGHRCAQGHCIRKLLRIIYHLLETGQSFDPALLR

SEQ ID NO: 104067 - protein, 311 aa, unidentified
MHDTIGIDISKDTLDTFWLSKRRHKQFANSKAGLSTLIGWIQRANVSLVVFEATGIYHWLLETNLAAYGIPFSRVNPRQARRFAEGAGTLAKTDRVDAAMLARMGALLELKADKPRSETLHNLKELGTARQALIKDRTAARARLKTAFYPLLKRQISRRLQQIERDFARIDAAIEAIITADKALSQKADILISIPSIAKITAYAMLTEMPELGNLSGKQAASLAGLAPISRQSGKWQGKERIQGGRACLRKAIYLPAVVATRCNPDMKAKYHALIANGKCKKLAITAVMRKLVVMANALLRDDRIWAEIRT

SEQ ID NO: 104068 - protein, 349 aa, unidentified
MSQSSSTVVARMGIDIGKSVFHVVGLDAKGKPVFKGRFNRERLLEFLARASPTIVGMEACPGSNWLARKAVAQGHQVRIVPAQFVKPFVKSNKTDIVDAEAIAEAISRPTMRFTQPKTEAQLDLQALHRVRQRLVSCKTAIVNQSRAFLLEYGITIGTGPAYFVRDMPSILSDESNGLTASMRQVLQEQWQEYRSVEARLLQLRRQIEAIAGADDVATRLTSVPGIAHLTATAITAFSGTGTQFKSGRHFAAWLGLVPAEFSTGGKQHLLGITKRGNPYLRRLLIHGARACVLHLDRTKDHLGVWISQMEAKGIHRNKVIVALANKLARIAWTILTRQGTFYLRQPRAQ

SEQ ID NO: 104069 - protein, 369 aa, unidentified
MTDLTLFVGLDVHKKTISVAMVEATAGAEVRFYGTIANTPDAIRGLCKKLTKDGQQLHFCYEAGPCGYGVQRQLSRLGHRCDVVAPALIPRKVGDKVKTDRRDAMMLAQTLRAGQLTAVWVPDEAHEAMRDLVRLRAQAMRDLRKTRQQLLSFLLRHGLVSPYGHWTKMHRRWLGELIFAHPAQHLAHEEMLQRIERAEALCDRLKRAILELVPQWSLAPVVQAIQALRGVSLIVASVIVAEVGCFSRFDSPRQLMAYLGLNPSEHSSGAMIRRGAITKTGNALARTCLVEAAWTYRFPARVTQIIRDRLNGLPEPIRNVAWKAQVRLSARYRKLIAAGKPAPKVVVAIARELVGFIWAIARMVEPKFA

SEQ ID NO: 104070 - protein, 408 aa, unidentified
MLEVKVERCAGIDVGKKFLEVCILIGPVHRKPAEEVRRFATNVRDLEALRAWLLEKACTEVVMESTGSYWRPVFNILEGNLQVILANPEQVKALRGKKTDRKDCRWLAGLLRHGLVQASFIPPRDIRELRDPTRRRRKLLENGTEERNRVAKVLEDANVKIGNVLADVFGMSGQAMLEALLENKLSAEQMANLAHRRLRPKIPQIVEALEGHRMSDHHRLLIGQALKHMQFIEDMVEELNQEIQKKLQPYQRQIELACTVPGIARDAAASILAEIGFDMSDRGPFATCHHLASWAGVCPGNNSSGGKRKSGNIRKGNRWLKATLSQTAWAGAAKKNSTFQFRYQRLKTRRGGKRAAIAVAHAQIIALYWVLRNGVPYQQQIRELHQQQRESMIRHHLARLTQLGYSTT

SEQ ID NO: 104071 - protein, 412 aa, unidentified
MKRIYQRCCGIDVHKATLTACVRVHGAGRKLSQEIRSFGTTGDELLSLHDWLMTHRVSHVAMEATGVYWKPVFYVLEQGFTLLLVNPADVQRMPGRKTDVSDAAWLAQLLENGLLRPSFIPPRAIRELRDLVRYRSELKHDHTRVANRLHKVLQDADLKLSSVMSDILGVSGRQILRQLAAGHSEPAALAELARGSLRAKRPALRQALTGRFSEHHAFLIGQALTELDNLEESMRALAARVEQHLVPFAQQIEQLTTIPGIKRVAAAVILSEIGTDMSCFPDTAHLASWAGMAPGNHESAGKRRRAKARHGNRWLRTILVECGHAAGRTRNTALAAIYRRMIIRAGRKHAAFVTGRHILNIAYHLLTQHDTYRELGPSYFEQRRAEQLKRRCLDQLRNLGFQATLAPLPTAA

SEQ ID NO: 104072 - protein, 334 aa, unidentified
MEELASCIGIDISKDTFHVCVKQLVSERVVVKGTRSFENSHKGFAEFLHWSLTKATTPVFVMEATGIYHEELTHFLYENGKDVAVVLANKIKHFAKSLNVKTKTDKADATVIAQYGLERHPQLWQPMMPQMKTLRDLCRERLSLKKDLVRCKCQIHNFRHAYGTLEFVSKMKQNQIAFLEQSVQSIENEIKRITEQDKDFNEHVNKIATVNGLQMFTIVAVLCETNGFTLFGNLRQVVSYAGLDIAERQSGLFKGKTRITKKGNARIRQCLYMPALSATNHNAHIKDLYQRVVERNPTIKRKGVVAGMRKLLILIFALWKKNEVYDPSHPWNVK

SEQ ID NO: 104073 - protein, 458 aa, unidentified
MEEPQEVLADEEHEQVWERVAAVDIAKASGVVCTRLPDEDHPGKRKTHVWTVQATSGAIIELGDYLRARQVQVVTLESTSDYWRIWFVILEAAGLKVQLVNARAVKNVPGRAKTDKKDAVWLAKLTEKGLLQPSFVPPYEIRRLRELTRLRADLVHDKSRYWARLEKLLERAHIKISAVLSTLDTDTARAMIEALIAGQRDPRALADLAIGKARAKRAELAAALDGRWEDHHSVQARILLDNIATLNQQAGQLTGQISELIAQIPAAWGVDADGTTGPDAGTSPDSPVLSAVAQLDAITGCGIIAAQAIIAELGLDMTVFGTAGRLVSWAKRSPQTRQSGKKTSGGRTGKGNPWLNGILGEIAASASRTGTFLGERYRRIARRRGKRKALAAVARSILVIIFHLLSDRAVRFRDLGADFYDTQISRDRKIRNHLRQLQALGLSPDDITALLGKDKAAA

SEQ ID NO: 104074 - protein, 414 aa, unidentified
MAEEETISWFAGVDWGSEKHQVCLLDAQGTTAGEREFPHSGEGLTELGDWLLSMASVASTVAVAIEVPHGPVVDALIDRGFVVYAINPKQLDRLRDRFSVAGAKDDRRDAYVQADGLRTDRRLFRRLQVADPRLIELRAWSRLAEELRAERVRLSNRVRHQLWRYYPQMQKLTDDLAAPWFLELWTIASTPAKAVRLRKSTVERLLKQHRIRRIDAETALRILREPAIKVAEGVAEAASIHMRSLVARLRIVNRELRKAERKLDELCTVISEIEQTSGEGLQRRDVEILRSMPGIGRINLGTLLSEASGPLSRRDYEGLRTLSGAAPVTKRSGKSVIVVRRYAAHVRLRDTVYHWARVATQRDPKCRARYTAMRKRGHSHGRAVRGVADRLLALACVLLQRQTLFDPYFGRLTK

SEQ ID NO: 104075 - protein, 331 aa, unidentified
MTGIICGVDVSSLLLAARIGRAGAQASFPNTVEGIAALAAFCRTHQVELVAMEATGGYEQRPFALLAEEHLPVAILNPRAVRRFAEGMSLTEKTDAIDAGLIAWFAEVKHPPPQALAPAGQQQLRALVTRLRQLTDLRTAQINQSRLVTDPGVQATFTELLAMLKRQTRELEQNIAQLIAADPLWHQLDQAFRSIKGVAGRTVARLMAEMPEIGTLSNKSISKLAGLAPMAADSGKHQGKRRIRAGRSAVRQILFVVASVAGRYEPDFILFQQRLRAAGKPPKVIRIALAHKLLVRLNAKARDVRNRFPQPCSISTGSPGSDFIAPDLAVA

SEQ ID NO: 104076 - protein, 353 aa, unidentified
MLIIGCDFHPGFQQIAIFDNQTGAYEERRLSHRAEAEQFYRSLAGQEVRVGMEACGHYPWFERLLAELGFELWLGDAAKIRASVVRQQKTDRRDAEHLQMLMREDRFPRIWVPSLEERDVRQLLVHRHKQVQARTRTKNQLHALAMSQGVQKKWKLWTAAGRAELESLELLPYAAQRRRQLLHRLDALEAEIAGLNRQVEEEVKGRPAAVKLMTHPGVGPVTALAMVLTLGPAERFRDGRKVGSYFGLIPSEYSSGGRQRLGHISKQGSSFVRFLLVEAGQSAARKDAELGRFYRRLGARKHRALAKVAVARKLAVRLYLMLREDWTYAQLCRAVVQASPSHSVAASKSRPLE

SEQ ID NO: 104077 - protein, 555 aa, unidentified
MKQCELGARVRKPVPVEPTAREPEENHCQVDHHAQDPHPALGGGDPFAQDVLACIIRVERDDLPEAPLDPRSRRGGRDMQLGEQVGIPTADDLLLDTMIVDPTSAIVHDEADVRRVGTRCNRVIRQKALRFPYLSQMRREFSSHNGTTGSDSQRRAQRLRRLRCGSERKTVAQSYMRKEPVMGEHTRFVGLDVHKETITVAVAEREGVARLVGTIVHNPVAVAKLVRKLGPVGELRVCYEAGPCGYALQRQLASLGVFCEVVAPALIPVRPGDRVKTDRRDAQRLATLLRSGELTAVWVPDEAHEALRDLVRAREAAQKDLLRARHRLGKLLLRQGQHSPRGTRAGTQKYMSWVRSLALSQAAQEVVRLDYLAEVDRLVERVARLNAEIVVAVEQLPAEVQRVVHGLQVLRGVALVSAVTAVAEVGQFSRFSTPRQLMAYSGLVPRERSSATAIRRGGITKTGNAHLRRVVVEAAWHYRHAPFIRPQLKRRQVGQPASICATSFKAQQRLHMRYRRLLGRGKNMQQTMTAIARELLGFMWAIAINLESTAGTRAA

SEQ ID NO: 104078 - protein, 341 aa, unidentified
MKHDLNVVGIDIAKRVFHLVGMDDRGTIILRKRLMRGEVMTFMAKLPRVTVGMEACGGSHYWARRLREQGHEVKLMAPQYVKPYVKTNKNDLRDAEAIAEAVTRPSMRFVPIKEVEHQDLQALHRVRERLMGARTALVNEIRGLLAEYGIVLPQGVNAFRKAIREKLEAEQAKLTSLSQEIFSKLLDELVKLESELAYYDDKLEAIAHSHPECQRLLTIPGIGPITATALIAAVSDVGVFTHGRHFAAWLGLVPKQHSTGGQTRLLGISKRGDSYLRKLLIHGARATLRWARTKTDRRSQWIRGLLERRGWNRTAVAVANKNARIVWALLSRGGVYCASTS

SEQ ID NO: 104079 - protein, 407 aa, unidentified
MNISSPHLHVAVDVGNHDHYVVIGLSSGGILDEFPMTHTPAGFQTFFNRIERQRSLHDNLPVDVAMEGYNGWARPLDQQVQGHGYQLYNVNNLKLARFKEIFPAPAKSDPVDARKMLELFQLKESLPLAKGVLQAVLPVSEANRRLKRLTRRRRQLANDKMTIQNRIQPDLQAICPTLLDITGSVDNLWFLHFLTCRDDLAKLLRLHSKSLLAIPGVGRSYLNLIRDWQKQAEFSDEVEDVGPMIQEDASRLLVLMKSIKTLETHIEQQIQASIYAQHIESIPGFGLVCSAELAGEIGTVERFPKQSSFSIYLGMSPLDNQSGTYQGTKSPKHVNTRARKAMMTAVCRHMASVPESRAYYDKKRSEGKSHNKAVRALGRHLSRVIWSMLHHDRDYELPGQVPLKEAA

SEQ ID NO: 104080 - protein, 345 aa, unidentified
MEQITRIGMDTSKHIFQLHGVTAAEEPALRKKLRRNQMVRFFEQLAPTVIAIEACGASHHWARLLQSFGHTVKLIAPQLVKPYVKRGKNDAADAEALCEAASRPTIRFVPVKTAEQQAALMLVGVRDRLIRNRTQLANAIRGYAAEFGLTAAKGKAHLDPLLERIRADESVPALARELFAAQAKEYAQLRAQIDEVDAKLMAWHRADECSRRLAKIPGVGPIGAVLLKMKTPAPELFRSGRQFAAWIGLTPKDHSTAGKLRLGTITRAGDEGLRSVLVVGATAVIQHVRRGGRSSPWLTELLKRKPPKLAAVALANKMARIAWKLMVTGDNYAAKSAPATLAGMA

SEQ ID NO: 104081 - protein, 396 aa, unidentified
MNYLGIDIGKNNHVASMIGGDGKPVFRAFSFPNTMEGANSLFAKLESCSVRKDKLEIGLESTGHYWLPIYSYLHDKGCKIHVINPIQTDGWRRGVEIRKRKTDVIDSMLIAEFVRYGDFLEARLPEEAILSLKNLTRFRSYLVDSIGDLKRKVICVLDQVFPEYQSVFTDVFGKTSKEILLQFGSPAELEEVSAETLAELLAGLSRKKLGLKKAEKLSRAASSSFGITFCRDSFTFQLRMLIEQIKYIESQVKDTEAEICAVMDKLNSPITTVPGVGKRLGAVILGEIGDIGRFDHASKLVAFAGIDSTVNQSGEFEASNSHVSKRGSPYLRRALYQAALVAAVGKKPDPVLSAFYRKKLSEGKHHGTCVIAVARKLCYIIYSVLKENRPFEVRNP

SEQ ID NO: 104082 - protein, 341 aa, unidentified
MRKNLYCGVDLHSNNAMYVITDEKDKQLLRKRLPNELPVVLKSPAPYRGRLKVVAVESTYNWYWLVDGLQEKEYPVVLAHPSEMDQYHGIKEADDLTDAAFIARLARLNVLPTGYIYPKEDRPVRDLLRRRMLLVQQRTGIVLSLQNMALRQTGQAVGWRALRKLSVEERAELLGDHDCLTFVAAEQVDLIERFNEKIRRFEKKVLEHVQLRPAYVCLQTLPGVGTILALTMMLETGDLGRFPTVGDYTSYCRCVRATHSSNGKKKAHHNGKNGNPYLAWAFVEAVHLALRTCPQAQSFYDKKRAQHNAALATKALAAKWSKAAYYMMKRQENFDVTRVFG

SEQ ID NO: 104083 - protein, 358 aa, unidentified
MKTHRVQDFVAKGKEVFVGLEDSKSTWKIAVRCERMLIHEVSMEAKYPALIGYLRNKFPECAIHLIYEAGFKGFNLFDRLTEDAIDCIVIPPHMVTEPKVNRVKTDKRDAKRLAYVLENQDYEDACHVPDKERREDRQISRSLIAVQKDIIRTRNRIRGFLKYYGIEVPFAGKENWGRKEFQALRELPISEPLGIGLKVFLSQLEQLWDHQTTLRDYLRDLCRKERYSKAFGIAKSFPGIGWFTAIRLVLELGEDLSRFASGKKIASFVGLTSSEYTTGETERKGRITGMGSGFIRSFLIESSWAGIRKDPALLSKFMRVWRTSGMKKKAIVAVARVLIVRLRACILSGRPYMIGVVR

SEQ ID NO: 104084 - protein, 366 aa, unidentified
MDPSHFYPASQWAKMGIEITIDKVGGSEMKIKTLGIDLAKSVFHLYGVDAHGKALMKKRLSRKKLLEYMANLRPCLIGMEACGGAHYWARAFRELGHEVKLMSPQYVKPYVKTNKNDYHDAEAICEAVSRPNMRFVGIKEVAQQDIQGLHRIRSGFMQARTRVVNQARGLLAEYGIVVGRQVGQFRRRLPEILADGENGLTDLGRELFAGLYQELVHLDERIGVCDEQMDRIFKENEACQRLAEVEGIGPITATALVASVGDPAVFRKGRQMSAWLGLVPRQHSTGGKPVLLGISKRGDRYLRTLLIHGARSVVSRAEGKSDARSRWITQLRRRVGMNKACVALANKNARIAWALLATGECYRAAA

SEQ ID NO: 104085 - protein, 425 aa, unidentified
MNLLILKGVPMSLKIVYKICCGIDVHKTFVVACIASTNDIGVTSYESHRFSTYTSGLKTLLQWLLNRNCKDVCMESTGKYWIPVYNILENDCSIVLAHPKYVKAIRGKKTDKKDAKWIADLFKHDLVAGSFMPPADIRQLRDLMRYRFKLTCFQSSEKNRLQNCLTVSNIQLGNVVSDTFGKSAQAILDKLLENPADTSFDLEPLVYKSLKKKLPQLRDAIDGYITPEQAGKLKVIKSHYENLESRKAELEELILALAAPYQQELAILQTAPGIRSDFTAIGIISEIGTNMEAFPSAKHLCSWAGLTPTNNESAGKKKSVRVSKAGCYIKPMLVQCANAVVTSKKHPEIRNRYLRLKKRRGHKKAIIAIARMLLTALYHMLKNGENYNAELYRKSYLPPVDREITVEQAIIIARNQGYKIKSATA

SEQ ID NO: 104086 - protein, 422 aa, unidentified
MLEEDHQTEEIIERVAALDIGKAEVMACVRVPHHDGTGRRLQEVKPYPTMTRSLLRLADRLSELSVTRVVMEATSDYWKPVYFLLEAHGFQTWLVNARDVKHLPGRPKTDKLDAVWLCKVAERQMIRPSFVPPPEIRRLRDMTRYRCDLVEARTAEKQRVEKLLEDAQIKLSVVASDIFGVSGREMMAALIAGQRDPQVLAQLARGRMRVKITQLEEAFTGYFTDHHGFLLTKMLTRVDALSADIAELETRIEEMVAPFGTAPERLDEIPGLGMIGASVVLAEIGLDMTRFLTAGHLASWAKFAPGVKESAGKKKGPGSTGHGNRYLAKVLGETAVAAGRTDTFLGERYRRIARRRGKKRAIVALGRTILVIIWHLLSDPNTRFTDLGSDFYDTRLDPERRKRAHIHQLEALGYKVTIEPAA

SEQ ID NO: 104087 - protein, 322 aa, unidentified
MTILGCDVSKDKIDLCFLLLENKQHYLQISNNRSGYLKAQAAIEELGIQPHICMEATGVYYEGLADFMVEQGYPVSVVNPLKIKSFAKSRFQRTKTDKQDAKLIAEYCRDLKPKPDYVKPSADQYAMRRAITLFRQLRGDLTGIKNRIKTAKDPFVKTILAKQAEEFKNHIEAVKEQLATLTEQAESRQAAAKLQTIPGIGQTTASVLAHYLTMYRFDTENKFIAFAGLAPQWQKSGTSVNRKERLSKYGNRILKGELYMPALVAYRFGFFAKFVDRLKAKGKPTKVILVALMRKLAAIAWNLWHNGQDFDPSRYGLPSKTA

SEQ ID NO: 104088 - protein, 397 aa, unidentified
MYIVGIDIAKRKHEAAVIDGEGAVIIKPFSFTNNCSGYNRLLAMLTKAKLPLDEVSFAMEATGHYWLALFTRLQKEGFRVQVINPVQTNSIRSFYIRQAKTDPRDALLIAEVIRFGHFSESTLHPENIYELRELCRGRHAIVSMQADVKRKVVALLDQVFPEYETAFTNMFSDTSMAILQTCPTPKELSEMPLEELCHLIEVSSHKRFRMAKAQELQALARNSFGFAMAGDVFSTMIRLYAKHLDFLKQQVQEMDRKIAEIMDTLDTPITTITGIGPTLGAYILSEIGDINRFSSAAKLAAYAGIDPTMRQSGEYNGVRNRMSKRGSPYLRHAIWLAASSAVLHDPALKLYFQKKRDEGKPYMASVGHACRKMVSIIYAVMRDNKAYTPYIPNEISA

SEQ ID NO: 104089 - protein, 398 aa, unidentified
MRRPPSPTQYPKKGLQVSGPDGPERESDVNQLSNVPCVAGADQQTFEVTAGLDLGDKYSHLCLIETTTGEILEEARLRTDPETLRRRFTEIEPMRIAIETGTHSPWISRLLEDAGHEVLVANARELGFIYKNSRKNDRLDAENLARVARLDPKLLSPIEHRGEEAQADLALLRTRDVLVKSRTQFINHLRGSVKAFGARLPVCSTESFHRQAVEALPDALKPALMPIISTIASLTDQIKEYDKQIEHVAAEKYPETEILRRISGVGPITALAFVLILEDPQRFSKSRKVGAFLGMVPSRNQSGESDPKQRISKEGDGMLRSLLVQCAHYILRPNSPDSDLKRFGLKLDARGGKGAKQRAVVAVARKLSVLLHHLWSTGEVYEPLYNAKQHQSQQPLAA

SEQ ID NO: 104090 - protein, 347 aa, unidentified
MVTLGGDCHKRTHTLVAVDDNGRELGTKTVAAVAAGHLEALRWASQWKERRWALENCRHLSRRLEADLLLAGEPVLQVSPKLMAGARQSAREWGKSDPIDALAVARAALREKELPVARLEGESREVKLLLDHRDDLVGERTRVQNRLRWHLHELEPSFDVPARSLDRKVVLNRVTMVLAGHRGVAADIAVELLERVRQLTVRINELERQIRDLVTQLAPNLLELDGCAALGAAKLIGETAGIARFRTPAQYAMHNGSAPIPVWSGSHERHRLNRGGNRQLNSALHRIAITQMRVGGRGQAYVQHRRAAGDTKRQAIRALRRRLSDEVFRRMWQDYLAAAKVPAHVAA

SEQ ID NO: 104091 - protein, 369 aa, unidentified
MRKIIKYIGLDVHKNSIAIAIAEDGQKREVNFYGAMNNDMDQLHKFLRKQISQGVEPRCVYEAGPCGYNIYRSLKDKGIDCVVIAPSLIPKKSGDKIKTDRRDAESLARLHRAGELIAVYVPSMEDEALRDLVRTRDDCVNTLKRAKQQLGAFLLRHHVCYSGKSKWSKAYFNWLAAISMSHPAQQIALQEYIDMVQDDKKRVERISEQIKQLVEQTQLNDLNKSLQSLRGVSQIVSTVVVSELGDLTRFDSPSKLMAYLGLVPSQHNSGDKKRPGKITKTGNGHVRRALIEAAQAYRLPARKSRAIAKRNEGLPQEICKISWQAQVRLCGRYKRLVFRGKNSNLVKTAIARELAGFMWAIAHAIPKTP

SEQ ID NO: 104092 - protein, 345 aa, unidentified
MVILGVDAHKRTHTVVVVDDHGRQVASKTIGTATADHLGLLRWAEQFGADRQWAVEDCRHLSRRLERDLLAAGERIARVPPKLMAHVRDSARTFGKSDPIDALAVARAVLREPSLPTARLDGADREIRLLVDHREVLVAERTRAINRLRWHLHELDPGWDPRPRSLDRASAYDRIEQRLQHAEGLVAALARRLLAHARRLTAEIDELTADITARVEAIAPSLLAIVGCGVLTAAKLIGETAGIDRFTSKEAYARHNGTAPLPGWSSNRARHRLSRTGNRQLNAALHRIALTQAHWHPDAKALLARRTAAGDGGLEALRVLKRRLSDVVYRALRADASLSITNPAA

SEQ ID NO: 104093 - protein, 337 aa, unidentified
MVAGTMGSHSKDGSTKMKQLITTVAGIDTGKAFLDVAILDAATGVEQASFRALNTAAGFTEVVERLSTAGVERVGIEATGGYEREAVAALHRAGLQVLVHQPLQVRLYARLKLRRAKNDRLDASIIAAFTAITEPRPKIADVTQNAVLQALHDHLVHIDDMVEDVARLKTRLEHRRDPRLIAEIKDDIAALNRRIASERRQLEKEVRVHPDLARRLDLASSVPGIGKPTALSMVIDMPELGHVSREQAAALIGLAPFDHDSGNQRGLRHIAGGRARPRKALYAAALPAAFKWNPQLVALYNRLIAKGKKHKCALVACARKLVIYVNTVLARNIPWTA

SEQ ID NO: 104094 - protein, 430 aa, unidentified
MMEEVDDAELVVERIAALDLGKAGLEACVRVPSPHRPGRRMQELRGYGTTTAQLLEMVAWLRHWGVQRAVMESTSTYWKGVYYLLEAEGFECWLVNAREVKNVPGRAKTDRADAIWLAKVAERGMCRPSLVHPAEIRRLRDLTRYRRALVQDRTREQQRIEKLLEDAQIKISSVLSELHGVTARAMMDALIAGQRDPRALAQLAKGRARKKTAQLEEALRGFFTDHHAAILRMMLNNTDRISAQIAALDARIEKEIGPFSGQAARLAEIPGVDAVAAAELIAEIGVDMTRFPSDAHLVSWAKFCPQTHESAGKSKSKGRGRGNPWLAGTLGRIAFANSRADTFLGARYRRLARRRGKQKAIVATGNSVLTVVYYLLSDPMATFCDLGPGYYESRINVHRRARDLVTQLQALTGQHIVIRDGKAVITDAAA

SEQ ID NO: 104095 - protein, 338 aa, unidentified
MKTYAGIDLHSSNNFIGIINQKDKRLHSQRHSNNLKQILKVLRKYKKTLQGIVVESTFNWYWLVDGLMDHGYKVHLANPAAIQQYKGLKFKDDKWDAFWLAHILRLGILPEGYIYPKEQRPIRDMLRRRRIFVKQRTTQILSLQSMIARNRGLDFAGSSVANFTKEFIEQVLKCPYKISIAWQQLRTIRFLAEQIKEIETEVEASMELKPAYKKLLTIPGVGKILAMTIMTEVGDINRFNKVGQYSSYCRCVSARCISNGKRKKDNNRKNGNRYLAWAYVEAANFHKRHCQKAQKFIQRKTAKTNYSLAIKALSNKLSKASYFIMRDQKNYDPDMMFG

SEQ ID NO: 104096 - protein, 371 aa, unidentified
MKKKILYVGLDVHKKSIDVALANGRANGKVRSYGKIDGSLDALDKLIGKLQSKDCVLEFVYEAGPCGYPIYRHLESKGHKCCVVAPSMIPKRSGDRIKTDRRDAINLVRLYRAGELSCIYVPSEEDEAMRDLVRSRDDFKRFERKARQRLLAFLLRHGLEFAGKKNWTKTHMNWLAGLKLSHRSQQIVLQEYVDAVKDCTQRVERTTEQIRQLVPDWSRADLVKAYQALRGVSLIVAVTVVAEIGDMGRFKNPKELMAYLGLVPSEHSSGSRLRRGSITKTGNSHVRRVLTEAAWTYRMRARKTTTILKRQQGLPKSICEISWKAQTRLCTRYQRLFAKGKSKQTIITAIARELSAFIWAIDKELQQKTTT

SEQ ID NO: 104097 - protein, 298 aa, unidentified
MSDHSEAFVGLDTSKLRNAVAIAEGVRGGEVRFLGEFENSAAATAKLVKKLAAKYRRLTFCYEAGPTGYGLYRQIKSLGHECVVVAPSLIPKKPGDRVKTNRRDALSLAKLLRADELTAVWVPDRGHEAMRDLTRARETAMMDLRSKRQQTSAFLLRQGLHYSERKKTWTKTHMNWLASQKLEHAEQRLVFEEMMLAMRQAQERLERLEQAIRVAVPDWSLAEVVTALMAMRGIDLISAATFLAEIGDLSRFQHPSELMAYLGLVPSEDSTGDKIKRGPITKAGNRRARRMLVECAWS

SEQ ID NO: 104098 - protein, 355 aa, unidentified
MNDAKYIGMDVHQATICAAVRDSSGNLVMEATFETKAEIVLEFVHGLRGSLHVSFEEGTCASWLHDLLKPHVSEVLVCDSRKNALLRVGNKNDREDARKLSELLFLNKLHPVYHGETGIRTLKELARSYLTITRDLTRVMNRLKAIYRGWGIACAGQQVYAPRYRAEWLAKITEAGVRRRAEIYYQQFDALAALRQEVRRELWAESRRHPAMRLLRQIPSIGPIRAALLIALMQTPHRFRTKRQLWAYCGLALRTYDSGEYRFVGGQLKRSKKAVTIRGLNKNHNHDLKNIFKGAATRATATVGPFQKFYEARLASGMKPPMARLTLARKIAAITLLVWKKGVRFDAKQLKQQAA

SEQ ID NO: 104099 - protein, 430 aa, unidentified
MKSNTQNTKIEAITETTLVLGIDVGSETHYARAFDYRGIEYSKKPLKFSNDEAGFVTFKAWILDIKEKHGKDKVIPGMEPTGHYWFNLGKFLQDNEMKPVLVNPHHVKKSKELDDNNPTKNDRKDPKVIAGLVREGRYMIPYLPEGVYADLRTASNMRFQLQAELTRIQNRISRWFNIYFPEYKTVYGQSDAKSGMLILKVALLPEDILTLGIDGVNQIWRDAKVRAVGKARAKTLIEAAEHSVGSKEGEISARMEIRMLLDDYESRNTRLQEVVALIEELVKKIPMAEKLLEIKGVGIKTVSGFLAEVGDISRFNNPKELQKLAGLALVENSSGKHKGETTISRRGRKRLRYLLFEVAMSLVSKNPEFMELHSYYTTRKLNPLKKMQSLMAVAAKLLRVFFAMLTKGVDYDSKKLVGDIKRPEVYLQAA

SEQ ID NO: 104100 - protein, 360 aa, unidentified
MGDHSEAFVAFDTSKLRNAVAIAEAGRSGEVRFLGEIDNTPAATAKLVKKLAAKYERLAFCYEAGPTGYGLYRQITSLGQECIVAAPSLIPKKAGDRVKTNRRDALDMVKQFRAGELTAVWVPDPRHEAMRDLTRARWAAVEDLRSKRQQVSSFLLRLGRHYEGKKSWTKTHMNWLASQKLEHAEQRIAFEEMLLAVRQAQERIGRLEVEAVMAMRGIDMVSATAFLAEIGDLSRFRTPRELMAYLGLVPSEHSTGDTVWRGPITKSGNRRARQILVECSWSYRHPPRVGKKKQDKVAAAPRAVREIAWKAQNRLYARYRALTRRGKLPSVAVTAIARELSGFIWAINREIASTRDAARP

SEQ ID NO: 104101 - protein, 377 aa, unidentified
MKQSTTPSKATAKAEATALAACTAVAVDLAKQVFQIAAEDALGQVLYEDRLKSRQAFRAFLSNLPPGLVVLMETGPGAQAWARQLSQAGHAVRILPAQRVAEHRSGAKNDRNDAHAILRAGHDSHIAAVPVKSAQELALQALHRVRQGHVRRRTALANQMRGLLLEHDIALAKGDVALLRGVSRVLEGASEPVPELLGELLAELLAEWRHLDDRIQALTVKLYAQANQHPGARQLMSVRGIGPITATALLAKRIDPERFANARQFAAYFGIVPDQHSSGPKVRLGKMSKRGDGYVRGLMIEGAQAVLRHVRPQSGHSDDQRLLRWMQRHGRKGAAIRLANRNLRIVWVLLQNAQQTYCREPNRQAPAERFKENAMHE

SEQ ID NO: 104102 - protein, 355 aa, unidentified
MTMLTEQYDFVIGGDPDRDTVDLAVLDSSTGAVRAHLEVSADGAGYTRTLDWANDSAPGRRVWALEGTGSFAAGLAEALAQAGEDVVEVGALKRARGPKNDRIDAVRAARTAMAREHQATPRVRGLREAIRALSATRQAVLVSRTKAINELKSLIVVAPEHLRAALRGRSLTKQLTVIEAMTSSAEAVVDHRITILTLQFVTARIRFLTGQLHDIDPEIEQLITAHPAGPQLLAEPGVGPVVAAQVLISWSHSGRVRSEAAFASLAGVAPLEASSGQRSRHRLNRGGDRALNRALHTVAVTRMRCHPESRAYEARRTLQGKTHRDIRRCLKRSIARRLYRLMESSARANQTPPAA

SEQ ID NO: 104103 - protein, 354 aa, unidentified
MTRTTKYVAFDVHQATTVTSVREESGRVLARSILETHGPSIVEFLRGRRGAIHVAFEEGTQAQWLHDLIAPLVHRVVVCDRRGQARHGNKGDQVDADQLSELLRRGGLRSVYHGSAHHADLKELTHAYRSLVEDGTRVMLRLKALFRARAIRTPGTAVYQPRHRPQWLAQLADHGARCRAEVLYAELDVLRALRPKAKAAMIAEARRDPAWPVLRTIPFLGPVRVALLLATMQTPWRFRSKRHLWAYAGLAVVTRSSADYTLVAGQPGRRRRAPLTRGLNRNHNRVLKDVFKGAATAATARPGPLQDFYHAVIARGVREELARVTLTRKLAALTLRLWKKGAPYDPTQLTQQAG

SEQ ID NO: 104104 - protein, 340 aa, unidentified
MSEITTIGLDLAKHVFQLHGIDAEGTTVLRKRLRRGQVLAFFSRIPRCVVGLEACATAHYWARELGALGHEVRLMPAQYVKAYIKRNKHDAADAEAICEAVQRPTMRFVPVKTAEQQATALLHRGREQLVRQRTMLVNALRAHLAEFGIVAAQGLRNVGELIAIVRDDGDTRLPDVARQVLQVLANQIEQIETAVAALERQLLAWHKTNPVSQRLASIPGIGPIIATAIATTVADPKVFRSGREFAAWLGLVPRQNSTGGKTRLGGITKRGNRYLRRLLINGASANLLRSKATKADPWVIGLRRRRPPLVVAVALANKTARIAWAVMLREKEYQPRAMAA

SEQ ID NO: 104105 - protein, 338 aa, unidentified
MYKFVIGIDISKLTLDAALIVGGQPQSATHHHLGNTVEQIAQLFSELGKGPGFSLDECLVCVEATGLYAHPLLTFAAQHGVNLWLESAVRIKKSIGLQRGKNDKADALRIAVYAAKNQENARLWKPASATLTAVKNLASLRDRLIKSKNQLTVPVEEFSQMGDTRTAAMLGKAMKSTIRSLEADIAAIDKQIKAMIDADENLKELFALATSVVGIGTQTALALMIYTDGFTLFDDARKLACYAGVAPFVYASGTSVKGRTRVSKMANMDLKTALHMASLTAVKLDVQLKAYYQRKVADGKSKMSVLNAVKAKLLHRVLSVVRRKQKYENSANFSLVLS

SEQ ID NO: 104106 - protein, 388 aa, unidentified
MLHDHPSDGLTAIRTHIAAIFISLELSRSNWLATSLSPGKGEKMSKQGVAAGDTAGLLALFTELKRKAEVRTGQSYSIITIHEAGLDGFWLHRVLQQQGIESHVVDPASIATPRRRRRAKTDKLDGEILLRTLLAYKRGEPRVCAMVVAPSPEEEDRRRLCRERRTLIQERVTHVNRIKGLLFAQGCDYAPLRRDRRKRLEALRTGDGRELPSHLKAQIGRELDRIELLLEQIKSVEVAQEALLASARKPASEKAAPDPITMLLALKGMGSNFAAVLWSEAFYRGFSNRRQVAAYAGLAATPWQSGGIRHEQGVSKAGNPRLRTTMIQIAWLWIRHQPQSALTRWFKERSQQGRKRAIVALARKLLVALWKYVTQGVVIEGAVMKPAA

SEQ ID NO: 104107 - protein, 502 aa, unidentified
MSLIPSPGVLRSVIRKEPMQAKEQKYRRCCGIDVHKKSVTVCVLPSTGRPETETKKRTFRTFTRDLKQLRTWLKNCKVTDIAMESTGQYWRAVWNILEDHFEKLILVNPQHIKGLNGYKTDPKDAQWIAGLLDSNRLRGSWVPPREIRELRDLTRQRVHVLEDLNRVKNRIEQLCQTGNIKVSSVATDLFGVSGRKMLAAIIENKHDAGWIADYARSSLRSKKRELELALEGSFTENQRWLLDKELRQLEWLEIQVQVLEQQIERRVVGFQEPMQRLMTIPGIDRKTAWMIVAEIGMDMRVYSDASHLASWAGLCPGNRESGGKRMSGRTRKANRYVRRAMCQAAWSATHTRNTYLSAFYRRLKMRKGAPKALLALAHHMITVVYNILARDEEYVELGADHHDRQNKPKTVARLVARLTRLGYYVDLKPIESDQAEKPAGAHSDGVSSSAVPPVGPHKTGAVPKPKRGRPCKCTERGIICKHGKAVLPNSLSDQVVSAERFS

SEQ ID NO: 104108 - protein, 341 aa, unidentified
MSEIITIGIDLAKSVFQVHGADRGGNAILRKKLRRDQVLAFFASLPRCVVAMEACASAHYWAREIAALGHDTRLIPPAYVKPFVKRQKNDMADAEAICEAAQRPTMRFVQGRSAEAQASAVVFRTRDILVRQRTQLINALRGHLTEFGYVVRQGVGHVGKLVEIVGDPTSDIPAEARPVLVVIAQGLQALQAQIALLDREIAARAKADPVAQRLMTVPGIGPVIATALVALAPAASTFRRGRDFAAWLGLVPQQHSSGGKERLGRTTKMGERSLRRLLILGASSATKVAARDPDKASGWLAGMLARKPRMLVTVALANKMARIVWALMAHGGSYRAPAAAA

SEQ ID NO: 104109 - protein, 334 aa, unidentified
MNNVSLIGIDLGKNSFHVHCQDATGKALSRKKFTRAKLFEFLANCPSATVVMEACAGAHYIARKISDMGHKPKLISPQFVRPFVKSNKNDFVDAEAICEAASRPSMRFVAPRTESQQEILALHRIRESLVRDKVKTTNQMHAFLLEFGISMPKGLAVIRRLSVVLTENELPPYLAKLLVKLQSHYLYLVEQIRDIENELKLAANQDDTTQRLMSIPSVGPITASFLMANLGNGQQYKQSRDFAAATGLVPRQYSTGGRPTLLGISKRGNKNLRRLLVQCARVYILHLEHQSGYLAEWVRHQLSKKHSCVVACGLANKLARIAWAITTKQSVYMA

SEQ ID NO: 104110 - protein, 422 aa, unidentified
MSQNQPEIQYAAFVSIDWADQKHVWSLQEANSRTREHGEVGHMPEAIEAWIAQMSQRFAGRPIAVAVEQSRGALVFMLSKYEQLHIFPVPPAMTANLRKAFYSSGAKTDPADTDLLQDVLQMHREKLRRLSPDTEATRLIQNLVEERRKLVDEKTAQSNRLEAHLKIYFPQIPQWFGDVDSPLVCALLERWSALEALQKARPDTLRSFFRKHHCRKEELIESRIKAIGEAMPALKDRAVVEAQLAVVKVLVQVIQVLHQGIEDFNRQIQEAAEAHPDFFIFESLPGAGAVMAPRLLAAFGSQRERYRNAAEVQTLSGIAPVTESSGKSSWIHFRFACSKFVRQSFHEWAALSITQSQWARAYYELQCRRGKRHHAAVRALAFKWIRIIFRCWRERVAYDEKVYLAALAQHNSPLLAATKIAL

SEQ ID NO: 104111 - protein, 435 aa, unidentified
MRSAQATAWAGRFTAREGLTVVEVLHERCAGMDISKKDVKVCIRVPGGRGGRYRNEVTTFGSMTGQILKLRAFLLEQQVTLVVMESTGDYWKPFYYVLENAPFELLLVNPRHVRGPPGRKTDVSDAQWLADLGAHGLVRGSLVPPPPIRELRDLTRTHADLTRDRTREYNRLQSVLEDAGIKLTSVASKINGVSCRLMLDALVAGERNPKILAQLAKGSLREKRDELTQAMTGRFTAHHEFMVRLHLQVIDQLTAAIDDLSTRIEVVTGPFRAQLALLETIPGVSTQIAQVIIAETGGDMTKFPTAGHLASWAGICPGHNQSAEVTKKAKTRPGNTYLKGALGNAAMSGIQVHETFPQDRHHRLKPRIGGLRTIVALEHSILRSVWYMLTTNQPYRELGAGSHQRRHPQNALRSITRQANRLGFSVRFDPITQTA

SEQ ID NO: 104112 - protein, 360 aa, unidentified
MKIVGVDLHAKQQSIAMLDTETGELTEKVIRHEGNAAREFYASLEGLVVVGIEATGSMQWFLELLDELGVQYRVGHPAKIRATEPRKQKHDRRDARLILELLTANRFPDIWMPSTEQRDLRTLLRDRHQWVKMRARLQHTLQSIALNHALRKGTSLWTAAGLETLQRLPLPPYTSQRRNQLLRLYAELQKRIQELDRQVEEQAQQRPQARRLLTHPGVGPLTALATEVFLGNPNRFISAKQVASYIGMIPREYSSGQRQRLGNLTKQGNSLLRYLWTEAALHAVRKDPELKRFYRRKLIPKGMGKARIAAARKLGIRLWIMLRDQIEYKEFCRRGKLRQNGEAQAGMPDFNSGAATAVTG

SEQ ID NO: 104113 - protein, 345 aa, unidentified
METMYYIGLDVHKRAISYCVKDVSGRVYAEGSVPATRFDLDRWMKTLPGPWTAAMEATVFTGWIYDHLQPHAAALKVAHPLMLRAIAAAKKKNDRIDAKKICDCLRCDFLPECYMASTAIRERRRTLRYRNLLVRQMVQMKNKIAMLLMEAGVSYNKQKLHKAGYFRELLATNPDINEGLCSLLRVCRETVVRLQRTESALVRSLERDSLLMDRVERLMTIPAVGPITALTWALEVGDVQRFSSIKKAISYCGLCSAEKSSGNTVQRTPLSKQRNKHLQTTLIEAAKMAPRNSPELAMLYNKKKRKGNANRATLAVARKLVAYLMAVDRGQRNFQVVETSNCIAA

SEQ ID NO: 104114 - protein, 333 aa, unidentified
MMNMHSQGRVASEARRPNAGIDVSKGHLDVRLLDIDLRVANDASGWDALIAKLKECEADLVVVEATGGYERGLVTALHRAQIEVARVNPRQAREFAKSMGVLAKTDRVDARCLRDFADVLARHKDRHKYITLPADPERELLTSLMTRRRQLVDMRVAESNRLEGATARTVRSIRSVIKTLDKQLQDIDGDIDQQLEQHFKQQKELLNSVRGVGPVTILTLTSALPELGRLGRRQIAKLVGVAPLADDSGKRKGVRRTWGGRSEVRAVVYMATLTAIRHNPAIKAFYSRLVAAGKPKKVAIVACMRKLLTILNAIVRDQARWNYDAGLTSQRST

SEQ ID NO: 104115 - protein, 484 aa, unidentified
MAKGASTYERLTEGSRKQRKDLQRRLHSENPGLELVHPNAAGIDIGNGSHFVAVPPVRDAHSVREFGSWTADLNRMADWLISCGIDTVAMQSTGVYGFAVYDVLESRGLKVFLVNASHTKNLPGRKTDVQESQWLMKLHTYGLLRNSFRPPEDIRPIRAIWRLRERHVQESSRSIQHMQKALTSMNVQLANAISDISGVSGQAIIRAILGGERDPWKLAALCDRRLKASKEEVARSLEGNWQDDQLFELQQAVDEYDFRHKQMTECDRKLQAYLTKLPTRPTPVADPGSTTPPSTPKREKKRKNTKAGNAPKSFDLAAEMRRVTGVDAFRIDGVSVMTIQTVVAELGTELQDSWPTEQHFTSWLGLTPKRDVSGGKVIRHVRNNSSNRVAEILRLAATSLLNSDSYLGARHRGLRMRLGAPKAIKASARYLACIIYRLFTKGQEWVDRGAEKFEQNRQAREFARLQAQANARGLRLVPAEEAAV

SEQ ID NO: 104116 - protein, 347 aa, unidentified
MNITRIGLDLAKNVLQVHGVDERGKALLRKRLKRGEVVAFFARLSPCLIGMEACGSAHHWARELATLGHTVRLMAPQFVKPYVKANKSDARDAEAICEAVGRPSMRFVPVKTLEQQSVLSLHRARQGFVAARTAQANQIRGLLSEFGIVIAKGIRQIEGRVPEILEEAENGLCGMNRALFQRLFEHFRQLDRQVKQLEEQIHAWHREQVDSRRLAGIPGIGPLTASALTAAIGNAREFAHARQLAAWLGLVPRQASSGGKDRLLGISKRGDVYLRTLLIHGARSVLRRTRACPDPAQGWLAQLVHRRNPNVAAVALANKNARIVWALLAHGREYQPGYVGAPLPTAA

SEQ ID NO: 104117 - protein, 320 aa, unidentified
MTIIPDKIQSALGCDVSARTVTIFDSDTKTIITVANDAAALKAVLKPYRRRADLLAVCEATGGYEDTLLQVLTRFAIPAHRADAARVKAFIRSCGTLAKTDPIDARHIAAYGLARAAQLPRWQPSQPHEARLKLLVQRRADLVAMRVQEQNRLKAPRNKPIEREIAGHIGELARRITALDTEIEAIAARDQRINGRQTILRTIPGIGKVIAPVLLALMPELGQLDRKRAASLAGCAPHPRDSGTWKGRRFAQGGRRQLRPLLFTAAMAASQGKNSLATTYRRMIAAGKTKMTALGAIMRHIIVIANARLRDYENGTMRLT

SEQ ID NO: 104118 - protein, 340 aa, unidentified
MTIRTIGLDLAKSVFQAHGVDERGAATLTKRLHRKQMLPFFSKLPPCLIGIEACGTAHYWARTLTAMGHEVRLIPPSYVKAYVKRGKSDALDAEAICEAVQRPTMRFVPVKTVEQQSILMAHRARSLLVRQRTMLANALRAHLAELGLVTNPGIANLAKLAQQVLSDKDALPSYARTALEILVRQIMTLSEEITTLDRKLLAWHAESEASQRLTAIPGLGIITATAMAATVTDPELFRSGRQFAAWLGLTPQQRSTGGKTQLGGISKQGDRYLRRLLVVGATAVIRHTKDKPTPMANWIRKLLEKKPFRIVSVALANKLARIAWVVLTRKEAYRPYQLAA

SEQ ID NO: 104119 - protein, 366 aa, unidentified
MGKSSTVFVGMDVHKESIELATADEGEARHYARIGGEAAAVDRVVRKLRSVHRELVFVYEAGPCGFWIYRRLRAQGLACMVVSPSMTPRRAGDRVKTDRRDCLMLARLARAGELQPIYVPDAKDEAMRDLVRTREDAVCMQRQARQRLQALLLRNEIRYVGKTAWNAAHRRWIAGLKLPDPAQQIAFEEYVTALEEAGARLVRLAQAIGAQLEHWRWRSLVGALQALRGISAIHAVRIVAELGDLTRFVSPRKLMGYLGMIPSEDSSGSRRRQGSITKAGNSSARRALVEAAWAYAHPARISWVIARRQTGLAKSTTDLAWRAQLRLCARFRRLAARGLNRNKIVVAIARELSGFVWAIGQSVKPL

SEQ ID NO: 104120 - protein, 342 aa, unidentified
MKTSKKVVRMGIDLGKNRFHLFGVDASGTQVLKRVLSRKQLLPYLANLAPCLIGLEACGGSHYWAREIGKLGHEVRLISPQFVKPYVKSNKNDYNDAEGICEAVSRPGMRFVEVKDVEQQDVQALHRMRSFAIKTRTGLVNQIRGLLGEYGIVLGQGISQVRRRVPEILEDGENGLTDRFRSWLANVYEELHQQDAQIALYDREIQTIYQQDEACQRLGQIEGVGPQGATALVAAYGQARDFKNGREFSASLGLVPGQHSTGGKSVLLGISKRGDRYLRTLLIHGARSAVRAAEGKTDQRSCWIQRLVATRGKNKAAVAVANKNARIIWALLSRGECYQPAG

SEQ ID NO: 104121 - protein, 338 aa, unidentified
MAKITTIGLDLAKQVFHVVCCDARGKIVRKRMLRRAQVGAYFAQLEASLVGMEACASAHHWARELEALGHTVKLLPPQFVKAYVRGNKNDYNDALAIAEAVVRPEMRGVAVKTAAQQDIQALHRLRAQCVASRTALCNQLRGLLGEYGVVMPQGVRTLRRRLPEVLEAGENGLSDLFRRLLANGYQRLCELDDHIEAYTAELKWHSRQDDACRRLQTIPGYGPVVASAFHSTVGDGQAYRRGRDVSAALGLVPRQHSSGGKSVLLGISKRGDRYLRSLLVHGARAVVRQAAHKDDRLSRWINKIRAQHGYNKASVALANKLARIGWAVLYNRSVYQTG

SEQ ID NO: 104122 - protein, 347 aa, unidentified
MNFYTQQHKHYCGIDLHARAMYVCILDQQGTKLVHKNLPTTPEAFLRRIAPYREDLVVGVECIFTWYWLADLCSKEGIAFVLGHALSMKAIHGGKAKNDRIDAHKIAVLLRGGMFPLAYVYPAEMRATRDLLRRRCHLVRKRAELLAHIHNTNSQYNLPEIGKKLAYKANREGVEDHFPDPSVRKSIEVDVSLIDHYDKLLGEVELYITRTAKGHDSQPFTRLQSVPGIGPILALVLLYEMQDIARFPRVQDFVSYCRLVKCAKESGGKRLGTSGKKIGNVHLRWAFAEAAILFLRQNQLGKEYFAKLAHKHGKAKALTVLGHKLARAVYYMLTRQQAFDLQRFVAA

SEQ ID NO: 104123 - protein, 339 aa, unidentified
MNVTTIGIDLAKDSFSLHGVDRHGKLVFRKTLTRAKLLPFLAQQPSCLIGMEACSGAHYWGRELRKLGHRVGIMAPRFVAAYRKGGKNDGNDAEAICEAVGRPGMRFVPVKSDEQQAILSLHRVRQGLIKERTAMINQLRGLLSEFGLIMPKGRYSAQHHIPDILEDAGNGLPMLARKLLHDTWLRLRTLNEQILTYDRELNHLVKDSEPAKQLMTVPGIGAITATALLASVGDPKQFKNGRQFAAWLGLTPRQYTTGGTIRLGRITKKGDAYLRTLLIHGTRAVLSTVKDKEDKLSVWTKTLIERRGYKRTAVALAAKNARIVWALMARGESYQMKSV

SEQ ID NO: 104124 - protein, 358 aa, unidentified
MRIIGVDLHTRQQTVAMLDTESGELVEKTLQHDGDEVRKFYSALPSQVLVGMEATGSMHWFLELLDELGIAHQVGHPSEIRKAETRKQKHDRRDAALLLKLLVQNRFPSIWMPSTALRDLRTLLLHRHQWVRMRTRVQNALQAIALSRGLRRGKTLWSQLGQHTIASLPLPPYAAHRRTELLAWYGKLQAQIEELDEQVMDRALQRPGAKLLMTHPGVGPVTALATDVFLGDPARFEDGKAVVSYVGMIPSEYSSGGQQRLGGLSKQGNPFLRFLWCEAAVHAVRRDPELQRFYRRKLAQKGLSKARVAAARKLGIRLWIMLRDQIDYQEFCRRGQLRQKNGAACAGMPEVGHSPAMQ

SEQ ID NO: 104125 - protein, 352 aa, unidentified
MSTLAHKGQAREVRFEGSIWVGVDVHKNSYAVAVRDQEGRAVQFTMAADNDAFVRKILSYGQPVALVAYEAGPCGYSLYRACEAVGIAPLVAAPSRIPRPVTRGNKTDRLDCRKLADYAARDMLVPVSVPTEEEEMLRSLQRRRHGLTDRIRSTKLQIKSLLLEYHIAEPHGLASWSKASIDALQRLELSAVLRDTLDSYLRELAYLTAERHSVDQAIAKATPHDVSQRMRILQSVPGVGPVLSTTFACEIFRPERFANGERLSSYVGLAPVVSQSGESAAKGSLVRTGQQRLRSLLVECAWLHKGRDVDAELLYRRILSRTGHAQKAIVAVARRLLTLLWRLCIENRVYVA

SEQ ID NO: 104126 - protein, 353 aa, unidentified
MQIVSALDVHRSQITFKTVDLAGGEVCRGRISPATREEVRAWLARFAGLDAEFVLEGTTGWRFVVEEIERAGHRAHLADPAETAARRGRKRRAKTDNADCDLQLKLLVAGELPESWIPPAPIIELRTRVRLRKALIDQRTGWQQRLQAQLFHQGLPAGLKLRTRAGREALAQAELSPAGRELVALGLRMLEAIDLQLAPLDRHLRAFARRQPGCRALISRLYGIGPVSATAILAELGDARRFTSSDDAVRHCGLDVTVYQSDSKRARGHLSHQGPELLRWALFEAAQSACRPPSPDHAYYLQVRERIDHDRACLSVARKLCRRAYHILRELGDEALAPVDELPAAAEAIAAAA

SEQ ID NO: 104127 - protein, 326 aa, unidentified
MDVTTIGFDIAKGVFQVHGVDGAGEVTLRRRLSRTQVLALFEHLPPCLIGTETCGSAHHWARAISALGHDVRLISPAYVKLYVKRSKTDAANAAAICEAVSRPHTRFVPIKSPDDQALALSYKTRSLMVAQRTAAVNAMRAHLSEFGIIARQGPIGSAELVSLIRNGDERLPDLARENLVDVAHVIEAVEAKIAQLDAKLADIARKDERCRRLIKVPGIGPVAAGTLIALSGDMTRFRSGRDYAAWLGLTPRQNSSGERVRIGRMSKAGNRDLRVLLVLAQMSVIRRARSNPSWISPWVLDLMKRRRRRWSRWPWPRKPLASSGRC

SEQ ID NO: 104128 - protein, 373 aa, unidentified
MPKYSTAFGMDVHLRSTTVCALDADTGEAVTRRFPGNPWGEIAGWMDGFPGPSLAAYESGYLGFAPQRELAGLGVECVVAAVSKIPRPAADSASKNDRNDAARMAKAILAHDISPVWVPSPEVEGIRDLAGAYDGATARLATARQRLLAFLAKRGFVYGGTTPAGNPRKYWTYDFLRWLDKVRPGDDDGVRALAALRNEVEAAAEARAGLLSEYRAAVDASPIAAEVAALQSIKGCAFALAAAFSAEVGDFTRFRSGRQVTAYFGLAPSQRSSGDSVRLGGISGAGNALVRKLAVEGSWCYAAARHQPKLMPRDTGVPLEIRMHGRKGSERLLRRREEMLARGMPAAKANAATAAELVRWLWALGMMCREGAE

SEQ ID NO: 104129 - protein, 396 aa, unidentified
MELMDERGRVLARGRLPEGVAGMARLHELIGEQLGEGADDAEVVIGTETDRGPWVGALVAAGYTVYGVNPLQASRYRERHGVSGAKSDRGDAHMLTDMVRTDSHQLRAVAGDSPGAEAVKVVARTHKTLIWERSRQVQRLRHQLREYFPAALEAFDDLDAPDALELLGKAPDPAKAAKLTRAQISAALKRARRRDIPGKTTVILAALRSAQLGQPPAVTAAYAVTVRSLVAVITVLNEQVKTLQGQVEADFGRHPDAEIYRSQPGLGPVLGARVLGEFGDDPHRYISGKARKNYAGTSPITRASGKRKIVAARFIRNNRLTDALMAQAFAALSASPGARALYDAERACGTGHNPALRKLASRLVGILHGCLKTRTLYDEATAWPQREKTPQSDIAA

SEQ ID NO: 104130 - protein, 426 aa, unidentified
MWDAKRRVLKIKSLKHGIIQDKRGNVMRAVFGIDVSKTSSEVAILVNGEKVHGYSILNDAIGFNRLLGDLKTVHNPEIIFEATGVYSRCLQAFLEECGYAYTRLNPLEAKKQLDSLRVRKTDKIDAEKLAKSQLVHNRKPTYVQEEVYQHLRDLSRFYQNMTEDLVRAKNRLHKVLQVTFPELENLLSTPTGEQYWNLVMAFPCKEFVLSLSQSDLYEIIRQSTSKRISEKRIAYLTDKLIKLAKQSFCAVKKTSPMLEEVRYYAQELLRLSERRQVVLNDMVALAQPLPEYDILRSIPGIAETTATSIIGKLGDIRRFHSANQINAFIGIDLRHYESGNFLAKEHITKRGNPYARKILFKCIHNIASASHTNPCHIADFYEKRKRQSTIASTKPHTIASIHRLIRTMYYLITHNKLYDYSLTQNR

SEQ ID NO: 104131 - protein, 416 aa, unidentified
MEVLHPRCAGLDVHKDSVVAAIRLAANGEPKTEVRTFSTTTPGVLALSDWLSHHACTHIAMEATGVYWKPVWHILADDTFTLILTNPAHVKNVPGRKTDVADALWLADLLAHGLIRASFVPEPATQAMRGLLRTRKQLVREQASHIQRIQKTLEDANIKLASILTDIMGLSGRALLKALIEGETDPDHLVKLIDRRVKASPEQRHAALCGRVSDHHRFLLRLHLRQIDMLNEAVAEIDQRVESDLDPFRAALRLLCSIPGIGELSAQVIVSEIGIDMSRFPTAGHLISWAGMCPRNDESAGKRRSKRLRKGAPWLKATLIQCAVSAAKKKTSYLHAQFKRLCQRHGPKKAFCAVAASILTAIYHMLRDGTFYQDLGADYFHKGTAYAQARKLAQRIAKLGFDCSITPKAEEEAVSV

SEQ ID NO: 104132 - protein, 324 aa, unidentified
MQPNSNANCWVGIDVSQDWIDVVVLAGEHKAETLRCERSADALARLAQQLLLYSPQGVVLEATGGLEGAVITSLAVVGLKVMRMNPKRVRDFARAHGLLAKTDAIDAYALALFGARMQPPLRAWPEAERLHLAAWVARQQQVTIERAGERTRLKQTTEPELRKSMERVIAFLGKELARLDKQLAAWVAQSETWKAQEALLRTAPGVGPKTALRLLAQLPELGHINRRQIAALVGVALFASDSGKWRGKRSIRGGRAAVRAILYLASWTAVRAEGQLRKFYLRLVAAGKPKQVALIAVARKLLLALNEMMRSNQPWRAANHPISA

SEQ ID NO: 104133 - protein, 367 aa, unidentified
MNQRTYVGLDVHARSILGCAIDQRTGEIKRQRLAANNAGVVDWVRGLSPPVRVVYEAGPTGFGLARALEAAGFTCVVAAPSKLQRPPGDRVKTDARDAEHLARLNLLDQITAVAVSDSGREAARDLARAREDVRSDLMRARHRLSKLLLRHGIVYSGGTTWTNVHHTWLHQQRFKDPSLQAAYDTCLETVEMTLDRRNRLDIRITALAETDPYAEVVHALMCLRGISVLTAFGLAVEVGDWYRFTGKTIGAYLGLVPSEHSSGASRSLGSITKTGNTHARRLLVEAAWHHRRNYQPSREMRARWDKADEASRVRGHQGNHRLHHQWEKFEARKKRRVIANVAVARELAGWCWSLAARVQREHPWPAE

SEQ ID NO: 104134 - protein, 551 aa, unidentified
MRFAVEGVGDEAGPLPDLDPVWKIVCSSPQADPRSGVSTVTITRAMKHSASSFAGKRQARNLNQLARQTKPKGSTPSGAAKPLDELTPVHRRAAGIDVGSAENYVAIPASGLAQGEESVRVFGVFSAEQDALVEWLHKHQITTVAMEATGYYWWTLHDKLEQRGIEVYVVDPHSVRTVPGRKSDWLDCQWLQKLHTYGLLSKAFRPDLPIRRLRTLTRQRTELVINGAAHQQHMGKALVAMNLQLGLVVSDLIGETGLRIIEAILAGQRDPEELVKLRDPRCKKSTIEEMKAALRGTYNDEDLFVLEQSLAGWRFYQQQMVACDQRIAKALAAIPQAPPATKASPAKPLTPAANPRPKAKRIDVGNNSPTINFTEALVRICGMNLMKVCGLNLLSVLMLIGEIGTDMSRWRSSRAFCSWLGLCPGAKISGGKVLSRRTRNVKNRASTILRLAAWAVSRTDTWIGSFYRRIQRRRGTAKAVTATARKLACVIYHLLKYREEFLLFDTVAYGTSLELQRLTRLRTQAREMGYELKERQELHKLVKHELAIIPG

SEQ ID NO: 104135 - protein, 356 aa, unidentified
MSRDIKYIGMDVHKEAIVIAVLNSSGQLVMESIVETKASSILQFIHGLRGELHVTWEEGTWAAWLHDLLQPHVHQMLVCDPRRNALLKEGNKSDKIDARKLADLLRTGMLRAVYHGEHGLRTLRELGRSYQTISKDLNRVMNRLKALYRGWGIACSGTQVYAARYREEWLHKIPHAGVHRRAELLYEQLDGLQALRRTLRPELLAESRKHKASKLLRQIPCIGPIRAARLIALMQTPHRFRSKRQLWTYSGLGIETRDSAQYCFVRGQLQRVKKPQQIRGLNRNHNHEMKEIFKGAATRASCGVGPLRDFYVGLLDKGMKPEMARLTLARKIAAIALTLWKKEERFDAEQLKPQAA

SEQ ID NO: 104136 - protein, 413 aa, unidentified
MRESYRIAGIDVHKRMLAVVVADAAAEGEWQFERRKFGTTDSGLQELSEWLKEQQVVEAVMESTAQYWKPVWHQLEGGCELFLAQAHSNRAPRGRKWDYRDSERLVRRHVAGELILSFVPDAEQRMWRTITRTKHQLTRDRVRLQNQLESLLEEAHLKLGTRVSDLLGVSSRRMLQAIAEGATDPAAVAGLALPELRATPQQLADALAAVPHMSGLHRQILKLFLERLQLIESQIATLRDSIAGALEEHQSAVRRLAAVPGFGVDSAQQVIAEVGPEAATFPSAGELASWVGVCPGQNESAEVSTSSRSPKGNRTMRRVLDQVAQAAVKTKGSIFESLYRRWLPRLGHQKAIWAIAHRLCRLTWKILHQKIEYIEYGQLRSLKAVQRRTSKLIRELRSLGYQVTPPALPQVCS

SEQ ID NO: 104137 - protein, 341 aa, unidentified
MERTTYSVGIDLAAATFVATVLESPETVKLAHKDFDNTAAGMAEMVTWLEAGGVGKDNTKICMEATGVYGEALAYFLAAAGWWVAVHAPLDVKRAFYPTGHKNDPVDSRQIAEYVLRFEDRLRRFEPKKPVLEQVQALLATREQFVRQKTANLNAIKALKRKVIRTPMAEDLFQKNVQQLSAQITQLEQEIERLFRQDPDLHQSLLLLLTVPGVGLLLASHCLITFEKLDQPYNPKVWAAYLGIAPLQKRSGTSVFKPDSSRHFGPSTMRKLLHLGARSVRTHKPVFRHYFERKVAEGKPKKLVLNNIANDLVRIICAVLRSQTPYIPNYRSVHPAVSVSS

SEQ ID NO: 104138 - protein, 409 aa, unidentified
MQNHRHKVYVGIDIHRREHVVAVIPSALLQRSRPDWKNAQILSIRNERDEFVRLDLVIKAHVQCPAEAAIAVDHTGGHYCEPLVYYLRGKGYNVCHLEAKAVKAARERLLDEENKTDTIDATGAAYLLYLRDTHGFSFGISSVVPELGSQAATLRSLILQQQQYVKMTTQLTNRLHQFLLAVFPEAESNYFTKLLRIASYYPTPPDIIASQGLKNVKYLSKADREVIMRLASNTVGVPPELYRELIRNLCQFRTDAIAKRDEIAALISQEVINHPYGHCLLSFPSFGTIAAASIIGVVNDISRWPDKKKLKKALGIYSTLKQSAASSARGRQGKEGNRHTRRALCQVVFRCIQVKAADNDFKDYYHRQVARGKPKLKAVVSTMGKLAEIIYHCLKTEECYQYQGKYRLR

SEQ ID NO: 104139 - protein, 429 aa, unidentified
MTRISAGVDVSKNRSTVCIIDQDGKVIMRPFLVWHSTEELDFLADTLKRLNGEVRVIMESTSIYQYPIALHLKEKGIFISIVNAYKVKKFANTDFRGGKTDKKDSRTIASYGISYWDKLVEWQIPKDTYFNLDLLNRTYMNAKKHRQIILQELQHYIDCAMPGMDKELHSLNLNTKKDFMLDFVEKFWHRDEIVNMTEAEFTEVFTAWAKKKGYRPGKGKAAKIYAIAKSCIPYYPANPTVKTILQCIVDKLSGVNRTLVTIVTQMIEEAKKLPEYQIVREMPGVGDPLAARFFGSAGDIRRFKNSKALVAYAGIDSPPDESGDSSSTHRHITKKGSKVFRDTGYEIMMALRAQKRTWEKVRKNPEVYDYMLKKKAEGKPRKVAKIAALNKFLRIVYARIKELYDNMALAERAKTKTRSKTRAKTKVTA

SEQ ID NO: 104140 - protein, 428 aa, unidentified
MKYNTQNAKIESITEKTLIVGIDVGSETHYARAFDWRNYEYSKKPLEFSNNEAGFVTFKVWMEELAEKYGKDVVIPGMEPTGHYWFNLGAYLQDNGMKPVHVNPHHVKKSKELDDNNPNKNDRKDPKTIAALVNEGRFSYPYIPTGVYAEIRSLSNLRLQAQEEITRIKNRIARWFSIYFPEIKDVYKNPGAVSGLMILKVAPLPKDIVKLGVDGVNQIWRDAKLRAAGLKRAKTLVTAAEHSIGSQEACDSARIELKILLNDYEIYHQREEELMELIEEKLSEVPYIDKLLEIKGIGMKTVSGFVAEVGDIKRFDNPKQLQKLAGYAIVECSSGKHKGDSHISYRGRKRLRYVLYEAAISLIARNTEFKEIHRYYQTRGKNSLKKMQSVIAVACKALRIFYAILTKGVTYDGAKMLQDIKRPQLKVA

SEQ ID NO: 104141 - protein, 389 aa, unidentified
MNNVRGGKAQRSGALPPLAGDARSIVTRQTHAVAEQDRRRLRGTSPDSRLSGGRRQAAAAAVPSSHVQDRDVSMNNAAVVGIDVGKAKLDVFIDSTEQSFSVDNDAAGVATIRQRLAGLEVQLIVIEHSGRYERRCALDLMDADLPVALINPRQSRDFARAINWLAKNDRIDPRLLAKFGRQVQPRLSERIPENRAELDELVGRRRQLVQMRAAESTRLPQARFKSIRNSIDKSLRRLDGQIQDLERQIARLIENDDDWRGKTQLLQSVPGVGPVVATTLVAELPELGKINRQEIASLVGLAPFDRESGQWKGKRRCWGGRAQVRSTLYMAAITAKRCNPIIQALARRLQAANKAFKVIMVACMRKLLTILNTLVATGQTWNPKLVHQP

SEQ ID NO: 104142 - protein, 440 aa, unidentified
MRIMYERCCGLDIHKASIAACALISEKGKPQEETRRFGTMTADLRELAGWLQQKGIRHVAMESTGVYWKPVWNILEPAGFELLLANAQEVKVVPGRKTDQKDSQWIADLHKHGLLRNSFVPPRAIRDLRDLTRTRAILTQEHTSICNRIEKVLEDANIKLGSVASDVFGVSGRAILRALMKEENDAEALADLSKGLLRKKIPQLRRALEGQVTAHHRSLLTGQWSRMEFLEREIVDLETQIAERMKPTPEETALTLPNTAEDAPAPLSPREEAIQLWMEIPGVGWTAACSMVAELGVNMDQFPSAAHVASWAALCPGNNESAGKRLSGKTRKGNVWLRRKMCEVAWAASHKKDTYFAAQFHRIASRRGNKRALMAVAHSILVTAYHMLKHKRHYQELGADFFDAINRDKVRDRLVQRLAKLGFDVTLKSKDSIASDSQKN

SEQ ID NO: 104143 - protein, 343 aa, unidentified
MNTFYYIGLDIHKKVIAYCIKTLDGCLIGQGKIDADRKSLDEWVQGLPGSWIGAMEATIFTGWIYDFLKPYAADLKVAHPQMLKAITAAKKKNDRADAEMIADLLRVNLLPECYMLSEEIRELRRILRYRNHIVRTAVKMKNKMSGLLMEVGASYSKKRLHGKKYFNSLLERVEEIPHSVKELLKLSRASFEMFSAVQKRLVEALRTNSLIRDRVQRLMSIQGIGEVTSLTWVLEIGDPKRFGSIRKAISYCGLCSGQKESAGKEQRGPISKKRNKHLQTILIEAAKIAPLWNPQLAALHDRELKKGNRNRATLAVARRMVAYMMAVDKNETDFMLREEESAA

SEQ ID NO: 104144 - protein, 405 aa, unidentified
MQTVYERCCGIDVHKKLIVACFRNGKKAELRKFDTLTCSIRELATWLLDNGCQMVAMESTGAYWKPIYNILELFNLDVIVVNAHHIKTVPGRKTDVKDAEWIAELLQHGLLRASYIPDRAQREMREIVRYRKSLVEERSRELNRLEKTLEGANIKLSSYVSNLTGVSSRKLLEQAMGGEVNEENIVDLMHPAMKATREELLRALEGCFSTIQKQLVKAILDHIDDMTKRIQDLDDIIDNQMKGYEDAINKLDEMPGIGKRSAEVIVAEIGIDMSRFPSAAHLASWAGLSPGNNESAGKRKSGKTTKGNKTLKSTLIQCAKAAQKNKDSFFHAQYQRIVVRRGANRATVAVAHSMLIAIYHVLNDNTHFEDLGSDYYTKFNTEAKARYYLKKLQELGVPVPVPLAI

SEQ ID NO: 104145 - protein, 411 aa, unidentified
MARVVFAGIDVSALKCDLVCLDEQGQQLAPVKSFPNSLEGASAMVEVLDGLAHKFNIQQLHIGLEATSIYSVHLRQFLLDSPKLKPYSTKVYEINPVMVAGFKKAFGTKRPKTDALDAYVIAERVRFGHLTPCSRETIVTEPLRQLTRLRLHLVEMVTAEQNRALNLLFLKFSNYHQDKPFSQTFGKASLAVLQEFTPDELIEMPLEELAEFIQSHGNNKLASPENMAKALKQAARRAYRLNPKMLAACEVALSLTLQNIDHLKRQLKQLDKVICRELEAIPQTLTSVKGLGPISAAGIIAEIGDIKRFKDQAALAQYAGLTWTRYQSGDFDAEERRLTKSGNRYLRYYLVQAANSLRVHNEEYKAYYQSKYHEVTKHQHKRALVLTARKLVRLVFALLSKGQIYKGTVMK

SEQ ID NO: 104146 - protein, 420 aa, unidentified
MDVMVERCAGLDVHRDNVVATTRVPGQGRRRFEQQTQTFKTTLPGLAELAAWLAAAGVTLVGMEATGVYWKTVFQALEDQFECWLLNAHHLRNVPGRKTDVKDSEWICQLVQHGLVRPSFVPPPEIRRLRDLTRLRAAQNNERTRTIQRLEKVLQDAGIKISSVASTSYSKSARAMLEALLSGVTDPEQLAELSKGKMRAKIPQLREALQSRFTIEHHGVMVAQLLAHIDTLDTELRHLTERIELVLAPHVHIIELLSTIPGVQARAAEVLVAECGLDMSVFPTVGHFASWAGACPGHHQSAGRRKSGRSRPGPAWLTSQLTECARAAVRTKETYLASHFAQLRGRRGEPKAIGAIRHDLLVAYYHIVRDQVPYRDLGPNWQRKRYSVEHRASRLQRQLEALGYTVTLNKADQPEAQQTA

SEQ ID NO: 104147 - protein, 430 aa, unidentified
MGLIVPSTIHPAREDQPLPYEWFVGIDWGSQRHQVCVLDRDRRQVGERVVDHDGASLARLADWLWTLSGGQPQRVAVAIEVPRGAIVEGLVERGFHVFAINPKQLDRFRDRHSVAGAKDDRRDAFVLADSIRTDQPSFRRLQLDDPQLLRLRELSRAEETLLEDFRRSANRLQDQLHRYYPQMLKLCSAADASWLWELIDLAPTPAHAALLSEEQVQRVLKAHRIRRVKAQEVLTCLQAPALPVAPGAAEAAQAHCAFLLPCLRVLAEQLQACSQQVSALLRALAQEPGEGEGPSDVAIVLSLPGVGRKITAWLFAEAAQPLAERDYQVLRTHGGVAPVTKQSGKRRLVVMRHGCNPRVRHALYHMARVAMQHDAHFSSVYAALRAKGQRHGQALRNLGDRLLRILMAMLRERTCYDATRIRREPVVQRG

SEQ ID NO: 104148 - protein, 444 aa, unidentified
MVCSGMILIREVADAPVIMGISKPAGLKSPCGEVKIVNPLFVGIDVSSRSNVAYLMKPDGSKHSSFSVQNNLGGAKMLSERIVSALSSMRLSDVVIGLEATSIYGNNLVYALREDGSLSRFQRKIHVLNPKQVKKFKEAYPDLPKNDFVDAFVIADHLRFGRIAKEVYMDDSRYQALRTLTRARFDVIQNLTREKQRFANYLFLKCSGIAQEKDIQNTSATTIALMEHFETVDDLANTDLDELTDFIAQAGRGRFVDPDATARAVRAAAKGSYRLPKTVNDTVNQAMSVSIASMRALKEQVKVLDKAIEQQFEIIPNTLTSIPGIGKVYSAGIIAEIGDIHRFDSQASVAKFAGLVWTQHQSGEFEAEHSRMIKSGNRYLRYYLLEATNSVRRCDSEFRRYYDLKFKEVNKYQHKRALALTARKLVRLVFRLLKDNRLYIPSEG

SEQ ID NO: 104149 - protein, 334 aa, unidentified
MNLPILGIDVSKDSLDVHLIIADTSQHAAFTNTPKGHKRLVRWLQKRCGQEQVHVGLEATGQYAFPVAEVLHAADHLVSLVNPARISAYARSLLARNKTDRLDAAIIADFCRTQSPPAWHPPREELRELQAMVRLLEDLTATRQAEINRLKSGIRSAEVGRILEDHIAYLDDQIQYVEQLINTHIAQDDDLRRKKELLRSIPGIGEKTAHTLLGEILYLDSFQDAKQVVAYAGLNPRQRRSGKMKGRSPISKTGNPQLRKALYFPAISAKRSNPIVHQFCIRLEENGLVPMQVIIAGMRKLLHIAFDVLKNDCPFDPNYEQFSSQSQQIPAFSS

SEQ ID NO: 104150 - protein, 433 aa, unidentified
MPRVTSKVETHRELRETLPNNQKVGINMFYGGIDVAKYRHEICIVDESGNVILQIFVDNTRNGLDKLIHNLKRLEIEVSNVEFCLEATGHYWLSLYYHLTELGYKIHVINPIQSDALRNFYVRKTKTDRKDAHLLADIVRFGHISETKLASETVLKLQNLSRLRFEFVRQVGGLKNRVLGILDRIFPEYPQCFSNVFINTSRELLKSFTAPEDLAEADLSELTDFLNKHSRGRLGVDRAKQIQALAKGTFGINIALDAFTLELRLLVEQIEFIEEQISVIEEAIDQVMEEMRPSKDTAYRHVLETIPGIGPVLAASIIGEIGDINRFPNAKALVAYAGLDATVRSSGQFEGTRNRISKRGSPVLRHSIWLAAVSARRFNPEMKEFFEKKRSEGKHTLVATGAVARRMVHLIYSLWKDNRPFDPNYQWSPTNSR

SEQ ID NO: 104151 - protein, 321 aa, unidentified
MAKRTTICAGIDTGKRKLDVALDGSSEQLQVDNTPEGYKLLLDWLRRHRVKRIGIEASGGYEQAVVAELRRKRFVVVVFQPAQVRAYARFHRQRAKNDKIDAALIAACTAAVRKIHAAPDARLLPFAEQLTMIDQIGEDIARLKNRLETCRNPRLRQIWQEDIARLEKREKIELKALVAAIRAHRDLAERLDLISSVDGIGLPTAVAILVRLPEIGRITREQAAALAGIAPYDDDSGEQTGIRHIEGGRERLRRALYTAALPASFRWNPQLMALYRRLIAAGKEHKRALIACARKLLIFANTVVARGTPWGPPPTAVPQAG

SEQ ID NO: 104152 - protein, 300 aa, unidentified
MQKIFVGIDVSKKKLDTYITGLSNYSVFDNTKSGYVKLIKVLKKVNPELILLESSGGYELPIAYKLIAKVFKVAIINPRMIRAFARAKGLHAKTDKIDSRLIAEYGEALKPEVVEIMSKEGRELKELVLRRGQIMNQITAEGNRLETLMSKFLRSDIKKHIKQLKRHLELVDKEIHRLIDNSLCWKKEKGFLTSIKGVGNVLASTLIAELPELGKLNRKEIAALVGVAPYNADSGKKTGMRFIQGGRKHLRNTLYMATVAAVRSNARIKAFYLKLKGKGKASKVALVACMRKFLILINAL

SEQ ID NO: 104153 - protein, 406 aa, unidentified
MASMTSAIPTAQPDRVVIGGIDTHKDIDVAALLDCAGMVLGTAEFPTTRAGYRQLLGWMGSAGHLGRVGVEGTGSCGAGICRQLSAAGVEVVEVNRPDRSQRRRRGKSDALDAAAAAEAACGGQRLAIPKSRDGQVEALRVLRLTRASAVKAGTKALQLLQQLIVTAPEQLPDQVGELPRMELIGCCAAWRPHSHDAADPSVATRIALKKLARRYLQLAEEISDSDTLLDGLVTDLAPQLIAVTGIGTDTAGQFLLTAGDNPERVHSEPAFAMLCGVAPLPASSGKTQRHRLNRGGDRQANRALHVIATTRKRCDHRTQAYLKKKIAEGHTRREATRSLKRLIAREVYYLLNPAPHTGRFLHPGQPAGAQTRSRWSPHARNDLDRAEAPAHHQNGGTGTLTNREAS

SEQ ID NO: 104154 - protein, 411 aa, unidentified
MRRVIGIDVHRTFGEVVFWEHGRLRHAGRIDMTRTALEGFGKTLLASDEVVVEATANSMAVSRVLAPFVARVIIANPLQVKAIAQAHVKTDKIDAGTLASLQAAGYLPQIWTPDAETERKRRLVARRYQVVRHRTRLKNEVHSILHAHLIPKCPHADLFNARGRAWLAAQQLPDDERAAIDRHVRELDRLAEDLALLDREIARDAIEDSAVNRLMTITGVNLAVAAGIVAAIGDISRFKSPQKLVSYFGLNPRVRQSGLGAAHHGRISKIGRSHARAMLVEAAWAAAKAPGPLHAFFVRIRARRGHQVAAVAVARKLTVLCWHLLTKGEDYLWARPALVANKTRAMQLQAGHPQQKGSRRGPAYAYNIKALRDREMLIAAQAERSYERLVSQWKPRRPKPGARAPQLGRTK

SEQ ID NO: 104155 - protein, 348 aa, unidentified
MRFYTKTHKHYCGIDLHARKKYVCILDSEGTVLVHREISCNPESFLRIVAPYRESLVVGVECMFAWYWLADLCRNEKIEFVLGHALYMKTVHGGKAKSDKIDAHKIAVLLRGGMFPLAYVYPPEMRATRDLLRRRNFFVRKRAELMAHIQNTVIQYNLPPLGFDLAVEENRHGVAQLFHDPEVRKIIEIDVAMIDAFDDVLKVLEPNIEKTARQHNQQALKLLRSIHGVGKVLGLVMLYEIHDINRFPTVQDFSSYFRLVKCAHESAGKKKRTGGSKIGNVHLKWAFSEAAVFFMRHNHPAKTLVDKLAKIHGKGKAILILAHNRARAIFYMLKNNVPFDREKFLATA

SEQ ID NO: 104156 - protein, 325 aa, unidentified
MKLTTYGVDIAKRVFQIHWVVPETGEIQRKKLKRADVMAFFRLQAPGRVVMEACGAAQHWARQWQPLGHTVQLIHPKFVRPFVMTNKNDAADAQAIWTAAQQPGMRFVLIKSEAAQAVLALHRIRSQLVKFRTMQMNQLRGLLGEFGIELPGGREAGLAALRDIDWERVPALLHAALQMQMQRLRELDEQMALIERQLAQWLRSDDTCRRVAEIPGVGLLTATAMIAAMGDAHHYRSGRAFAASLGLVPRHSGTGGHVQLGGISKRGDRYLRTLLMHGARSVILHQGKDKASPWLRDLLARRPFNVAVAALLIRHSNTVQKAHAA

SEQ ID NO: 104157 - protein, 423 aa, unidentified
MMKLKYSICCGLDVHKNVIVATIVITNKDGISEYKQKSFSTINSDIQKFHCWLIENNCYHVCMESTGKYWIPIFNYLENDIDVCLTHPKYVKAIKGKKTDKKDSKWIADLYKFDLVRCSFIPPKDFRQLRELARYRFKLVCMKSSEKNRIQNCMTVSNVGIASVLSDPFGKTATEIMSYLLEHTADPIDEKAVRKLIKKGAKAKSDEIIEAIKGYNIETDQAKKLELARAHLDYLDDMITQTEVELYVRIKPYYEFVEFVSTMPGMTELSTTIILAETGVDMTVFDDAKHLCSWCGLSPANNESAGKKKSVRIAKAGDYLKPMMVQCALAAVKSKKQPYFAIKYGRIKKRRGHKKAIIAIARMMMVCIYHMVSEKKPFTPTDYEELMDPQNHVERVVLNENNVFAYLETLGYDSSKLVKRNDN

SEQ ID NO: 104158 - protein, 483 aa, unidentified
MKRKSIFRNNSQKLDSAFIEAGLPEKVLLVPLDFAKLTHYACFCDGRGRYIRNAFTVKNNRAGIDYLIEQIEKTRKARSIRSKQHVIIGGEDSASYTCNFMDQLFEQGYLTVRLSAKEVHQQAESLDSSTDKTALRAIAKTMLNRDARQTSGSDPYKELRGLTRQRRRIVHLSTAVKNRIHTHVDRLFPGFLSKDSAVAPFSKASLQLMEKAFSAAAISRKSERVLTRLLSGQGVREPALAAARLKEQADRAICGDDSSTRLSGQLITGELSLYQSLQSTLSDLDLECARILAQLPEAFVLSMRGIGITLCASIFAETGSLARIQHCDQINAYAGIVPKVKQTGGPEAPARVGGKRRSFNRVLKDYTLQAGNHIYLHGPKDLMEDAVRRKLEGKAVDTAMARRFLRIARALTKGRCIYLPKSLRTDQEEPDAEARAQYILQTWPDQLLKWKRLGLHREAFAPETPLGQWREIVQQIYDIELPL

SEQ ID NO: 104159 - protein, 330 aa, unidentified
MSAIVVCGLDVHKDSTYATVMDQEGKIVNQTKMSNERVLSYLSGFKVDRVAMESSNQVAPLYRKLTREGYSVVVSHPKKTRYIAEAKIKSDRVDSKALAELLRLDALPLTYMPDKETAVLREKVRRRAFLVRERVKLRVKVKAILTYEGIKWPSDHGLFTVKGVEWLHGLSLDPVESYLRVMASLDDEIRLLSKELRGQAEDDEDVKLLMTIPGVGYYTALLVKSEVGDINRFPFGERLCSYVGLVPSTHASGASVRHGGITREGSRWLRWVMVEAAQTHVHKYDTGITRAYNRIAERRGKRIAAVAAARKLLLCCYSVMKNKRPYHDQT

SEQ ID NO: 104160 - protein, 410 aa, unidentified
MFKEECLLFVGLDWAEAHHDVCLMNEDGKVLARKRVEDTLEGAGQLHTLLAEYSTEPSQVIIGVETDQGLLIRSLIAAEFQVYAINPKAVDRYRDRHKMSRAKSDAADAKVLADLVRTDRHNHRPVAGDSTLAQALKVLVRSHQRLIWARQRQASQLRTMLREFYPGALLAFDDDLTGRDAIAVLGRAPTPAKGRALTTAQLVGILRRSGRRRNLEQKAEAVHTALQVPQLEVPGVLANAYGASVQAAVRVIAEYNIQVAALETELVAYFEAHPDAEIITSLPGLGNILGARVLTGFGDDPTRYADSKARKNYASSSPITKASGTYRLVKARFPRNTWLADAGHMWAFSTLNASPGARAFYDRYRARGHTHVQALRVVANRLFGILHGCLRHRTVYSEDIAWPRAMDQAA

SEQ ID NO: 104161 - protein, 376 aa, unidentified
MEHDSTLYVGLDVHKESITVAYATGMGEVELLGKIGTTKPDIDRLCKRLQSKARRVHVVYEAGPCGYGLYRQLVEKGIDCMVCAPSLIPKKPGERVKTDRRDAVKLVRSLRAGDLSAVYVPTVEDEAFRDLSRAWVSAKDDLKRARQRLKAFLLLHGVGYTGRADWGPSHRRWLSTFAFDSTWQQFAFEEHRRTIEDRLAQCDRLEAALREAVLNWRFYPAVLGLQTMRGVQFTTAVGMLAELGDLSRFTHPQQLMAWLGVTPSEHSSGEKRRQGSITKNGNSYARKLLVEAAWSYQHPARVSPEIQRRHEGIPKPIVDRAWDAQVRLCRRFRKLVARGKQKNIVVIAVARELSGFIWDIGRLAMSLAVRCDGLVA

SEQ ID NO: 104162 - protein, 348 aa, unidentified
MLHVGLDLSRRRLDYCLLDEGGVIVERGAVAPDADALAGLVRLVELRHGRQPVRAVIESMNGARFVHDTLERCGWEVLIADAQRVKGLAPLACKTDRIDAWVLAELSRRDLVPAIWLPGFAQRQERERARWRLYLVKHRSSLKQRVHSELMAFGHACPVTDLFGVRGRELLERLALPDPWHANVLACVALIDDLDRRIDQLERELKALGADHPYVPLLVTVPGISWVLAYTIAAEIGDITRFASPKKLCGYSGLCPRVYQSGDSDRRGPLTKNGPRYLRWALIVAATNASRHPLYHDRYQQTKRRLGKQRGAKVAQVQLARTLTEAIWQMLTRNQSFAPAGAAFPLAA

SEQ ID NO: 104163 - protein, 403 aa, unidentified
MNNVAGIDVSKGKSMVSVLRPFGEVVAKPFSIGHTGSELKELADYLKSLDGETRVVMEHTGRYYEPVARFLHEEGVFVSAVNPKLIKDYGNNTLRKVKTDKADARKIARYGLDNWAELRQHTPMDTIRMQLKTLNRQQSLYSKTKTMMKNNLIALLDQTYPGVNALFDSPVREDGSQKWVDFATAFWHVDCVRNMSLTAFAERYRKWCKRHGYNFSQSKAVEVHTGAQDLIAMLPKDALTKTMVRQAIDALNAVSASLERLKAEMQALAAQLPEYPVVMAMHGVGDSLGPQLMAELGDVARFTHRNAITAFAGVDPGADQSGTHEAKSTRVSKSGAPELRRALFLVMDCLLKTQPQDDPVYRFMDKKRAEGKPYLVYMTAGANKFLRIYYGRVKEYLESLEEN

SEQ ID NO: 104164 - protein, 335 aa, unidentified
MHYLYYVGLDVSKETFDASLVAFEDANEMAHRKFANSRKGICSCLHWVEKRHGIRLDDVIFCAEDMGSYISEMAVCASDRTLNFNFSLISPLVIKYSMGIARGKTDRVDARRIAEYAITHYRKIALYLPAEKELCQLRTWLILRAHLAKQRVAKLVLLEKLDYKEKFADVSIQRSMLQEEIAYAETHMKTIEREMKELIAADSNICRNYKLLTSIKGVGPITAIVMLCSTLNFTKITDHRKFACYCGLAPFEHSSGTSVRGGCHTSSMANRDIKVQLNRSALIAIRCDPQLKAYYERKAAEGKHKFSVLNAVRAKIAARCFAVVRRVTPYVALQI

SEQ ID NO: 104165 - protein, 356 aa, unidentified
MNIRKVQDFVVKGKEVFVGLEDSKKTWKLAVRCERMVIHRASMEATYSVLIGYLRNKFPECTIRLIYEAGFKGFNLYDRLSEDGIDCVVIPPHMVTEPKVNRVKTDKRDANRLALILENHDFKCGCHIPDKERREDRQVSRTLIAIQKDIIRTRNRIRKLLDFHGIEVSFGDRWNRKEFLALKKLSVSEPLKASIAVLLTQLEQLWDHQTTLRTYLRGLCRKERYRKVFEIARSLPGIGWFTAIRLILELGEDLSHFTSGKKIAGFVGLTCSEYSTGETERKGRITGMGSGFIRSALIENSWTAIRKDPALLAKFSRIWRASGNKKKAIVGVARMLIVRFRACVISGVPYTMGTVR

SEQ ID NO: 104166 - protein, 426 aa, unidentified
MAKGKMNPEPEFAAFVGIDWADRKHVWCLQAAGSRKRETGELEHKVEAVEAWVAELSQRFGHCPIAVAVEQAKGALVFLLNKYECLHIFPVPSKMTASMREALYPSGAKDDPRDADLLLDILGQHRDKLHRLSPDDEATRRVQNLVEERRKLTAEKTAQGNRLTSYLKIYFPQMVEWFEKLDMPLVCDLLERWPTLEELQKVSTEELRMFFRQHHCHRGLRERRILAIGGAIPAKGDRAIIEAKSAVVKVIAQLIRSLLQGIAELDRKIEEAAAVHPDIFIFESLPGAGAVLAPRLLAAFGSQRDRYSCADEVQTYSGIAPVTERSGKRKWVHFRWACPKFLRQSFHEWAGHSIAQSAWARAYYRQQRDRGSDHHAAVRALAFKWIRIVFRCWKDRVAYDENKYLAALAKRGSPLGKLVVVGMASL

SEQ ID NO: 104167 - protein, 350 aa, unidentified
MSSKYDYTGKTVYVGIDVHKNSYSVVVTSDDIVVKKDRLVASPTILVCYLKNNFSGAKINTAYEAGFSGFHLHRCLIEHEINNIVVHPAAIEIAARERVKTDKRDALKISAQLADGKLRCIHIPDEEQESNRRITRLRSSLMGDRVKYGNKIKALLFQYGLIAANDDSVVSKKWIDQTLRVLDKGNYSCGLKYAVQGYVEQWLTITAKVKEIDKELVKQAKGEKEIDDIYQSVPGIGPLSSRILANELGDMKQFSSEKKLFSFTGLTPMEYSSGDKKYLGCISRQGRPVLRKILVEAAWIAIKKDKNLENVFERISKKAGAKRAIVGVARRLIGRIRSCIIKGEEYRIKE

SEQ ID NO: 104168 - protein, 369 aa, unidentified
MEDNITVFVGLDVHKDSVAVAVAHAGRGNPRFVGPCGADPAQVHKALSHLGTPDETLIAYESGPTGFALARALSAHGWRCQVVAVSKIPRRAGERIKTDRRDAIALASYLRSGELTPVVIPDATDEAIRDLSRAREDAVRARLKARQQLKAMLLRTASAFPGKTSWGTTHERYLARIGWEHPAQGIAYAEYRNAVAEAHARVERLTAALREQVEQWRFGPVVRALMCFKGIDFVAAAVLLAELGDLQRFDHPRQLMAYLGLVPSEYSSGPSRSQGGITKTGNTHARRILVESAWCYRFSARMSRPVAERNLDQPQAVRDIAWRAQLRLCSRYRRLCGRGMHSNKICVAVARELTGFLWEAARAVAPLVR

SEQ ID NO: 104169 - protein, 355 aa, unidentified
MELYIGMDVHAASCTLAVVSQTGKQLKDFPVETNGQALVEAIRMIPGHKHLVFEEGLQSAWLYETLRPHVDELVVAGITESRGPKSDKRDAYGLAETLRVGSLDKPVFKAPRQFTHLRELSRIHMTLVGDVVRAQSRIKSLYRSRGILVSGVNVYGVRHREDWQKQLCSSAQTRATRLYDHLDFLLEQKKQAESDLLREARKHSIVRILETAPGFGPIRAARVVPIVVTPHRFRTKRQFWSYCGLGIVTRSSSDWVQASDGGWIKARVPQTRGLSRQHNRFLKHIFKGAATTVITQRQKDPIHARYQQLLDGGTKPTLAKLSLARMIAATVLRMWKDEEVYDPGRAGSPMETREG

SEQ ID NO: 104170 - protein, 345 aa, unidentified
MDIMYYIGLDVHKKTISYCVKDASGQVHQEGQIGATRRELDGWMETLPQPWTVAMEATIFTGWIYKHLLPHAKQVKVAHPLMLRAIAAAKKKNDQIDAGKIADCLRCDFLPECHMAPTQIRDRRRTLRYRHLLVRQMVQMKNRISGLLMETGVSYNKQRLHRAGYFRELLSTNEDVHESIRPLLRLSRETIVRLQKTEYALVSSLQRDPLLSERIQRLKTVPGVGPITALTWALEMGDVSRFPSIRQAISYCGLCGEEKSSADKVMRTPLSKQRNKHIQRVLVEAAKLAPRQDHDLALVYETAKQKGNGNRATLAVARKMVAYLLAVDRGERDFVPAENYQRAAA

SEQ ID NO: 104171 - protein, 391 aa, unidentified
MIYVGIDAAKDKHDCCILGGNGQTVHEAFTFQNNHEGFEQLRSAIQKSSEAEGSGQIKAGLESTGHYSGNLETFLRVSGVELVVFNPLQVNLFRKSQTLRKTKTDKVDAKCIAQLLMTTESNPVSVSYQMQELKALTRHRSRLGSQRTKLKISISRLVVILFPELPAVCNSVTQAAMKAMLLELPSAHQIANCRIDRLTNLLRAASKGRYGRAKAEEIKSLAQQSIGANSPAAALELQLTLQHLDFLQKQMNELDKSIRAAVEQSQSPITSIPGIGPTLAAIILAEIGDVHRFSSPDKLQAFAGLDPSTYQSGKFKADRTPMVKHGSTYLRWAVMQAARLAAVHCKTFSRYMEAKQAQGKHYFVALGHTAKKLIRVIFRILSANEVFVPQT

SEQ ID NO: 104172 - protein, 319 aa, unidentified
MAQNDLVVVGIDVAKDKVDACIRSFTLRQTFPNTAQGHRKLVAWLRKYQVGKAVMEASGGYEREWRNVMHNAGIGVRIVDPRRVRNFAQSAGRLAKSDPIDAEMIAWFAETFSQAPGQIPDAAREELAALTKARAALVDVKIRLQAQDEHAAPESARKAYTRVLKSLAAEIDKLEATVSAKVKATPEFAERAEIIESVPGLAQVTSAILIAGMPELGQVSDKVAAALIGVAPYDDDSGKRRGERYIKGGRRWVRNGIYMPCLGAATQCNPVLKAFYQRLLTKGKEPKVALVACMRKLIIILNTMLARRQRWNPSAHAIA

SEQ ID NO: 104173 - protein, 383 aa, unidentified
MLPTLTNNSTPGQTILAVALELSQKCWKIGLQDGLHEKPSIHNAYDEEPAKRVSEVDDFINAQKVKWGLPVNCQVVVMYEAGQDGFWLCRALKKLGYEALIIDPASIPVERYSRRAKTDRLDVIKLVNCLLAYLRGERDRMHAIRIPEEATEGQRHLIRDRGELQKEIQQHRDRMRKLLRTVGNWDGVGSGFETRLHAGEIRCHDGSALPEQLQERLLRECERLALAGKQMFALESTLIEQLPTPAQERMQHLRKLKGVGKVGAVRLVLELFWRRFNNRREVGSCVGLVPQPYDSGESHVDQGISKQGNRRVRALLIEMAWMWLRYQPESAISRWFIKRTVGTGANKRSKRIAIVAVARRLVIALWRYVEDGVIPEGAQLKAI

SEQ ID NO: 104174 - protein, 368 aa, unidentified
MFEHTFIGLDVHAVNVVGHALNPATGEISGHTMAADPAVVLEWVRRFAPPVKVVYESGPTGFVLARYLRAAGINCVVAASSKLLRASGDRIKTDRRDARVLAEMLAVGSVTEVRIPDPEEEALRDLSRLRSGTAKDLAHARQHVNAILLRHGIRYPKETRWTREHSLWLHRQHFDEPALQFTYEADVERAELLAGHLARIDRQVAATAATCRYAPVIDALMCLRGIQVTTAFGLAVEIGDWSRFTGSSIGSYLGLVPSENSSGQSRHQGPITKAGNTYARKLLIEAAWQHRRPYARPGERLLRQLDRVAPATRIRALEGNHRLHHKWEVFDQRHKMTVKANTAVARELAGWCWSLAAPLQQGERMTAA

SEQ ID NO: 104175 - protein, 415 aa, unidentified
MNDQKRWYAGVDWASESHTVWLADWGGQRLGERSFKHNGEGLAEMVSWLLKASGAADPGQIDVAIEVPHGPVVETLIERSFAVWLLNPKQMDRFRDRYSIAGAKDDSRDAEVMASALRTDPHCFRRLAISDPIVVELREWSRIAQDLTSERTSLVNRLRQQLWRYFPAFLELNADLSAAWLIELWQAVPTPQAAKRVRKASIEVILKRHRIRRLDADQIREILRQRPLAVAAGTVDAARAHCATLIARLKLINRQIADAYHQLDTLTAKVGATGQPSPGQNTQRDAVILASLPGLGRINLATLLAEASDPLQRRDYHALRALTGVAPVTRQSGRSRIIVRRYAHHSRLANTVYHWARTAVQHDVISRTKYAALRARGHSHGRALRSVADRLLNVACSMLRAGTIFNPSLTHQNAA

SEQ ID NO: 104176 - protein, 330 aa, unidentified
MKKYDHFFGVDVSKKTVDITHSDKQEFTHRQFPNNDEGMSHLMTWFKELGIVLNDTLFCMEATGLYCFPLTQFLTTNSIDIWIEHAAQIKKSTALARGKNDKVDSLRIVMYAIKNLDRVRLWKPVNITLEKIRHLASLRERLVETKKRLEVPIKEFEQIGDLAMAKLLTKTIRNSLKAIDKDLKNVESKIIAIVNEDENLKSLYRLVTSVVGIGFVTTINLLIHTNGFTMLKDTRKLACYCGVAPFEHSSGSSVRGKTKVHYMANKKLKCNLHMASLSAIKLDQDLKKYYERKVAEGKNKMSVLNAVKNKLLARVVAVVNKQQEYVKKAV

SEQ ID NO: 104177 - protein, 402 aa, unidentified
MYNAVGIDVSKGKSTVAVLQPAGVIIRKPFNVNHTSSELDELAKYIGSLEGETRVVLECTGRYHEPVVKTLSESGLFVSAVNQHLIKNFGNNSIRKVKSDPADAKKIARYTLDNWIELRQYSSMDNTRTQLKTLNSQFSFFMKQKVAAKANLIALLDNTYPGVNKLFDSPVRDDGSEKWVDYAYSFWHVDCVRKIGLKTFTERYQAFCKKHHYNFQPAKPAELFLASKDLIAVFPKEASYKLLIQQSIQQLNLASSHVEELRSKMNELASTLPEYATVMGMYGVGKTFGPQLIAEIGDISNFSHREALTAFAGVDPGVDQSGTHNSKSNKASKCGSNRLRKTLFQIMSTLLQTSPENDKVYQFLAKKRAEGKPYYVYMTAGANKFLRIYYGKVKECIRNLEQ

SEQ ID NO: 104178 - protein, 333 aa, unidentified
MKKKWFIGIDISKKTLDVVIYDPTKKHADETNYKQVLNAQAGYESLFSWMKEKGIRSKQSVICLENTGIYGYDLCLFLESCNQDYCSFNPLDLKRSLGLVRGKNDRVDAGRIARYGYLHRDELVYSKLSGTTILLLRDLSSERKRLVKHLAENKGFITDRKGREPTSTSRRAEDMVRILEEQIQSVEDEMRRIISSDSAISLNYQLLNSIKGIGDINAINIIVHTNNFKGFETARQYACYLGIAPFGYSSGTSVRGKTRVCATGAKLLKADISQAARSAVVWDKELKEYYERKTKEGKEHGVVLNAVKFKLVCRMFAVVRRGTPFVDLITYKN

SEQ ID NO: 104179 - protein, 406 aa, unidentified
MKQYIGIDVAKHEHVAGARFEDGGEHGKPFAFPNDERGFESLLGRLRELEAAPGDSLVVMESTGHYWMSLWEFLDAHGYEVALVNPVLTDAFRKADTLRKTKTDQVDAFLIAEYARFKRLGPTRVSAEDAAGLKQLTRYRHHLVKERTALKNRLTSVADRTFPELAGLFSDGNCATARAVLREFGSAERVAKADIRTLTKVVREASRGYFGRAKADEVKAAARGSVGTSFAAEALAFEANHVSELITHLDGEVGKLDAEIARLLDPEVGALLQSIPGIGPTCAATIAAEVGDPGRFDEPKKLMAYAGMDATKHQSGKFDGDEQHMSKRGSAPLRDALMTAADRARMHDPYFGDYYDSLRARGKHHYVAVSACARKLCGVILAILRERRPYEPRPSIQSQQGRPGEG

SEQ ID NO: 104180 - protein, 414 aa, unidentified
MEIVYTRCVGADGHKKTVVVCVIVPDERGGWRKETRTFGTMTTDLLALSDWLQQCGCTHVAMESTGEYWKPIFNILEGNFEVLLVNAQHIKAVPGRKTDVGDAEWIADLLRHGLLRASFIPPQAQRELRDLTRFRSTFVRERATLANRVQKVLEDANLKLASVASDVMGVSGRAMLAALLDGQNDPEALANLARGRLRDKRADLVKALTGRMKDHHRFVLTELLCQIDNLEEAITRFDEQIKTHCAPFEEAVTLLDTIPGVARATAEVIVAEIGTDMSRFPSADHLAAWAGVAPGNNESAGKRRSGKTRKGDRPLGVALNQAAHGAAHTKNTYLAAQYRRLAKRRGKKKAIMAVAHSILVIAYHLIQRKEPYRELGGDYFDKRRPEAAAKQFVKRLEQLGYSVVLQPQTTPVAA

SEQ ID NO: 104181 - protein, 338 aa, unidentified
MEFKRISIDTSKHVFTIHGVDEQERPILRREIRRAPVEPFFTKLAPTEVVLEACAGSHHWGRVLGGMGHRVRLIPPQYVKPFVKRSKNDRNDAEAISEAASRPTMRTVPVKSVDEQAATLIVKHRELMVNQRTQAINALRGHAAEFGIVAAKGCANVTALLAVLSAEEAIPAIAKAMFEQMGQHVTDLDAKIDALERQLLEQHKANAVSKLLAAIPGVGPITAITMALTVNPANFETGRHFAAWIGLTPREHSTGGKHRLGRISKAGSERLRQLLVVGAMSVIRYAKPGSKSATTWLLQLLERKPRKLAAVALANKMARIIWAMMARGETYRRQPVAA

SEQ ID NO: 104182 - protein, 417 aa, unidentified
MNDSEHWKQHRAYGALDWASEKHSVIIVDQAGKVIEDFEIEQSALGWKKFREKLQPYGSIPFAIETSQGAAVEQLLEAGMIVYPLNPKSAQAYRERKAPSGVKDDRLDAWSFADALRVDGQDWKALRPEEPLIKELRLLCRDEVSLIEQRTAFISQLRHALAEYYPAALEAFEDWTSVSAWMFLQRFPSPELLALAGKRQWQKFLHSRRLWGSDQGPRRMEIFAHATELSGSAPTVKAKSLLALSLVKMLFVIEKQLAVYRQRIEELFARHPDHDLFGSLPGAGPKIAPRLLSEIGDDRERFDGDARILQCYGGTAPVTKRSGKYRHCHQRWACDKHLRHAIYLFAEKSLSRCVWAQTYYQHHRQKDRSHANALRRLGHRWLKIIHKMWMDRTLYDPELHHRNQLQHGSWIFQLKEC

SEQ ID NO: 104183 - protein, 373 aa, unidentified
MKKRSSSGKSQKRTAKTKRTQEHVTIGIDLGDKTSRYCMLNNEGEILREGQVTTTKAGIVETFGSLGRARIAIEVGTHSPWVSRLLQKLGHEMVVANPKQVKLITESSRKDDRLDAQTLARLARIDPQLLRPIQHRSEEAQGALMIIRVRAALMAVRTSLVNTARGLAKSMGERLPKCDADQMGVLKAASLPPKLRQVLEPLLKEVASLTEKIKDSDREIEQIARKDYPETALLLQVGGVGPLIALTFILTVEDKDRFQKSRDIGCYVGLRPRRSDSGQSQPQLRITKEGDPYLRTMLVQGAHYILSHRGPDSDLKRWGLKLAQHGGKRGKKRAVVAVARKLGILLHRLWVTGEVYEPLRNHNLRQQQKNIAA

SEQ ID NO: 104184 - protein, 373 aa, unidentified
MPRYSTAFGMDVHLRSTTVCALDAETGETVTRRFRGNPWGEVAEWMSGFPGPSLAAYESGYLGFAPQRELAGLGVECVVAAVSRVPRSAADFSSKNDRNDAARMAKAILAHDISPVWIPSPEVEGIRDLAGAYDGATARLATAKQRLLAFLARRGFVYGGTTPAGNPRKYWTYDFLRWLDKVRPEDDGGVRALAALRNEVEAAAEARADLLSEYRAAVDASPIAAEVAALQSIKGCAFALAAAFSAEVGDFTRFRSGRQVTAYFGLAPSQRSSGDSVRLGGVSGAGNALVRKLAVEGSWCYAAARHQPKLMPRDTGVPLEIRMHGRKGSERLLRRREEMLARGTPAAKANAATAAELVRWLWALGMMCREGAE

SEQ ID NO: 104185 - protein, 400 aa, unidentified
MLSIGIDVSKGKSTVCGMKPGGEIVYAPFEVQHTREGMLELVSLLRGSGEEVRAVLESTGSYHCPVVAALLENGIFVSVINSLRMKRFCSQSIRKVKTDRIDAMQIALYGLAYWQELQPARLPEDTYRELQLLARQYYQMTSMLIKAKVDFNAICDQVLPGMQELMNDHAGRHKLSDFVLRYHHTTHILEMGETRFRKDYCKWAEKKGYRNCERMAALIFATAQNGIPVLPNAPSTQIVITEAIRVLHTVEASRDAILTQMQALAKTLPEYSLVREMPCIGDTLAPRLIAEIGDVRRFHSKRALIAYAGIDAPPYQSGKFCANNRHISKRGNRYLRKTGYEVMQSYVMHKPANDPIFTFIEKKRSEGKCGKLAMVAGLNKFLRVYYGKVTELYRSLPAIE

SEQ ID NO: 104186 - protein, 315 aa, unidentified
MTAPTERFVGIDVSKDRLDAHVRPDDTARHFANTPEGLDALLDWLRPLGVALVVVEASGGYERAVLAALSLGGLPVSLVNPKRVREFAKAIGRLAKTDAIDAAVLAHFAQTLRPSVWSMPDPDAQVLQALLARRAQLVGMRTAEKNRLAGLTVARVRRSVRNVIRALDREIRRADKDLGDAIRACPGWAAKDDLLRSIPGIGPTVSRTLLLEMPELGTLTREQAAALAGVAPINRESGQYRGKRMIAGGRAVVRSMLYLAGHAARRGNATLRAFADRLKAGGKAPKVIRVALARKLVILANAVLRDNTAWTLKTA

SEQ ID NO: 104187 - protein, 413 aa, unidentified
MVQAIIERCCGLDVHQETVVACLLVGAPGAHPMKEVRTFRTVTRDLEALRDWLLEAGVTHVGMESTGIYWRPVYAVLEGHFELIVGNARHMRNVPGRKTDVKDSEWIADLVRHGLIAKSYVPPRPLRDLRDLLRYRRKLVESQAAERNRLLKLLETANIKLASVASDVFGVSGRAMLRALIAGEASPEAMADLAKGQLRRKRTDLILALDGRLEAHHRFLLAMQLRRLEAIEADIAALDLRIGERLEPYSAPHALLMQIPGVDWVVAAVLIAEIGVDMSVFLSVYHLAAWAGVCPGNHESAGKQKSGRARKGNIHLRTILVGAAISASRTKGSYLKDKFHRLKARRGGLRAALAIAHKILVSAYHMLAKNLPYRDLGAAYLDQISQTRTVANLKRRLERLGYRVTLEPNAQAA

SEQ ID NO: 104188 - protein, 379 aa, unidentified
MLLTPCVFEMVQNAQTGGCSNNRPSLGLSPLTPEAKPETEPGTGPVSSQTRTVARVEPRTTRKGWKMAQMVPTAGIDVSKDRLDVAVHPTNEQFSVTNDAAGRRLLVRRLRPLAVRAIGIEASGGYERDAISALLKAGLPIRSVNPWKLRLFAKAAGVLAKNDRLDAGMIARFVATMPSRELRRDSAVEHLAELVTARRQLVDALQQAANQTEHLRDAGLRRLQARRIRQLERDVDQLDRLIAQAVAASPELNARCDLLCSMPGVGPVVAATLLALLPELGSLPNRPIAALVGVVPYDFDSGRMKGRRHIFGGRAAVRRVLFMAAQVATRFNPALKAFKQRLLATGKRPKVALVAAMRKLIITLNAMLRDNLAWQTATP

SEQ ID NO: 104189 - protein, 425 aa, unidentified
MNLLVLKGVPMALKIVYKICCGIDVHKTFVVACIASTNDKGITSYESHRFSTYTSGLKTLLQWLLDRNCKDVCMESTGKYWIPVYNILESDCSIVLAHPKYVKAIRGKKTDKKDAKWIADLFKHDLVAGSFMPPADIRQLRDLMRYRFKLTCFKSSEKNRLQNCLTVSNIQLGNVVSDTFGKSAQAILDKLLENPADTSFDLEPLVYKSLKKKLPELRDAIDGYITPEQAGKLKVIKAHYENLESRKAELEELILALTAPYQQELTILQTAPGISSPFTAIGIISEIGTNMEAFPSAKHLCSWAGLTPTNNESAGKKKSVRVSKAGCYIKPLLVQCANAVVKSTKHPEMRNRYLRLKKRRGHKKAIIAIARMLLTALYHMLKNGENYNAELYQKSDLLPVDREITVEQALMIARNQGYKIKSATA

SEQ ID NO: 104190 - protein, 343 aa, unidentified
MTNITTVGLDIAKNSFHFIGCNQAGKIVKKKMLRRKEVLVYFSRLPPCLVAMEGCSGAHYWTREITKLGHEVKQIAPQHVKAFLRGNKNDYNDALAISEAANKPEMRFVTPKTQDQQDIQALHVLRKKCERDRTANSNEIRGLLSEYGVVIPIGITNVYKMLPALFDSEKENGLSTLFKELLSQHYKKLTELKEHLVFYTKRIQTLSKSDECQRLQSIPGFGPIVSSAFYQHVGNGSAYKNGRCVSASVGLVPKQHSTGGKERLQGISKRGNRYLRTLLVHGARSVVNTLKDKQTPLANWVRRLILTRGKNKAIVALANKLARIGWVILKRGGCYDGELVTGK

SEQ ID NO: 104191 - protein, 355 aa, unidentified
MNSVRYIGMDVHRDTISVAVLDEDGRLMMQSVLATRAAAILDFVHGVRGTLQVTCEEGTHSAWLYDLLARRVAKLVVCNPRKNALLKSGSKSDAIDARKLAELLRAGMLSPVYHGESSALEVQHVARSYTLLTEDTTRVMGRLKAVFRGQAVSCAGKKLYGKRHREEYLRELEKRGLRKRAEYLYQELDALQQLRRQARRELLGECRKHAAAPWLQSVPFLGPIRAALLIGRVQTPHRFRSKRQFWAYCGLALETRDSGEYRVVNGQVERKRKPARIRGLNWNHNHEMKNLFKAAATTASIRAGVWREFYQELLAKGMRPEMARLTLARKIAAITLKIWKKGEPFDAEHLKLQAG

SEQ ID NO: 104192 - protein, 355 aa, unidentified
MDSTKYIGMDVHTESISIAVRNAAGKIVMECVIETKASMILQLIDGLRGDLQVTFEEGTWAAWLYDLLKPHVTEVLVCDPRKNALLKEGSKGDKIDARKLSELLRLNHLKPVYHGEHGLRTLKELGRSYLTITKDVTRVMNRLKALYRSWAIPCAGTEVYAPRHRSEWLGKIMEAGVRRRAEHYYQQLDVLRLLRQEVRRDLLVESKKHKAWKLLRQIPGIGPIRAALLIAIMQTPHRFRTKRQLWNYSGLGLETHDSAQYCVVEGQLQRSKKPGTLRGLNKNHNHDLKDIFKGAAMRSSTAAGPLHDFYEALLTQGRKPTMARLTLARKIAAITLIVWRKEARFDANHLKQQAA

SEQ ID NO: 104193 - protein, 422 aa, unidentified
MLEETHDAEELIERVAALDIGKAELVCCVRVPAARGSGRRRQEVQTYATMTRQLLVLADRLRELGVTRVVMEATSDYWKPPFYLLEAQGFEVWLVNAKDVKHLPGRPKTDKLDAVWLCKVAERQMLRPSFVPPPAIRRLRDVARYRIDLVGVRTAEKQRVEKLLEDAQIKLSVVASDIFGVSGRSMLAALITGERDPKVLAQLARGRLRAKRSVLEEAFTGFFTDHHAFLLAKMLARIGQVDTDIAELDRKLQELIAPFAPVVDRLDEITGIGHTAAQVILAEVGLDMGRFPTAGHLASWAKFTPGVKESAGKKKGTSATGHGNRYLARVLGEAAVAAGRTDTFLGERYRRITRRRGKKKAIVAVGRSILVIVWHLLADPDARYHDLGADHYDRHVNTDRAKRTHIRHLEALGYKVTLEPAA

SEQ ID NO: 104194 - protein, 355 aa, unidentified
MKKTQNWIGIDVAKASFDVGLLLNGNKVFKEIQLAHFPRTEEGFHDCMRWVKQCCDDSEQIVDDPLRVVLDSTGYYSMQLVSWIFKNYPELKPSIINPSQLKYFGAGLALRNKTDEVDARKHALFGYERQPRPYDPLDPHYMELRELNRQRTTLREELVSARNRASCEVVTLSVRRVQKSHINHLEKLIARIEDRIKKVVNSNDQLKNDVKLLLSIPGIGLISATVILGEFGDLRRFGTAREISAFSGLSPSRYQSGKKEKRSRISRKGPSHLRYKLYMPALASTRGDNDLARVYNRLVENGKPKKSALCAVMRKLVVLSRSIIVNQVPYENNFEQKRRAKNEFQQAGISMTKCA

SEQ ID NO: 104195 - protein, 338 aa, unidentified
MEIKAIGIDLAKESFQVYGIDAQNKVVIDKKLNRSNFKVFMSRRPISRIYMEACSGAHYWARLFKSYGHEVKLIAPHRVKPFVGHQKNDRNDARGIVEAGLRPEARFVGAKSLWQQDLQSLHKVRDLKLKHQVALINQIRGLMSEYGVILPKTHSKFKTLMVETLEDGENGLSPLIRDECGRLFKDYLVVSDRINEVEEKIKAIAKESEFVKRAEREVKGVGYLVASRFLASIGDVGAFRNGREVSAWLGLVPRQHSTGGRTRLGRISKHGDSELRKFIVQGARAATIAAMRKKDFDWDHEKIHRLSEQKGFNVASVAVANRNVRRMFAILNKLSVVQ

SEQ ID NO: 104196 - protein, 387 aa, unidentified
MKIMAGIDLHSNNAMCGLVDSEGKRLLHKKVPCDLRCVLSVLEPYKQRLESVAVESTFNWYWLVDGLQDHGYKVALANPAAMQQYNGLKHTDDKSDAFFLGELQRLKILPTAHIYDRKTRPVRDLLRRRLLLVHQRTSLLLSLKSLHARTSGCSLSLGLAKALLPEQAAKLFRHPADQLIAREQAQHIRQLSQSIEAIEKMVLGEVKQLFCYRQLQTLPGVGSILALTITLETGDITRFPSAGDYASYCRTVDSARLSNERKKGQNNEKCGNKYLAWAYVEAANFAQRSDGPCRRFFDRKLAKTNRFVATKALACKLSKAAWYVMSQGVDFDSARAFPGPRPEAQTQRSSKAQAGQATKQTELKKKTDLGRASVNPSKGSGSKTLRD

SEQ ID NO: 104197 - protein, 317 aa, unidentified
MNTIPAIPSPVHIGVDVAKDELVADLAGSTARFANHPHGIAALLRAALQCSPAACLVCEATGGYEQALATACFKAGMPVCIVPAQRPRHFAKALGIRAKNDPCDAALLSRFGSQTLPQPARAKDRARKELESLMRARGELLDSLARENNRNEHHSHPLACKLAKSRIARLEKDIAEIDAAASEVIAGDPLLARADVLLRGVTGVSHQSSRALLAFMPELGTLNRREIASLAGLAPFDRDSGNKQGKRFIQGGRARVRSTLHMAGVSASRFNKVLAPVYRKLREAGKPFKVAVTAITRKLLVYLNSIMADFLKNQIAT

SEQ ID NO: 104198 - protein, 430 aa, unidentified
MRGSRAVQKQHGGYDMEVLYGICGGVDVHKKLLVVCLRCGNKTETRSFGTTTQELFDVAKWLKDNKCEMVAMESTASYWKPLYNVLEAETIPAMVVNAQHMKAVPGRKTDVKDAEWIADLCQHGLLTASYIPDKDQRELRELVRYRKSLIEDRGRELNRLQKMLEGANIKLSGTIKDINGKSGRNILNKVISGETIDEKVYDEMYAKKEIAHNLKGTKEQIIADLNGVLTDLQRRMMKELMTHLDELDLHIKNLDDEIDHFMTPDEQTAATTIQEIPGIGSTSAQAIISVIGTDMSRFPSDRHISKWAGLCPGNNESAGKRKSGKTAKGNKVLRTTLITCAHAAVKVKDSFFRAQFARISAHRGSKRAYVAVAHSMLIAIYHVLSTGEVFKDLGGNYYNQFNKERKANSMVKRLKSLGYEVTIATVTATA

SEQ ID NO: 104199 - protein, 317 aa, unidentified
MKALLIFVGIDVSKAQLDVAIRPTATQLSVANDSAGIKALVKRLMKLRPTLVVLESTGGLERQVMCALIHGEIAVAMVNPRQIRDFAKSTGQLAKTDRLDATILAHYAEAVRPQPRPLPDANTVKLRALTGRRRQLIGMIVAEKNRLATADPSVRESIADIISLLEQALDHIDQALDRFIEQSSVCKDKEQRLRTTPSIGPITSRTLLAELPELGDLDRKQISALVGLAPFPRDSGTLKGRRCIWGGRAAVRAALYMATLVAIKRNSVIRDFYNRLKAKGKVFKVALVACMRKLLTILNAMITHKTTWSDSFSLQTT

SEQ ID NO: 104200 - protein, 359 aa, unidentified
MTHSTNILPRSVDYDQTLVLAIELSNKSWVLAAQVPGLSQTKAKRTIDPNKNDLLAAIDGYRTRAAAAGRSVKRVIASYEAGWCGFWLARWLMAHGIEVHVVQPSSVPVDRRMRRGKSDGIDAELLLRTLLAWLRGEPRVCSMVPIPDEADEDARRCVRERSELVSERVGLVNRIGAILATLGADDYNPLLQSRRRRLTELRTGLGDPIPPNALAKIVRLLTRLELVLAQIVELELERDAVARTDAPDQAGKMIQQLISLRGIGVQSATVLVREAFVRRFANGKALGSYAGLTSTPYSSGGIDREQGIGKAGNRRLRTVMVELAWLWQRYQPGTAQVVWFRERVGSTGRRVHGGSLSTV

SEQ ID NO: 104201 - protein, 337 aa, unidentified
MEVLRPRCAAIDVGKDIVVAAVRVQEGTAIQRGCRTFGTKRRELLALAEWFSGFGITHVVMEATGSYWQSIWRVLDGALDLTLANPAQIKNLPGRKSDVNDATWMADLHAHGLIRGSFVPPQEITALRELTRTRKQFVREIARHTLRIQKLLDVAGLKITGPISEILGVSGRRIIKALIRGETNAERLADLVDPHIRASRDTLVEALQGELTPQQRRLLKMHLKLVESLESAVAQIDGDIAKAVRPFRPVIEHLIEVPGLSDISAPALVAEIGVDMSRFPTAKHLVSWARLCPRLDESAGKIRSRRTLKSAAWVKTSWSKPHGAQSGSETATSAPSF

SEQ ID NO: 104202 - protein, 379 aa, unidentified
MQTKLRFIGLDVHKETIVMAVAEGRGEAVVLRQIPNDPARVLKELRKLGPPSQLKVCYEAGPLGLGLQRLLAKHKIDCVIVAPSLIPVRSGERIKTDRRDACKLAHFLRSGDLTPIWIPDEQTEAIRDLERSREDARLAERTARQQLLKFLLRHDRKFTQGRCHWTGIHWKWIRQQRFELPALQAVLDDYVHTAQQATARVQRLTTQIAEHVQEWALAPLVTNLMAFLGIKLVTASGISAEIGNFTRFETAGSFMAFTGLVPSEHSSGGSRRQAGITKTGNRHVRRLLIEAAWHYYDARPGVSAELQKRRAGVPQEVVDIAEKARLRLRRKAARMRSAHKPPNKITTALARELAGFLWAAARATPLPQTSPTKAERLPV

SEQ ID NO: 104203 - protein, 392 aa, unidentified
MDITPIHRRVVGLDVHQSKITACALIEQPDGSVAVEHREFGGFKRDRRALAEWVRGFDPEVVVMESTGIYWKSPYAALERVGVMAWVVNARHARNVPGRKTDLSDAQWLATLARAGLLRASFIPPAEIRHLRLIARQRQKLVGMLAAEKNRLHKVLTDAGIRLNVLVSDVHGASARAMIKALLADAPMHAILDLAGRLRASREELFEALQPEELSTRHRFVLNEVLAHIEYLEAMIARFEQELLAGLAPWEPQVCLLETVPGIDRIGAAMLLVEIGTDMASFGSAERLASWVGICPGNHESAGNAKADARARATPGSVACCASSRKPPPAPAVRSRTSFRPCPSARDTSAPSWPWRTSSCASSTPCSIMRPPTRIAPSITRLSSCSATRRAG

SEQ ID NO: 104204 - protein, 318 aa, unidentified
MNTNTLQNINVGVDTGKSQLDIYIRPLDIYFTVPNNDKGIKEAVRAIAKHQPQRVVIEATGRLEMPFILACDQAKLPYVIANPLRIKRFAGAIGQRAKNDRLDAALIAHYAEKVQPDLTELKAENIRLMSDLVSRRNQLLSIQTMERNRLQILPKNIASTITPILTALKNQIEKVEAKISKLIDISPEYQTKNEILQSMPGVGKILAASIISNVPELGYITNKQASSLIGVAPIVRESGRYKGKRIIQGGRTQVRTVMYMAMMSAIQCNPVFKTTYERLLAAGKPKKVAIVACMRKMVVILNSMLRDGVMWDNNSAKN

SEQ ID NO: 104205 - protein, 376 aa, unidentified
MGTPSAQTLDDVGVRKMFQELEEVPMTMVGGLDVHRQQITFDYVDDDGLVHWGQIRPATRKTLRGWLAEHCPDGDGEFALEGCTGWRYVSEELAAAGLGVHLGDPAEIAVLRGPKKRAKTDRADAKLLRTLLLEGRFPESWIPPAHVAEIRSLGRLYYTLMDERRAWQQRIHAQLFHQGCPPIKALLSASGRDALARAPLSAAGRQYVDTALRRIDELSAEIEPLRTQLANFARRQQGCQALQRHYGIGWLCAAIIWAEIGDTRRFTSSDQLVRFAGLDITVYSSDSKRSPGHLSRQGSPELRWAAFEAAKCAARRGSPDYAYYHRQAAKHDGHNGKNPTLAVERKILRRCYHTLRDLGDAALALPDTRPQQEVAA

SEQ ID NO: 104206 - protein, 362 aa, unidentified
MIVIGTDTHKHTHTAAAANSATGELRGGATAPARTGGFARLLDWARGIDPERIWAIEDCRHVSGSLERYLVAHGERVVRVAPKLMGQSRRPERTRGKSDSIDAAAIARAALEQGPETLPGAHLDQDALQIKLWLDHREDLVRARSDDQQRLRWHLHDLWPDYEIPAGALDRIVWLDRVARRLARAEQSARVVIARELVVEIRRRTRRASELQRQIAGLVGDYAPQLLELPGCAGLTAAKIVAETAGATRFASDAKLARLAGVAPIPASSGRTSRHRLDRGGNRQLNCALHRIAVTQGRVHPPARAFLDRKQAEGKGRMEALRCLKRHLARAVWNALRDSESLDPDTRKLRATSTPAVAAGLT

SEQ ID NO: 104207 - protein, 460 aa, unidentified
MNKKRTYGSVDVEKIDPLSIVQMLMTIGCIVAVDVAKTKFVAALANAAGEVLRILRFEHPRQTLAFLRIVEALQANKLAPRVVMEPTGTYGDALRYQCNVRGARVEMMSPKHTHDIAEVLDGVPSMHDPKAAVALAKLAVMRPGRAWEPDTEEKREVRALLDRRWPMSKTHELYHGHLEAMLARHWPELGSLLNIREQRSWMTLLQRYPGPHLVAASSNEAAETLRKASRGRLAKECVAAVVDSARTTLGMPMMKGEETRLRFVVEQIARETQGIEALDAEIKERVDKDEMMSRLAVVVGSACAASILSHVGSPLAFETASALEKATGLNLKVKSSGEQQGNVHITKRGPAQVRQLLYLAVLRLVQSDPIVAAWYRARTSYTPKSKQKALVAVMRKLVRALWHVARGATFDASKLFDVRRLKVTPTSETAADAAPATTDSAPASTLPKQRKQGGASQPHA

SEQ ID NO: 104208 - protein, 389 aa, unidentified
MPTVADRPDAPTAIQSNLAAIFVSLELSRSIWLITSLSPGSGEKMSKHSVRAGDVAGLLARFSELKQKAFARTRKSFPIVVIQEAGLDGFWLHRALEQEGVESHVVDPASIATSRRRRRAKTDRIDGEALLRTLLAYKRGEPRVCTMVRAPTPEDEDRRRLCRERKVLIAERVEHVNRVKGLLFSQGISSYEPLRRDRRQRLEDLTTGDGRTLPTHLKVQISRELDRLELLLAQIKLAEAERDGLLAEGQAAAPESPTRMLLEFRGIGAECAATLWLEALFRHFDNRRQLASYAGLAPTPWQSGSVDREQGVSKAGNPRLRALLIELAWLWLRHQPQSALALWFKERVKRNGGRMKKTTIVALARKLLVALWKYVTAGIVIEGAVMKPV

SEQ ID NO: 104209 - protein, 292 aa, unidentified
MTDGKNASSCRYVALDIHKHYSVIAAVNRDGQIVLDPVRIEHEDLEAQLRKKLLPSDQVVIESTTNAWHIYDLLEPLAAKVLVANPIRVKQIACAKVKTDIRDTLILARLLAANLVPTVWVPPVEVRDLRYLLSQRRRLVGMHTQTINRMGSVAHRHHLNHPKGKRYIEKNTEWQQDDELSDSEKFQLELDMATGEHLDGQAKKIAEKIARMSQEEPWAANMMYLMQLPGFGVITGMTVLSAIGDIARFESSGKLSSYSGLTAGVEQSGTKNRGKGITKEGRKELRWAMVEV

SEQ ID NO: 104210 - protein, 346 aa, unidentified
MEHYAGLDVSLKEISICVVDHDGKTVARGTCPADPEGVAGWFRNRSLTPHRIVHESGMLSIWLQRGMTKLGLPTTCIDARKAHKSLSARLNKSDAADAEGLAQLARTTWFTPVHIRSEEADRLRSLIGARERLIRLRKDLEGHIRGVLKTFGIRMTGVGQGRQRQAFRDQLVAAGETDPILRTIADGFVAAHSTLCQAADDLDKAVKKKAQAHPVARRLMTIPGVGPVNVLSFIALIDNPDRFSRVTDVGAFLGLTPKRYQSGEMDWSGRVSKCGDGTMRGLLFEAASCLIRQVKRFSPLKSWAVRLAGRRGFRKAAVATARKIAVLMLTIWKSGADYQWTKEATA

SEQ ID NO: 104211 - protein, 387 aa, unidentified
MPINDHLVQNETAIRSDVASIFVSLELSRSRWLVTSLSPGSEKMSKHLVAGGDGAGLLDLLIRLRDKAEQRAGTPVRIVVIQEAGLDGFWIHRLLATDGIESHVVESASIAVPRRHRRAKTDAIDGAMLLRTLMAFKRGEPRVCSMVVPPRPAEEDRRRIARERRTLIKERVEHINRVKGLLASQGITGYQPMRGGCRERLEELQTGDGRPLPPRLKAELGRALDRIELVRRQIAAVEAERDALVQADDVRARSPAVLLMQLRGIGPEFATVLWMEGLFRNFTNRRQLAAYAGLAPSPWKSRCVDREQGIAKSGNPRLRTTMVELAWLWLRYQPDSALSRWFRERVGSERGRIRRIAIVALARKLLVALWRYTTLGDLPVGAALKTT

SEQ ID NO: 104212 - protein, 402 aa, unidentified
MNSVGIDVSKGKSMIAVMRPFGEVVVSPFEIHHTDSELCELTKLLSGLSGETRVVMESTGNYHLPVAWLLNDSGFYVSVVNAMLVHDYGNNSLRRAKTDKKDAIKLANYGLDHWLTLPRYVPEEDTRLMLKNCYRQYQQYSKVRTMLKNNLISLLDTAFPGANRLFSSPPRADGSEKWVDFVAAFWHCECVCGLSEKAFISKYQKWCKKCSYNFSEDKALDIYASACGHFSVMPKTDTAKLLVEQAVSQLRATSAALAALKLEMQSLASSLPEYPVVMRMFGVGPALGPQLMAEIGDVRRFHSKKALVAFAGIDAPPYQSGQMDIYSRSISKRGSASLRRTLFLLMGVYLQNAPVNEPVYQFMDKKRSEGKPYKVYMMASANKFLRIYYASVKAYLDSLDEA

SEQ ID NO: 104213 - protein, 470 aa, unidentified
MQDKNRKDGPASKKQIEGLPVVRRNVAGIDLGSERHWVCTPTTDGTAREVADFGATTPELIRLGEWLQARGVESVAMESTGVYWIAPHEILEARGLEILLVDTRQLARVPGRDKKTDPSDCEWIQRLHSCGLLRGSFRPPEEVCMLRTLERDKANLVAESGDWVRRMQKSLDQMNVRVHRAVSDIDGVTGMAILRAIAGGERDARKLAKLRDPRCRKSEPEIAEQLSGHWREDHLFTLRQALKMYDAIQQRIVDYDQEILRRLAAMQRQDFRDQPPPKVKNRQKAQAMKKRGEEPMREALFRMSGVDLTAIDAIGVGTVQVVLSEYGPDLSRFATEKEFVSHVTLAPRRAMSGGKPVRKKRRNTASTRVAGALRMAALSLRNSSTALGGYYRKLARRIGADVAVFATARKLATLIYRTLRWGQQYVDEGAEAFEKRYQHIRMTALKAKAKELGYELLPSVQAPVEGEVTG

SEQ ID NO: 104214 - protein, 340 aa, unidentified
MEKEVKFYLGMDVSKLWVDIAVLPVINHQKQPMLTARFDNTAAGMKALDQWLKKLSVTFDQNSLLVIENTGVYHRRIWEYCSTHGLPIYIGNAAHIKWSFGITRGKNDVVDSQRLCLYAFKHADELTATAVLDPVFIKLKDLMTARTRLLSQMGSIKVYLKELLLSNSKEVQQTMEKAHKAALQGLEKSMNLIEREIDKILKENQALKSNYELLISVPGIGHLTAIYLICCTNNFAGKRSGKQLACYAGVVPFESTSGTSIRGRNKVHQMANKDLKKMLHLCALAAIKYYPEFKSYYERKKAEGKNTMSVINAVRNKIVLRVVAVVNKQQPYIDYYKKAA

SEQ ID NO: 104215 - protein, 352 aa, unidentified
MNPQEKKPKKEVAKMYYTGIDLHKKTSFITTIDESGKVVFRRNFQNREEHILNYFVNLNGSTKIVIESMCSWYWLYDLLRAHHFNVVLSNPLKTKAIASAKIKNDKVDSHMLAQLLRADLIATVHVCSLKTRKLKELLRHRRRLVADATRMKNRIHMLLMKNNISIAVSDLFGVKGMKYLKDIELPVYHQQQLKSYLTLYGHLTEQIEPLTKQIRDLANSNPMAQLLMTIPGIGPLTAMFIIAEIEDISRFPSYRNLSSYAGLVPSLDASADKSRTGRITKQGSPYLRSALVEAAQVIPRMKKTRLNVFFRKRIVRAGYQKAIVATAHKILQVVYYVLKNQTPYQEEYPAKA

SEQ ID NO: 104216 - protein, 382 aa, unidentified
MEPNMTAGTLPKPIGPVLYLALELSEREWKLGFTIGFAQNPRLRNITGRDIDSLKKEIRLAKHRFRLPETTVVISCYEAGREGFWLHRCLTSLGILNLVVDSSSVEVKRRARWNKTDRLDAKKLVSMLMRYHHGEYKVWSVINIPSSSIEDYRQLHRELRALKKERTQHTNRIDGLLATQGLSISISPSFPDHLEKLRTWDGRLLSPYLLTRLEREYRRILLIQEQIKEIDDLRHTLLRTSEDPAIEQIRRLMKLKGIGINSAWIFVMELFAWRNLRNRRQVGAIVGLTPTVSQSGDSSRQQGISKAGNTFVRDIIIEIAWGWLRYQPQAKSSRWFQERFGHGSKRLRRIGIVALARRLLIDLWRYLETGALPEGAVLLDPS

SEQ ID NO: 104217 - protein, 341 aa, unidentified
MKNKSFIGIDISKNVIDVSIFCEETPIKDFSHDVFNNSRKGFGEMCTWLKKNHVVLSNSLFGMEFTGSYSMELEKFLNARNYQFCMLSTHVVKHYPMGPKDKSDKIDSAKIADFLYRYNGTECVKPYNMPDKTMQKLKALMNERKFLVEQRTCFMNRRQLCITKEDAQLYDGYIKKFSRDIENIELEEQKLLATDDSLLSTYKNLLTIPGIGFVNAINVIVITRNFTAFETARQYASYVGVAPHFRTSGTSVKWRPRPSARCDGQAKADLSMAATVVVQYDAELQSFYNRKLGGKQDSDTKRKALNAVKFKLVLRMFAIGKQNRKWEPLDSKSSNEKLAIS

SEQ ID NO: 104218 - protein, 284 aa, unidentified
MEKVTTVGIDLAKNVFSLHAVDREGQVLLRRTVRRDQLEALVAKLPACVIGMEACSGAHEWARRFAGYGHTVKLMAPKFVAPYRKSGKNDGNDAEAICEAVSRPNMRFVPVKSMEQQALLVLHRVRQGFVSERTATINRLRGLLSEFGVVLALRAKTIRREAAAASEELPMLVRQAVAELLEHLRLLDGRIEAHDREMEAQARLCEPARRLMKIRGIGAITALAIVASVGSAREFKNGRQLAAWIGLVPSQYSTGGRARLGHISKQGDPYLRCLLFQGALGAGT

SEQ ID NO: 104219 - protein, 361 aa, unidentified
MNATTVAVDLAKSVFQVAVADENWRLVESHRLTRAQFERWFANRQVSLVIMEACGSAHHWARWLNGLGVEVKLLPAAYVRAYVKRNKTDAADACALLEAARCAEIVPVRVKSVEQQALQGLHRTRSLWMGTRTSRINALRGFCREFGLMIPQGARTGVEAISRALADPGSAIPLLIRRTMLLLVEEIRLLEARIAQLERELTELARHSPACTTLLTIPGIGLLTATAMVAATGGEVKHFKDARHFASWFGLTPKEYSSGSTRRLGRISKRGDRYLRMLLTHGARALLRAATLARQAGRTLDGLRHWATEIQGRTHHNKAACALANKLARICYAVLRDATPYGLPQPRQAKKLNRTAFVVAA

SEQ ID NO: 104220 - protein, 411 aa, unidentified
MEQIYERVAGCDVHRDQVTVCVRTPGPRGGVHKDKARFKTTTAGLIEMADWCGERAVELVAMEATGVYWKPVYYALEDRFRVWLCNAYHVKNVPGRKTDMSDADWLADVAAHGMVRPSFVPPVPIRELRELTRYRKKQIDTRASELARLEKVLQDAGIKLTSVASKVLTQSGRAMIQALIEGEGDPGALAELAKGKLRPKIPELTAALSGHFGAHHALVADRVLAHLDFLDDTIAQLSRQIAERVAEGYQPAQDLLLPIPGLQHTTVEVIIAETGADMSCFPTPGQLASWAGLCPGNHESAGKRRKVGTTAGNQWLRRTLIESARAAARTKGSYFGAQYHQIARRRGPNKAAVAVAHSLLDVIWHALSTGEVFTDPGADYFTTRQDPEHRTRRLVNQLERLGYTVELTQTA

SEQ ID NO: 104221 - protein, 351 aa, unidentified
MSQKANAVAIRTIGIDTGKNTFHLIGLDQQGTIVLREKLARGRVGRRLANVSPCLIGIEAGLATHYVARELLALGHDVRQIPPAYAKPFRQGHKNDFRDAYAIAEAVLRPSTRYVPVKTDDQLDLQALHRVRSRLVGQRTAVINQIRSFLLERGIAVRQGPRFLRQQLPEIQAKRIDLLSPRMIGLIEDLAGDWRRLDERIECVTEEIEQLAHGSESCRQLMTVPGIGPLIASAMVAAIANGAAFAKGRDFAAWLGIVPKQRSTGDRTILGHISKRGNRYLRTLFIQGARVILLRPANWARHSFGPWLTAAAKRLHHNVLATALANKLARIAWTVLAQRRNYETRVVTEAA

SEQ ID NO: 104222 - protein, 355 aa, unidentified
MDSRKYIGMDVHKESISIAVGNAAGKIVMECVIETKASMILQFIGGLRGDLQVTFEEGTWAAWLYDLLKPHVTKLVVCDPRKNRSMREGNQSDKIDARRLAELLRLDHLNPVYHGEHGLRTLKELVRSYLTITKDLGRVMSRVKALYRSWGIPCTGKQVYTSRHRAEWIGKISEPGVRRRAEFYYQQLDALRILRQEVRRDLLAESKKQKAWKRLCQIPSIGPIRSAELLGILQTPHRFRTKRQLWTYCGLGIETHSSADHRMVEGQLQRAKKQVEIRGLNENCNHDLKNLFKGAAVVAATKPGPFEKFYAELLAKGMRPEMARLTLARKIATIVLIVWKRGVSFDAQHLKPQTA

SEQ ID NO: 104223 - protein, 425 aa, unidentified
MREHDTRAEAGTVNTPGRGTMFEIEDVGVFLGLDVGKSAHHGHGLTPAGKKVFDKPLPNSEPKLRAVFDKLTAKFGTVLVIVDQPASIGALPLTVARDAGCRVAYLPGLAMRRIADLYPGEAKTDAKDAAVIADAARTMPHTLRSLELTDEITAELTVLVGFDQDLAAEATRTSNRIRGLLTQFHPSLERVLGPRLDHQAITWLLERYGSPAALRKAGRRRLVELIRPKAPRMAARLIDDVFDALDEQTVVVPGTGTLDIVVPSLAASLTAVHTQRRAMEAQINTLLEAHPLSPVLTSMPGVGVRTAAVLLVTVGDGTSYPTAAHLASYAGLAPTTKQSGTSIHGEHAPRGGNRQLKRAMFLSAFACMNADPASRAYYDKQRARGKTHTQALLRLARQRVSVLFAMLRDGTFYQSRTPNDVELAA

SEQ ID NO: 104224 - protein, 274 aa, unidentified
MTITTIGIDLAKNVFAVHGVDQNGKTVLVKSRVTRAALPGLIASLPPCVIGMEACSGAHYWARLFLQYGHEPRLMAAKFVSPYRMAGKSGKNDAADAQAICEAVRRPHMRFVPVKDESQQAMQCLHRTRQGFIEEKTATYNRLRGLISEFGVIAPQSTDALRHMVSAQKSSLPLQVQQCVDDLLEHVDRIEANITEYDRILSRIAKTDHRSQRLMKLKGVGPTTACALVACIGNAHDFKNGRQLAVWLGLTPSQYSSGGKSKLGRITKAGDSYL

SEQ ID NO: 104225 - protein, 448 aa, unidentified
MKRTKKMQENGHRISGKTIIGIDPAKNKHQAIILRPDGSICGRSFAFETNHRGFTETLPQRIQQRLATPEETEVVYAIEGSCALWQNLAFHLSEQGQEVVLISPLATYHARPSITGDFSRTDQKDAELIARLAQQGSYREMPGHSDHQRAMHRMAICYDKLRKSRQRHYARLRALVERLFPEFLSVLTLDTKTARYLLSEALLPGEFLALEPGRTVLGMARASRHQHGQATLLHLQELARHSVGQTRGPAEGKVEHLAAETWLAVIELIEAQIKALTEALVEAACEHPCFASIKSLRGISDLMAALFIAELRDPGLFRHWKQIEKMAGLNLYVSDSGQYRSRRRISHLGNSRLRWLLYQMASETSKYVPEVRCKYLTRRLKHGGSRTKHLVGCIPQLLQLLMALMRQGRCYEQRPESLAQMQQLETRYQAVQTSKGKRRAQGTRQKAA

SEQ ID NO: 104226 - protein, 398 aa, unidentified
MPKYQDLSRSLAAFDQNSTLVAVIEMGSEGWLVGALVPGLKKDPRKKLSPDKQSLLALLHRWCAEAAKAGRAIKRVCVAYEAGRDGVWLARWLREQDIDAYVIHPTSIPVSREHRRAKSDRLDLRLLLRAFLGWLRGEPGHCSMVAIATVEEEDGKRPLRERETLTGDVTRLINRMKSLLVTHGIRNFKVTLKKAGEKLAELKTAWGEPLPPESLAELQRSFERLRQAKQQIAEIDKARRRRLEKAPEAGVHPMILILARVYGVGLMTAESLVREVLYRNLRDRRAVARYAGLTGSPDESGKKRREQGLAKAGNGRIRRALIQLAWRLLRHQPESALVKWYRARTGDGRRDTRKVMIVALARKLLVAFWELVTNGTVPEACGFIQRKSPGELWPRSRA

SEQ ID NO: 104227 - protein, 408 aa, unidentified
MAGRIAGIDVHKKVLMVVVIDARAPEEKPERRRFATMPTELRRLSNWLQAQGVEEAVMESTAQYWRSVWMELEPHMCLHLAQAFSNRAPRGRKHDFKDAERLVRRLIAKELILSFVPDGEQRIWRNLSRMKLQLVRDRVRLRSQIECLLEEMRIKLSVVVTDLLGSSGMRILHALAQGETDAEQLALLGDDRLKCSEEQLIEALTGRTHPVHAQMLMLQLERLRLLDEQITKLNSLLAQAMTPHQETVIRLAAVPGLGIDSAQQVIAEVGVTAATFSSAAEFTSWVGTCPGREESAEKNSSSRSAKGNKYMRRLLNQAAHAAARSKGTHFQAVFRRLLPRLGYQSAVWAIAHRICRIVWKILHQGVSYIEQGTQPEPKLLIYRAQYLAKQLRKFGYNIQITPPNTAPV

SEQ ID NO: 104228 - protein, 477 aa, unidentified
MSKGSGTTRGDRRRNERRARLRRVLPRDGAVIGIDLAEEKQAIAVIDHDLRVLARKTVRVKVFRLGEALDWAVAQARARGFGPVSVACEPTGPRWLQVQQLCAERGLPLVCIQPLVSHIAREQQDFTSHKTDEADCVMIARLAVELHCYLPEQLDETWAHLRHLGRRRNQLITAATASVQRIRDFLSVAWPVAAETCVRPFESVTWLAAMQVVMSRCGADPAKLAPCGVEAFAVLVRRAVPCWGGVRPSGRVCQAVFAALTDTQGVVASHRRGLLRRCTDELDDLQRTRARLRAVEADMVTVLAQLGLVRLADIPGLTAVGAAAILAEAGDPRRYDSSSSLVKHAGLSPADNASGAFSGQAHISRRGRPGLRLTVWRAVWAVLIHNPVMAAKYQAMTQAADTAAAQAASASADAGSRQVSAAAAAARARRAKARVACAASLLRWIYSMVVHGTGWDPAVASGAAACQHASSSRQQAA

SEQ ID NO: 104229 - protein, 319 aa, unidentified
MAQNDLVVAGIDVAKDKVDVCIRSLSLRRTFASTAEGRRELATWLRRKKVGKTVMEASGGYERDWAKALRGAKIEVRIVDPKRVRSFAQSAGRLAKNDTIDAEMIAWFAETFGEARGQAYDAAREQLHQMVHARQALKDMQSRLASQGEHAVPAAVQRIHARISKTIAVELVKIEAEITTLIQATPRFAELAEIIESVPGLGRTTSAALIADMPELGQANNKIVASLLGVAPYDDDSGRRRGERHIKGGRRRTRNIFYMACLGAATQHNPVLKAFYDRLVAKGKLKKVALTACMRKLISILNIMIERRQKWDTQRYAVS

SEQ ID NO: 104230 - protein, 391 aa, unidentified
MKLYTGMDLHSNNTYIGISDEDDKRVFKGRFPNQLPVILKVLEPYEKMIVGIVVESTFNWYWLVDGLMENVYKDRVHLAHPAGFQPYKGLKHSSDKTSAFFLGKLLRLGILPEGHILPKNDRHLRDLLRKRLMLVQQRTDHLLSLKSLLNRNFCLSPNRNELKQISQEDIDALIRNEHLNLSAKTNIDVSDHLESRIKQLEKKILADTIEKPYYLKLLTVPGIGKVLALTITLETGDINRFEDDGNYASYSRCVSSKRISNEKNKGSNNRKNGNKYLGWAFVEAANFMKRYCPEAEAFHRRKCLKENYTLATKALACKIAKACFYIMKDDFAFDVEKMFGKPLKSKKDKGRGSKPDRGLAAKPRAPIGKTAAADFNSGYNNSDIEKMQDKN

SEQ ID NO: 104231 - protein, 417 aa, unidentified
MGRVFEQVFERVAGLDVHKAQVTACVRVPDAEGRRVAHLAEFATTVAGLLALADWLKGYAVTHVAMEATGVYWLPVWHMLEDDFELTLCNARHVKNVPGRKTDVSDAAWLCQLMEAGLLRGSFVAPKPQRRLRALTRYRKTQVAERQREANRLHKALEDTGIKLDCVATDILGVSGRAMLDALVAGTTDPEVLADLAKGKLRAKIPALREALQGRFEAHHALIIGAILSHLDFLDEHIAELSEAIEAELGPTGQAAITLAATITGVAQRTAEAMVAEIGTDMAVFPSAGHLASWAGRCPGNDQSAGKRRSGHRRNGSKFLGISLQEAALAATRVKGSYLQAQYQRLKPRLGHRRALGAVQHSMLVAYWHMFTTGETYRELGGDYYQRRDPERLTKRLVARLESLGHTVTLQPLSQAA

SEQ ID NO: 104232 - protein, 419 aa, unidentified
MTDQQEFAAFIGIDWADAKHDICLQAAGSEHMESTVLEHKPETIDAWVRGLRQRFGARPIAVCLELDKGPLVYALRKYDFIVLFSVNPSTLAKYRAAMTPSGAKDDPTDAALALEFLTKHPERLARLNPQSPGIRALAQLVEYRRRLVDDQTRITNRLTSALKNDFPQPLEWFGEKSTTLFCDFLERWPTLKALQQARRSTLERFFREHHVRDAGLIERRIHAIKAATALTRDEGVIAPNALLVQALVTQLRATLKAIAQFDQAIVEHAHPHPDFALFNALPGAGAVFAPRLLVAFGEQRQRYRCAAEVQKYSGVAPVTERSGKTSWVHWRWQCPTFLRQTFVEWAGQSIQHSFWARAFYQQQRERGKSHHAAVRALAFKWLRILFRCWQNRDPYDESRYLEALKRRGSPLIHNLAKSM

SEQ ID NO: 104233 - protein, 404 aa, unidentified
MRFVGIDWAEDHHDVCVLDPAGEVVAKGRVPDGIEGVRRIHELVVKGLGEDDEPQVVVGIELDRGLLVGALVAAGYEVIAVNPLAAARYRERFSVSGAKSDPGDARVLADLVRTDRHQHRVIAGDSELAEAVKLVARSHQSAIWARRRLANQLRSALREFFPAILAIGDPLERDVLSLLTVAPTPEQARALSRSKIASALRRDGRQLHLEAKATEYQALLRREALEQPPTVARTYGQIVKSLVEVIGATTRQIAELEEVLTEDFSQHPDAEIYRSLPGLGVVTGARVLGEMGDDPGRYVSAKARKNAAGTSPLTVASGTRRIVRARHVRNDRLADALYWWAFNAISRSPGARSLYDQRRAVGDGHAQALRVVSNRLVGILHGCLKTHTPYDEDLAWGHRGSLAA

SEQ ID NO: 104234 - protein, 356 aa, unidentified
MSYDVKYIGMDVHKEAIVIAVLNGTGKMIMETILETKASSILQFIHGLRGELHVTWEEGTWAAWLYDLLQPQVPHIVVCNPRRNALLKEGSKSDKVDAQKLADLLRTGMLRPVYHGENGLRTLRELARSYQTISKDLTRVMNRMKALYRGWGIPCAGTQVYAARSREEWLSKLPQVGVRRRAELLYQQLDGLQALRREVRPEFLAEGRKHKAAKLLRQIPCIGPIRAARLIALMQTPQRFRSKRQLWTYSGLGIETHDSAQYRFVSGQLQRSRKPQQIRGLNRNHNHEMKEIFKSAATRASCSRGPFHDFYTGLLAKGMRPEMARLTLARKIAAITLTLWKKEERFDVEQLKTQAA

SEQ ID NO: 104235 - protein, 429 aa, unidentified
MRTESTPGARGPVFCGVDTHADSHWLCVLDWRGRKVLSRQFPADAAGYEALAGAIAAAGEPACVAMEGTSSYGAGLTRHLASLGMPVREALSPARMQRRRPGQGKCDESDAERAARAAMSGSKLGTPKSQDGWVDGVRCMLAARSGAVKARTSAINTARSLLTTAPEGLRSRFRGMAGPRLMEELPSVRAEGALGAALGALADLWAAARDAALDMERAIEASLEENCPALLAMYGCGPVSAAKLAVAAGDNPGRLRSEASFAAICGACPIPASSGKTVRHRLNRGGDRQTNSALHEIARQRVMRDPETAEYAERARARGKSDREVMRCLKRYVAREAYRALMRPHEVRRPEDASGLVAARRAARVSQVRAASILGTSEKYISMLERGQRELKPIRRAYEAWVEAGLPLDWDRQAFEAERKFDSKKHLAK

SEQ ID NO: 104236 - protein, 412 aa, unidentified
MEVLYPHCAGLDVHKDTVVACVRHMATGSVEREVRTFKTTTKDLLALSDWLAEHGCTHVAMEATGVYWKPVWHILSDGDFVLVLANAAHVKNVPGRKTDVNDATWLADLLAHGLIRGSFVPDEQTQEMRNLLRTRKQLVRECSRHIQRLQKTLEDANIKLDSVISDIMGLSGRAMIEALIAGESDPERLAQLAHRRIKAPPEALCEALRGRVTRHHRFLLRLHLKQIDAVNVAIDDIDQEVDAQIEPFRTAIQLLITIPGVSELSACVMLAEIGHDMNRFPTAAHLISWAGLCPKNDESAGKRRSTRMRKGAPWLKTTLVQCARAAARKKASYFQAQYHRLRARRGDKKAIGAVAASILTTAYHMLKYGTLYEDLGPDYFDKRGRGKHVHRLINRLHNLGFAVQITPVEAAA

SEQ ID NO: 104237 - protein, 336 aa, unidentified
MKNSSINHIKDCVGIGIDVSKDSLSFAEITEDKTYITNIENSISSIDLVAQKLMQENYQGKVICESTGHYHLKIVSVFSKYKLNLLVLNPLQSSKHSKANIRKVKSDPADAETLGIMCITEKNLPKPTELSDSKILIRLKMGQLASLEKFIQRLQSSVNAYHETYEGLKFKESDVQRDLAETLSKLKKTKGRMTRELERLISDLCVDDHVINDIQEIPGVSEITAALISQFDTDVKDANSWVAYVGYDVSVRQSGKWKGRGKLTKRGNSYLRKRLWGAAWGAMRHDEHFKAYYDQLRGNGRSYVAALCILAKKILRIAYQIMVNHKKYDPNIAFPA

SEQ ID NO: 104238 - protein, 360 aa, unidentified
MFSERTSVGLDVHARSIVGCGLDTVTGRTAQRRLVPSAQAVLDWLRELAGPVAVAYEAGPTGFGLARELAAAGVRCVVAAPSRLQRPAADRVKTDARDALHLARLLRMDQIVEVRVPSVEQEAARDLVRAREDVRGDLMRCRHRLSKLLLRHGIVYCAGQAWTGVHETWLRGQHFAQRGIQLAYDADLEAMLLTRDRRNRLDAAITEMAADSQYTPLVHRLGCLRGISTLTAFGLAVEIGDWHRFTGATIGAYLGLVPTESSSGTQRWQGSITKTGNTHARRLLVEAAWHHRRTYRPSAVMRARWALAPPAATARGHAGNHRLHQRWQTFLTRKKKPVIANVAVARELAGWCWSLAVLDD

SEQ ID NO: 104239 - protein, 340 aa, unidentified
MEKRYFGIDLHRNQFSCCVRLDNGRSYFSEWALEQLPRFVKKLRPTDEVAVEVTGNTRLFYDAVAPHVARVVVVDTNQFRVISRSVKKTDERDAALLALYLSKGLLPEVRMKDKQHGQLASLTQTRDTLVKLRTALKNKVNNILSARGINLPKEALSGEKKLAEVLSLPFDEIVRIELRVIVDQIRSLNQSITELEKTIAEEGSKLEGHKSLSSIKGIGKITSAILLSVIGDVNDFPDESRLASYFGIVPRVSNSNQTEHSGRIHKRGTKLGRTALVQSALIAANYSPYLKNFYERVKARRGAGKAIIALARKFLGIIYRTLKNKWVFEDFPNFVLAEGA

SEQ ID NO: 104240 - protein, 324 aa, unidentified
MYRIAGIDVHKRMLAVVITDVAVEGEYRFERRKVGTSPSEICRLEEWLVAEQVEEVVMESTAQYWRPVWATLERVWRPKRLQEGGAKAGKLHLAQAQSNRGASGRKKDFPDAERLVKRLVAQELKLSFVPDVEQRLWRTIMRRKHQLTRNRVQFQNRLECLLEEAHIKLSSLVSDLLGKSARRILRAVAEGATSPEAIAALADHRLRATAQQLCDALGACRDLHPVYRQLLKMALEELELMEEQIDKLDQEMASLLSAHQDVVQRLAEVPGLGVDSAQQIIAEVGPAAAAFPSAKHLASWVGICPGEEESAGVNYSYRPKATGR

SEQ ID NO: 104241 - protein, 416 aa, unidentified
MELQRNKVCGIDVHKRFLIATILCRDGKKDTQRFSVTLEDLLKFRDWVIENGCEQVAIESTGIYWHPVHSVLEGKIDLIVANSYKIKHTPGRKTDVSDSEWIAELCLNGMIEPSRIFPKDDRELRRLTRAREGYVKQMTQEKNKIHQSLDSACIKLASVISDIFGKSGMYLLNCVLEGRDIDEIIEGIPSGRLKKKADQIKESIKSRLDVSQVILIRGSLSLMKSIQERIDELDGEISARIQYRKNDLAIAMSIPGTGFVSATAILAEIGNCTDFKKPEQLAAWCGLVPSLYQSAEKTILGGITKQGSKHIRRMLIQVAYAISRTKDSKLKKFFLRIQAKKGSKVAAVALARKVLCILHHLLINQEMYIEDRDKKNMRQKPLIPPSPIEMSIQEMIDCIVRAGYVVTKSDSRGGFG

SEQ ID NO: 104242 - protein, 344 aa, unidentified
MDHFAGLDVSVKDTSVCIVDDTGKIIREVKVASEPEALLAMLKSPAYRFKRIGLEAGPLSQWLFSALAEAGLPAICVETRHMQAVLKAQINKTDRNDARGIAQMMRVGLFRPVHVKTLRSQKLRMLLTHRKLLQSKAIAIENDLRATLRNFGLKVGMVGTVKFEARIKELVENQPDLVALVEPLLIVRRVLREQIAILHRRLLTIVRSDDVCRRLMTTPGVGPVVALTYRATVDVPARFRKSKAVGAAFGLTCSKYQSGEIDRSGRISRCGDEMMRVMLYEAAQSMMRSKKWSWLKAWAMQIARRRGMKKAIVALARRLAVILHRIWVDGTEFRWTREQTAAAA

SEQ ID NO: 104243 - protein, 343 aa, unidentified
MQTATTIGLDIAKSVFQVHGVDMDGNVIFRRQIKRRHVLGFFQKVPPCLVGIEACASSHHWSRELQALGHTVRLMPPAYVKPYVKRQKNDARDAEAICEAVTRPNMRFVATKTAEQQSCLTLHRTRHLFIRQQTSVINVIRALFAEFGIVAPVGRSGVEQLLGVAADLSDKRLPDIVRACVAALGAQLRMLKPQIFQFDRMIMAWHRSSEASRRLDDIPGVGPALATALVASVADPKVFRSGRDFSAWIGLVPKQNSSGGKDRFGSISKRGDRYLRSLFTTGALAVIRYAKIHGIRHRPWLTALLTRRPTKVAAIALANKIARMAWAIMAKGEHYKEPAALAA

SEQ ID NO: 104244 - protein, 352 aa, unidentified
MKKKIANYFADKLLYVGIDVHKKRWVVTVRTYDIELKTFSMQPVAEELEKFLTDNYEGAVFFIVYECCFSGFWIYDYFYEKGYKITVTPVNRIYRDGSVVKTDKIDSRKLAFQHSRGLLREVKVPTVKIREYRSLFRIYDKEKMRLGQILRQIRSILETKNHPLKWDRWNKEMINKLRSIEFQERIFNKKFSSLLKEYDYIKEEIKDTEERINEIAEDEELKERINRIAKINGIGPISAVRLVVYLFDQKGKFETGEGLVHYVGLTPGEQSSGEEIKRSRTGLVGNKQLRSIIIQLTWVAVRKDGNLLDKFEKVYKKSGSKQKAIVASARKLMMKVHAITEKEEDYVINKAA

SEQ ID NO: 104245 - protein, 325 aa, unidentified
MSTSVPTHVGIDVSKATLDVAVLPIREHFVVPNDEAGIEELLSRLAQVVVSADDALLVVLEASGGFERPLAAALAASGIALFVVNPRQARDFAKATGTLAKTDALDAFVLAHFAQAIRPAPRAIPDQEAREFQEILARRRQIIKMATAEKNRLGASTSKAVRGRIEAHIRWLEKELSRTDRDLDETIQSSPTFKANEALLRSVPGVGPVLCRTLLAELPELGSLSPRELSALVVGVAPLNRDSGTLRGRRTVWGGRARVREALYMGALIASYFNPTIKEFYERLVEAGKPKKEVALVACMRKLLVILNAVMRDRTSWRCPHTLNS

SEQ ID NO: 104246 - protein, 347 aa, unidentified
MSIISEKQFVGVDLHLHRSVIARMDEQGHELGWVRIDNDPKTLVREVRKAGRGCSVAVEATYGWYWAVDALSAAKFDVHLAHPYGMKALRKRKRVKNDVRDAYELAKLLRLGSLPEAYISPHELRELRELVRHRQQLVKLQTAVKAGLRALLAKHGIRIAARDLNGDGAISILDSLSLPGTYAIRLAAQRRLLLALGEEIDATEVELVHRLKDHQGYRRLLTIGGVGPTLAAVFVAEIGDINRFPNAAALCCWAGITPRHYESDRTVRRGHISKEGNALVRWAAVEAVQRNCEPSIVAVRDKVLARRGKTARNTAKVAAGRVLLEAVYYVLRDGYSHRLNNEWLAIA

SEQ ID NO: 104247 - protein, 378 aa, unidentified
MHKDSVYLCILRENGEKIERVYGVLTPQLDSMRDFMAENEVSEVAMESTSVYWIPIWRVLVDSFELKLVNPYFIKQLPHGKSDVKDAQWIAECVMKELIRGSFIPPPLIQQLRLYDRRIFELNAELVRKYSKIDAILQRCNIRLSNYVSNTDCKSYKNVVKRISEGVTSPQELLMLVHKRIINKHGEDTILAALTGVVSEAETDMLAQYVAESALLEDNKNKCIEKMREICNREFEEQMKNLQTIPGVSERSALTVLAEIGPDVNAFPSAKHLVSWCGFNPRNDESNKKIKSNKITHGNRFIRIASVQCAWAASRTKDCYFSKFYAFHTQVRKKFKLKVVVAVARKILVCIWHILKFNVSYKDFEPQKSVAKDCTQLA

SEQ ID NO: 104248 - protein, 345 aa, unidentified
MEYGAIDLHLRRSVVRILDENESVVLDRRIDTSRADLDRIFAGRARMRILIESSTESEWVAQHLESLGHEVIVADPNYAAMYGARSRKVKTDRRDVAALAIACRRGIYRRAHRVSAAARQLRQTMRVRRHLVQTRSGLISLLRSVLRQEGLRLPSGSAERVLQRLDRLTVPPAVTAVLEPLRATLQQLTATLTMADEAVEMRATSDPVAQQLMTAPGVGPVLALTWQGVMDDPARFGGDAGRASAFVGLVPSEDTSDERQHKGHITKSGPRDLRALLVQASWVIWRGRSAAGAALRLWAQALAARRGRRIAIIALARRLTRILYAMWRDRRDFTPRSRAAVAAAA

SEQ ID NO: 104249 - protein, 453 aa, unidentified
MAKRNAKISLKTGKSRAALTITHPNAAGIDIGSASHFVAVPPDRDDEPVREFPSFTVDLNALADWLKACGVDTVAMESTGVYWIPLFELLESRGFTVLLVNARHVKNVSGRKSDVLDCQWLQQLMTYGLLSGAFRPTEQVCVLRSLWRQRAMLLRSQARHVQHMQKALTQMNVQLANVISDVVGETGQKILRAIVAGERDGQVLGAMKNARIRASIDEIAKSLQGNWRAEHLFALKQALGAFDFVGTQLSECDHEIEQQLLCLQAHDGEPAKGKQRGRARNAPKFDLRTQLFKMCGVDLTRIDGIDVTTALAVISETGTDMSRFPTVGHFTSWMGLCPGTKITGGKVMSGKTKRCANHAAQALKLAAAALRPSQSALGAYFRRMCSRMDKSKAVAAAAHKLARLIYTMLTKGEEYTDRGQDYYEERYRERVLWQLNQRAKKMGMKLVAEPQPA

SEQ ID NO: 104250 - protein, 416 aa, unidentified
MNELKCWFVGVDWASENHRVRVTDGCGKRLGERNFAHGGAGLAEMAAWLTSVTGAEPSAIYIAIEIPHGPIVETLLERGFNVYSINPKQLDRFRDRFSPAGAKDDSRDAEVLADALRTDMRAFRRLALAEPLVVELREWSRMTDDLNGERNRLCNRLREQLWRYFPAMLELEQDLGAEWFLDLWELVPTPDKAMRIRDTSIARILKSRRIRRLTAAEVSAVLRKPPVTVAPGTIEAASAHIRVLTERLRVVNRQLKDAHRQLDRLCGLLAEPTESEPGQANEQRDAAILASLPGNGRIVLATLLAEGWEALQRRDYHALRTLCGAAPVTKRSGKTCIVTRRLACNPRLRNALYHWARVAVQHDPRSRAKYAALRLRGHGHARALRSVGDRLLNVACAMLRNGTQFNPSLESQKSAC

SEQ ID NO: 104251 - protein, 365 aa, unidentified
MERDRSIRLWSEETVAEPGRHVPPHPSPNSCQGHRARIITRSGYTKEAAMQTPVMYVGIDVSKARLDVAVRPSGEPVSVTSDASGITTLIAQLSQVRPALIVMEATGGLERPLLRALVDAALPVIVVNPRQVRDFAKATGQLAKTDALDAQVLARFAEVIRPTLRVFPDPQTQELAALLARRRQVLAMQGAEQNRLDRAPDRVRKRIEAHLRWLRDELARLDEDLDDLIQQSSVWRAREELLQSVPGIGPVMSRTVLAELPELGLLNRKQIAALVGVAPFNRDSGRLRGHRTIWGGRAPVRRVRYMAALVATRWNPVIRLFYQRLRAAGKAPKGALVAAMRKLLTILNAMVHHGTPWQPVVAQEA

SEQ ID NO: 104252 - protein, 479 aa, unidentified
MNAKANENKNQVNKAFSVINTLSAEERQSRIDDLLKTMQAKTWHDLEASGKFDKNAKLSFISEDMLIVGCDIGSETHYLRAIDIRGRELSKKPFSFTNNEEGFEAAKAWMVELAAVNGKKQIVLGLEPTGHYWFCIATWLISNGISVVQVNPYAVKQTKEVEDNSQLKDDRKDPKVIANLVMNGNYGMPYLPEGIYADLRSLSLLRSQLTENRIRCANRMHRLMKIHFPEYKDAFGKVDGSFALEVLKVAPFPEDIVALGEDGIREIWHNAKLRGRGYSRATELFRYASTSVGRNEGAEYDREAVRWFVEEMLSLGDKLSEVEAAINAKCMEIPHAENILEISGLGQNIVAGIISSMGDIDRFDDVKEIQKLSGLNLVACSSGKHNGETKISHRGRKELRTWLFQGAKSVVAHAEEFQLIHEYYTTRPKNPLKKMQSLIVIACKLLRIIFAILKKGVIYDPQKMLDDIKRFDNAETVAA

SEQ ID NO: 104253 - protein, 411 aa, unidentified
MEEILCGIDWASDHHDVALIDVEGIKLGRRRISDDAAGLGELTGMFAEHGAGPGTVKIAIETERGLLVASLRAAGYDIYPVNPKAVDRYRDRHHLARGKSDAADAMVLAHILRTDAHLHRPLPADSPAARAIEVLARAHQDLVWSRQHEVNRLRSLLAGYYPAALAAFGDLTTRTAMTVLAAAPTPAAAAQLTTSDLLDLLAAAGRGRRRADARRLAEVFAAPQMRQPAAVEQAMGDAATAVITTITAMNTAVTALAQRIDASFEQHPDAAIYHSMPALGPILSARVPGEFGDDRTRWPDPASRRAYAGSAPITRASGKKRVVLARSIRNRRLYDAAHWWAFAALSVSPGARAYYHQRRAAGDGHQAALRRLASKLIGQLHHCLQHRVPYDEATAWTRHQEQSQPAPPAAA

SEQ ID NO: 104254 - protein, 411 aa, unidentified
MHHRQNYLYVGVDLHKEQHTAVIINCWQEKLGEIQFENKPSAFSKFLLEVETYVSDGLSVVFGLEDVGGYGRALAKYLVDHEQVVKEVNPALSFLERKSQVMIHKNDSWDAECVARILINKFNQLPDAKPNDLLWSIQQLVSRRNALVKAQSALKNQLHIQLNHHYPSYKKFFSELDGKTALAFWQQYPSPSCLEGVSIKKLTAFLLDVSNNTCSVKKASDILKLVKEDGQTMKEYQEMRNFLVRSIVREIEFKKKEMKYIERELKQLVNLLDYQLETMPGIELVTASALIAEIGDVRRFPNANKLARFAGIAPVYFGSGGKGKTHKSKQGNRALHALFYNLAVQQVQVAKGSKMPRNPVFHAYYQKKLKEGKTKGQALVCIMRRLVNIIYGMMKYKIAYELPIVEEKEVV

SEQ ID NO: 104255 - protein, 380 aa, unidentified
MKKNNGGMVTMKAAAIEKQAERTDVVPSAPNYHAVVGLDVGDRESHYCVLDPDGELMVEGKVATRKAPLRVQFEGKARMRIALEAGTHSPWMSRLLKELGHDVIVANPRNLRMLSESDSKNDPGDARMLARLARVGPELLSPIQQRSEKTQKDLALVRAREVAVESRTKIVNAVRGIVKSIGQRLPSSSTLTFARKAKEACPEGLKPALLPLLRVIEELTREIELYEKLVTQKAETEYPETKAIRTIGGVGPLTALAFVLVLNNDRQRFRRSRDVGCYLGLRSKQRDSGLRAPQLGITKSGDPLLRRLATQCAQYILGPFGKDSALRRWGLSLALRGGKNAKKRAIVAVARKLVVLMHRIWITQEVYEPLRGVPGKPVAA

SEQ ID NO: 104256 - protein, 418 aa, unidentified
MQAELSQFTAIIGIDWADKKHDVCIQAAASGQRQIYQVPHKVDKLDEWARSLYRQYGGPIAVALELSKGPIVSALQKYDFFVIFPIDPTTLANHRRTFTPSGAKDDPTDAEYALDLLLKHTEHFKALNPQSVEMRTLMTLVEQRRRLMNDRVRITNRLRNVLKQYYPQALEWFDRIDTQLFCDFIKRWPSLLQARRARKATLEKFFREHNMNRRALIERRLAAIKSALPLTEDEAIITPNRLQAMTLVAQLEVALASIRRYDDEIAALAPQHPDYGLFDCLPGAGPSLAPRLLVAFGEQRERYGKAAELQKYAGIAPVTERSGQSTWIHWRWQCPTFLRQTFVEWAAQTINKSYWAGLYYYQQRAKGCSHQAAVRALAFKWIRILYRCWITRTPYDEARYLKTLQQRGSPLLKMAEAA

SEQ ID NO: 104257 - protein, 428 aa, unidentified
MDEVNRNRLEEFRQLRQEVRHSEEHLIVGIDIAKDRHYAFFGTATGKTLLKRLVFSNDHEGFRKLLDHAEALRAQQGLKKVVYGMEPTANYHKPLGEYLISLGRTVVLVSGVTVARNRESLDGRWDKHDGKDSANVADLISQGKCLYYEYPSAELRGLRGLLSLKRRLKKQEHGYRVRIRNQLIAQYFPEMDRDYERLGPEGVAIVRWCLPASQIAQLDVEPFIERVTSRRIRMEKRRRLEEVWEKAAESIGCEEVPGVDHEAKVMVEGLKQIREMIKETEGKIRELCEQFPEYPYILTIPGFGPDVSAKVLGAIGDPDRFQNGKQVLKMGGLDLSADRSGKDSDRAIPEISKRGKADLRYALYQAALVASLQNRDVMIYYTNKIRGREKEKGIHVKMRVKLAAKLLVIAWTLMKKKEPFNPAYLNAE

SEQ ID NO: 104258 - protein, 342 aa, unidentified
MGYFAGLDVSLDDTALCIVDDAGRIVREARVASEPETLVAFFGACGMTMDRVGLEACSLTAWLHAGLTEAGITAICIEARQAKAAMGAMPNKTDRNDARGIAQIMRTGWYRAVHVKSPSCRSWRALLTARRMVLNKRRDVENGIRALLREVGLKVGAPSRKDFPARVRELAADDPVLMSLTEALLAVIDVMTREVEKLTRRVLDEVRVEPTCRRLMTVPGVGPLTALAFRATIDQPDRFRKSRDVGAHLGLTPRRYQSGETDVQGRISRCGDELARTALYEAAHSLLIRSTKWSALRAWGMSIAKRRGMARARVAVARKLAVILHRMWVDGSEFRWGKQAAA

SEQ ID NO: 104259 - protein, 405 aa, unidentified
MGAVQIQHSRCAGLDVHKKSIAACVITPEHEETRTFGTMTKDILALSDWLSQHQVTHVAMESTGVYWKPVWNILEGNFELVLANAQHIKGLPGHKTDVKDCEWIADLLRHGLIRPSFVPDKTQRELRELTRYRVSLVQEHTREVNRLQHTLEGGNIKLAAVATDIMGKSAQAILGELLAGNADTKAMAGLAKGRMRTKIPQLREALVGRFGPHQRFLVARQLAHIDYLDEAIAEVTAEIEERMRPFEDAVAILDTIPGIDRVAAQCILAEIGIDMSRFRTHAHFSSWAKLCPGNNESAGKRKSSRIGHGNRWLRRLMVQVARAAARTKDTYFAAQYHRLKARHGANRAAISVAHSILITIYYLLQRRCTYSELGGNYFDERDREATVRSLTRRLERLGYKVTEAA

SEQ ID NO: 104260 - protein, 410 aa, unidentified
MEVLHPHCAGLDVHKDTVVACVRHMADGAVRRDVRTFKTATRDLMALSEWLSAEGCSHIAMEATGIYWKPVWHVLGDGEFELVLANAAHVKNVPGRKTDVGDATWLADLMAHGLIRGSFVPDEQTQEMRNLLRARKQFVRERSSHIQRIQKTLEDANIKLDSALSDVMGLSGRAMIEALIAGQSDPDTLAGLAHRRVKAPPETLREALRGRVREHHRFMLRLHLSQIDALAGAIAEIDREVDAHVEPFRTAITLLTTIPGVSDLSARVIMAEIGNDMSRFPTDGHLVSWAGLCPKNDESAGKRRSTRMRKGAPWLKTTLIQCAWAGARKKGSYLQAQFHRLRSRRGAKKAIGAVAASILTAVYHMLTNGTLYHDLGPDHFDRRAKASQTKRLVIRLQNLGYAVQITPLAA

SEQ ID NO: 104261 - protein, 399 aa, unidentified
MRKIIGIDVSKSTAKLSVAIDAKTVYEGDITLDMIGFTSLKAIIDSYGGAEVVFEATGVYSRRLERYLLDESITYHILNPLVAKKRLDDGSRTRKNDVRDARGLAITEFAKHPKPFKPSFYDPVYRELMDISRYYDQQTEDLKRTKNRIHRLIQLSFPGIEEELDLRKPSALHTLTLFSHPAELTGLSFENIKTQILDMHLKGVGAVRSSNLARALWRSRARSYPAVSGNSFVVQAVKHETQKALKLLSEREETVQAMVSLAERTPEYVILLSIPNIGENTAVRLVAELGDIRRFKTRAKLNSFIGLDLQEIQSGNYTAQRKITKHGNAHTRKLLYWTVINMIGSGAQPSHIRDFYAKRQATASRRKPLLVACMDRLLKTIHYLVNTNQLYSYELACSR

SEQ ID NO: 104262 - protein, 348 aa, unidentified
MKQVTTIGLDISKSVFLVHGVDAAGQAVLRQKLSRSRVLEFFAKLPRCLVGIEACASSHYWARELMALGHEVKLMPAQYVKPYVKRGKNDVADAEAICEAVTRPTMRFVGVKTPEQQSIMMLHRVRLILTRQRTQLSNALRSHLAEFGIVSPIGREGLDRLLTIVADTDDGRVPTEARASLEMLAVQLEGVKAQILANDRRIIASARATEVGRRLLEVPGIGPVLASAFVASVADPAIFKSGRDLAAWIGLVPRQNSSGGKERLGGITKAGNGYLRQMLMVGAIAVIRYAQRNSARRPWLVQLMGRRPAKVAAIALANKTARTVWALMSSGERYRDPQAIQAAVSANA

SEQ ID NO: 104263 - protein, 397 aa, unidentified
MIAVGIDISKAKSTVAVIDSDGTVLASPFTMAHTQPEMEAFVTYLKGLGEPTTILMEYTGHYHYPVLKKLQDEGFPVCIVNPYQMKKYGDVEIHKAKTDKKDALRIAAYALEKSYKLVPYSSMEQKYEDLKFLSRQYNQRISYVAKLKVQLIALLDQTMPGITRILPLNSRNPEKCALLLFIKRFKSFDEIQRIGKARFLASYDVLAKKASERSASSKGLSIYELAVDSITTRGEDPYIWLSQNQCVDLLSATQNAADEIISQMRNIAETIPEYKVLRAMHGVGDRLGPIILAEIGDVHRFHSGKALNSYAGNDAPPYQSGQFESRNRHISKRGSSALRKACYEVMQALKLTKPQDDPVYLFMLKKEQEGKPFNVAKMAGVNKFLRIYYARAMEFYK

SEQ ID NO: 104264 - protein, 344 aa, unidentified
MQSMYYIGLDVHKRTISYCVKEVSGRIYAEGSVPATRLDLNRWMKTLPQPWTAAMEATVFSGWIYDHLRPHAVDLKVAHPLMLRAIAAAKKKNDRIDADKICDCLRCDFLPECYMASTAIRERRRTLRYRNLLVRQMVQMKNKIAVLLMEAGVSYNKQRLHKAGYFRELVASNPDIDEGLCSLLRVCREMVVRLERTESALVRSLERDALLRDRVERLMTIPAVGPITALTWALEVGEVQRFSSIKKAVSYCGLCGEEKSSANSVQRTPLSKQRNKHLQTTLIEAAKMAPRYSAGLALLYDKERRKGNANQATLAVARKLVAYLIAVDRRQRQFEVVEASRTAA

SEQ ID NO: 104265 - protein, 335 aa, unidentified
MNQARVHIGVDVGKEWLDICHPDGSKEHIGNTKRSRAKLIRKARAASAIVSFEATGPYEEDLADECLAAGVPAVRLDAWKTRKYAESQGMLEKTDAIDREMIRDFAASLRPEQLRFVRPMSDGYRRLKRAASVRRNLIKSKTLVVNQLENILDGDVRASVSRVIDALERQIEKMDALCTEAIRSDERMNALAVRFEQVVGVGPVLIGTMLSSCPDIGSFTSKGIAKMAGVAPIENKSCTIRKKSKPRRGRRELRSALYMAAVSACRSNHLLEPIYKRFVDRGMPRRVALIALARHIAILMNYIAKYPDFNPAVDPKKAALSALPKRKPGRPRKNP

SEQ ID NO: 104266 - protein, 406 aa, unidentified
MDVIIDKGCGLDVHKETVVACVMGSGIKKEIRTFSAMTGDLLRMKGWLTDLGITHVAMESTGPYWKPVFNILEDSFEVILANARHIKNVPGRKTDVKDSEWICKLLRSGLLTASFVPPQAIRDLRDLTRYRQKLIQAASAEKNRIQKVLEDANVKLSSVVSDTFGVSASRMIKAIMSGNFDTDSLAELAVGRLKGKKEKLKEALQGHFRDHHGFMIQASLDHIASLEKIIADLDRQINEKLKDYHRERELLASIPGVKEQGSSSILAEIGAAMNVFPSEGHLSAWAGMSPGNNESAGKKKSGKTTHGNKNLRSILTQCAWVATKMKNTYLSAKYYSLVGRRGKKRALIAVGHKILIMAYQILKTGIPYKELGHDYLSRRKEDKIVKGHIKRLKDLGYQVELKKATA

SEQ ID NO: 104267 - protein, 351 aa, unidentified
MDRYIGLDVHMQSCTMAVMGPTGRRLKEEVVSTNGRELVEAIRKVDGRRHLCIEEGTQSEWLYELLEPQVEELVVTVPAESRGQKSDSLDAWARAEELRMGSVKTKVFKAVGRYTELREAMRGYRLIVQDTTRVKNRLKAIFRSRGVWGMDEEAYDPKTREKWLAKLGPSQRRLAELVSQELDGLVEIAQQAKQRLQAESKKHAIIRRLATAPGIGPIRAAQVVATVVTPERFRTKRQFWSYCGLGIMMRTSADWVREGGRWVRAPVMQTRGLNHNRNPILKSVFKGAAMSVVQMTDHPLKRAYERLLKAGSKPNLAQVTIARRIAAIVLAMWKHQENYDPAKQELPPRTP

SEQ ID NO: 104268 - protein, 392 aa, unidentified
MRYVGIDVGSDSHVVAAVNADGTVAVKPTKITEDAAGYAKLFALLGQAPVFLVTMEATGHYWRNLFAALVARGYAVALLNPLRTRRFAGEDLERTKTDSVDALGIARFGAQKCPAVTRLPDAATDELRELVRHRDRLVADFGDRVRQLHRLVDLGFPEFRRHVKSLDSMLACTLLAEYPNAQAFAGAAPGRLAKLVYDGVHTVGPELAAALIAAAKVSVGHHHGPAYRIQVRHTCQDLDLLRRRIRELDGDITRQLDDYEVGSLLTSIDGIGTNTAARLIAELGDLGRFRNAAALAAYIGVVPGLKQSGKRRGQRAGLCPIGHARLRAALWMPLLGAVRRNPWLKAFYDRLISRGKLPKVALVAALRKLLGAVFAVVRDRKPFVPRLAAAAA

SEQ ID NO: 104269 - protein, 339 aa, unidentified
MNATPVGIDIAKSVFQVHYVAPETGEIVNKQIKRSQFLEYFANRAPCMIGMEACGSAHHWARQLMQMGHQVKLMPAKFVKAFNVGNKNDAMDAQAIWLAVQQPRKAVAVKSEMQQAVLMLHRQREQLVKFRTMQINGLRGMLAEFGEVMGKGRTAMIKAVQDALARAEARLPKLLIDTLREQWARVNKLDEEIATIERRLREWKKDDKAVQAVIEIPGVGLLTATAAVAMMGDPKAFKSGREFVAWAGLVPKQTGTGGKVSLHGISKRGDTYLRTLLIHGARSVLTNAKEPGPWVEGMKKRRPSNVVVVALANKMARTIWTVLAHDRPYRKDHVSVKPA

SEQ ID NO: 104270 - protein, 440 aa, unidentified
MPSVKRDPRLRRVVIGVDTHKHIHVAVALDDIGGRLDDRSFPADQDGYEHLLDWAAGFGAKRLVFGIEGTGSYGAGLTSAVRRRGLGAVEVLRTDRRDRRLRGKSDTIDAENAARAVLNNTATAVPKTNDGTVEMIRQIKVAKDVAVKARTSAMITLKAVLVTADPELREQLQPLTKMALIHRCAGLRPGTVDTVTAATKHTLRAIARRWQHLDAEIKAHEALLAQLTGQLVPQLVDAFGIGADTASEMLIVAGDNIDRVRSEPAWARLCGVAPIPASSGMTNRHRLNRGGHRQANAALYRVVIVRMRFHQPTIAYVARRTTEGKTKAEIIRCLKRLLAREIWALLRPLRTHCYDPCAPCPPTPHRPLDNYRSVNAVAESFFATLKTEIGTTVWDTRDDARRDVFAYLGYYNHDRLHSTLDYRTPHEARVDYRQDLTHVA

SEQ ID NO: 104271 - protein, 378 aa, unidentified
MNGATHRGEPTVPTKKTTERGRIHLGLDVAKNSIAVAILRPDEVEPDTEKIGHDEASIRRLIARLGDPWDLFACYEAGPTGYDLSRLLTSIGVRTDVVAPSLIPKAPGDRVKTDRRDARRLARLHRAGELTAIRVPTLAEEGIRDLCRARQVVVEDRRRARQRLGSFLLRHNEIYREPTTWTAKHEEWIAHRHFADEATKSAFSFYRAAVAERDVTLQAITAELAPYFDKAPFAEPVHRLAAYRGIDYLGALTVVCEVCDFRRFAHAGAFMGFCGLVPSEYSTGESVSRGHITHAGNVHVRTQLVESAWAYQHGPLRGALMARRQVGLSPETIQRSWRAQVRLCGRFRRLGARKDSRNTVVAAIARELAGFVYAEMTA

SEQ ID NO: 104272 - protein, 349 aa, unidentified
MVADELDYVIGIDTHLDEHVLAILAAPSGAVVAQRSIQASARGYAAALRFAADEANGARVWAIEGTGSYGAGLARFLAGRGETVLEISRTPRAERRLRGKDDSLDATRTARAALASETLALPRSGERREALRLLLVARRSAVDVRREALGQLRGVIVTAPDKLREELRGLPVGRLLERCSRLRRSSAISADELATRLVLRSLARRIEAATLEAAELERELLGHLRAVAPALLDEPGVGPIVAAQLIVAWSHRGRVRSEAAFARLAGVAPVPASSGKTTRHRLSRGGDRQLNRALHTIVLHRSQHDPATRDYIAKRIAEGKSRRDATRLLKRYLARRLFRLLQNEELLMT

SEQ ID NO: 104273 - protein, 344 aa, unidentified
MEQHKTFYVGIDISSETFTSSNGSAEQGWTVLGKAETFVNTQEGYKDYLQWLARQGVKPGNSVICMENTGVYSEQIAYFLQSKDYQICIETPIKVKRAFDVDGHKTDPVDSRQIAEYAYRFYDELRIWKPRREVLEQVKILLATREQLVIEKTGHINSLKALRRKVVRADIAERVLESLISTLKDQIKTMETEMNKLIRQEADLAQEQALLTSIPGVGKLLSAQALVLFHQMDGELSDKKLAAFIGICPYEHSSGTSVKRKAKTSQHGPEVIRKLLNLAARSVCTHVPDYQQYYLRKLAEGKAKSLAINNVGNKLLSVMVAVFKSGVPYIPGYRSVHPRFLTKS

SEQ ID NO: 104274 - protein, 544 aa, unidentified
MVTKVKTGKSRTKRRTKAFAAAVMGKPSGQIQERVKQAGPEHFGVVSVDCAKDRSKWMLADFYGRVLIPPTSVEHRRSEIQLALLTLKQAVEKHGIKDTIVAVEMTGTYHQIIWRAFRTAGYDTRIVHPFASSHYRAPEHGDIKTDDNDLVAIFRAAVNGFGLLDQPWDDVYRCLQMLVRHRRDLVNKRAKLQCQIRHHLERSLPGYTNAFPDDSLWTQPVALKVLQYIAEHGGTHQALLDVGIPGVSKWLKQQNVAFQSRSVGRIVAWAGNAVVGDPMRSMMTRIWQSLLIDWQQKTQQIIALERDIASLLVQTPWVLLMSHPGINVVSAAELAAETGPIEHYASSKAITGRAGLFPSRYQSDGVDRGGNLSRFRNARMRGAWLLAAECLLKCNDYWRGKFNFWKTQGHDSRDIRVRIANRFTRTVFQMVAGRKVFNHRSRLDRSYILDKLLTFHREHDTPMAEILTDLKSATDQLPKHAYADEAKPLQEVQRKSFRSRRNEPQQLGTLLVGLLARLGVTIQPPALQSVPLEAPAADSDKGDR

SEQ ID NO: 104275 - protein, 327 aa, unidentified
MYNPASESSLQGYHIMNSEFDSYWGIDVSKEWLDIAIENQVYRIDQTESAIAEFITKHKINNQETLVVLESTGGYERLAVECFSFSGFRVHVAHPTKVRDFAKARGRFAKTDRLDAKILSDYGKFIEVHQIRELPTKEQQVLRSLGARLEQLKAMQHQEVCRKGMANDELLRKSHDFMLKTLKQQIDEIIKQIEGLINNDATLKEKYALLQTMKGVGKILGMALLIDLPELGKATKKEIAALVGVAPLTKESGQKTGKACTKFGRREIRKVLYMGALVACRHNKNLKIFYERLVNAGKAKKIAIVAVMRKMLVILNAMVKSNTVFAY

SEQ ID NO: 104276 - protein, 351 aa, unidentified
MSPNSAPATITTIGIDLGKNTFHLVGLDRRGAIASQLKLSRGQLERRLVNVPPCLIGMEACSGSHHIGRRLTALGHDVRLIPAQYVKPFLKGHKNDYRDAEAIAEAVQRPTMRFVAIKTPEQMDLLALHRVRSRLVGQRTGLINQIRGFLIERGITVRQGVMPLRKALPDILGSNAEALSPRMVGLIADLAQDWRRLDERIAAVSAQIEALAQQDESCERLMTIPGVGPIISSAVVAAIGNGTGFKQGRDFAAWLGLVPKQESTGDRTILGKISKRGNKYLRTLFVQAAHVVLVRRPGAAKRALWPWIEQASRRLHRNMLAIALANKLARIAWAVLARGRAYEPRVPANAA

SEQ ID NO: 104277 - protein, 340 aa, unidentified
MKLYAAIDLHSTNNVTVVIDEQDRVVYQKRLPNDLGLIAKELSVYQSELEGIVVESTYNWYWLVDGLMAEGYQLHLANTAAIQQYEGLKYTDDHSDARWLAHLLRLGVLPEGYIYPRAERPVRDLLRKRSQLVRQRTTNLLSIQNLLTRNTGSSMSANRVKGLDAQQVDELLPDSDLALAVKANLSVMSSADQQAQLLEQTVIQRVKLRPQFCFLKSVLGIGEILALTIMLETGDIRRFASVGNFASYCRCVGSQKISNGKKKGKGNTKNGNKYLAWAFIEAAHFAIRYNPKIKSFYERKKAKTKIVVALKAVAHKLCRACYYIMRDRVAFDVTKAFGQK

SEQ ID NO: 104278 - protein, 342 aa, unidentified
MQTTTIGIDLAKQFFQVHGVNEFGKTVLKKQLRRQQMAEFFVNLPPCLIGMEACGSAHHWARKLQSMGHTVRLMAPQFVKPYVKTNKNDAADAEAICEAVARPNMRFVPLKDVAQQAVLALHRARQGFVKARTAQANQIRGLLAEFGLIIPQGIAHIAHRVPDLIEDASNELPGMFRLLVQRLLDHLKVLDKQVDELETQIVAWHRQNPQSKKLEKIPGIGPLTASALIASLGDARNFESGRQVAAWLGLVPRQHSSGGKQNLLGISKRGDTYLRTLLIHGARIVIHHASQRANSCSWVNKMVARRNKNIAAVALANKNARTVWALLAHDREYQMDYQSVAE

SEQ ID NO: 104279 - protein, 404 aa, unidentified
MWYVGLDWADTHHDVEVLDEAGKRVGVRRFAHSHDGLNELKAFLLGIAASPEHLACIVETNHGLLITFLLEAGIPVYPVNPKTANQLRKAAGAKTDQIDAHLLAKLGRLDLADLRRLEPDSAIVQELKTLTRDQDALIQTQTRLVNQLTACLKEYYPAALHLFAKVQQRSTLVFLQTYPTPQAAQAASLEEITATLRLGKHTNPTKAAPKLVEELHRPQLVANPVIVRAKSRLMLSLVKQLLVVIQEIASYDEAIRPLFLRHDDQELWRSLPRAGKRLAPRLLAEWGDDRTRYADATSVQTLAGTAPVPFQSGNYAKAHKRFACVKPLRNVLHQFAWQSTRQEAWALAYYQRKRAEGKTHSMAVRALANVWVRIIYRMWVNKTSYQTATFEAAKRAHASRPHAA

SEQ ID NO: 104280 - protein, 340 aa, unidentified
MSSIQILGIDLGKHSFHVVGHNHLGKEVLRKKYSRNQLISFIAKLEPTIIAFEACGGSHWLARKCIDLGHQAKLIPPQYVKPYVKGNKNDFIDADAIAEAASRPSMRFVAVKTEDAQVIATIHRIRDGYIKERTACMSRIGAILLEFGLSLPKGHAKMKALFQWLAEQNQELPPSLLNELCSIHEHYSYLSQQIKEQDIKLHDISENNELARLLKTIPGIGDLTSTLCIADVSSSNNFANGRNMAAWLGLVPRQFSTGGKPKLLGVSKRGNKQLRTLFVHGARAVLSRPDTTGKVFGQWLVNLRATKPFNVVVVALANKLARIAWAVLQHRQAFKAAKQP

SEQ ID NO: 104281 - protein, 337 aa, unidentified
MGLYCGIDLHSNNHVLTVIDEADRKVYERRLPNELAITKAALAPYRAELVAVAVESTFNWYWLVDGLMEAGYTVRLVNTAAVRQYEGLKHTDDEHDAFWLAHLMRLGILPTGYIYPKSERGLRDLARQRMRLVQHRSSLITSVQNQVWRSTAVRLRSDTIKGRGKQPWPEISDPDLASSIKAGREVIDTLTVQIERLEKLILKRVDPSPQFRMLKTVTGIGPILGMTIALEVGDIGRFAGVGEFASYCRCVDSQRLSNGKKKGEANRKCGNRYLAWAFMEAAHFAIRNLPAAKRFYERKRRQRHALLAVKALAHKLARACFYVLRDQVPFAPERLFT

SEQ ID NO: 104282 - protein, 344 aa, unidentified
MEHFAGLDVSVKDTSVCIVDDTGKIVREVKVASEPPALLTVLKNPAYHFKRIGLEAGPLSQWLFSVLAEAGLPVICVETRHMRALLKAQINKTDRNDARGMAQMMRAGLYRPVHVKTLRSQKLRMLLTHRKLLQSKAIAIDNDLRGTLRNFGLKVGMVGTVRFEARIRKLVENLPDLAALVEPLLIVRRALREQFCILHRRLLAIVREDEVCRRLMTTPGVGPVVSLTYRATVDVPARFRKSKSVGAVFGLTCAKYQSGEVDWDGRISRCGDEMMRTMLYEAAQAMMRSKKWSWLKAWAMQIARRRGMKKAIVALARRLAVIMHRIWVDGTEFRWTREQVAAAA

SEQ ID NO: 104283 - protein, 450 aa, unidentified
MNSKGIKTLDLVGQEPEEMPCRLVIQHYLSEVRYIMRHIGIDLHKKSFTVAELSPDGSVLCYDVALDILQSLQEFLGRLHPDDRVAIEATGNSYFLHGLIKPLVAEVVLVDPKKVRPIAESNSKTDKKDAEILARLLMAGLLPGICVPPPEKRAVRGLLGHRHKLVGEKTSVKNRIHALLGTYGFSSPVSDLFGKEGRNIIEELKKILPLDAQVELTSCMRLIDFYEEELGKLERHLTDIALPDPYVDLLMTIKGVNVITALSISAYIVDIARFPSPKKLAAYAGIVPIVRKSKDHVYYGPITKEGPPVLRWALVEVVQTLVKEPGDFRNLYRRILRKRGESAATRSKALIACANKLARVIWKMLTEVKPYRAYNSSLYERKTKKAREVATPYPHSLDETWKMKYLSPRLKRPPFLSEVEDPEITRLYAVHGVMQKAKAKRQRKKGRKAA

SEQ ID NO: 104284 - protein, 355 aa, unidentified
MESTKYVGLDVHQEATTIAVMNSAGKLIMESIVETKAITIRQFIQGLHGDLHVTFEEGTWAAWLYDLLKPYVTKVIVCDPRKNTLLKVGNKSDRIDPKKLAELLRNGALSEVYHGENGVRTLKELARSYLTISKDLGRVMNRVKAVYRSWAIPCAGTQVYALCHRSEWLSKITEAGVRRRAEHYYQQLDALQSLRREVRKDLLLESRKHNATKLLRQVPCIGPIRAAQLVALMQTPHRFRTKRQLWTYSGLGLETRDSAQYCYVEGQLQRSKKPQQLRGLNSNHNHDLKNIFKGAATMASVSAGPFHDFYQALLTKGMRPTMARLTLARKIAAITLIVWKKGARFDPQHLKQQAA

SEQ ID NO: 104285 - protein, 354 aa, unidentified
MSNKSTTTVATMGIDIGKNSFHVVGLDRRGAIVLRQKWSRGQIEARLAAMAPCLIGMEACVGAHHLSRKLQALGHDARLMPAQYVRPYSKGQKNDFRDAEAIAEAVQRPTMKFVATKTADQLDFQALHRVREGLVRQRTRIINQIRAFLLECGIAVRQGFRFLRSELPGILAQRSDVLSPRMVHLIEDLAGDWRRLDERIERLSADIEDVVAQDAACERLMTVPGIGPIISSATVAAIGAGDVFSKGRDFAAWLGLVPRQISTGDRTILGKISKRGNRYLRVLFVQAAWVVLIRPQSWERYGLKPWIEAAKKRLHHNVLAIALANKLARIAWAVLNKERNFEATRTTAPSPRPA

SEQ ID NO: 104286 - protein, 356 aa, unidentified
MRYLELDVHSEATVLCLVDAQGNEVEHGKVDTTGPALQKLVKRLSATEELTVGQEVGTMCHFVHDAISATGVKILSFNAQQIRLICSSRKKTDKRDAYWIAKLLASQMMPHPVYVPGAQIRALRGLLSLRRSLVQERKRWLLRARSHLRAAGLKLPSKSRTVARLRASVLSGSDGVDEHLGVALDVCQRQEEQLSPELKSIEARLLRETKDVAEVQRLKTIPAVADWVAIGIYAWVGEVSRFPNARVLCAYVGLVPSVHQSGKTQQQGAITKTGSSALRSVLVQAGHVLLFRCNDEYAAPLQTIAKRVHTNRARRKIAVVAAARHILRLAFYVLRDGKDYNPALLRSNAQVSNPAA

SEQ ID NO: 104287 - protein, 391 aa, unidentified
MIYIGIDVAKDKHDCFITNSDSEVLVKAFTIANNLDGFNDLYQKIESVMDDVTKVKVGLEATGHYSYNLLGYLIDKGLPTYVINPLHTNLYRKSLSLRQTKTDKVDARTIASMLMSDVNLKSYSDTSYHNEELKSLTRYRFDKVKERAKLKTSVSRLVCILFPELEKLVPTLHIASVYALLSEFPSAKHVATAHLTRLTNLLSKSSKGRYGKDTAITFRDSARASIGSNMPAKSLELKHTIKLIQELDSEIDEIENEIKIIMDEINSPILSIPGINYRMGAMIIAEIGDFNRFDSPDKILAYADFSPSTYQSGQLDGAYAHMEKRGSRYLRYALYNATKYVCHWDPTFAAYLAKKRAEGKHYNVAISHAVKKLVRVIYHLEKTKQQYIKAA

SEQ ID NO: 104288 - protein, 337 aa, unidentified
MNTTRNDVLGIDVSKKKLDLALLINGKLKAKVFDNTSAGHRALVTWLRDSKASLSTLHICMEATGVYYEAIATTLHAEGFNVSVVNPACIKGFGLGENIRNKNDEIDAGLIARYCAAMSPDPWTPPPLEQRQLRAWTLRVQSLKDIRQQEENRIEAHMVAGLRDVAANVAEHIKWLDAEIEKLQDEIDDHIDRHPGLKNDAALIASIPGLGATTVARVLGHLGDIRRFKNAKAFAAFLGLTPKQRTSGTSLKGRTMVSKTGNTSLRAALFMPSMVARRHNPILRQFAERLLANGMAKRAVISAVTHKLAHLIYGVIRTGKPFDANYLHKNLAIQDGI

SEQ ID NO: 104289 - protein, 337 aa, unidentified
MSLYCAIDLHSTNNVPAIIDDDDRILFQKRLPNDLSTVISALKPFKHDLYGVAVESTFNWYWLVDGLADNDFNTLLVNPSAVKQYEGIKHTNDESDAFHLAHLMRLGILPTGYIYPKTERAVRDLLRKRLQLVRHRVTHMLSAQNQIWRSTGLNVSSKPFKQADFSLLNLVNDNHIRMAVKSNLTIIQALNQLIDELECTVLQQIKLKPEFLALLTIDGIGKILGMTIMLETGDIRRFASVGNFSSYARCVDSSRTSNGKKKGSNNRKNGNKYLSWAFVEAAHCIIRHNKTAHKFYQRKRSQKNGALATKALAHKLARAAYHVMRNQAPFQLERLFR

SEQ ID NO: 104290 - protein, 319 aa, unidentified
MAKIVLGIDVSKKTLDAALIFDNRTFSKQFKNTTEGFKSLAAWLESLKIEQVHACLEATGTYSEAAALFLHERGHRVSVVNPLRIKGYGQANMQRNKTDRLDARLIASFCQTQEPDEWLPPSAEVKQLQALVRRIEILEQMRQAEENRLANSVSEVQPSIERMIALLKEEIIELERQIKEHIDRHPNLKRQSVLLQTIPGIGSRTAHLLLSEIEFERYSSARSIAAQAGVTPRKRQSGTSLKQTNLSKLGNARLRKALYFPAIVARQHNEIIKEFAKRLKSRGKTPMQIVCAAMRKLLHIAFGVLKHNRAFDSSLAFSA

SEQ ID NO: 104291 - protein, 347 aa, unidentified
MLADLVEHVIAIDPDRDRITAVVLEAKTKGVVATATFRATKNGYVALLGFADEHTLGGERAFVIEGTRSYGAGVTQAVESAGEWALEFDRTEQKKRGRVKNDERDAIDIGREALGRERLAEPRRGAEREAVRTHHVARESALKDRTRAINLLKSLVVSAPEDLRARLRGLSTKGLVKRCASLRHAASQPIDERGTRQTLRLVAQRILTLEGEIAAHEQAIRPLLQSQAPQVLAQFGVAEWATAQLLISWSHPGRCRSEAAFAHLGGSAPIEASSGQTKRFRLSRGGDRQLNRALHVIAVTRMRDCERTKAYVERRRAQGKTDREIRRCLKRYIARQMFRLLEQGAPS

SEQ ID NO: 104292 - protein, 429 aa, unidentified
MNYNTQNAKIASITEKTLIVGIDVGSETHYARAFDWRNYEYSKKPFAFNNDEAGFAAFKVWMEDIAEKHEKEAVIPGMEPTGHYWLNLGAYLQEQGMKPVHVNPHHVKKSKELDDNNPNKNDRKDPKTIAGLVNEGRFSYPYIPTGIYAEIRNLSNLRIQTQEELTRIKNRIARWFSIYFPEIKDVYKNPDAVSGMMVIEKAPLPCDIKELGVDGVNQVWRDAKLKGAGLKRARTLVSAAEHSIGSTEAPGSARIEIRNLLNDYEVYKNRIDDLMREIEAKLSEIPYIDKLMEINGIGLKTVSCFIAEVGDIRRFDNPKQLQKLAGYAIVADSSGKHNGESRISHRGRKRLRYALYEAAISVIGKNKEFREIHDYYRTRKQNPLKKMQSVIAIACKLIRIFYTILTKGVAYDGQKMLSDIVRPEIIMAA

SEQ ID NO: 104293 - protein, 340 aa, unidentified
MKKVSTIGLDLAKNVFQAHGADASGAVIFRKKLRRAHVLEFFATQPACTVAMEACGGSHFWGREIGNYGHRVRLIPPAYVKPFVKRQKNDAADAEAICEAAQRPTMRFVAVKSEAAQGAAVVFRTRDMLVRQRTQIINALRGHLAEFGLIVAQGPAHVAKLIMAVQDPKQPLPEAARPILCVLVDMLGLLDQRIKLLDIAIARRAKEDEVARRLMSIPGVGPVIATAMAALAPPAETFKRGRDFAAWLGLTPLQHSTGGKQRLGATSKMGERTLRRLLIIGASSVVRWAARKGAPAGSWLASMIARKPAMLVRVALANKMARVIWALMAKGGTYRAPVVA

SEQ ID NO: 104294 - protein, 368 aa, unidentified
MKVTTIGIDLAKSVFAVSCADGRGKLVVRKQLRRAQVLEFVSRLKPCVVGMEACGGAHHWARAMEQLGHEVRLMSPALVRPYRTGPKHDRNDADAICEAVRRPQMRYVAVKSVAQQDLLALHRVRAQLVKQRIALSNQLRALLHERGVVARLGAAGLRAGLARALADEHDERHEVSGAMRELLLELSGWLREAEQRVAAITKRIEHAAKHDERCARLMEVPGVGPLGASALVATVGNARAFKRGRELSAYLGLTPRQHSSGGKTVMLGISKHGDRYLRTLLIHGARSLLYRNRRRAHPRAPWLARLVARRGPNVAAVALANHNARLLWALLSRGDRYRPSPQPHSFPSRPSTVVKRAREGKLLLDQGA

SEQ ID NO: 104295 - protein, 401 aa, unidentified
MTSLPRARPGERDLIRSLFAQTRRSAVRPPGRRVPSTTRICRAGGTAIPTIAHTQPARLTVGVDTHKDVHVACAKDQLGRRLATTLVATTSAGYAELLGWAGTLGQVEAFGIEGTGCYGAELARFLRSRGQRVVEVNRPDRAARRRHGKSDPVDAEAAARAVQAGEATGLPKAGDGAVEMLRVLRVARQTAMRARTQTINALKALVVTAPDPLRRQLRDLPTRQLVATTAAFQPDTPATPTMATMVALGALARRYQALDGEITMLSKQLHRLVGLAAPALLAVFGVGPETASALLITAGDNPQRLHSDAAFAALCGASPVEVSSGKTVRHRLNRGGDRQANNALWRIVLVRLRAGHPPTVAYLQRRTAQGKSKREVIRCLKRYVAREIFAVLQTMAVQAAA

SEQ ID NO: 104296 - protein, 344 aa, unidentified
MTQYKRIAIDTSKAVFTLHGIDHAERPTLRLNLRRGQMIDFFTRLPPTEIALEACGGGHHWARELTALGHEVHLIPPQYVTPYVKRGKNDRNDAAAICEAGGRPGMHVVPVKSIDQQAQGMVLKVRGTLVDQRTQLCNTVRGHAAEFGVVGGKGRGQVAVLLSVVEQQPAIPPEAKAMFVVLGQQIDALDARIQHIDGRLAAAHKSNPVSQRLATIPGVGPITALTLAIEIDPGAFESGRHLAAWAGLTPKEHSTGGKPRMGGISRAGNERLRGLLVSGATSVIQAAVRPGGRQMTEWLRALLLRKPRKLAAVALANKMARIAWAMMTTGETYRRPLSAAAVAA

SEQ ID NO: 104297 - protein, 356 aa, unidentified
MRSLGVIRPILLGRYPLLMEMIAMLDHQPLFAALDVSLEKTTVCVMSLDGTIVKEAVVPTDSEAIAACLVDPGQLERIGLEAGPMSEWLVRGLADLGLSVVLMETRQVRAALSAMIVKTDRKDARGMAHLLRTGWFRPVHVKTPDAREQRAMLSARATLVARLKDIENSVRGLLRGFGLRLPLALRGRWDAGVRDAIAGHPALLCIMEPLLVARGALREQLILIDKRVRDVAKADQVCRRLMTAPGVGAIVALTFRAAVDQPDRFRSSKQIGACFGLTPRKYQSGETDRDGAIQSRRRRFGSDGALRGRARDHDAGREMVEDQGVGHERREATGRQAGQGRARPQTRCRSPPDVGR

SEQ ID NO: 104298 - protein, 425 aa, unidentified
MSYKIAGIDIHKRMVAVVVADVAGEGEYQFERHKFGSGGEQLRLLAEWLVANQIEEVVMESTAQYWKPVWGALERDWQPVSRARGAGAKSGSLLLAQAKSNRAPRGRKNDFADAERLLKRLVANELVLSFVPDTEQRLWRTVSRQKLQLTRARVRLQNQLEALLEQAHLKLSSLVSDLLGVSARRMLQALADGEIDAGRLAALAHCRLRATSEQLCDALGAATKLSPVYRRLLQMLLDELKLQERHMEQLDQELSVLLTAHHSAIQRLAEVPGLGVDSAQQILAEVGANAAAFPSAKNLASWVGVCPGEEQSAEVSKSARSPKGNRNLRRLLNQAAHAAVKTKGSVFEWVFGRLRTRLAYQEAIWAIAHRLCRLIWKILHQGVHYEEHGPAVSIKSKRNRTTRMIRELRKLGYRVEPVGAFATNM

SEQ ID NO: 104299 - protein, 360 aa, unidentified
MHATTVAVDLAKSVFQIAVADEHWRIVETQRLTRTQFERWFANRSVDLVVMEACGSAHHWARWLNGLGITVRLLPAQYVRAYVRRNKTDATDAAALLEAARAADIRPVRVKSVEQQALQGLHRIRSLWMGTRTSRINALRGFCREFGITIPQGARTGVETIGRVLADPRSAVPDLIRHTAGMLLEEIRLLEARIAQVERELSSVARQSPACTLLLSVPGIGLLTATALVAATSGDVTHFVDARHFSSWFGLTPREYSSGSSRYLGRISKKGDRYLRMLLTHGARSVLRAAKVAECAGKDVCGIRRWALDVQGRSNHDKATCALANKLARICYATLRDHAPFDEAARLTKKQSRQSFALPA

SEQ ID NO: 104300 - protein, 362 aa, unidentified
MMTTTTTAANAGPILALDLGKYKSVACRYDRVTAQASFDSITTSRAELLRLMERHQPALVVIEACALAGWVHDLCAERGLACKVANTASEAWKFKHTKRKTDKDDALRLAQLEALGQLPTVVIPHLQTRQWRSLIAYRQVLVGRRCACQNRIRSLLVGQGLPAPRGHRAWTEVGLEGIGQHARPLAECGGDELWRGLLEMALAEYRQLRALLEQAEAKLDALARADAGVQILESIPGVGTRTAEVIVAHLHQPERFHSGKQVSAYVGLVPRQFQSGEMDRRGRITRRGPAILRKLLVECAWVMLRYNGWARAVYQRLSRGKARKKQAIVALARKLLVRCWAMLRDKARWRADPEPSPEAVPA

SEQ ID NO: 104301 - protein, 406 aa, unidentified
MNYLGIDVSKATSRYVFLDNDGEKLVKPFTLDNGHNDFNKLLDRLKELTLLPDNLLVGIEATGIWWENIYSLLTEHKFKVIVLNPHQTNKFREALRIKAKTDDIDAYVIAGLLRSQEYSASYIPEESIQCLREITKLRFELVKDRQNYERQTNALLGLLFPELAQTAIKNPFAVSSIAILKAYPTAKHLAEAKPKNIEKIVRSIKGNNFNIKEIQSLIECAQKSIYSGRAKHDRGLNLIILLTQVESLQNAIAQLDERTNNILSPSDSNDANSFPGANLLSIPGVGPKTLAAILSAVGSDGQAFPDGKHLIGHIGFFPKIYESGETRHDNTMSNRGPKYLRAALYMSAVACLKHNPEFKALYDRKVSQGKTAKQSLVYVAKKLAHLCLSMLKSGESYNPARVFMPV

SEQ ID NO: 104302 - protein, 435 aa, unidentified
MPSVQVEAPPVIRAALTPSVLRPPDPKTAALVEEIFNLPTGKKHTLYIGLDVHNDTIAVSLAPSDSTEVRRYGIIGGTHEDVLKLAKKLQAAHPEHLLKFCYEAGPRGYPLCRFLRSHGYFCIIVSPSCVPRRPGDRVKTDRRDADQLARLFRAGELTGIAVPDPHDEAVRDLLRGRYQVVTQQHRARQQLKMFLLRHNIRYGGKTSWNAAHLRYLARIKMPFAEQQFVFQEMLQVITEAGQRLERYEKQLPLVVLSWRWQPVVAALMSLRGFDLLHAATLVAELGDLHRFEHPSKLMGYLGLVPSEHTTGEDRQQGGLTKMGNGYGRRAMVEAAWQYRAPARITPHLQRRQEGLPKAVTDIAWKAQVRLHGRFRHLLGVGKKKSQVAAAAVARELCGFVWAIGQIVRPHDQAKIKRGCASLAKAKSTAQKKGGQ

SEQ ID NO: 104303 - protein, 408 aa, unidentified
MEVVYRCCCGIDVHKKIIVACLDQGGEQSLREFGTTTSEIKSLATWLTESGCEMIAMESTGVFWKPLYNLFELMDLDAMVVNAAHMKALPGRKTDVKDAEWIADLLRHGLLKASYIPSREQRELREITRYRKSLTEERCRETNRLQKILEGANIKLDSVVKDINGKSARKLLEKIIEDDVPTSEEEVSKMVHGRMRSKLGQLVTAIEGITTPLQRKLLAQVIDHIDDLTRRIADLDKLVQDYMDEYEAAIAALCDIPGIARRSAEVILAEIGLDMSRFPSAAHLCSWAGVCPGNCQSAGRRKHGKTTKGNKPLKTILTQCAKSARSVKGSYFSAQYQRIAARRGKNRATLAVAHSMLIAIYHMLRNNVPFRDLGSDYYDSFNRDRKIHGYLKRLKALGWEPDALPGSA

SEQ ID NO: 104304 - protein, 388 aa, unidentified
MQNVADQSVALTTIRADLCAIFISLELSRSTWLATSLSPGRGEKMSKHSVSAGDIAALLARFSELRRKACARTGESFPIIVIQEAGLDGFWIHRVLLSEGIESHVVDAASIATSRRRRRAKTDRIDGETLLRALLAHKRGEPRVCSMVRAPTPEDEDRRRICRERKVLIMERVQHVNRIKGLLFSQGASGYEPLRRDRRARLDALQTGDGRRLPPHLKAQVCRELDRLELLLEQIKAVEAERDALLNAEQTKVSAPPPMLLGVHGIGPEFASVLWSEGLSRQFDNRRQVAAYAGLAPTPWQSGSVNREQGISQSGNPRLRTTMIQLAWLWLRHQPRSALTLWFLDRNERNGGRRRKTTIVALARKLLVALWKYVSAGVVIEGAMIRPA

SEQ ID NO: 104305 - protein, 331 aa, unidentified
MAQNDLVVVGIDIAKDKADACIRSLPSGRTFPSTPLGRRQMTSWLRRHKVSKAAMEASGGYERDWAKALRDAGIEVRIVDPKRVRSFARSAGRLAKNDAIDAEMIAWFAETFSQTPSQTPDAARVELVQIVNARRALLEQQTQMQNRREHAVPKPVQKMHQRLLKAIALEVARLEVIIAAMIEATPHFVELAEIIESVPGLGKITAAGLIAAMPELGQVNNKIAAALLGTAPYDDDSGRRRGERHIKGGRRNIRNLFYMACLGAATRHNPVLKAFYRRLIARGKEPKVALVACMRKLIVILNTMIARRQKWKANPGADEHAMATLALQASA

SEQ ID NO: 104306 - protein, 377 aa, unidentified
MPQTNVSQTVDFYGQKFYIGLDVHKKSWNVTVRSLSCQVAHFTQPASAEVLFKTLKRKFPGGIYYSAYEAGFCGTSHHEQLCTLGIDNIIVHAADIPQTDKEKKNKTDLHDSRSIATHLERKNLHGIHIFSRRQQELRSLFRFRQSKVKDVTRANNRLKGFLNYFGIILPEQICKKQYLSKKALEWLSNFEMHTQAGLLTKQELIQELRYQRTQKYLLTKKLRVQLQLCYSDAYLRLISVPGIGAATAMALLCEIGDFDRFDDPDDYISYIGLTPWNDSSGNTIRTKGMQPRCNKHLRPLLIEAAWAAIRNAPELFAYYSKHAAKDNKHAIVKVCRKLALIARGCVLHDRNYQPDYLQSKQNEKGRKPKSLKPDGFY

SEQ ID NO: 104307 - protein, 422 aa, unidentified
MSITCVGIDVSDGHSTVSAFAWGDQMVMKPHDVPHTVAALRELADEIRRLPGEVRIVMEHTGRFWLPIAGALRAAGLFVSAVNPKLIRDFGDNKLRILKTDKADSRKIARYGLRYWNDLFPYAPTEATRQKLLEFSRQLDHSNKLLTAQKNNLQAILSVTFPGVRKLLTSPAREQDGHIKWVDFICTFYHCDVVRKMSMAEFTQRYRDWCKRKGYKFAKKGCAMIYSLACDCVPSLPCDRDTKLLIGEIARQLTAISTTVEVYRAKLYLLASTLPEFDCVMAMFGCGKTTGPQLMAEIGDPTRFKDRTVDGKRVKGKKQLAQFSGVAPGNNQSGSYEQRSVKASKKGSTHLRRTLFLIISAYLRRKPDDAIYRFLDRKRTEGKQYYVYMTAAANKFLQRYYAQVRDFLINLSISPSGTTSAA

SEQ ID NO: 104308 - protein, 363 aa, unidentified
MQYLINTELSSHEETRFEFNRSTGAIKLGIDVHQDFYVVVEQVGGSNPKPAQRFQKQAFLHWAAKLKQSGAEVYAVYEACGFGFSLQRQLSALGIVCHLVCPQKLDERNKRVKTDGLDAKALCLRLDRFVQGNRHALNCVRVPTEEEERSRAIHRQREQLVGARKRLEAQGRSLLVNHGLEPVQNWWKPRTFAALAVPQWMRELLLNSQPILLALQEKIAALTLQLQSAAAPNQPRGLGKMTSVIIDREIGDWRRFNNRRQIASYTGLCPGEYSSGNTRLQSCVTKHGNPRLRAALVELAWRLARFQPNYKPVVKWRQILAKEALATGAARKKAIVAVARQLAVDLWRIKTGRLTAEQLGLTI

SEQ ID NO: 104309 - protein, 361 aa, unidentified
MPGTMTYVGFDVHARSTHAAAIDVMTGELTRMRFGAGIDAPVDWLKTLSGPVRACYEAGPTGSGLYRAAVAAGVGIEVIAPGLTPRGKGDRVKTDRKDAELLARCLIAGSLHPIVVPSMHVEAAREVTRAHDACRRDLMNARHRVSKLLLRHGRVYPEATTWSQKHRRWLAAQQFREPMSEFTWADLIACVDGLTARKKTLAERIGELATDPAWWPTVARLRAFRAVDTLTALAVHLELGGDWARFEKATRVGSWLGLTPSRSQSGEHDYHGSITKTGSQLARRLLVEAAWHYGREPRVGATLANRQEGQPDHILQISNRCQHRLHHLYTSMRARGKHHNVTTVAVARELSCFLWAAATAP

SEQ ID NO: 104310 - protein, 330 aa, unidentified
MKLNHVGIDVSAKTFTVIIDHEGTRTEAFDLPNDAKGHKKLIQMATRNGFQAKVVLEATGVYSLDLALALHRARRVEVMVANPRAIGQFAGAYLRRSKTDSLDANIIVEFAIRMDFEPWTPPEAHTFNLRAISRRIEGMTKMATQEKNRLHAAASFNEMSEIVRNDIEVNIRHLERRIERMREQARELIANYPDLECAFLHITSVKGIAEAAGIQILAELAVLPGDMDVRQWVAHAGLDPRVFQSGTSVNKPARISRQGNVHIRRALFMPALVAVQYEPHVKAFYEKLLGRGKTKMQANIAVMRKLLHAIHGMLKHDRDFDGEKFYVIGA

SEQ ID NO: 104311 - protein, 347 aa, unidentified
MRKIAYLSMDVHARNCVLGDMDGNGKFRGNRSFITCENNIINALKAVKAKRKYLVIEAGPLANWVAQTASAYLTQVFISDPRENALIYKSSQKYDKVDTKKLCRLLRLNEFKEVYRPESDQRAIFKAAAQHYLDLRDQLTALKNKIKAKYRQWGVIDVFTDSVYSVSGRDKFLKQVEHHPICLQLKRLYELMDHIAAIKQDAQKAMISLGRNYPEIKEFKKIPGMGPIGAHTFDAYIQSPHRFAKRNRLWRYCRLAVTDRSSDGKPLGYKRLDKSGVGELKALSHRAFMSAIKGDNEVKRFYLKSLQRTHDHKHARLNTQRKILSVMRSIWKKGQAYRAELFLGPSI

SEQ ID NO: 104312 - protein, 367 aa, unidentified
MNYSAIDYHKKNSFVSTVNEQGQRVAEAKIKGNEPAAFAQFFAGLGGEPTKVVVEACWNWGWLYDVLEQIEEVEEVVLAHPYKTRVIAEAQVKSDKLDARILSQLLRGNLIARAHAPSWPTRQRRFLLRQRMFWVRVRTMVRNRVHALLARQHGLELPHRQDLFGSGGMKFLRSLTLSGIDGALLSQNLQMLEQLEVQIKASEGEIARELGAEPEVERLQTIPGIGKLLGAVIAAEFDGAERFRTNKKLWGYCGLAPSTRSSDGHTWHGPLLGQCNKWLRWAFIEAAWVAIVHSGYFGAIYSRQIERGKIPNQAIVVVARRLCEIAWKLLREKRSFQAIAPSKLSHPPHVILADAQLKKCAPRPRSD

SEQ ID NO: 104313 - protein, 343 aa, unidentified
MQVTTIGLDLAKNIFQVHGVDNDGNVTVRRKLGRSSLLPFFSKLPPCIVGIEACATAHYWARMLLAIGHQVKLMPPAYVKPYVKRGKNDATDAEAICEAVMRPSMRFVAVKSAEQQSILMLHRCRDLLIRQRTMLANALRSHFAELGVVVAQGIRNLSNLTEIIGDEADTRIPAVARYALGLLMEQINDLQRRIKDLDHALVAWHRANETSRRLKTIPGVGIIIATAITATVTDPSQFKSGRQFAAWLGLVPRQNSSGGKERLGRISKMGDRYLRRLLVVGATALLRFARNRNTPLSEWADQLLSRRPARLVSVALANKIARVAWALLMRGGQYGSRAAAIPA

SEQ ID NO: 104314 - protein, 422 aa, unidentified
MENSDVAMELVERIAALDIGKKALMACIRVPHEDKPGRRRQEVGEYPTTTRSLLALADRLRCQGVTLVVMEATGDYWKPVFYLLEAEGFTCWLLNARHVKNVPGRPKTDRLDAVWLAKVAERGMCRPSFVPPKPIRRLRDLTRYRRSLVRERTREKQRVEKILEDAQIKLSSVITDIFGVSGRAMIEALIAGQRDPRVLAQMARSSMRAKIGVLTEALTGHFDGHHAFICQMMLERIDDLTARISQLSTKIEEQIAPFQAQVAQLDEVTGIGLTCAQELIAELGVDMTIFPTASHLVAWARFCPQTKQSAGKNKGSGATGNGNPWLAAALGEIAGACCRTPTFLGARYRRIAKRRGNGRALVAVCNSILTITWHLLSDPQAHYQDLGPDFYDTRAGRDRQTRNLVRQLERLTGQKVAFQPAA

SEQ ID NO: 104315 - protein, 354 aa, unidentified
MLIIGCDYHPGFQQIAFVYTETGEFHEQRLRHREEAEKFYRDLATRGLKVRVGMEASGQARWFERLLAELEVEVWIGDAAEIRAKRVRKQKTDRQDAQHILKLMLKDDFPQIWVPSWENRDVRQLLWHRHRMVQMRTRIMNQLQAVALNEGLRCKKRLWRERGRQQLEAFRLAPWASRRRRDLLELLDRLNPTIVELTAAIEQEAEKYPAAQRLMTHPGVGALTALAFVLIIGKAERFQCGRQIASYLGLVPAEDSSGERRRLGHISKQGSALLRFFLVEAAQVTVRSDPEWRSKFFHLALRRGRKIAKVAMARRLAVRLYWMWHQGWDYEQWKKISPHAGQPGTGVGVQLNTV

SEQ ID NO: 104316 - protein, 381 aa, unidentified
MQEVEDEPLFAERVAGIDIAKAEVMVTIRVPADTGNGRRQQETREFRAVRKELLALADWLRSWQVTKVGMEATGDYWKPVYFLLEREGFDCELYHAAQVKALPGRPKTDKLDSAWLAKITERGSLASSFVPPEEIRRLRTHTRYRRHLTQARTAEKARCEKLLEDAHLKLSSVITDIHGVSGRDMLTAIIAGERSPKVLAQMARTRMRGKIRQLEEALDCSFFTEQHAFAETGVDMTVFPTAGHLASWARQAPQVSESAGKRKGKNATGRGNPYIGGALGEAAVNAGRTQTFLGTKYRRLIKRMPKKKAQGAISRTQLIICHALLSDPDAVYTDLGTGYYEERMNIRRQARSHARALERLGYKVTIEAIDPGTGELQPIAS

SEQ ID NO: 104317 - protein, 343 aa, unidentified
MYYIGLDVHKRTISYCVKDAAGHVHQEGTIGSTRRELEAWIKTLPQPRTIAMEATIFTGWIYDQLLPHAEKVKVAHPLMLRAIAAAKRKNDKIDAGKIADCLRCDFLPECHMVSTEIRDRRRTLRYRHLLMRQMVQMKNRVSGLLMETGVSYNKQRLHKVGYFADLLSTSEEVDKSIRPLLNLSREHILRSQKLERALLRSLERDPLLAERLKRLRTIPGVGPITALTWALEIGDVSRFQSIKQAISYCGLCSAEKSSADKFVRMPISKQRNKHTQQVLVEAAKLAPRYNHELALVYEREQQRGNKNRATLAVARKMVAYMLAVERRQQAFVPAEQLGGTAAA

SEQ ID NO: 104318 - protein, 422 aa, unidentified
MKEIETRKYKIINEKTLLVTVDMSKVMHTGYCRCPDGTETKVFEFFNTGQGFHKFWGHITQVMRAKNLEEMVVGFESTGPYAEPLLHYLMKRRVKLVQVNPMHTKRLKELQGNSPNKTDQKDPKVIADIIELGHALTVIIPEGATAELRRLTQARERAIQRRTAIFNQLHDLVFILFPEFLQVMNNVKTVSSQYLLKHYPTPQDIIKYGLDALTATMKKTSRGKLGQERASAVYEAARESAGIKEGQTSILIEIREILAIIESSERFIAEIEKEMSCRLDEIPYKNSILSLKGIGEITAAGLIGEVGDFTKFKTISEITKLAGLDLFEVSSGKHKGQRHISKRGRPLMRKLLFFAAINVVRKGGIMHEQYQKYINRGMPRMKALVAIARKLLCVIFALVRDHREYTSNFIRGQNIVPVKEAA

SEQ ID NO: 104319 - protein, 393 aa, unidentified
MICVGIDVAKDKHDCFILSSEGEVLADVFTIQNNAEGFDMLLQTIRRCARPEDKIKVGLEATGHYSYNILGFLLDKGLDTYVINPLHTNLYRKSLSLRKTKTDRVDARTIAAMLMSDVDLKPYTDTAYHNEELKSLTRYRFDKVRERAKLKQSVSHLVTILFPELEKLVPSLHLASVYALLIEFPGAKQVAGAHLTHLKATLSDASKGRYGRDMAVTLRDAARCSVGSVMPAKSLELQHTIRLIRELDAEIEDIETAIQSMMDEMQSPITTIPGIGVRMGAMILAEIGDFSRFNSPDKILAYAGMSPSTYQSGQLSLSGPYSHMEKRGSRYLRYALYNATKYVCLWDPAFAAYLAKKRGEGKHYNVALSHAAKKLVRLICALEKSQQSYRNAA

SEQ ID NO: 104320 - protein, 382 aa, unidentified
MRYVALDLHQRYCEGAELAGGKLRRFRFPNTHGDWARLASELTPDTRVVLEATGNAYWVYDMISQCAGEVLLANPLKTRAIAEARIKTDKVDAEILARLLAADFIPAVWVPDREQRQLRTLLGYRGKLVRLRTTLKNSVHAVLSRNGYRPPVSDLFGKRGRRFLAELTLPKTEEIILESCLKLIDELDREVAALEGEFYERAKRIPEVKLLLRVPGLDVISIMTILAEIGDISRFRSPKKICSYAGLVPRVHWSGKTRYTGHITKAGRSTLRWILVQVAHRAVRAPGPLRDFYLRLKAKKGAKVAIVAVARKLLVLIWTLLTRKEEYREPSRRHEAKVRKMERLARAYPIARTSETGAALVKLLAEDLPSSSTALPRACGFS

SEQ ID NO: 104321 - protein, 344 aa, unidentified
MSEYAGQQFVGIDLHRRRSVIVRTTGSGEVLESVRILNDVESLDRVIERAGEDPEVVLEATYGWYWAVDALQEAGARVHLAHPLGVKAFEYRRVKNDFRDAADLADLLRMGRLPEAWIAPPATREVRELVRHRAKLVALRSHCKAEIHAVLAKCGIQVSMSDLFGVAGTALLDRLQLAAPYAARIASLRRLIDDLDFEIEVFTNAVQGRLHADPGYVAVQQIPGIGPILGAVFVAEVGDVTRFDRAPQLACWAGLTPKHHESDTHVRRGPITKQGSRLVRWAAVESVKRVGPDTRVGAVRDRVAERRGGNIGAVAAARQQIEYVFYALRDGHVRALAHPARASA

SEQ ID NO: 104322 - protein, 471 aa, unidentified
MSYDRILFRYAFRHGSNQKLKTMSAKKSKTVKKVKINEFTLVHPNAAGIDISSKDHVVAVPEDRDDIPVRTFDSFTCDLHKIAEWLKKCRVDTIAIESTGIYWLQLFLLLQAYGFEVYLVNSKHTKNVTGRKDDESDAQWIQKLHSCGLLNRSFQPEEDIRALRSLVRHRKNLIHSMSTHTNRIHKALEQMNIKLGVVINDILGKTGKAILQSIIAGERNPKELAKHRDRRIKASIETVEKSLEGIWREEHLFELKQSYELYEYYQEKIIECENEIQKQLEKYVAKSNYGDISELRESAKKKFKKSELSFDTSVYLKKIMGVDITSIYGISYTSALEIFAEVGIDMKRWPTQNHFTSWLNLAPNNKKSGGRIISSKVPKKKSTAGQTFRVAANSLWNSKNPLGDYFRKIKSRQGHSKAIVASARKLAIIYYNMLSKKEEFNPKAILEYQAKYKQMKIKRLKKQLADLEQAA

SEQ ID NO: 104323 - protein, 353 aa, unidentified
MDKYIGFDIDSKKVSVCVFESGKKEVYATINPDIGSMKKFVLSQQQAGYQLHLAYEVSGYSGYIHDQLCECVDRIAVANPVKTTWIYRTAKKTDRIDARKLAILLYMGELPTVHVPNKEVRQWRQMILHRRNIVKDICRVKNMVRAVLKSAGYFKTGHTGSLWNKANIFWMRQVSTGCELWQMQLGDLLDKYEFLNKQLNKVTDYLDDYLKTKPGAVLFMSIPGIGPRTAEAVLAYTDGVERFRGSKQYCSYFGVVPKLDQSGDNRRVGHITKHGPSVVRWLLCEAAWKSIRKSPSLKQFYERVMNGDVKRKKIAIVAVSRKLLSIMRAMLSTGELFNEKLVLENYEEINKAA

SEQ ID NO: 104324 - protein, 364 aa, unidentified
MNKCQLNTELSSLEGTRSEFNRSTAAIKLGIDVHQDFYVVVKQEGGTNPKPAQRFQKEAFLQWVAKLTKEGAEMHAVYEACGFGFALQRQLTALGIHCYVVCPQKLDERNKRVKTDGVDAKALCLKLDRFVEGNRDALALVRVPTQAEEQKRAIHRQREQLVKARKRLEAQGRSLIVNHGIEPVNKWWKRRTFAALQVPAWMKELLQNTQPILLALEEKIRALTVQLQEAAISRQPRGLGLLSSVVIDREIGNWDRFKNRRRVSSYTGLCPGEYSSGNTRVQSCVTKHGNPRLRAALVETAWRLVRFQPEYRAVKKWRHLLAKGALATGAARKKAIVAVARQLAVDLWRIRTGRVAIETLGLIN

SEQ ID NO: 104325 - protein, 345 aa, unidentified
MPIAGGLDIHRKQITFDYLDTVTGEVRRGQIAPADREHLAGWLAGRFTGQDAHFAVEGCTGWRYVAEELAAAGITVHVAEPADTAALRGRKRHAKTDRTDSRHLRQLLADGRLPECWIPPWHVLECRALLETYHDLRVEHTAWVQRIHAALFHQGAPQLGEGGLRTGEGLAALQAIAAAQLSPAGQLQVAVALGKLAELDRHLDLLRRRLLTEARQLAGARELHARLYGVGPITALALVCWLGGAGRFSSARKAVRFTGLDVTVYSSDGKRSPGHLSRQGPEVLRWCVYEAGKTHARSSAPDYRYYAAVKDRIDGKRAAISEARKIIRQAVHILAELGDGALAPA

SEQ ID NO: 104326 - protein, 408 aa, unidentified
MIVIGIDAHKRTHTMVAIDHRGRKLGEKTVDATTAGHLAAMRWAHTNFGTDVVWAVEDVRAMTARLERDLMTAGGQRVIRVPTKLMAGTRKSARTFGKSDPIDALAVARAALQEPDLPVATHDPLSRELRLLADRRDDLVHYRTGMIQRLLWRVHELDPTHRLRRGALIWRTQQDALAQWLDNQPGLVAEIARDELADIIAVTPTINALERRLAATIRETAPSLIALYGCSTLMAARIIGEAADLNRFKSEAAFAAYCGLAPSPHWSGSGPRRLRSYKSGNRALNAALHQIGMIQIKKGGPAEPYYRRRRDDEHDTHGAAMQRVKRRIARTVYARLHADRKNAPSATPVTDSTGDGVQAGVQRRAAPRTDTHAPPTRSTVTSPRPVGEHVGIDELVAINDRWAAALGL

SEQ ID NO: 104327 - protein, 413 aa, unidentified
MTTSPRIQSITSNVCLHMSIELAAASWKLGFADQFGRRPRVRSIEAGNFHQLRSEIASAKKKFGLEPDAAVISCYEAGRDGFWVHRCLVSIGIESHIVEPASIQVNRKKRRAKTDRIDAQRIVSALMRFKAGDQLACRMIRIPDTEVEDVRNINREMRTIKTERTAFTNRIKGLLCTQGVTQVVIDGSFPRRLKRMRTAEGKPLGEYLQARLLREFDRLALATSQIRALQMQQAKMMRTAAKEIEKSEAERTSPKCAVIAEFLARLSGIGPVTAWTLSSEIFSWRDIENRRQLAALAGLTPTPNASGDDEKEQGISKSGRGEFRVLLIEVAWGWLMHQPRSDLTKWYEKRFNDGTKRNRKIGIVALARKLLVAIGKFVRFGEIPAGAKLKDKHQFKYMPALKIPGTELNCLAA

SEQ ID NO: 104328 - protein, 454 aa, unidentified
MAKKAKKIKTGKGLKLAIVNPNAAGIDVSSTEMQVCVPEERDRENNRRFGTFTEDLHLISSWLKSCNIDTIAMESTGVYWVQLYMVLAADGFDVLLVNAKAIKNIGEKKTDEVDAEWIMLLHSYGLLKASFQPDNYARSIRNLSRHRDSLIKTSSREVLHMQKSMELMNIKLTNVISDVLGKSGQDIITAIIAGERNASTLAALADPRCRSPKEVIEKSLVSNWDEDLVFMLKQSFELYHYVQKQMKECDKKIEMLLKEYIKTLPQDNAPKECPRTDKRKAKKNEVSIDIEQYAFKIFGVNLMRIPGVSDATMLRLVGELGHDFTNKFNSYKEFCCWANVTPNNKISGGKLLSSKIPKRKNQVGLILRSCANSLRTNKTPLGYYFRKTQSKTGYIPAIIATANKLGRIMYTMVKTKSEFNESLVNINEEAMLRRKLMKTQKELEKIQNQLRECA

SEQ ID NO: 104329 - protein, 347 aa, unidentified
MLYAGLDLSRQRVDVHLMNQAGEPVQVTATPPDVDGLRGLARQVSGFGEPVVAAIESMNGARFVHDQLELHGWEVTVADAQKVKGLAPLACKTDRIDAWVLAELSRRELVPAVWLPTPEVRAERERARWRLHLVRHRTALKNRIHATLLAFGRPCPTSDLFGPGGRQVLARLALPEPWAGTTTAAIALIDDLDAQIEECEHDLRRLGADHAYVPLLMTAPGIAWVLGYTIAAEIGDITRFASPKKLCGYTGLCPRVYQSGSRDHRGPLSKNGPRYLRWALLEAATHAARHPAYHGHYQRIKTRLGHQRGAKVARVEVARKLTEAIWHMLTTQAPFRPARPHAHPLAA

SEQ ID NO: 104330 - protein, 313 aa, unidentified
MKKTICGVDVSKAKLDVCIEPGHRLASFNNDTAGIAELAAFCREHAVTLMVMEASGGYERRAFVELWEKGISCALTNPRNVRRYAEAMGILEKTDRIDSSVIARFAHAKNLAPTPLPSQAQQRLKALVTRLRQVTDDLTVQKQRRASMFDSPEMRSSVDEVIALLKRQSRSLEGEIASMIDDDPLWAKLAETWREVKGVAGRTVARLHAELPEIGLLSNKAIAKLAGLAPIANDSGKRRGKRPTRGGRAGVRSILFLVAATAARYDRSLGEFRDRLLKAGKEKMVIRIALARKLLVRLNAKARDARAEYANAT

SEQ ID NO: 104331 - protein, 414 aa, unidentified
MMEVFCGIDWAEDHHDIALAGRDGQLLARRRISDDAAGLAALLGLLAEHGDSAGDPVPVAIETPRGLLTACLRATGRQVYPVNPMAVARYRDRHSIAGRKSDHGDAVVLANILRTDLHAHRPLPADSELAQAIAVLARAQQDAVWERTCAHNKLRSHLREYFPGFLAAFAEARGGLMRPEARAILAAAPAPAAAAKLTLTQLRALLRKAGRSRGIDAEAARLRDAFRAEQMRQPPLAGQAMGRQALALLRCLDAACASAGDLEQAVIASFDQHPDAGIITSFPGLGSLTGARVLAETGDDRSRFADAKGLKAYAGAAPITRASGKTLAVLHRRVKNQRLAAAGYIWAFAALTASPGARAHYDRRKTAGDRHAAAQRNLFARLLGCLHHCLLTGQHYDETTAFPAPSQTTRKVAA

SEQ ID NO: 104332 - protein, 403 aa, unidentified
MNCVGIDVSKGKSMIAVMRPFGEVVVSPFEVLHTDSELSELARQLKSLDGETRVVMEATGNYHASVAKLLHDAGLYVSVVNAKLVHDYGNNELRRVKTDRKDAVKLANYGLDRWLTLPRYIPEEDTRLLLKNCYRQYRQYSKVQTVLKNNLISLLDTVFPNANRLFSSPIRGDGSEKWVDFVAEFWHCRCVSEKSERAFTSKYLRWCRKHGYNFSEAKAHTIYAEASGHIGVMPKSETTKLLVEQAVSQLRATSTALAALKHEMQSLASQLPEYPVVMGMFGVGPTLGPQLIAEIGDVRRFYSKKALVAYAGLDAPPNDSGDVTGRHKSMSKIGASSLRRTLFLVMSVYLQTAPLDEPVYQFMDRKRAEGKPYRVYMMASANKFLRIYYATVKAYLESLEHTA

SEQ ID NO: 104333 - protein, 391 aa, unidentified
MTYFIGIDIAKYKHDCFIMDQDGSVIRDSFSFSNDSAGFCLFLSVLDSLDPSYEKRIGFESTGHYGLNLKCFLEEHDISFMEINPILIKRFSSATTLRRTKTDKADAALIASYLTTVEYITYPIQSYHIHNLKSLTRSRDALVKLRSGQLVMITNVMDKIFPEFKPFFNKSLKSSTAMYLLRNYTVPSKMASMNSESYRKMSSKLKKTISYARFSKLRELAKNTVGREDPCLTFELNTYLDIYQSLDSKIKEMEAHIEEEFKKIHSHIQTIKGIGWMSAASIYSEYGGIENFQTPNQMLAYAGLDPSRSESGEHAYKGHMVKHGSSHLRYVLLNCAEMVILHNPVFYDYYRKKREEGKHHRVALSHVARKLVRIIFFLEKNNVDYDPKKMR

SEQ ID NO: 104334 - protein, 349 aa, unidentified
MTSSMTIAVDLAKTVFEIAIADSEWRIVERHRLSRSPFQAFFFNREPATVVMEACGTAHFWGRWLTGLGFTVRLIPAQAARPYRRRNKNDAADASALIEAARNAEIIDVPVKSSEQQAIQGLHRVRSQWMATRTARINNLRGLLREQGINIPVGAATAVSAAPALIDDENVPEVLRAALLEIVSEIRALEARMKTIEAELKRYAAASADVQAIQQVPGIGLLTATALVAAVGSPKHFRDGRHMAAWMGLTPRHTGSGHRLHMGGISKRGDRYLRMLLIHGARSVLIRAQMNAKTGQSLNRLQQWAMDLKQRSNHNKATCALANKLARIAWAVWAHDRDFDGNHAIAMAA

SEQ ID NO: 104335 - protein, 391 aa, unidentified
MIYVGIDVAKDKHDCFITNSDGEVLFKAFTITNNLDGFNDLYQKIETVMKDITKVKVGLEATGHYSYNLLGYLIDKGLPTYVINPLHTNLYRKSLSLRQTKTDKVDARTIASILMSDVNLKSYSDISYHNEELKSLTRYRFDKVKERAKLKSSVSRLICILFPELEKLVPTLHIASVYALLSEFPGAKQVANAHLTRLTNLLSEASKGRYSKDTAITFRDAARTSIGSNMPAKSLELKHTIKLIKELDSEIDEIENEIKIIMDEINSPILSIPGINYRMGAMIIAEIGDFSRFDSPDKILAYAGFSPSTYQSGHLYGAYAHMEKRGSRYLRYALYNAAKYVCHWDPTFTAYLAKKRAEGKHYNVAISHAVKKLIRVIYHLEKTNQQYIKAS

SEQ ID NO: 104336 - protein, 433 aa, unidentified
MLKINYMSTLFVGIDVSSKTNAVYAMDFEENKYISSSFGNNQPGADQLVDMIAECMQKHQNLDTLLIVLESTSVYSVHISNFLSTSEVLMPYKPYVFCVNPKATSNYRKSYIGMEKTDPTDAYLIADFGRVGRTKKLEPWRGGQFIALKRLTRHRMHLSECITREKTYMVSNLYLKFSELQLLEGDDKPFGSLYGATSSAVLTEFLSPQEIIDMPEEDLLAFLAEKSRNRISDISKTSELLRKAARDSYRLDKCMYEPLNISLASSFNCIHAYQKEIRLIEQAIGKCINGMNPNALIILRSIPGIGPVWASGILSEIGDITAFHSSDALAKYAGLYWPKGDSGDFTSEDNQMSKAGNPYLRYYLGEAANSVRKHIPEYADFYARKYAEVTRHQHKRALALTSRKFVRLVFGLLVKNQLYTGEKLDTEYNTESN

SEQ ID NO: 104337 - protein, 382 aa, unidentified
MQTIDTVNPTILLAIELSASTWLVAARVPGLEKPHLHRIDGGDTAALLALISSLQARAARRLDATISVVCCFEAGRDGFWLHRLLTAHGVVCHVLEPTSILVNRRARRAKTDRLDAEGMLRVLAAYLRGDHQACSMVRVPTPEEEDAKRTHREREKLVQEKLRIENRIEALLFTQGIRKRPSLRSWERDLAVLRTGDGREIPRHLRAELDRLRRRLIMTLELIREVEAERDQAAKTKPQDQACHKIAALSRIRGIGENFAAVLTREVFYRSFDNRRQIASYVGITPMPYQSGGMDRDRRISRAGNPRARTTMIQLAWLWLRYQPGSELAEWFRERVGTLAGRTRRIAIVALARKLLIALWRYTETGVIPAGAEIRAEITVAA

SEQ ID NO: 104338 - protein, 320 aa, unidentified
MAQQGRIVGIDVAKLKADACIRSLQLRLSQPSTAQGQQDMITWLRRNEVGLAVMEASGGYERVWAEALRAAAIAVRIVDPKRVRYFAKSAGRLAKNDPIDAEMIAWFAETFAVAAEPAHDADRDALNRLGTARSLLVRLATPIRQLGEHGQPRVVENAQRAILKTIKAQLAKLEAAIEAKIAANAQFLARRAIIASVPGFGDHFVAGALAWLPELGRIGNKAAAGLVGVAPYDDDSGQHRGERHIKGGRRDIRTLLYMAALGAATRHNPVVMAYYKRLRAKGKKTKVALVACMRKLVVILNTMLARGEMWNPTPRTTAVA

SEQ ID NO: 104339 - protein, 363 aa, unidentified
MSESTRVTVGLDVHARSIRLAAVCADELLEERTLAYDEEQLERLLRRWPAVRCCYEAGPTGFGLYRRLVEGGIECAVVAPGLVPQRPGERVKTDPRDARKLARLHAGGLLEPIYVPSPELEAARDLVRAREDARLDRMRDRQRLSKFCLRHGRLLPTSAWTVSRRTWLGQQRFEHAAQQLTFDTYLHALDLVDHRIDALEKAIRETAEQGSWRQLVARLRCLRGVDTHTALALAVEIGDFGRFGSAEQFMAFVGLVPSERSSGEQRRQGSITKVGNAHVRRLLVESAWHSRRRPTVGYQLARRQRGQDAAVIEHAWRCQQRLHQRWQRMAGRGKPQQKIVVACARELAGFVWALATGQPLRNL

SEQ ID NO: 104340 - protein, 370 aa, unidentified
MSQSSTLFIGMDVHKDSIAVAYVAQDHGAEVASLGTIGTRQCDIDQLIRKMQSKAKHLVFIYEAGPCGYWLYRHLRKKDYDCWVVAPSLIPKKAGDRVKTDRRDAVQLARLARSGDLTAVYVPKVEDEAIRDLTRAREDTLSDRKDAKFRLKAFLLRHDIRYTGRANWSPAHLRWLSEVSCPTPAQQIVFQEYVRAVHEHTERLQRLEQELQDHVQAWRLHPVVEALQALRGVQFTVAVTMVAEIGDLTRFDTPRELMKFLGLVPSEYSSGERRQQGSITKAGNTHARRALVEGAWAYRYPAKVSRHLQLRLEKQPKIIQDISWKAQVRLCKRSRRLVARGKHANVVTVAIARELVGFMWAIAKEIPVKP

SEQ ID NO: 104341 - protein, 321 aa, unidentified
MQEKSILGVDVSKSKIDVCLIVGEKIRHKLFDNNHKAFAKLVDWCTGQGASFMHVCMEATGHYMEDIAHYMNDLGYIVSIINPSQIKNYTKTELLRGKTDKSDAQAIAWFCLKHNPKAWIPQAKEERVLRDLLRCMDSLKKHKIQLHNRLENDKDDKIARNHLSKVIKSIEEEIEQIMVEINDHLNTYPDLMDKVKLISQIKGIGKLTSCFIIAEMPNTDNFKSAKEFAAYAGLTPGQHRSGSSVYKKSRICKIGSNRARKALYMPALVVKNHNKYFKFFCDRLISRGKAGKVVVVALMRKLLHVIYGMLKSKENFNPDLI

SEQ ID NO: 104342 - protein, 340 aa, unidentified
MQIITVGLDIAKNVFQVHGVDGEGRAVLRRKIRRDQLLNLFGGLEPCLVGMEACATAHHWARELGALGHEVRLMPPAYVKAYVKRNKNDAADAEAICEAVRRPTMRFVPIKSTEAQSVLMLHRARHLLVRQRTAQVSAMRGHLAEYGIVAAKGISRLRDLLPALDASAGVLPELARQTLLLIAQLIEALTMQIRKIETELLAWHRGNPASQRLETIPGIGVITATALAATVLDAKAFRSGRQFAAWLGLVPRQNSSGGKDRLGSISKMGDRYLRHLLVVGATAVVRYTRRKTTTISIWANRLLDRKPARLVTVAVANKMARIAWAVMAREENYRSTAAAV

SEQ ID NO: 104343 - protein, 338 aa, unidentified
MIKNASSLVRIGRCSSVGIDVSKATLEVVGLGVSHAWKRTIANQCADVERLARSLVQANYRGKIVCESTGHYHYLLALVFSRHGLDLRVINPLQSSKHQRSRIRKTKTDPVDGYVLATMCQTERDLPQAAHLQPEQVLARLRQGQLHSLDKTIQRLTRSLATYRETYEHLGLEAGKAIEDIEAALSHLRRAKRELESELEAIFAELAGSEDITKLRALPGFSTLVAAMVAGGLNRNVKSERSWVAFTGLDVSIRESGTWKGRGRLTKRGNSFFRKRLYAAAWGAWMNYPEVKRAYDRLKAQGRHHTEALCMIARKLLRIAYAVLVKGKSFNIETAFPA

SEQ ID NO: 104344 - protein, 342 aa, unidentified
MGQITTIGLDIAKSIFQVHGVDAAGEVVLRRRLTRARVVPFFEKLARCLVGIEACATSHHWARELRKLGHDVRLMPPSYVKAYVKRQKNDTADAEAICEAVTRPTMRFVEVKTPQQQSVMVLHGTRTMLMRQRIQLSNVIRAYMAEFGLVAPIGREGLLTLIDALHEEREDRVPAEARHCLQMLADQLRLVNTQILENDRKIRLSARATDVGRRLMGIPGVGPVLASAFVATVPDPHAFRSGRSLAAWIGLVPRQNSSGGKERLGGITKQGNRYLRQLLFVGAMAVIRYAERHGTRRPWLVQLLARRTTKVAAAALANKTARIVWAIMTSGQPYREPELKAA

SEQ ID NO: 104345 - protein, 343 aa, unidentified
MEPMYYIGLDVHKRKISYCVKDNSGRVFAEGLLSATRLDLDHWMKTLPQPWTAAMEATMFTGWIYDHLKPHAAALKVAHPLMLRAIAAAKKKNDRVDAGKICDCLRCDFLPESYMASTAIRERRRTLRYRNLLVRQMVQMKIKTSALLMEAGVSYNKQRLHKAGYFRELLATNPDIDAGLCSLLRLCRETVVRLGKTESALVRSLERDSLLVERVERLMTIPAVGPITALTWALEVGDVQRFSSIKKAISYCGLCGAEKSSGNTVQRTPLSKQRNKHLQTTLIEAAKMAPRNSPELAMLYDQEKQKGNANRATLAVARKLVAYLMAVDRGQRNFQVATRNIAA

SEQ ID NO: 104346 - protein, 374 aa, unidentified
MAGDYNAFVGLDLHKETISAAIADAGRDGEVRLIGVIQNQPEAIGKLARKLIARHGKVEFVYEAGPCGYGVYRQLIALGLDCRIVAPSHTPVRPGNRQKNDTRDAVMLARLLRAGELTYVWVPDPVHEAMRDLVRARHVASHDTRKARTLIQLFLLKHGLRYEGKSWSNRHRRWLTDRRFEHRGQQIAFQSYLNRLNQAEARKKELEMQIADLMPDWSLGPMVTALRSLKGVGMVVAATLVAEVGEFSRFASPRKLMAYLGLVPGEHSSGGSIRPRGITKAGNSDMRALLFEAAWSYRTTPKVGQWMSTRTSNVPQEAKDIAWKAQLRLNSRYRKLVGRGKKSNVAITAVARELVGFMWDLARRFEPAPGAVPA

SEQ ID NO: 104347 - protein, 337 aa, unidentified
MKYCGIDLHSNNCVVIVSDETDRIVFSKRLPNELGRIREALELHREELTGLVIESTYNWYWLVDGLMDAGYRVHLAHPSAIKKYEGLKHSGDFADAAYLAQLLRLGLLAEGYIYPREERAVRDLARKRMQLVRYRTAQILSIENIVTRQTGARLKGQAVKRLRAEQVDEFAFAPDIALAVEANRAVSQALGQQIEALERRLKERVSLRSEYRLLKTVPGIGETLATTIMLETGCIGRFAQVGNFSSYCRCVDSLRESNGKKKGEGNSKNGNKYLAWAFVEAANFALRYCAQARSFYDRKKSQTNRVLAIKALAHKLARACYHMLRDQKPFDVSRCFG

SEQ ID NO: 104348 - protein, 440 aa, unidentified
MPILNADAAGVDIGATEIYVAVPADRDPEPIRMFPTFTLDLIHLAEWLQQCRVRTVAMESTGVYWVPLMQILEVRGLEVYLVNAKHVKNVPGRRTDVSDCQWLQYLHSVGLLRASFRPASDVCAIRSLLRHRDSLVEMATSHVQHMQKALDQMNLQIRHVISDITGTTGLAIIDAILGGNRDTQTLAALSDPRIRANQETIARSLVGDYRQEHLFTLQQSVDLYREYQRRIADCEEEMRRLMKTLETRADLPMSLPVAKDSVKKCKVMTPAKALELREEAYRVLGVDLTTIPGISVLHVQAILAELGRDVSKFRSAGAFSSWMGLCPDNDISGGKVLWTGTRKIKNRVAVTLRMAAQSLQKSQSALGEFYRRMRTRLGAPKAITAAAHKLARVIYHMLKTRESYDESVFARAEFKHRQRTENRLRALAQNLGYTLIPAHS

SEQ ID NO: 104349 - protein, 339 aa, unidentified
MLYIGLDVHKEFCQACVIDESGRALSNERFSSTNEELDRHLDRFQDAKFVLESTGIWEFIYEGIERRGFEVQLAHPLKVRAIAEARVKTDKVDAHTLAQLLRADLIPRSWIPPKDMRDLRQLVRQRAYLVREASRFKNRIHAEILRRGVRRPENMRTPFSQRSIRWMRSLDIPTVTSCLNCLESVQAQVEEINIQLREEFGRRPDAQLIATVPGIGFYGALLILAEIDDVHRFHHPEKLCAYAGLVPTVSQSASSVKYGSISKDGSAYLRWILTESVHVHTRYDPGSQLSRFHARVAKRRGRLVATVATSRKLLRIIYWMLLRHEPYHGHGFNPVKDLH

SEQ ID NO: 104350 - protein, 346 aa, unidentified
MTNNIQFSSVCGIDIAKSVMQVYRVTSDGVVSNKAVKRADFLNEFRNIPPALIGMEACGGSQHWARELQSLGHTVRLMPPKLVKPYVTGLKNDKNDARGIYTALEMGVREVPVKSAAIRDLALLQTMRTKRQKEKVAKINHIRGILTEYGLVMGKSVNAFLAKAGSLIIELKERADVSPYIVSELLALFQEVKEAIAKIKELETNIESIAKTLKHYDLFQSALGVGPITAATMLVLLCNPEVFKNGREFAAYIGLAPKSSGSDGKNFVTHIPKKYECNNEVRTLLVQCAHAICRSKHKSDWVSSILARKPKKVAIIAVANKLARQLWVMAKKGEKFERRLILAAAQ

SEQ ID NO: 104351 - protein, 405 aa, unidentified
MNAVGIDVSKGKSTVTIRRPGDVVLMPPCDIPHTQSAINALIEQIKSLDGETKACMEHTGRYYEPVANWLSDAGIFVSAVNPILIRDFGDDSLRTPKTDKADSKKIARYALDRWAKLKQYGSMDKTRSQLKTMNRQFGFYMDQKTAMKNNLISLLDQTYPGANDFFDSPARSDGSQKWVDFVYTYWHVDCVRSKSLQAFTEHYQKWCKRNGYNFSVAKAEKIYQSSSDLIAVFPKDDSTKTLIRQAVTMLNTASQTVESLRLKMDQTAATLPEYPVVMAMNGVGPSLGPQLMAEIGDVTRFTHRESLTAFAGVDPGKNDSGKRNQKSVRTSKKGSPSLRKTLFQIMDGLIKRSPVDDPVYAFMDKKRSEGKPYYVYMTAGANKFLRIYYGRVKEYFASLEGTKES

SEQ ID NO: 104352 - protein, 458 aa, unidentified
MNNFYLGCDVSKGYADFIIINEDKQIVLDSFQLDDTALGHQQLCSILGTFSGEHSGSVIYSAVESTGGYENNWYTSLWNLQSKMCIYVARVNPLGTNHNSKASMSRIITDKNAAKNIAEYLINHKKKIIFNKDDKFSSLRKQWTFVRMLTKQRTQLYNQLESILYIANPEMLIYCKHGYPNWLLTVILNYPTAKRLSKVRVATLSSIPYLNEQKAISLINKARVSVAASDDDVTANLIISLVKQIIELSKTIDRQSKFIADNCKLPEIEILKSFPGIGDYSAIGLLLNICSTEYYQSTKNLASYFGIHPIWKQSGDGTWGMHMSKQGKKEVRNILYMVAKTAIVHNERIREIYARHLKKGMNKTAAIGVCMHKILRIVFGMLKHNEKFNPEKDSANSQKMLKDNKQVKAVTNKLRRYQKLDLTAPISRRQTKKRKEQEKSQNEITSFSTGSIPHSFSD

SEQ ID NO: 104353 - protein, 390 aa, unidentified
MLLLGVDIAKLNHVASLVDSSSGELIFSNFKFQNNILGFSSLLEKISKFSINEIVIGLESTGHYGENFINFFFQKGFKIAVINPLQTSHLRKANIRDSKNDRLDSINIARALLFGEHRYISQKNLTNFALKKLTRFRKSLIKQKTKTKIQLVSLLDIIFPELQYFFKSGVHSNAVYTLLKKYPSTEKIAALREKSLFSILNKASKGHYKEEHALQLKSLAKSSVGIKDTSVSMHIPQLIELIEMLDSQIKSIEKEIDSSIDEESPILTIPGINTVAAASILGEINDIDNFDSSSKLLAFSGLDPKIRQSGNFSASSCRMSKKGSPYLRYALIFTAWNLVRNSETFNRYYLSKRAQGKSHYNALGHTAHKLVRVVYTLLKKNISYQENLIV

SEQ ID NO: 104354 - protein, 356 aa, unidentified
MPPIAPADVVVGVDTHKHVHAAIALSGLGARLGTITVPASAEGYRELEAWACSFGAVHAFGIEGTGSYGAGLARALAGRGHAVIEVNRPNRQLRHQQGKSDPLDAESAARAVLGGQATARPKSGTSTVEMIRHLKVARDTAVKSRTRAMITLKTLIVNAPAPLREQLDHLSSRMALIHHLAALRPGALTSTTASTKVALRALARRWLALDAEIKEHDLALDALTDACAAGLKRAHGIATGPAAERLILVGDNPERIRSEAAFAKLCGTCPVPASSGKTTRHRLNRGGNRQANAALYRVVITRMRSHPPTLAYVAKRLAEGRTKREIVRCLKRYGAREIFGHLCGPKLRAACRPEGA

SEQ ID NO: 104355 - protein, 355 aa, unidentified
MDDLKYIGMDVHSATTTIAVQDSRGRLVMEATVATQAAALSDFLRGLRGRLWLTFEEGNWAAWLTQVLTPQVEKLIVCNPRRNASLKQGNKSDPLDARELAHLLQANLLKPVYHEADGAPTLQELARAYTTCVSDTTRVMNRIKARYRARGILCSGSRVYRPRFRQAWFEQLTDPGARQRVELLYAQLDLLQELRKRARQALRTEARRDPAYALLRTVPGIGPVRAALLLALLRTPFRFRTKRQLWTYAGLGLVTRDTGQYQIVGGQIIRRQRPARVRGLNPQHNRELKEIFKSAALAATRPSSLLHAFYQQRLDQGMRPHLARLTLARKIASLTLTLWKKGERFNAHALTSQAE

SEQ ID NO: 104356 - protein, 338 aa, unidentified
MKITTVGLDLAKVIFTVHGVDEHGKAVLRKTVRRAKLLELFAQLPACVVGMEACSGAQHWARELRKLGHEPRIMAAEFVEPYRQGGKNDANDAAAICEAVSRPTMRFVAVKSVEQQAVLAVHRVRQGLVEERTALGNRLRGLLAEYGVVVGTGLDRLRRALPEILEDGANTIPGIAREVFADAEQHLRQLDARIATYDRRIAALAKASAPAQRLMKVEGVGPVTATALVASVGDAKVFHNGRQFAAWLGLTPRQHSTGGKQRLGAMTKHGDVCLRTLLIHGARAVLRVSPLRSDAKSRWVQTLRQRRPDNVAAVALAAKTARISWALLARDRNYQSTD

SEQ ID NO: 104357 - protein, 424 aa, unidentified
MNLTQNDRLKQVTSDTLIVGVDVGSQTHFCRAFDWRGFELSRRVFKFSNTGMGFLTFLRWTEELMNKTEMKKVIVGCEPTGCYWLTFQKFLQDHDIQLVTVNPFTVNRSMELDDNSPEKSDLKDPKTIALLVKDGRFSTSYLPSGVYAEIREASVCRDQIMKQHVRLSNQIQGWLQKFFPEYFECYADWDSASGLMLLKEAPLPQDILKIGAGGVNQIWRDAKVRAAGIKRAQTLVEAAQNSVGLEAGEAARLEIWVLVNDYILKAEQLKRLDEYLEEKVKEVPNVEKLLAIKGVGKSTVIGFIAEVGDIGRFTDPKQIQKLAGLEIVKKSSGKKKGQPRISKRGRRKLRRTMYESAKALMLWNPAFQDVFLYYRNRTRNPLGGMQAKIAVACKAIRVFYVVLQTGCDFDEEKFRKDIIRPEAA

SEQ ID NO: 104358 - protein, 361 aa, unidentified
MTKATCLVGLDVHARQTHAAVLHLESGELAVSRLRMTPEEVASFLERLPGEAVAVYEAGPTGFGLARTGRRRGIDVRVVAPGSIPKGPGDRVKTDRRDAIRLVRLLAAGELTFAFVPTEEDEAFRDLIRCIEDLRGDLMRARHRLSKFLLRRGRRYEEKSTWGSTHLRWLRAIAFDDGCSEATFVDYLASVELLGGRRRTLLEVLETQVPGCAHAPTIARLRCFRGIDTLSASGLCAEVGCFARFPKPGLMSGFLGIVPSERTSDTKRRQGSITKAGPGHARRLLIEAAHQYRRRPAIGETLARRQQGQDPRIIEIAWRAQRRLYQRWQHLREARRKPAGVVAIAVARELAGFLWEAAVLD

SEQ ID NO: 104359 - protein, 391 aa, unidentified
MRVHRNCCGLDVHKKMIAACLLTEDAEGNTVTEKRLFGSMTGELHALAQWLCTAQVTAVAMEATGVYWMPVWNVLEQYGLQLLLINPEHYKAVRGKKTDLKDGTRIAELLQDGRLEGSYVPPVAIRVLRDLTRYRTKLVQYQSAIANRIQKLLEQCNIKLASVASDVLGVSAMAMLRALAQGETDAARMADMAKRQLRKKIPQLQLALEGCLLPHHRWLLREMIEDLDHVGAKITRIEETIEQHMRPFQNAVNTWLTVPGIKHRLAWILVAEVGPTVEAFPSAADLVSWAGVCPGNNQTAGKRKSGTTRAGNPWLRRALCEAAWAAAKTKGTYLQAQFRRLAALRGPKRALMAVASSILTAGYYMLQRATRYQDLGLTTSTNATAFGPPVA

SEQ ID NO: 104360 - protein, 318 aa, unidentified
MTNLEMAEYVGVDVSKARLDIAVEATGECWSVANDEAGVSDLIDRLSQMALGRVVVEATGGQERLLVSRLSDAGLPVSLVNPKQTRHFARGLGRRAKTDRIDALVLACFGRVTQPILYVSLSEQAEELSALVERRQQLVESLTAEKNRLGTARPAARPSLEAHIRWLEQEIESLRRQIEALLQQTADLKSKSEILQSTPGVGLITSVTFLAALPELGHLNRKQAAALVGVAPFNHDSGATHGARYCSGGRAAVRTALYMATLSAIRCNPLIRDFYICLKDRGKPSKVALVACMRKLLTILNAMIRDCIPWMPQKVATP

SEQ ID NO: 104361 - protein, 323 aa, unidentified
MTYIGIDISKDSFVAAFPTVSGYQTQTYPNTVKGIRKFIGSLSVTEHHCVMEATGNYGFLLLYLLDRQGIAASMVNPKQIKHFSRMMMAVTKTDPKDACMIAMYGEKMNPPVYKMPSETVMLLKQKKTIIRQLKKQLTASRNLRSSLVVLPFQDKNGMKALDKTISFLASQIESLESELADLASSEFDRQVKLLTSIKGIGITLATALIVATGGFSYFNNAKQVSRFIGICPTYQQSGTSVHIKGGINRNGDASLRSLLYVASWSALRGNTTCKECYTRLKANGKPSKVALIAVANKLVRQAFAVIKSDAPYVDGFVSTQQTK

SEQ ID NO: 104362 - protein, 504 aa, unidentified
MRAGIETVAFTGVSAPAWESGSHGIGVESLKAQHAVTSYRRVNPFATVFPARPSILRGFFMARKNQKKRFEIVHHHCAGIDVGSREHWVAVDPSSCADSVRSFTTFTDDLIALADWLESLKISVVAMEATGVYWIPAFEILDARGFDVYLVNSRATRQVSGRKSDVLDCQWIWQLMTHGLLSGAFRPSDEICAMRSLVRQRANKVRDQAKSINRMQKALSQMNIQLANVISDITGVTGMKIIRAILAGERNPNVLATHRDGRIKVDQSTIARSLHGNWRVEHLHALRQEVECQDFLDQQIEACDIAIGQLLARLPTLSEDVKAPAKVLRSPHRSSADQLMLHKALNQIMGVDLTAIPTIGVDTALVLASEIGPDLNRFPTSQHFCSWLGLAPPTRISGGKQLASKPSKVLNRSAQALKQAASNARNDKSFIGASHRSRLARMDASCAIKATAHQLARLIYAMLTKGQPYVEQGIEAYEAKSHDRQLRALERKARKLGYQLAPAA

SEQ ID NO: 104363 - protein, 316 aa, unidentified
MNASGVFVGIDVSKETLDVAVRPSGERWRTTNDERGITELVSRLRPMGATLVVMEATGGYETALALSMVEAKIAMRIVNPRQVRDFAKGKGLLAKTDSLDAAILAEYGEIYRPEARVLLDEQAREMADLLSRRRQLIEMKTAENNRLEHARGQVRKEILAHLSWLSRRIKKIDEDLDKRIRNSPLYLDKRERLKSVPGVGNQTALSLILNLPELGTLNRKQIAALAGVAPFNKDSGRRRGKRSIWGGRAQVRAVLYMAAVVASRHNDVFRDFYAKLCAAGKPKKLALTACMRKLLTVLNAMAKNQTSWTPSLATAR

SEQ ID NO: 104364 - protein, 436 aa, unidentified
MRGCRCSMIMGFTKPIEHSNLTRKEGDFMNPLYVGIDVSSKSNVVYFMLPDGSKHSNFSVANSHDGSTQLVKRIHAAIESMSLDTVLIGLESTSVYGDNLVYFLREDESLAPFNRKIHVLNPKQVKKFKDAYNDLPKNDYVDSFVIADCLRFGRINKEVYIGDYRYKALQNLTRARFFTVCNLTKEKQRFINVLFKKYSTITQEKVFSDTFSTTALAVYDEFESAEALAYMDLQELTAFIIKKGKNRFPDPDAVAKAIQKAARSSYRLPKTVNDSVNQVLSISITSIKALEVQIKEFDKAISAQIQLLPNVLISIPGIGPVYSAGIMAEIGDINRFANQAQLAKYAGLAWTQYQSGNFEAENTRLIKSGNRFLKYYLCEAAFSLVRCDKEYKAFYHQKYKEVNRYQHKRALALTARKFVRLVFTLLKDNRLYRSAK

SEQ ID NO: 104365 - protein, 343 aa, unidentified
MSNDTRIAVDVAKSVFEVAISDRPGRVSRRERPLRAQFLNFFANQPAATVVMEACGSSHYWARRIESLGHKVVLLPPHHVRPYVRRNKTDRTDAKGILEASRNEDIHPVPVKTVAQQVLTSLHRLRQAWMTERTARINTLRGLLRELGIFIPVGARGVIPAVWAVLEDADCDLPDALRPFFAEACHEIRAIEARIKDVERRLEAMSEELPAVGHLRTIPGIGLLTATALVAFLGDIRRFPSGRHLASYLGLTPREYSSGLKRHLGRISKRGDGYLRTLLIHGARSVLLRAHTKQPDRLREWAHNLAKTHVHNKATVALANKMARIVWAVWTHQRPFASPSNAA

SEQ ID NO: 104366 - protein, 350 aa, unidentified
MIIIGCDFHTRYQQIAMMDTETGELVERRLEHENGEARAFYASLPKPVVVGMEATGYAQWFERMLAEFGHELWIGHASEIRAGVVRKQKTDARDALHLLHLLLEKRFPRIWIPSPAERDTRQLLRHRHKLVCFRVSVKNQLHALAMSQGVCRKKKLFTAQGREVLEKLSLGPWARRRCQELLEMLDQLNTVIEELDRAVQQQAESHAEAARLMRHPGVGPVTALAFVLTLGPVTRFRRSKHVVSYLGLNPKERSSGGKQRTSTISKQGNTMMRWLLVEAAQTAARYDPELLRLYQRLKFRRGANVAKVAIARKLAVKLYWMLRATATCVQRAPMQGSSRGTLVPQAGSSF

SEQ ID NO: 104367 - protein, 343 aa, unidentified
MEKITTIGLDLAKTVFQIHAIAADGRVIVRRALRRSQLLDFFRNLDSCLVGIEACASAHYWANAISSFGHTVKLMPPAYVKAYLKRNKTDAADAEAICEAVTRPTMRFVPIKNSQELAAGMVLKTRELFVRQRTQTANAMRSHLAELGIIGATGMTSIAKLISILRDMEDSRLPSTARSALLEMAEQIEKLTVRINSLDTQIVNAVKADDTARRLTSIPGVGPIIAASTRAAVQDPGSFRTGRDFAAWIGLTPRSHSSGGKERLGHISKRGNKQLRTLLIVGATSVLKQARRGLPLPAWIAALISRRPYKVAAVALANRMARTIWALLVKGGTYEAPALMARM

SEQ ID NO: 104368 - protein, 312 aa, unidentified
MDAIVCGIDVSKNRLDVAVRPTGETLAFNRTAEGIEDLVAWLRALSPKLAAIEATGGYEVVVAAGLAGAGLPVVVVNPAQVRSFAQALGKRAKTDPIDAAVIAHFAEATKPELRQMPDEMTRLLADLVARRRQIVEMITAEGQRVRRISDNRLIKSIARLRKALEKELAELDVLIEDLVSGSTVWVEKEDLLASVPGVGKVIARTLIAELPELGSLDRRQIAALVGLAPWTRQSGQWRGKSFIGGGRKSVRSSLFVGAMVAARYNPQLKRFRDKLVAAGKPKRLALVAVARKLITILNAILRDRRPWQPTTA

SEQ ID NO: 104369 - protein, 400 aa, unidentified
MRVVFGIDVSKASSEVAILVNGEKVHGYTISNDAIGFARLLGDLRTVHKPEIIFEATGVYSRRLQTFLDDNGYAYTRLNPLETKKQLDSLRVRKTDQIDAEKLAQSQFVLNRKPTYVQEEVYQNLRDLSRFYQNLTEDIVRAKNRLHKVLQVTFPELENILSTPSGEQYWNLVIAFPCKDCVLELSNDELSKSIRLSTSKRISDKRVAYLAEKLIALANQSYCAVKKTSPILEEVRYYTKELLRLSEQRQAVLDEMVELAQPLPEYDILLSIPGIAETTATSIIGELGDIRRFQSANQINAFIGIDLRHYESGNFLAKEHITKRGNPYARKILFKCIHNIASANHTNPCHIADFYKKRKRQSQTTSTKLHTIASIHRFIRTMYYLIMHNKFYDYASTQNR

SEQ ID NO: 104370 - protein, 356 aa, unidentified
MNHVNKIDFTGQQIYVGMDVHKKSWSISIYTDQFEHKTFSQPPEVGVLVNYLKRNFPGAAYKSVYEAGYSGFWIHDRLQEQGVQCLVVNPADVPTKDKERAGKTDRVDCRKLARSLRSGEIEGIYVPSRPKAEDRSLLRTRHSVVRKQTRCKNQIKAILCFYGIHIPDELANSHWSKRFITWIESIRMERASGDLALKVHLVELMHIRQTIAELNRAIRALAGTDDYRNNVRILKTVPGVSVLTAMTLLTELYDVNRFKTLDKLCSYVGLIPNTDSSGETNRKTGMTGRRNAQLRVILIESAWTAVRKDPALMMTFDGLSKHMTKTKAIVRIARKLLNRIRFVLKNQQEYVSAVVQ

SEQ ID NO: 104371 - protein, 348 aa, unidentified
MEHYAGIDVSLELSSVCVVDAKGKIIKEAKVGSDPESLVTFFRGLGVAIERIGLEAGPLSQWLYARLTQSGFDTVLLETRHVKAALSAMTVKTDRKDARGIAQLIRMGWFRPVHCKSVGSQEIRALLVGRKLLLGKLLDVEFSIRGILRGFGLKMGLVTRKSFEGRVRELSAGQPMLEQIGSAMLAARAALLTEYAKLHKAMLDIVRNDQVCRRLMTTPGVGPLVAITFKTGVDDPQRIRKSKAVGALFGLTPRKYQSGETDVTGVITRVGDEMVRGALYEAANVLLSRVTRFSALKRWGMDVAKRRGAKRAKVALARKMGVILHRMWVDGSNFRWTREANAPQLTRA

SEQ ID NO: 104372 - protein, 422 aa, unidentified
MLKINYMSTLFVGIDVSSKSNAVFAMDFEENTYISSSFGNNQPGADKLVDTIAQCMHKHKNLNTILLVLEATSVYSVHIANFLSTCEVLMPYNPYVFCVNPKQTANYRKSYIGMEKTDPTDAYRIADFARVGRTKKLEPWRGGQFIALKRLTRHRRHLSECITREKAYMVSNLYLKFSELQLLEDNDRPFANIYGATSSAVLTEFLSPQEIIDASEEDLLCFLAQKRKNRISDLSKTSQLLQKAARDSYRLDKCMYEPLNISLASSFNCIHAFQKEMKGIEQAIAKCMNGMNPNALIILQSIPGVGPVWASGILSEIGDIAAFHSSDALAKYAGLYWPKGDSGDFSSEDTKMSKAGNPYLRYYLAEAANSVRKHVPEYAEVTKHQHKRALALTSRKFVRLVFGLLAKNQLYTGEKLDAELNT

SEQ ID NO: 104373 - protein, 307 aa, unidentified
MFVGIDVAKDRLDVHVRPAGESFVVARDGEGIEELAKRLNTMTPTLVVLEATGGFETVVAAGLAAAGLPVVVVNPRQIRDFARATARLAKTDTLDAAVIAHFAEAVNPPVRLLADPQQRLLGELMARRRQLIEMMVAEGNRRRLLTARRTLKSVDRVLATLKAQLEEIDHDIDIAVRGTPAWREAEDLLISVPGIGHKIARTLLAEMPELGRLDRRQIAALTGVAPFNRDSGTLRGRRTITGGRIVVRSALYMSVLVSIRRKLPLAQTYHRLRASGKPAKVAIVACMRKLVTILNAILRDKKPWATA

SEQ ID NO: 104374 - protein, 320 aa, unidentified
MQCIGVDVSKQELVTYDGMKTRTFPNDRRLSGFSNYIDCAEHVVIVFEPTSTYSHRLQAFCARRDIPTCQLNPRIIPNLRKVSRKRSKTDQTDAELLYQYGMDRGRDEARAPKQVDRLGHALSAQLALYRVIQKARIAYQGLLEAWINDPSTPKTLLNRLRADIAAMKEKEADCVARAEEIVEADEEASSTLQTLMNIPGLGPITSVTLLTFFRRYQTTNREQTVALAGLDPMQYQSGTSVHRRGRISKRGSRELRKRLYEATLSAARYNVSVRQLYQRLKEAGKPEKVARTAAARKLLLIAHAIYKTGEHYHSPINQGP

SEQ ID NO: 104375 - protein, 407 aa, unidentified
MEVVYKRVCGIDIHKKQITICIIINGAKEFHMFGTTTGELLDFCGLLKDKGVEISAMESTASYWKPVYNLMEVEGLSAILVNAQHIKNVPGRKTDVKDSEWIADLLRHGLLRPSFVPPRDHRELREIVRYRASIVDERAREINRMEKVLQGANIKLTSAISSVTTASGMDMIRAISEGVTDSSVLAAFARGNMKAKTEELKKTLDGLVQEHQRTILKSMLDHIEFLSEQVQGLDEDIYRRLEESGDLIERLDEIPGVGRRSAEVIIAEIGTDMSQFPSAAHLASWAGVCPGNNKSAGKNKSGKTRKGNPTLKKTVIQCAKSAGRTKNTYLGSLYKRIAARRGANRAAVAVGHAILKICYHMIRDGSSYADLGADYFNSRNEDYIVKSSKRRLESLGYTVIIEKAGAA

SEQ ID NO: 104376 - protein, 343 aa, unidentified
MKLHVIGIDLGKTIFHLVGLDSTGKAVIRKKCSRKQLLAFTANLEVQLIGMESCSGSHFLGRALREQGHEVRLMPAQYVKPYVQTNKSDYLDAEAIAEAVQRPRMRFVPIKTEEQLDLQALHRVRERWVMRRTAVVNQIRSLLLERGLTLPKGRRYVDEQLPRILEDAEWRLSGSFRVLLAQLKRELEQLTARIEEMDRVMQKTAKENEDCQRLTEIPGVGPVIATALIGAVGNASTFGKGRKLAAWMGIVPGEYTTGGKQKLLGISKRGNKYLRTLFIQGARSVVQQRHKQAPGLSRWIEQLLGRTHQNVVIVALANKLVRMAWAVLCKNERYRAPVLAVTP

SEQ ID NO: 104377 - protein, 411 aa, unidentified
MRLFVGDDWAEDHHDVEVMDEAGKVLARRRLPEGAAGMAGLHELIGGLLGEEADASQVLAGIETDHGPWVMALVAAGYRVFPVNPQQSARFRARHSVSGAKSDAGDAHVLADMVRTDAHQLREAAGDSPEAAGIKVLARTHKTMIWERTREVQRLRHQLLEYFPAALQAFGDLDAPEALELLAKAPDPGRARRLTGAQVSAALKRARRRNIPERATAILAALRGAQLAQPPALTAAYAATVRSLIAVITALDEQVKVLQGQVEEHFGRHPDAEVYLSQPGMGAILGARVLAEFGDDPARYRNGKSRRNYAATSPITRASGKKKVITARFVHNDRLIDALRAQAFAALTASPGARAFYDAQRAKGLQHNDALRRLANRLVGILHGCLKTRTRYDEATAWSHRENLPPNSAAA

SEQ ID NO: 104378 - protein, 290 aa, unidentified
MNIVFLGIDLAKNVFQLCGLNQAGKPVYTKRTGRKELLQTLANIPACLIGIEASTGAFYWQREFEKLGHKVKVISPQYVKPFVRGQKNDGNDAQAIAVALMQPTMQFVPPKSPEQQDIQALHRARQRIVNHRTATVCQIRGLLLDRGIPIGSAVSRARRAIPLILEDAENGLSSRMRRTIAELYDLFNDLGRRIHFFDKEIETVFRQSEACQRIAKVKGIGPETATAVVAAIGKGTEFKNGRHFAAWLGLVPRQHSSGDKHLRTLFIHGARAVVRVATNNNDGHMNQWVN

SEQ ID NO: 104379 - protein, 404 aa, unidentified
MIFVGVDWAEAHHDICVLDEAGEVLARKRIPDTLVGVRALHELLGEHAEEPEEVIVGIEKDRGLIVAAMLAANYRVYAVNPMSAARYRERHVTSGSKSDPGDAKVLADIVRTDRHNHREAAGDSENAEALKVLARAHQSAIWARHREANALRNALKDYYPGALVAFGTDLDDRDAVAVLEIAPTPALGRQLSKSRIVAALKRAGRMRNLERRAAEIQSALRDEQLAQGPVLELAYGHTTKAHVAMIRAYNVEIAELEEALTSGFEQHPDARIVLSLPGMGTVLGARVLGEFGDDPNRYANVKSRRNYAGTSPITRASGKSHVVLARHMRNRRLADALDQWAFCSLTRSAGARAYYDELRGRGKTHRQAIRQLANRWVGILHACLEQRVHYDENIAWKHRVDLAA

SEQ ID NO: 104380 - protein, 359 aa, unidentified
MNKLSKIETFFNTANLTAADQLFIGIDVHKKSYHVALYLNDAPSIDFVMPAKKEQLGQTLQPTLPALRQVTYETGFSGYGLARSLRKQHLPASVAATSKIPRSSAGEDKTDKLDSKKLAAYAAKGLLKTVPIPSIKQEADRQLYRMRHRQARNLAKVKNQIKSFLMMHDIEEPAGLGPWSHKGIAALKTIRLHPTLRLSLDELLGDLDYYMSRLKALDQSLAEHLDKGVLARRMALLKTHPGVGPVVACQFATELFHYRDFHSTREVYKYLGLAPRVHQSGDRSVRGSINKVSNARLRSNLIQAAWCWIRVDVNAKKTYLRFLNNNGGIKQKAITAMARKLSGHLWMMLIKDHPYDPTK

SEQ ID NO: 104381 - protein, 339 aa, unidentified
MDHFAGLDVSVKETSVCIVNDTGRIVREVKVASEPEALLAVLKNPAYHFERIGLEAGPLSQWLFSALAEAELPVVCVETRHMQAVLKAQINKTDRNDARGIAQMIRVGLYRPVHVKTLRSQKLRMLLTHRKLLQSKAIAIENDLRGTLRNFGLKVGKVRFEARIQELVENLPDLAELVEPLLIVRRALREQIVILHRRLLAIVRDDEVCRRLMTTPGVGPVVALTYRATVDVPARFRKSKSVGAVFGLTCSKYQSGEIDRSGSISRCGDEMMRVMLYEAAQSMLRSKKWSWLKAWAMQIARRRGMKKAIVALARRLAVIMHRIWVDGTEFRWTREAAAA

SEQ ID NO: 104382 - protein, 498 aa, unidentified
MGTKSRKQVKRLMSGSSYSSEELSSLTMDDGTTVVYSVNGDIKRSICGSVDVHKKILMAAICITDPDSLKSTFFVRKFTTMNADIRTMAGWFKNHGVQDVCMESTGKYWIPVFNILEQNDIKPILTHPKYVKQAKGHKTDFRDAIHMASLFRMDLVVASFIPPAEIRDLRELCRYRLKLTYIRTSEKNRFQNSMTISKVRLDSVFTDPFGKSASAIMEYLISTDPELVNDDDILALISRRGNVKASNEEILDSIHGYEFIGVQRDKLQIIRMHITQIDECIDMIDSKLEYYRQKYANIIHHLTTMVGITSMSALYILGEIGTDMSVWRDDHSLACWAGLSPANNASAGKKKSTKVGNGGHYLKPLLVQCALAAVKSTKKDPYFHHKYETLKKRRGHKKAIIAIARKMLVAIYHMIRDDTNFHPIDQEEVTQKTKKTQGLNLKNVLIFLKEHGADRNMIRMVEEQCSENTEIKDAKEKQSNLAITDASQPIQESVNGMS

SEQ ID NO: 104383 - protein, 350 aa, unidentified
MIIVGCDYHPGFQQIAFVDTDTGELQERRQEHSEVAEKFYRDLAAQGMKVRVGMEASGHARWFERLLAELNFELWIGDAAEIRAKRVRKQKTDRQDAQHILGLLLENRFPRIWVPNAENRDLRQLLWHRHRMVQARTRIMNQWQAVALNEGLRGKKKLWRQHGREQLESFRLAPWASRRRQDLLKLLDGLDPMIVELSQAIEQEVEKSPEAQRLRTHPGVGPLTAMAFVLIIGKPDRFQCGKQIAAYLGLVPLEDSSGSRRRLGHITKQGSSMLRFLLVEAAQVTARSIPEWRSKYFHLALRRGRKIAKVAMARRLAVALYWMWRKGWNYEQSRKFGSHAGQLGTGDGVQ

SEQ ID NO: 104384 - protein, 415 aa, unidentified
MTTQAFVPKRFIGLDIHKHYLVASGVDADLNPVLGLQRVEYIHLDHWMARTLHPDDALVIEMTTNTWQIYDDLLPHVGSVTVVHPPHVTLITRSQVMNDKIAATTLARLLAKGLLVGIWVPPKEVQDLRALIAQRNKMTRLATQSKNRLHAILHQHHVLPPAGDIFREDQQAWWLALELAPTEKVNLQSNLETLSFANRQIARMEDLLKSLAAKDPRVTRIIQLPGFGLINAMSILAAIGIIERFPTPTKLVGYAGLGGRVHSSGQTFRQGRITKAGRRDLRSAVVEAAQAAVNTHPHWKAELERLLPRLGRNKAIVAIARKLLVAVWHILANHETDRFAQPQIVARKMMQFTYLLGKANRPANLSTGQYVRQQLDNLGLAAEITQIDWGPKKAPIKLPPSELATKKKVSDIPRR

SEQ ID NO: 104385 - protein, 351 aa, unidentified
MQQTTSNSTTLTIGIDLGDSESAYCVLSPEGEVVEESNLVTTPEGLDEFLKGRPRCRIVIEACLHSHWVGRQLEAAGHEVVVTNPRRNALIAKSIRKNDRSDAHLLAEMGRSSLSLLHPVCIRDEQTLAVRSLLRARRTLVRTRARLVCMVRSQCKLFALPLPSCGVEVFVKRARQHIPEILQGILTPVLDMIDSLQEQIRAYNKRIDALGKETYPVTQLLRQVPGVGEQLSLAYVVALGSPKRFKNSRDVGAYLGLVPKQRQSGSKDPQLSISKQGDREVRTLLVNAAAYIMRRTSPDTTLKRFGKRIAARGGARDRARARVAVARKLAVILHRLWTTSEVYEPLRGATA

SEQ ID NO: 104386 - protein, 331 aa, unidentified
MISVGIDVSKEKSTVCILKPYGEMVCSPYEITHTEKDLSELAALIRHIDGDVRVVMEATGNYHLPILSYLKDRGVYVAVINPLIMKKYASVTLRKGKTDKLDAIKIASYGLDNWLHLVDYEASEEVYMQLRLLGRQYAHYIKIRIDSKLSLTNMLDSTMPGIKTLLQSRSYKPEKDKLNDFVEEYWHFNNITKKSEKQFIKSYISWAKKKGYHQSESKAIQIYALAKEGIPTLSSNAPSTKMLVLEAVRVLREVDKTLAMILSQMQVLARSLKEYAIVREMGGAGEILAPRLIAEIGDVRRFHSGKALIAYAGIDTPPYQSGQFTGSNRHI

SEQ ID NO: 104387 - protein, 337 aa, unidentified
MKYCGIDLHSNNCVVIVSDDNDRIVYQKRLPNELARVAAALEPYQHELVGVVVESTYNWYWLVDGLIDSGYRVHLAHPAAIRKYDGLKHSGDFGDAAYLAQLLRLGLLPEGYVYPREDRGARDLARKRMQLVRYRTAQILSIEGILMRQTGSRMSGETVKRLTAEQVDEFAFTPDVTLAMEANRAVSQALGQQIEALEKRLRERVSLRAEYHLLRTVPGIGDTLATTIMLETGSISRFARVGNFSSYCRCVDSLRESNGRKKGEGNTRNGNKYLAWAFVEAANFAMRYCPQARSFYDSKKSRTNRVLAIKALAHKLARACYHMLRDQKPFDVHLCFG

SEQ ID NO: 104388 - protein, 427 aa, unidentified
MKKIKIDHLSTLFVGIDIGSRTNVISALNFDQDFLIRMIPVANAQGGAEQMEEMIAQVLSQHHEFRAVIIGLESTGFYGVHIANYLSTSEKLAPFSTKVYCLNPNEVKQYKKSFNSLDKNDGIDPFVIADLARVGRIHTEPWRGAQYLALQRLTRHRLHITECIAREKTYMLNNIFLKSSEFAMLNKGEHPFSDKYGATAEAVLTDYLSTEDIVGASVDELVALISSKSRGRIADPEQTTYLLQKAAQDSYRLDQCLYEPLTVSIGCSFNCISAFEKELKAINAAIQRAVKGLNPTEYQILASVPGIGPVYASGILAELGTIKCFKSNDALAKYCGIVWKENQSGEFEAEDTPMNKAGNRYLRYYMIEAAGSVIQYCPEYKAFYDKKFAEVKTHQHKRALALTSRKLIRMLFGLLANGKLYSVEKSR

SEQ ID NO: 104389 - protein, 421 aa, unidentified
MQVLYERCAAIDVGKDVIAVAVRLPGDGPDGRATVKRTFKTFYGVLAEAARWLTSLGVTHVAMEATGIYSMPVYHALIEHGSFEKVLVCNAGHVKNVPGRKTDLADAEWLAHLLECGLLAGSFIPPADIKAARDVIRYRTKIVQSRTSELQRLGGVLQDAGIKIDSVASSIATKSGRAMIEALIDGERRGQVLAELAKGKMRAKIPDLSMALEGRFGEHHALMCRLHLDHIDHLEAMTTALDAQIEAMMTPFRAARDLLTTVPGIGPLAAAAVISEIGADVRGFFPDAAHLASWAGLCPGNHESAGKRRSGKPRHGNQHLQPVLVECAWAAVRHEGYLRSLYHRHVMKWGGYRSPLAKKKAIIVVAHALLVIIWHVLATGKPYDELGADYFTRRQDPERETRRLIARLQALGHQVTLQPAA

SEQ ID NO: 104390 - protein, 383 aa, unidentified
MQKIQETLQAQSTTTQDIMYIAFELSNSTWRLAFSDGNKKRHVTIKARDLKQLEREIEKAKRRFGLKDNVQIKSCYEAGRDGFWIHRYLLSKGIDNLVVDSSSIEVNRRKRRAKSDRLDAGNLLRLLMRYHGNERQVWKVVTAPTVKEEDARHLHREIETLLRERTRYRNRIRALLVQHGLDVKNPSRKNFLKVLNTLRSWDGQALPESMKARVVREHERLKMIEDHIKLLKKEREQRVKSKETASLRQVAQLRELCGIGVNSSWIFVMEFFGWREFRNRREVAALAGLTPTPYDSGGSQREQGISKAGNKRIRTMAVEIAWCWLRFQPHSKLSRWFNERFASGGSRMRRIGIVALARKLLISLWRYLEHGVIPEGAIIKSAS

SEQ ID NO: 104391 - protein, 359 aa, unidentified
MEHIVRDRMLIGIDVHKDTHTAVGVSPFGEKMFELTVGNYQKDFVALTAKVEAAARDAKLSPYFGLEDCHGYGERLAMYLDAAGYPVMHVASTLVDRQRHVNTHPEKSDSLDAYGVAEVMLRKSDTLPRYTVTEASTIAKDIKDVATDRQNIVLERTRLKNQLHDILHRIWNTAYKEKFIDPFSQKALRHWSRAECKGASLFLTRSMKRKVRRLQALHIEIKELDHELARLLKESGITIATASGCGTVVASTIIAEVGDINRFHSPAALAKYAGCAPREYGSGKKQRYRKTRSGNRRLNSAFHAMALTQISPTGNDKARTYFKKKMSEGKSKSQALVYLRRQLVNVIWCMMKYKTEYRS

SEQ ID NO: 104392 - protein, 370 aa, unidentified
MLNTTTFVGLDVHARSIKAVALDAMTGEVRSATFAYDAAAVAEWVGSLDPAAKCVYESGVTGFDLQKRLAALGVDCVVGAVSKMIKPSADRKRKNDRNDAEFLARMLSVGNVVEVWVPDDGCEAARDLVRALDDAREDLKRCKQRLSKFLMRHGYAFSETTPTGRRKGNWTAAHWAWIRSIEFPEKADDDVLAYYIDATRQAMEDKKRLEKLVEAEASKPRWKKRVDSLRCLKGVDAMTAADVVFEAGEFSRFKNARSFAAWLGLTPSEHSSGESVRQGGITKAGNKHLRRVLVEAAWHYISASPHPKDLAKGQAPDPAARRHAAKGIRRLVKRREEMLGRGVHKNKANVATARELACWCWAIGRMVENG

SEQ ID NO: 104393 - protein, 376 aa, unidentified
MERGSLMLNTTTFVGLDVHARSIKAVALDAMTGEVRSATFAYDAAAVAEWVGSLDPAAKCVYESGVTGFDLQKKLTALGVDCVVGAVSKMIKPSADRKRKNDRNDAEFLARMLSVGNVVEVCVPDDECEAARDLVRALDDARDDLKRCKQRLSKFLLRHGHAFSETTPSGRRKGNWTAAHWAWIRSIEFPEKADDEVLAYYIDAVRQAMEDKKRLEKLVEAEASKPRWKKRVDSLRCLKGVDAMTAADIVFEAGEFSRFKNARSFAAWLGLTPSEHSSGESARQGGITKAGNKHLRRVLVEAAWHYISASPHPKDLAKGQAPDPAARRHAAKGIRRLVKRREEMLGRGVHKNKANVATARELACWCWAVGRMVENG

SEQ ID NO: 104394 - protein, 345 aa, unidentified
MENMYYIGLDVHKKTISYCVKDGSGRIYAEAEIPATRLDLDIWMKTLPQPWTAAMEATIFTAWIYDHLKPHAAAVKVAHPLMLRAIAAAKKKNDRIDATKIADCLRCDFLPECYMASTEIRERRRTLRYRNLLVRQAVQMKNKIAVLLMEAGVSYNKQKLHKVGYFRELLATNQDIDEGLKPLLRLCRETVVRLGKTESALVRSLQRDSLLIERVERLMTIPAVGPITALTWALEVGDVQRFSSIKKAISYCGLCGAENSSANIIKRTPLSKQRNKHLQTVLIEAAKMAPRNSVDLAMIYDREKQKDNANRATLAVARKLVAYLVAVDRRQKDFLVVESENRTAA

SEQ ID NO: 104395 - protein, 329 aa, unidentified
MLHTGLDLHKRTLVLSTVTADGQPVRDTRLPTTREAVRGYFAALPGPHRAVVESTATWYWLRDLLVSAGVDLRLGHSKYIKAISYAKVKTDAVDAATLAQLLRSDLIPEAHMVSAEWREARDTLRARLQLVERQVRCRNAVTGLLAQYNVAAPAALPPLVQLRVRMLTEQLTLLTAQARQLARALDPRLIPTPDVQRLLWIPGIGRIVAFTIFLEIDGIARFPSARDFVSYCRLVPGAGNSGGKTRHKRVKDGNRYLKLAFSHAAVRAIQHYPEIRAFYRAMARRKPPIVARTLVAKELARIVYFVLTRQEDFNGTFKGRRLSRTKQAM

SEQ ID NO: 104396 - protein, 342 aa, unidentified
MKITTVGLDLAKNVFHAVCFDEHSKEVKKRMLRRNQLRIFFTQLPPCKVGMEACASSHYWGRELKALGHEVKLIPAQHVKPYLLGNKNDFNDARAIAEALTRPHIRGVALKTTEQQDIQATHRMRSQCLRDRTALCNSVRGLLAEYGVVLGKGIPILRKSIHGLLEDAENGLSLIFRNLLARRYEQLVELDGHIDFFTHELEIQSRQDDACQRLQEIPGYGPIIASAFYSTVGNGEGYSRGRDVAASIGLVPGQHSTGGKNVLLGISKRGDGYLRGLLIHGARAVVIHASKKKDRLSQWINRIVAERGKNKAAVAVANKMARIGWAILRHNAHYQATLKATC

SEQ ID NO: 104397 - protein, 352 aa, unidentified
MMIIGCDFHPRFQQIACLDTETGECSERRLMHTAEAETFYRSVAGCQVRVGVEATGNFAWFRRLLGELGHELMLGDATAIRASNPRSQKTDKRDARHILRLLVEERFPVVWQPGVENERLRQLLLHRSSLVRMRTRMENQLDSVGKNEGLVESRRWTAKRRSAVEGLKLDGWYGERRRDLLALLDGLEERIKPLDQAVRTAAEADPEARLLMTHPGVGPVVSLAYVLTIGDWQRFPRGKQVGSYLGLIPCEDSSGDKRRLGHISKQGNPMLRWLLVQAATVAQKYDADWHRQYVRLSMAKHHGVAKLAIAHKLAVRLYWMLRSGQDYKQVMERGSHAGQSACPNGCGKKPRT

SEQ ID NO: 104398 - protein, 482 aa, unidentified
MSMVVETREGGLMQVRLGIDIACRAPHQASLADESGAFIWTGRRFRTAAKDLEGLWALLPEGTEPTDVTVIMEPTRNAWVPLAAWFRRRGARVILVPPEQSADLRAYYSKHTKTDRLDSRLLARLPLLHPDGLHEEQGLGPGHPLRRATRMRQTIVKRRSATLARLDALLEILGPGWVRALGSDLANKTPLRLLAAGYACPHTVKRLGRARLTRFLYRHSRGAWGEEKAEELLQVAEDTLELWAGELDFGDLADDIAVEARLTLALTEEIKELDERIGVLFAKADPTGVLISAPGVGAVIGAQILGRLGDPSRFRSLAGLRSFSGLVPSLDASGLKGQHGGPTKRGDACLREAIFMAADHARRIDPTLAARYHRLMVSAGKHHTSALCHVAATLLTRVVTCWRRGSATSSGTSMGILSGLPRASGSSMSGTPFPPSFATHGSAGMRPPQRAGRANEARSRRALRRPARPGYTLRPSRGLDIA

SEQ ID NO: 104399 - protein, 354 aa, unidentified
MKRTTKYVALDVHQASTITSVREESGRVIARMVLPTEAGPIVEFFRGMRGSIHVAFEEGTQAQWLHELLARVVQRVVVCDRRSEARRGNKSDHVDADALSELLRRGSLRPVYHGSADPATLKELTRAYVNLVEDATRVMLRLKALFRARGIPAPGKRVYHPAGRAAWLARLPNRGARCRAEALYAQLDPLRALHPRVKAAMVAEARRDPAWGLLQTIPFYGPVRVALLLATMQTPWRFRTKRNLWAYAGLAVVTRTSAEYEVVAGRPVRRRRAPLTRWLNQNYNRVLKNVFKSAATAATAQPGPFGDFYQGLLARGMREELARVTLTRKLAAVTLRRWKTGERFDPTKLTVQAR

SEQ ID NO: 104400 - protein, 350 aa, unidentified
MERNKPRPCAVFGVDIGKNLFHVVGLDAKGTPIQRAKFRRETLLQFFERANRTLVGMEACPGSQWLARKLQTMGHQVRIIPAQFVKPYVKSNKNDIIDAEAIAEAATRPTVRFVGIKEAYQVDLQMLHRIRSRLVTNRTNLICQMRSYCLEHGVPIRQGAGVFKTDILRVLDDDTNDLTSLAHEILRDLHDDLLKLEQRIASISNEIKDVADADERARRLMTIPGIGALGATAIIAATGDTSRFKRARDVAAWLGLVPRQHSTGGKQTLLGISKRGNGYLRRLLIHGARSCMLHLDRSKDRLGQWIDALRSRMHVNKVTVALAAKIARIVWIVLRQPGATYLRRPMEAAA

SEQ ID NO: 104401 - protein, 354 aa, unidentified
MPRQSKDTIAVLGIDIGKNTFHLIGLSKRGVIVLRQKLSRGQLEAKLANLPPCLVGMEACVGAHHLSRRLKALGHDARLMPAKYVKAFLKGNKNDFRDAEAIAEAVQRPTMRFVATKTAEQLDLQALHRVRSRLVSERTAIANEIRAFLLDRGIAVAKGLHRLRTALPGILATRTDVLAPRLLHLIEDLIGDWRRLDERIDNVSLEIETLAEQDGGCERLMTVPGIGPIISSATVAAIGTGDVFSKGRDFGAWLGLVPKQISTGDRTILGKISKRGNRYLRTLFVQAARVVLLRPANWERYGLRPWIEAAAKRLHHNVLAIALANKLARIAWSVLHHGRNFEVRKMSKPVCQPA

SEQ ID NO: 104402 - protein, 345 aa, unidentified
MIVRRTKSKDMTQPAALYIGADVHERESQLAIFEPSGTLLTEKRLPTTNLPTFIDSLPGEKHVAIESTGFIYPIYDKLSTLKSCHVSVAHPNKVKLIAKSKLKHDRADAKILGELLRTNYLPASYMPPPDTREKRLLINDRVRYGLRSGELKGSIRWLLKRRGIQLQHTFKPEGKRTLRELNLQEINIRLDELELIEAIIRKLNDQIAKIVQEDPNAKLLDTLPGVAPYTALFLSSEIGDVNRFPDSKHLCAYLGLVPSLHQSGDISFTGHITKEGNKWLRRNLTECSRVAVRKDPHLRTFYLKLTHTRGEKKAILAIARKLVAYAYWMLKRNQTYEELSPWDGS

SEQ ID NO: 104403 - protein, 416 aa, unidentified
MEQIFMIKENYIYVGIDLHKETHTAVMIDCYNQKLGEITFPNRPADFPKLVAKVKKCNTDGKTIVFGLENAYGYGRPLAVWLIDKGYFVKDVNTAISHRQAKHRGAMYRKSDSDDAEAIALATLNMLDKLPDACPNDAYWSLGQLVHRRDNIMKQRTRLVNQLHEQLCIAYPSYKSFFNDISRPTALYFWEHYPSKKYLKGKSVEDLRAELVPVSHNKCSTKTCEKILDAVASDKVKNNAYQDARDMVTLSIVSDLQHYDSQLAEVDKMLEQMYKMLGCTLTTIPGVNVITAVKILAEIGDIKRFSNANKLAQFAGIAPLHLSSSGKGKDLATKQGNRRLQATIYFLAIQMVQISSKGTPRNPVVRAYYEKRKAEGKTSQQALICISRRLISIIYGMLKSGTEYRMPVMENTGETV

SEQ ID NO: 104404 - protein, 322 aa, unidentified
MSFFLGFDTAKTKYDVSLIDDQGIELWSDTMPNEVTKLVAYLLTVTGHYGNGTVTCVVEATGCYHHPLLEAVIVLSMPCRVYNPIITKQQLKASVRGKKTDKTDALMIARLGLRGEGRLYVPEPYTTTKYYARGQQRLSNMSSSLRYYEDHLRTVLATDLTQAAQDILANIQEQFKLARAQFIKDTAATAPAGLMRRLQTVPGIGPFIAASLIGEIQDMCRFKTAKAIVAYAGLDPKVRQSGNVLNSTGRLTKRGSSYLRRSLFIAGNVARQHDPYFKALYDKKRAEGKTYKVATCAVARKLLVVTRAVWLDEQDYDTSYWQ

SEQ ID NO: 104405 - protein, 307 aa, unidentified
MIIIGVDFHPEFQQIALMDSDSGEFQEKRLGHREEAETFYRGLAAAGQKVRVGMEASGHGRWFERLLSELQIELWIGDAAEIRTRRVRKQKTDRQDAQLILKLMLKDDFPQIWVPSWENRDLRQLLWHRHRMVQARTRIMNQLQAVALNEGLRCKKRLWREQGRQQLEAFRLAPWASRRRHDLLELMDRLNPTIAELSQAIEQEAEKWPEARLLRTHPGVGALTALAFVLIIGKAERFGSGKQVASYLGLVPLEDSSGQQRLGPSHNRAQLCQVDQRPPRSAQRLAQGHLKIVSTGSRKPLRPTVRA

SEQ ID NO: 104406 - protein, 424 aa, unidentified
MDTKDQNSWDQHRYYMGLDWAKQEHAIAVVDGDGRIMMETTIEHTAEGWHRLREKLVDLAGPDLSLVAATIETNRGPVVERLLELGCTVYPINPNAAQCYRSRKAPSGSKTDRLDALSFADALRTDGHGWRPLNPEDPKTQELRLLCRDEMSLIEQRTTLVNQLQQALHEYYPAALEAFDDWTSPSSWAFVERFPTPQALKKAGKRHWEKFLHTHRLYRPETYQKRLEIFAGATEFCGSHAVTNAKSMLAVSLAKQLRLLEQQLKAYREHIDKLFQEHPDYTIFDSLPGIGEKLGPRLLSECGEDRDRFEDHEALQCYAGTAPVSFQSGQINRVRFRYACNKNLRNAVHLWANLSRKKCAWAQVYYHQKRLEGKSHACALRCLGQRWLKILWKMWQTKTPYDEQMHTRNQIKHGSWVLALTASK

SEQ ID NO: 104407 - protein, 341 aa, unidentified
MNYVGIDLHKKTISICVVDQGRNVLKRKRLYCCQEESIRVWFEGLGPFQAVAEATASYPWLFKLIEPVADRMVLAHPRKLRIIAESTRKSDKVDAQVLAEFLALDMIPEAHRPTPRQREHRTLVRHRHYVRGRLTSARNKIHAILSNYNADRDDLFTQAGRRYLRSVKVSSSDRFVLDELWAQWVYHSRQLDAVERRLAEFAQTAPAHEAEARAVLDSIPGVGPVTVDVVVSELGDIRRFRSAKQVCAYAGLAPGQRESAGRTKQLPITKEGSKLMRWILVEAAWQLVYRTRRWGSMFDSLARRRGKKKAIVAVARRLLCMMVAMLRSGRRYEPALVCTPG

SEQ ID NO: 104408 - protein, 336 aa, unidentified
MKNYSFFIGVDVSKETLDFALIVQNTVQFHLQVTNDKLGIEQFIKQVRKQNKEFSFVNSLFCMEHTGIYNNPLLNYLHQKQANIWLEQATQIKASMGISREKNDKVDSQKIGLYAYKNCEDVKLWTPKRPVIVQIDRLTALRDRLVKSIKILKTPLSDAKKLVDKKMLSSEKSLCQSSMDAMKADLKAVDKKIKELIDNDPQLKELFYIVDSVKGIGPVIATEVLITTNEFKDITDPKKYACYSGFAPFEHSSGKYKGKSKVSNKANKKVKALFHNGAMSAIQHCKELKEYYQRKVGEGKNEMLVINNVCNKLVHRIFACVSRREKYNENYTQSFA

SEQ ID NO: 104409 - protein, 345 aa, unidentified
MPIVGGLDIHRKQITFDYLDTATGEVGRGQIAPADRAHLRAWLARFAGRDDAAFALEGCTGWRYVAEELAAAGVTAHVAEPADTAFARGRKRHAKTDKTDSRHLRVLLEQGRLPECWIPPAQILECRALLEAYHDLRREHTAWIERIHAVFFHQGAPRLGEGALRTDRGLAALREAAAIHLSPAGQLQVATALDMLAATEARMDTLRQQLLHAARHLAGARALQARLYGVGPLAGLAMTCWLGGAGRFSSARKAVRFAGLDVTVYSSDGKRSPGHLSRQGPEILRWVAYEAGKTHGRASAPGHDYYAAVKDRTDGKIAALSQARKLIRQACHILAELGDDALTAA

SEQ ID NO: 104410 - protein, 401 aa, unidentified
MNTTTILYVGIDVSKDKSDICIKDQSGNDLIQRFKITNTKADLGKLYETIERIKSKIQGNSDVVFGMEATGIYSLPLYSALRRDGHKVKLYNPIQTNGFRKMNVRKTKTDPIDAAIIADMLRYSEPPQVNEIKDLNLYQLRELVRIRHRLIEKQTVCKIQMIRNIDMIWPNYVSLMPKVFGTTSITVLKKYTVPSKMIGKSFEQFYELVHKASRSKISRTKAEEIYANAGNILTIPEIEPIVSIEIKTLITQLELYDGQIQSVEDKIDQMMKLIDSKIMSIPGIGGILGPIILGEVGNIDRFSSAKKLVAFAGLDSIVIQSGRFENRTGKISKRGSPLLRQALFLAANVARMNDDVLKRFYDKKRSEGKHHYSALNAIAAKLLRIVYSVLKNNKEYQPQTN

SEQ ID NO: 104411 - protein, 317 aa, unidentified
MIHLGIDIAKLKFDVALLAQGKFKTKVFANDSTGIRACLKWLGTHAGGPVHACLEATGSYGEALACALHEAGHTVSVINPARTKAYAQSLGLRQKTDAVDAKMLARFVQTQQPAAWKPAPAELRALQALLRRLDALVEMRTQEKNRLGVAEPTVSASIVQHLDYLQTQIDALKAQIENHIDQYPGLKQQQQLLDSIPGIGAATSAWLIAELNLLRFDSARQAAAFVGLTPRKDDSGTSVRGKPRLCKQGNSLLRKLLYFPAITAMTHNPLVRALCLRLKAKGKHNMAIIAAAMRKLIHIAFGVLKSGKPFDPTLADT

SEQ ID NO: 104412 - protein, 338 aa, unidentified
MIVIGVDVHKQSVTAVAIDAAGRPLGEKMVVVGSDELVGWACTLGGKRLWAVEDCRQLTRWLERQLLSVGEELVRVPPKLTVPERRAGRTRGKSDPIDALAIARAALREPDLSRPRAGEQVFRDLKLLVDHRDDVVDARRRTQQRLRWHLYALDPTFVVPLRMLSRSSHLERVSRWLARQEQELQVRLARELVAHCRSLNRTITELDQELEQRATEIAPALLELPGCAAVTAAKLLAEIGPVNRFKSDAQLARHSGVAPLEASSGRVQRHRLDRGGNRQLNAALYRIAITQSRYHPGARAYLERKQADGKSRREAIRCLKRLLVRTVFNTLKASPALT

SEQ ID NO: 104413 - protein, 355 aa, unidentified
MTRIAQLEPTRVTVGVDTHRDAHVAVALDQLGRRLGQLEIATTRAGYAQLLAWAESFGEVVVFAVEGCGCYGAGLARHLGAQHVRVVEVMRANRQTRRRKGKSDPTDAEAAGRAVLAGEAATAPKSGDDVVEMIRVLRVVRVTAMKARTQAINALRSLLVTAPPELRDQLRALSSVKLVRSAARFRPGAQDSPLAASKLALRLLARRYQALDDEIAELDSQLEQLTQASPQLIESFGVGPEAAAALLIAAGDNPGRLHSEAAFSMLCGSSPVAASSGKTVRYRLNRGGNRQANAALYRIVLVRMRYHQPTKDYVDRRTSEGKSKPEIIRCLKRYVAREVYTALKQTGEANLARAV

SEQ ID NO: 104414 - protein, 346 aa, unidentified
MKQIIRIGMDTSKHIFQLHGVDAAEQPVLRKRLSRKQMVEFFANLPPTVIGMEACGASQYWARELSKLGHEVKLMAPQLVKPYISRNKNDGRDAEGQCEAMSRPSMRFVPVKTAEQQAALMLTGIRDGLIARRTQLSNMIRGYAAEFGLIAPKGLDKIEPLLTQIAQDENLPAIARELFAVPGREYARLQAELKQIEAKLVAWHRADALSRRLAQIPSIGPIIATRLVMKTPDPRAFRSGRHFAAWLGLTPKDHSTAGKTRLGKITRAGDEDLRRLLVAGATSVIQQVRRGRGHPSRWLVALLKRKPPKLAAVALANKVARIAWKLMATGESYDAARMNAIPAFAA

SEQ ID NO: 104415 - protein, 346 aa, unidentified
MTHSTTVGVDLAKNVIQVSVISARGKELLNRSLTRRKFAEFLGKQKPALVAFEACATAHYWARTAERHGHVARIIPAKFVAPFRQGHKTDSNDALAVAEAARRPGIKAAPMKTVEQQGLQAIHRSRQLLIQESTALSNHLRGLLMEFGVVIPQGFASLLRAVPEVLEDGENELPDLYRPTLHRMYTRLLELRADIEAITKEVEVLVKQHPICSRLTALEGIGPIGALLLYATLGSGNAFSGGREFAAYLGLAPRQYSSGGKTNIVGLSKKVGNCRLRSILILGARAYTYRLKEPKSAKDRWLKNAIDRNGHSRAAIALANKNVRTAWAMVTQGTEYQRRGQLKMAA

SEQ ID NO: 104416 - protein, 294 aa, unidentified
MSTIRVVGIDIAKSVFQVCVWMVDGSVAWNKKISRSKLPDTIRQFEPGTLVAKEACVTSHFWGRTFASMGYCVRLIPAQHVKAFVRSQKNDANDALAICETAFRPGIHFVSVKTTEQQDIKALRNTRQLMVEQRTALTNQLRSLLAEYGFTIPVGILRLQQQLPELIEDASNSLTFTLCRLLSSLREDMQALNERITRLDSEIVALSSQQIAYRHLLTIPGVGPLIAAAFLSEVDATQFSSGRELSVWCGLVPRQYSSGGKQRLSSVTKKWQSESANSHYSWCAVCNALCEKAR

SEQ ID NO: 104417 - protein, 351 aa, unidentified
MIIIGCDFHTRYQEIAWLDTETGEIHEQRLEHAGDEVRKFYSALLGAVRVGIEATGYSQWFERMLHELGHEVWIGDAAAIRASVVRKQKTDARDAVHILDLLKTNRFPRIWVPTPEERDLRQLVLHRVKLVQMRTKVQNQLHAMAMGQGVCRRKKLWSERGRAELESLVLAPWAQRRRTELLQLLDQLDGSIRELHAAVEQQARQHPQAALLMTHPGVGPVTSLAFVLTIGPASRFARGKKVSSYLGLNPSEHSSGGQQHLGRISKQGNSTLRWLLVEAGQTAARRDPQLGRMYRRLKFRKGSAIAKVAIARKLAVRLYWMLRSQCDYAALVRMPGSSSSAVVPEDPGSGR

SEQ ID NO: 104418 - protein, 397 aa, unidentified
MACVRSPAGSGKRRSQEVREFRTWTTSLRELRDWLAAAGVSQVAMEATGVYWKPVWHVLVELDAELMLCNAHHVKNLPGRKTDVADAVWLCQLLECGLLRGSFVPPTEIAELRDLTRYRTKLVQDRARETQRLQKLLEDANIKLDSVASDVLGKGARRMIEALIAGERNVEAMAEMAMTRMRPKIAELRLALEGRFTGHHALMASLHLRHIDELTELIAQIEEEVDRRLAPFAEAAARLQTVPGIGKRTAEVIIAEIGVDMSRFPTAGHLASWAGLCPGNHESAGKRRSGKARKGNAALRTALCEAAWSAARTRNTYLAAQFRRFSRRFGKKGESKAIFAVAHTMLVIVWHVLHDNVNYADLGPDYFERFTDNDAHARRLVRQLEKLGHRVTLEPAA

SEQ ID NO: 104419 - protein, 403 aa, unidentified
MSFNGAPVMAATVVAVDVGKNTAVLSVTDSARHRLLGPVEFAMTAPAVAAVVERVSAVLPGVAVKVGVEAAGHYHRPLLESRLWPAGWELLELSPARVSEQRRVQGRRRVKTDAIDLEAITELVLAGHGVPVTARSARITELTGWAMHRSRRIWTRTATKNQLLAQLDRCFPGLTLALPDVLGTQVGRLVAAEFADPHRLATLGVTRFVRFAANRGLRVRRSAAERLVTAARTALPAREAVVARHVLADDLALLVDLDVQIAAAEAKIAQLLPDTPFAVLLTVPGWGTIRAGSYGAAVGDLRRWPGSSQIYRASGLSPAQYESAGKRRDGSISREGSVQLRRALIDLGIGLWRSDPAARRYGQRLRARGKKGGVIGCAMAHRANKIAYALVRDQAGYDPDRWA

SEQ ID NO: 104420 - protein, 347 aa, unidentified
MNQVIIGVDTHKANHIAVAIDTRGTRLGGITIPATPKGYAALEEWASGYGAIKAFGIEGTGSYGAGLSRDLLAKGHTVVDVMRPNRQLRYLHGKTDDLDAEGAARSVLNGQATAIAKAQTGSSEMIRHLKVARDSAVKAKSQAMITLKTLIINAPAELREGLDQIRGPISLVRHIAALRPGELTSPIASAKAAMRALARRWLLLHEEIERHDRELERMVQDKAPKLMQSHGISTMTVAEMLILVGDNPERIKSESALAKMCGVCPIPASSGKTNRMRLNRGGNRQANAAIYRVAIVRMRDDQQTKAYAARRTAEGKTKREIVRCIKRYIVREIYRALCASPARSADA

SEQ ID NO: 104421 - protein, 394 aa, unidentified
MSELEKGLVFAGVDTHTLCLLDHTGRAIGTFRFAADAKGYDALAGKIGGPATCVGVGIEGTGSYGAGLTRRLLELGYCVYEVMVPGRARRKPGRPKSDPADAEVAARQVLARVNLSKPKDQSGWTEELRQLMIARDRLVQATSAMINAAKSLIVTAPEDLRRSLEGLSRKNLRSALSTLDPAAGGIILALGSLGKAWDLQDREADAIEERMKRVLEANAPALLTIYAALAVAGGGNPERLKSEAEFASLCGVAPLLASSGKTERHRLNRGGDRRANRALYQIAVTRMSYDQRTKDYVGKRKRDGKSKKEAIRCLKRYIAREVFRALRNPLETKGPSWKDLRPARQALGITLVEAGKALNVGFQRVSYAETGRLMNVRFLEEYDAWLKSQAKRES

SEQ ID NO: 104422 - protein, 397 aa, unidentified
MIAVGIDISKAKSTVAVIDSDGTVLASPFTMAHTQPEMEAFVTYLKGLGEPTTILMEYTGHYHYPVLKKLQDEGFPVCIVNPYQMKKYGDVEIHKAKTDKKDALRIAAYALEKSYKLVPYSSMEQKYEDLKFLSRQYSQRITYVAKLKVQLIALLDQTMPGITRILPLNSRNPEKCALLLFIKRFKSFDEIQRIGKARFLASYDVLAKKASERSASSKGLRIYELAVDSITTRGEGPYIWLSQNQCVDLLSATQNAADEIISQMRNIAETIPEYKVLRAMHGVGDRLGPIILAEIGDVHRFHSGKALNSYAGNDAPPYQSGQFESRNRHISKRGSSALRKACYEVMQALKLTKPQDDPVYLFMLKKEQEGKPFNVAKMAGVNKFLRIYYARAMELYK

SEQ ID NO: 104423 - protein, 314 aa, unidentified
MQKAMENFVGIDVSKAWLDVAQHEREETFRVSNDDAGIAELVKRMKALKPKLIVVEPTGGFEKLLVAELTHAGLPVVVVNAKRVRDFARATGRLAKTDKLDAKVLAHFAAAIRPAVRRLPNTEEERLTMLLTRRRQVVDMLTVEKNRLVTVRAKMRSDIEAHIEWLANNLEELDKEIEDFVESTPIWKEKDNLLQSVPGVGPVTSATMLGMMPELGKLNRQEIAALVGVAPVNKDSGRKQGRRRIYGGRADVRSVLYMAALSAKKFNPVIKKFYERLIKQGKQKKVALTACMRKLLVILNAMMRSNQPWRSLAA

SEQ ID NO: 104424 - protein, 314 aa, unidentified
MRTQVFVGIDVSKAQLDVAFRPEGRFSAPNDEAGCAQVLERLRAVPPTLVVLEATGGLEIPLTGVLAAAGVPVVVVNPRQVRDFAKATGRLAKTDTLDARTLAHFAQVMRPELRPLPDEQTQALAAILARRRQLVEMLTAEKNRLGSAPKPVRKSLRTHIAWLERELSHTDSNLAHAIRESPVWREKDALLRSTPGVGPVMTTTLLANLPELGTLTGKQIAALAGVAPLNRDSGTWRGKRTVWGGRAQIRATLYMAALVAARFNPVIRAFYQRLCATGKAKKVALTACMRKLLIILNAMLKHRTPWRTELVRCA

SEQ ID NO: 104425 - protein, 397 aa, unidentified
MPQIWAGVDAGKTHHHCVVIDADGKRLLSRRVANDEPELLTLIGDVLDLGGGPVMWATDLADGGAALLIGLLASHEQDLLYIPGRVVNKAAGSYRGVGKTDAKDAAIIADQARMRRDLHPMRVNDELVVELKLLTARRSDLVHDRTRVVSRLRELLTSIFPALERVLDVTNTGPLLLLTGYQTPASLRRIGRARLETWLKHRHVRGAAQLAQTAVDAGDRQRTQLPGEALTAQMIETLAREVMVLNEQVKAVEKLIEGRFRRHESAEVITSLPGIGTVLGAEFLAVTGGDMSMFGSPDKLASFAGLAPVPRDSGRVHGNLHRPERYHRGLQRVFYTSALISIQRNPESRSFYDRKRREGKHHNQAVLALARRRVNVLWALLRDGRCYQLTPPVTAAA

SEQ ID NO: 104426 - protein, 408 aa, unidentified
MELLHPRCAGLDVHKDTVVAAVRCVSPPAHQEVRSFSTTTKGLLELSDWLTSHGCTHVAMEATGVYWKPVWHVLEEGFELVLANAQHIRNVPGRKTDVNDATWISELLAHGLIRSSFVPPAHIQELRDLTRTRKQLVREMSQHSLRIQKVLEDANLKVGSVLSDVLGTSGRKMLNALMAGETNPETLADLAVGTARKRRAELIESLRGRVTPHHRSMLKLHLDLVDALQKALDEVDATLGKVLEPIQARAALLTTMPGISDLVASVIVAEIGTDMSRFPTAGHLVSWARLCPRNDESAGKRRTTRISKGAVWLKTTLVTAAWAASRKKDSYLRAQFLRLKSRRGPKKAIIAVAASMLTACYYMLRDNVEYRDLGSGHFDRRDATKTVGRLAKRIRDLGFDVELRPLAA

SEQ ID NO: 104427 - protein, 422 aa, unidentified
MKKVTEFTKKVKGQVKNTVLNKASWIVGIDIGKTKLSCVLMKKDQTVLCRFNTKASISGYKKILDQVKEKTKAKGEVVYAMEPTGHYWMILGQFFEDHSKKYVLIHPLAVARSREVVRLNRGKTDPMDARLIGELACREIATRTQIPEDYWATLRFLAREYMDREKDIVREKLRINSYIETTLPEFLDVFPNPLCLAGRACLRTLANFKDAIRGNFFSFEKQVRKYYTGKRLLISRVREVYDTLRQSQSIGLRAGRYAMFWRIINSLERLEIAERQQETTEQSLLSQYNQSEYKQYLNSIQGTTSTTNALILGFMGDPTIYDNPKTLIKLAGCDPVLNESGKYRGKTSISHRGRSLLRKAADRTAFSIEKRNVVFRNFFHRLVTRSKNKLTKRQARIACINKYFRTIWVLCNYRVTFNPSLA

SEQ ID NO: 104428 - protein, 444 aa, unidentified
MAMSKARTGRSKLEVMHPDAAGIDVGGSMHFVAVPNEAAEQSVRQFGVYTRDLQAMADWLQECGVKIVAMESTGVYWIPLYELLERRGFEVMLVDARQVKNVSGRKSDVQDCRWIQQLLSYGLLKAAFRPQDQFCELREFNRLRTRLLADQGRSVQHMQKAMTLMNIQLSQAISDVAGVTGQKIVRAIVEGERDAQVLAAYRDSRIKASEEEIAASLQGTWRAEHLLALKQALGRFDFYAQQLQECETEIQRVMAKLEVHTKELGKGKKRSKAKNAPKFNVRERLLKMCGVDVTKVDGIDETTALNIVAEVGTDLSRFPSDKHFASWLGLCPGTRISGGKVLGAKTKHSVNRASQAFRQAAAALRSSKSALGAYYRRLCGRMDKGKAVTAAAHKLARLFYALMTKGQEYVDQGQQYYEERYRQRVIHHLQRRAQSLGMSLVPTA

SEQ ID NO: 104429 - protein, 412 aa, unidentified
MDALIERAAGLDVHQGSVVACIILGAAGRRPTKEVRRFGTMRQDLAALRAWLLEKGVTHVGMEGTGVYWQPVYAALEDAFTLIVGNASHMRNVPGRKTDVKDAEWIADLVRHGLVRASFVPPPEVRVLRELIRHRKALVGTLAAERNRTLKLLESAGIKLAGVMSDVFGVSGMLMLRALAEGTADAATMADLAKRRLRRKRDRLALALDGSLAEHQRFLLGLHIRRLEEIERDLAEVEAAIGGAMRPFAAQQALLVTIPGVDALTAAAIVAEIGTDMAAFGTAQRLAAWAGLCPANHESAGQQKRRGTRKGNPYLKAMLAAAAISASRTKGTYLRDKFHRLKARMGPKKAAVAIAHKILTAVFHMLQRAVAFIDLGADYLDRIDKHRTAKRLVRRLDALGYDVMLRPKMAGA

SEQ ID NO: 104430 - protein, 415 aa, unidentified
MERIIERCAGLDVVHKASVTACVRVPDESEGLHQEIREFAATTRGLLLLGDWLASFEVRLVGMEATGVYWKPVYYLLEDDFEVWLLNARHLKNVPGRKTDVQDAAWICQLVEHGLVRPSFVPPKEIRELRNLTRYRKAQIEERTREIQRLEKVRQDAGIKLSWVATRVLGASGRAMLDALLSGTTDPEVLAELARGRLRSKLPALRDALEGCFSSHHALMVGKILAHVDYLEESIGDLSLEIERVIAPFSDKVELLDTIPGVDRRMAETLIAEIGVDMSQFPTHRHLASWAGMCPGNEESAGKRRSGKSRKGSKWLRSALTEAARAAARSNKGIYLASQYARLRGRRGSKRAAVAVGHSILVIAYHVLEREEPYEELGEDYFDRQRSGEAYAKRLVRKLERLCHKVALEPLPQSA

SEQ ID NO: 104431 - protein, 362 aa, unidentified
MWIIGCDLHARQQTLAILDTATGEVVNETLAHEGDGVREFYSTLPGPVRVGIEATGSMKWFLNLMEELGIDCQVGHPATIRAAEPRRQKHDQRDAELLLKLLVENRFPSIWQPSKELLDLRALLLHRHQWVRLRTRIQNALQAIALANGLRRGSSLWSQRGQQAIRSLPLATHTAHRRSELQAMYERFEAEIEELNERVLEQANRRTTAGLLMTHPGVGPITALATDVFLGDPKRFRDGKALASYTGIIPRENSSGGRQRLGGLTKQGNPLLRFLWCEAAVHAVRRDPELRQFYRRKLVQKGLGKARVAAARKLGIRLWIMLRDQIDYQEFCRRGQKQQRSGDACAGMPGMRYGAKSHRLID

SEQ ID NO: 104432 - protein, 321 aa, unidentified
MQECYLGIDVAKKKLDCALRLPNGKYKHKTFDNAPKGFEELRVWIFSFDVTQLHVCMEATGVYWEAVAEYLANHQYVVSIINPVQIKAFGASRLVRTKTDKVDAKLIADFCKENRPEPWKAPSLEEQALRAMVLRLDALQEIRTQESNRLDVARESVKDGIVSHIAWLDEEIKNLSKKIRDHIDSDPDLKDRKALLESIPGVGERTIALLLAFSLAPGRFTNARQVTAYAGLDPRHHESGSSVQHKTRISRVGHNLIRKGLYMPAMVTLYRTSWGKHFLARLSSAGKKPMVIIVAMMRKLLHVAFGVLKSGQKFNPDLHAA

SEQ ID NO: 104433 - protein, 375 aa, unidentified
MGDHSEAFVAFDTSKLRNAVAIADAGRTGEVRFLGEIDTSGAATAKLVRKLAGKHPRLTFCYEAGPTGYGLYRQITSLGHECIVVAPSLIPKKPGDRVKTNRRDALSLARLLRSGDLTAVWVPDRHHEAIRDLTRARETAVMDLRSKRQQVSAFLLRQGLHYCEGKRTWTKAHMNWLLSQKLAHVEQRIVFEEMMLAIRQAQERIERLEQAVRAAVPDWSLAEVVTALMAMRGMDLISATTFLAEVGDLSRFQTPRELMAYLGLVPSESSTGDTVKRGPITKTGNRRARRMLVECAWSYRHPPRVGKDKQEKVAAAPPAVREIAWKAQCRLSGRYRALVRRGKLKTVAITAVAREFAGFIWAVARAANAARAEAK

SEQ ID NO: 104434 - protein, 368 aa, unidentified
MKQQTSATTETLHKGRTMIDFTGKTIYVGIDVHKKDWQVGQFHAGLVLGNHRITGNSQELIDFLKKRYAGATLKCVYESCAWGFNLQRQLTTAGIECIVVHAGDVPGSDKEKKNKTDKVDAVRLARHHAAGLLEAIHVPDEELQKERNLMRFRKKLMGDLNRSKNRLKSLLKFQGIEIPEHMDNPNWSRNFISWIEEQAAKDTLLQDTVELMLEEVKMQRQLLLKTEKKLRQLMSSKKYEGKTKLLMSIPGIGRTTSTLFLLEVGDIKRFKGFDALNNFVGFYPGSNSTGEKDIDTGISKRKHNQLRTMLVEAAWQAIRKDPALLDAYEQLTKKMKGNEAIIRIARKLLRRMRAVLISGQEYEKGVVK

SEQ ID NO: 104435 - protein, 338 aa, unidentified
MKLYGGIDLHSNNSVVALSDERDQVVYRRRLPNDPEVILTALAPYSEALVGVVVESTYNWYWLVDALMEAGYRVHLANTAAIVQYSGLKYSDDDSDAAWLSKLLRLGLLPEGYIYPKELRAVRDLLRRRSRLVQQHTANLLAVQNLLSRNLGHSLNANAIRRLTPEKVHELLPDANLALAVQSTLLAMRGQLAAIELLEREACAQVKRDPEYPHLLTTSGIGQVLGLTILLETGPVERFARVGNYASYSRCVGSQRLSNGKRKGKGNTKSGNKYLAWAYLEAANFAVRYNPQIKRYYQRKKAQTNGVVAIKTVAHKLARACYHMLREGTDFDVDRAFG

SEQ ID NO: 104436 - protein, 345 aa, unidentified
MEIRAIGIDLGKSMFHLAAVDARGQVLERRKLSRVKLLQYTGTLRSCLIGMEAGAGGHYLGRRLLAQGHDVRLMPAQYVRPYVKSSHKNDILDAEGIDEAVQRPTMRFVPLKTPEQLDLQALHRVRDRLVARRTSVINQLRAFLFERGITIRQGRRHLEEQLPQILEDADNDLSARMRALLRGLQEEWKTLEADIAMVEEEIERLAAHDDACQRLAEIPGVGPLVATALVAAVGNATSFAKGRDLAAWLGLVPRQSSTGGRTRLLGISKRGNPYVRRLLILGAHSVLISPRRERHGFGRWLLALQPRAHPNVVVVALANKLARIASAVLTRQERYRTTLLAGVSA

SEQ ID NO: 104437 - protein, 350 aa, unidentified
MNVNHYIGFDVHKKSISYCVKTADGTITEEGKLGATHLAVREWAEKRREAWHGAMEATLFSGWIYDALKPYAAELQMGHPAMMKAIGASKKKNDRLDARKTADLVRCNLLPACYVATPEIRELRRMLRYRNVVVAQAVRMKNKMSGLLMEVGAEYNKQRLHGKKYFTELLDTIEAVPESVKDLLRLSRGALEMFQTTQQQLLAKLEKDPLLAKRVSVLKSIRGVGEVTALTWALEVGDPHRLCSVGNAVSYCGLTSALDASADKQRRGPISKQRNPHLQTVLVEAAKLAPRWNPQLAAVHAREVQRGHRNRATLEVARKLVAYLLAVDKSGKPFQIRTPATAEQEVETAA

SEQ ID NO: 104438 - protein, 303 aa, unidentified
MQTMYYIGLDVHKRTISYCVKDGSGTIHTQGTIPATRFDLDRWMKTLPQPWTAAMEATVFTGWIYDQLQPHAAALKVAHPLMLRAIAAAKKKNDRIDANKICDCLRCDFLPECYMASTAIRERRRTLRYRNLLVRQMVQMKNKISGLLMEAGVNYNKQRLHKAGYFRELLATNPDIDEGLISLLRLCRETVVRLGKTESALVRSLERDSLLMDRVERLLTIPAVGPITALTWALEVGDVKRFPSIKNAVSYCGLCGAEKSSGNMVQRTPPSKQRNKHLQTTLIEAAKMAPRNSPDLAMLSCSP

SEQ ID NO: 104439 - protein, 412 aa, unidentified
MEQLVDRVAGLDVHRDTVVVTVRRPRPGGGRLVKTLTFATTVAELTALGDWLVAEGVELAGMESTGVYWKPVYFLLEEQIPQVWLLNAEHLHNVPGRKTDVADSAWIAQLLEHGLVAPSFVPPAPIRRLRDLTRHRRVLIEERTRVIQRLEKALQDAGIKLTSVASTLLCKSGRAILDALLAGETDPVELAELAKGRLRVKIPALQQALRGSFQVEHHGLLVAQMLAHVDFLDESIAEFDARIEAAVADYQPVLTRLVTIPGVARKTAISLLAEIGVDMSVFPTPAHLASWAGICPGNNASGGKARAARTRHGSPWLKTALTEAAQAAARTKGTYLAAHHAAIRGRRGTYKAIGATRHDLLIAYWQIVHDEVDYRELGADWAQRRHSREHQTRRLIRQLEALGHHVQLTDAA

SEQ ID NO: 104440 - protein, 348 aa, unidentified
MVHFVGLDVSVKTTSVCVVDDAGKVILEQKVPTDPADIIAILTSLGVSFGRIGIEAGPLSQWLVNALVAADLPVICVETQHMKALLTAQQISKTDRNDARGIAQMMRVGLFKPVHVKTLVAQEQRMLLTSRKLLQRKLLDVESDLRGTLRNFGLKVGVVGGSRYEARVRELVEGFPGLAAIVEPLLSVRRVMRQQFAVLHKMLLDTVRGDPVCRRLMTAPGVGAVVALTYRATVDQPQRFVHSRAVGAHVGLTPKRYQSGEIDYDGGVSKCGDALLRTMLYEAAHSLLTHGRQWSWLKAWGIRVAQRRGMRRAIVAVARRLAVVLHRMWVDGSEFRWRKDSAAVSAVA

SEQ ID NO: 104441 - protein, 350 aa, unidentified
MTTLARQITGGVDTHLDVHVAAALDERGALLGVESFETTPKGYDKLLTWLRSFGTVELLGVEGTGSYGAGLTRHLHSEGVRVVEVDRPNRQRRRRHGKSDPEDAISAARAAQGGDATGEAKTRDGNVEAMRVLRVARASARKGRTQALNQMRSLISTGPDCVRADLRHLNVYRMLERASSYRPGTKRDLVSINKLTLRMLARRAIELEEEIKEIDAVLKPMVKETAPELSALSGVGTDIGSALLVAAGDNPERLRNEASFAHLCGTSPIDASSGKNQRHRLNRSGDRQANSALWHIVITRMVSDPRTREYIARRMKEGQTKKEAIRCLKRYIAREVYNNLPMEHLALDNP

SEQ ID NO: 104442 - protein, 378 aa, unidentified
MHCFGSGRPLMGWTDRVLHSSSNTGAMNTERNMIMIKQTSPAAISTIGIDIGKNSFHVIGFDDKGAIVLRQKLSRGQIAVRFANLPRCLIGMEACVGAHHLSRRLQALGHDVRIMPALYVKPYLKGQKNDFRDAEAIAEAVQRPTMRFVATKTMEQLDLQALHRLRTRLVRQRTAVINQIRAFLLERGFAVRQGLNPLRQALPDILAKPGDELSPRMVQMIEGLCEDWHHFDRRVDDLTNEIEALVKADDGCQRLMTIPGVGPLTASAMVAAVGDGAAFRRGRDFGAWLGLVPRQMSTGDRTILGGISKRGNKHLRTLFIQGAWAVLMRSKNWANYSFGPWLEAASKRLHRCVLVVALANKLARIAWSVLNHRQAYQA

SEQ ID NO: 104443 - protein, 403 aa, unidentified
MNAVGIDVSKGKSMVAIMRPFGEIVSTPFEIKHTASDIHSLVELINSVEGESRIVMEHTGRYYEVLAHQLSKANLFVSAINPKLIKDFDNDSLRKVKSDKADSVKIARYALDKWQNLKQYNVMDELRNQLKTMNRQFGFYMKHKTAMKNNLIGILDQTYPGVNTYFDSPARSDGSQKWVDFASTYWHVDCVRKMSLNAFIDHYQNWCKRKKYNFSQSKAEEIYGKAKELVPVLPKDEITKLIIKQAIDQLNSASVTVEELRSLMDKTASKLPEYPIVMQMKGVGSSLGPQLMAEIGDVSRFTHKGAITAFAGVDPGVNESGSYEQKSVPTSKRGSSGLRKTLFQIMDVLIKTHPQDDPVYQFLDKKRAQGKPYYVYMTAGANKFLRIYYGRVKEYLSSLPESE

SEQ ID NO: 104444 - protein, 330 aa, unidentified
MKDWNVILGVDVSKLTLDISCASRGLHLKIENQSKGFSLFKKWCKTNTIALKQTLVVMEFTGGYEYRFIQFCESHFIAYTRVPGLEIKNSMGMVRGKNDKDDSFRIGQYGEDKIKRLKPSRPLSVNMLSLRQLLSFRKRIVREKAGLDSTLKERRHIYSVEKTDAITKIIKTKIKANQKHQLEIEKEIQVLISMDKEMLQNYRIITSIKGIGKVNAWMTIAYTENFTSFPDARKYAVYVGVIPFSNTSGTSIKGKPKVSHLAHKELKQELNQAAKTAMRHDPELAAYAERKQQTKCYNLVLNNVKFKLILRMFSLVKRGEIYIENYQRAA

SEQ ID NO: 104445 - protein, 343 aa, unidentified
MQVVTTVGLDIAKSVFQVHGIDAAGQVVIRRQLKRRYVLAFFEKLPPCLVGIEACASSHHWSRELKALGHTVRLMPAAYVKPYVKRQKNDAADAEAICEAVTRANMRFVPTKTPEQQSGLTLHRTRHLFIRQQTAVINVIRAHLAEFGIVAPVGRRGVEALLNVVSDASDQRVPVVARMCLAALGAQLRRLKEQILEFDRMIMAWHRSHETSRRLDAIPGVGPVLATALVASVADPKAFRSGRNFSAWIGLVPKQHSSGGKDRLGSISKQGDRYLRSLFMSGALAVIRYARIHGTKHRPWLTALLARRPIKIAAIALANKMARMVWAMMARGEHYKEPVVLAA

SEQ ID NO: 104446 - protein, 359 aa, unidentified
MVWTPPILAAMVVVASITSGSRTMPSVVGVDSAKRVFQVHTVDELTGEIRRWTLSRSKLLEFFGNMRPSIVAMEACGSSHHWARRFTAMGHEARLIATKFVRPFVKTNKTDAADAAAIWEAAQRPGMRFVPVKSEQQQGIMALHNMRDLLVKSRTAQIHQIRAVFYEFGFELPRGRHWGLKALPGAFAAIEECVSALVLDSLRGQLELIHDLSRRIEAIERQLEIYERSDDRCRRLRAIPGVGPLTATAIVASVGDAREFRTAREFAAWIGVVPRQSGTGGRVRLLGISKRGSPYLRAMIIHCARAVAARQKQPGPWLTNLMQTKHWNVAVVAQANKIARVIWALLAHECEYRPAPSMA

SEQ ID NO: 104447 - protein, 416 aa, unidentified
MLKIVYPICCGLDVHKSFIFACVASTDDKGITSYKHHRFSTFTKGLRELAEWLKYHSCSDVCMESTGKYWIPVFNILETTCKIVLAHPKYVKSIRGKKTDKKDAKWIADIFKHDLVTGSFIPPLDIRQLRDLMRYRTKLTNFNTGEKNRAQNCLTVSNIQLANVVSDVFGKSASAITAHLLNNPKDNNFDPTDLLHGSLRKKAEDIGLAIDGDITPEQGEKMKIILSHMDSISLCKINLESVILGISEKYIPQIELVSTVPPFKNPFSAIAIISEIGVDMSVFMTAKHLCSWAGLTPQNNESAGKKKSVRISRAGAYLKPLLVQIANAAVKSDKHPEFKNRYLSIKKRRGHKRAIIAIARMLLTAIYQILKKNEPYNAELYKKSDIIPTNRDVSVEQAIFILQRQGYQISKVDAVV

SEQ ID NO: 104448 - protein, 365 aa, unidentified
MDTIYIGVDFHARQQTICYLKTETGELVFHELKHRDKQQVRAFYQQFQGSVIIGLEASGYSPWFERLLEELGCEVWLGHATEIRRRARWRQKNDRRDAELILDLMLHDEFPRLHRPAVQSREVLRMLRYRQKLIKIRTMSKNSLQAIALQSGLAKGSALFTKAGQQELSTAEMSPVMQWQREHWLQLIEPLNGQLLETMVWFKAQSKGDVSITRLRTHPGIGLLTSLCLVHTLQPVGRFRNTRKVAAYAGFDPIERSSGERKCFLGISKAGSRLLRYLLVEAAQTAVRKDEDLKRFYQRLAERRGRPKAKVAAARKLLIRAYIMLRDEIDYAEFRHRAVAARLARRGQGPNVPEVLIGQPASPQQ

SEQ ID NO: 104449 - protein, 401 aa, unidentified
MAAAQETAWVGVDIGKTHHWVCVLDADGKRLLSVKVANDEAEILALIATVQGLAEQPIWAVDIIGAPAALLLALLAQAGQSLRYASGRVVAAMSSAFAGEGKTDAKDAYVIAETARLRRDLAVVDQDTDLVRNLAMLTGHRADLVADRVRMINRLRDLMTSVFPGLERAFDYASRKGALVLLTGYASPQRIRRIGHTRLAAWLRQRKVRDSAGVAARAITAARAQMTVLPGQDLATSIIAELATNILALDERLRSLDAQIAETFDQHPQAAVIQSMPGFGPLLGACLLVGAGDLRAFPSAGHLAAAAGLVPVPNDSGRRTANLHRPMRYSRPLRHVFYLSAQTSMLRAGPNRDYYLKKREQGRTHSQAIIALARRRVDVLWALLRENRTWTTSPPVVAQAA

SEQ ID NO: 104450 - protein, 315 aa, unidentified
MADSIAQSLGVDISKDTLDVHLHPAGRARRFANTEKGCRALIGWLGGVVVVRVAFEPTGAYHHRFERLLAQAGFALCKVNPRQARRFAEAIGRQAKTDAVDAAMLARLAALLEPPARPVISARLDEMKELHIARSALVKDRTAALNREHTRRSALLRRQAAQRLAQIERQIAAIDAALRHLLMADAELKARFEILIGIPGVGETTALTLLIEMPELGALEHKCAASLAGLAPIARDSGQHRGKRSIRGGRASLRRAIYMPALVAVRFNPDLRAKYNALRAAGKPPKLALIAVMRKPMILANALLRDQRNWTPKLA

SEQ ID NO: 104451 - protein, 416 aa, unidentified
MLNSFEWYLGIDWGSEEHHLCLLNAGGGVCGTRPVAHTAVAVHDALQWVRAETGAAPETIAVGLETPRGVLVDTLIEQGFTVFALNPKQLDRFRDRFTAGGAKDDPRDAQVVADALRTDRWAFRRVRPDDPQIIQLRELCRIVEELQEQEGRLANRLRDQLYRVHAPWLTLTAAADEPWLWTVLADTPHPDEWRHLPRRRINAALRAHRIRRLNADDIVTTLRQPTLAVAVGVAEAVAIRIASLVPQLILVRQQRTTAERQIDRSLERLAETTDSELREHRDVEILLSLPGVGRMVTATMLTEATGPLADRDYATLRAYTGAAPVTKRSGKRAYFVQMRYACKWRLRQALYHWARTSIQRDDAARLYYDALRARGHHHARALRSVADRWLRILVAMLRTRTLYDPSRFVQAVAIPA

SEQ ID NO: 104452 - protein, 322 aa, unidentified
MQYIGIDVSKATFVVAYSSDKGGEIRTFNNTTAGIKQFIGTLPKDGNIHCVMEATGNYSALLLYMLNVAGITVSMENPLKVKNFARAMLSTVKTDKIDARLIALYGEKMNPQPFKVQGEAILRLRQKRTVIRQLTKQITAMSNLRGSLACLPVPDKGATHTVDETIKFLEKRRDRLQSELTDLVEVEFSRQLALLTTIKGIGITLATALILTTGGFTYFQNAKQVSRYLGICPTYEQSGTSVNIRGHINRNGDAYTRGLLYIAAWPASRFNAQCKETYTRLRQNGKPGKLAMIAVANKLVRQAFAVVAHDKEYIDGFVSNRP

SEQ ID NO: 104453 - protein, 408 aa, unidentified
MQVLYPRCAGLDVHKDSVVAAVRCVSPPTRHEVRTFATTTQGLSALVDWLTSHGCTHVAMEATGVYWKPVWHLLEGHFELVLANAAHIRNVPGRKTDVADSAWIADLLAHGLIRSSFVPPVAIQELRDLTRTRKQLVREISQHCLRIQKVLEDANLKLASVLSDVLGQSGRAMLAAIIAGEEDPERLADLALGTARRKQAALIEALRGRVTPHHRAMLRLHLGLVDALQAALRNIDERVGKALEPIRAGAARLTTIPGVSDVVANVIVAEIGIDMSRFPTDGHLISWAGLCPRNDESAGKRRSVRVRKSANWLKTTLVTAAWAAIRVKNSYLQAQFLRIRARRGGKKAILAVAASMLTAAYYMLRDEVDYQDLGADHFVRRDRSKVIRRLVRRLHDLGCEVTIAPHAA

SEQ ID NO: 104454 - protein, 341 aa, unidentified
MKQYVGLDVSQDQTSICVVDESGRVLWQGKCASTPEAIAATLSSKAPEAERMESGPLSIWLCHGLTALGLPVVCLDARHAQAALKLQLNKSDANDARGLIVRTGWYREVAVKGLDGQLVRALITARAQLVALRVDLGNQIRGILKPFGLLAGKGVGKTFAEKVRSLVPDGPLHDVVEALLRAWEAINKEVATLSRRLVTEARQDDTVRRLMTAPGVGVLVALTYVSTIGDPARFPHSASVGAYVGLTPRRFQSGETDYTGKISRCGDRLTRTYLYEAAGIILNRVSRWSTLKAWGTRLARKIGHKKATVAVARKLAVILHRMWRDGTEFRWSNKEAAVTAP

SEQ ID NO: 104455 - protein, 339 aa, unidentified
MFYSGIDQHRLTSVITTLGESGERLAQVTLANDRWLLTQYFAQFAGEHQAVVEATGRWYWLRDLLVPQGIDLHLAHAKFLKAIAYAKVKTDAVDSTTLAHLLRTGLIPEAHMITDAQRGPRDVLRARLRLVERRSRCANSLDRLLEKFNVTGVDRLPPLYHLQAELQTAQITLLTAQIHTLERAVQGELLETPAIQRLLWIPGIGRIVAFTIALEVDDIARFPTVRHFWSYCRLVPGAADSGGRQRHRASKDGNRYLKLAFSHAAVRAIQYFPEVRQWYQRWKRKKPARIARALVAKELAQSVYHVLQDGVAFNHHFKGTPLTRRKHHARWPRRASPSA

SEQ ID NO: 104456 - protein, 292 aa, unidentified
MRRVIGIDIHRTFGEVVIWENGVLRHAGRVDMTRTGLEGFGKRLQATDEVVIEATGNCMAVSRVLSPFVARVIIANPLQVKAIAHAHVKTDKVDAGTLASLHAAGFLLEIWTPDPATERMRRLVARRYQVVRHRTRIKNEVHAILHAHLIPRCPHSDLFNARGRAWLGRQPVPDDERAAIERHVRELDRLAEDLEELDREVAKGALDDPAVKRLLTITGVNLVVATGLMAAIGDIRRFKSPQKLVSYFGLNPRVRQSGLGAAHHGRISKVGRSQGSRVAGPKLNGRLAKIGK

SEQ ID NO: 104457 - protein, 350 aa, unidentified
MTNITTIGIDIAKRIFQFHGVDKNGKAVLKKKLMRDQVLTFIANLPKCLVGMEACGGANYWAREISKLGHEVKLMAPQFVKPYVKTNKNDQADAEAICEAVSRPNMRFVPIKSIEQQDILSIHRVRARLVKNRTALANEIRGLLHEFGMIIPQGINKITSKLTEVLDSGKLSPISQQTFSDLKEEFIENDKKIKCLESRLKIMASELDKYQQIIAIPGIGLITSTALIASIGNGSCFENGRQLSAWLGLVPRQASSGGKEKLLGISKRGDIYLRTLLIQGARAVLNTKLRFTTESQKAKKDYSKFTQWMFNLHDRGGHNKTVVAVANKLARVVFAVLSSGNDYVENKVCS

SEQ ID NO: 104458 - protein, 366 aa, unidentified
MSEVTRGPIVRVGADLAKRVIHVVAVDAAGSVVTSRQLPREKFLSWCAQLPAGCTVAMETCSGAHHWARKLIAVGLQPRLIAGHFVGAYRLGGRSGKNDAADAAAICEAASRPSMRFVPVKTVDQQSVLAVHRLREGYKEERTACINRIRGLLAEFGLVFPQSPEALRGVLSDVIEDASNELPGIARLALNRAFQHWVELDCHVAWCDKRIADHVRRDERARTAKEVSGIGPITASAVVASVADFSQFRSADQFGAWLGLVPRQNSTGGKANLGSITKRGDEYLRTLLIQGAKSAVMTAHQRSDRISQWVVQLKARVGWQKAVVALANKNARILWALMTRGARYDPQHVPIPPSGPVLTPTPPCPA

SEQ ID NO: 104459 - protein, 341 aa, unidentified
MEHFAGLDVSVKETSVCIVDEAGRITREVKVASTPEALMQVLRAPAYHLKRVGLEAGPLSQWLFGALAEANVPVICVETRHMRAVLKAQINKTDRNDARGIAQMMRAGLYRPVHVKTLRSQKLRMLLTHRKLLQSKAIAIENDLRATLRNFGLKVGMVGTAKFEARIKELVGDDSDLVLMVEPMLIVRRVLREQLAILHRHLLALARDDGVCRRLMTVPGVGPVVALTFRATVDVPARFQNSRAVGAVFGLTPCKHQSGESDYTGGISKCGDEMMRMMLYEAAQILLIRATKWSWLKSWAMQIAKRRGVKKAIVALARRLAVIMHRIWIDGTEFCWIRQRP

SEQ ID NO: 104460 - protein, 372 aa, unidentified
MSQSVLFFQSFVGVDLHKHTVTLAALAPDGTRIGRVTLSTKCRDKIAAWLLALPRPSHMAVETVGFVEWFIDCFRGCVDRIDIADATELANRRGKRRKNDPNDAHDIAARLARGECPLGYIADDELMQLRKLGRHWRQLSTVLARAKQCMKSMLLAANLRGPKFDGVSAQRWLLAHGHRLKPVQRRAFANFVQIIQLIELQRQPLRWAIIEAGRSERFAPIMKTLQSVPGIGEIWSCIIAAEIGPFDRFPNADALEFWAGMTADLKESAGRTQSGHITKAGSRTLRWALCNAALTLCHSDAKQEATRQRLIRKTGGIKAKANTAMGRRLLRLLYAMVRDGKTYQPGPSRGRNAAANKARAAKRARQKRKEAA

SEQ ID NO: 104461 - protein, 424 aa, unidentified
MENTVARKRKQVPEGYLVIGVDPHKKKHAAVAITQDFTTQVKFKFDNTREGLEMMLNRARVEMLKSGCRGVIFAIETGGHYWRNIAYYLDERGIPFRFINQYTLKRRREGKDINRRKNDYRDSEVAAQLLCTGEFVDSVIPQGVYAELRTSHNAYQRLVKERTRITNLVKGLLDALFPEFTRVFKDPGGLTALSVLSTCPIPRVIAVMTEDEFEATIEARHGGRRLMRKKLRELHYSAKTSIGIDAGARSMSSEIAFLVDKLELIRQQICVMEGTLVKLVDETEEGKYLLSIRGLNYIAVTGLLAELGCFKLYRSAKQMIKMAGSNPTESESAGKKRSKTPMSKQGRPLLRYCAWTAVIPMLRFNPDFRAWAKQRRERPAHANPLSGREIVGAALNRLLRLAFALVKNQTYYQDVKPALIPVAV

SEQ ID NO: 104462 - protein, 342 aa, unidentified
MQITTIGLDIAKNVYQVHGIDAAEKVVVRKQLRRSQVLGFFKALPPCLIGLEACATAHYWARELTKLGHQVRLMPAKDVKAYVKRNKNDAADAEAICEAVRRPTMRFVQIKSAEQQGRLMLHRTRDLLMRQRTQVINALRAHLAELGITSAQGREGLKELLKIVASDADERLPADAHASLVVLAAELQAMQTLIGLIEKRIVTQHRENKASKRLLTIPGIGIIGATAIADTVTDPKAFRSGRDFAAWIGLVPRQDSTGGKQKLGPISKQGDRYLRRILVVGAHSVLRRAKLNPQKHPWLTQLLARRPFKVVAVALANKMARMAWALLAKGGAYRAPALAATA

SEQ ID NO: 104463 - protein, 360 aa, unidentified
MNKNKYVGLDVDQATTVVAIEDARGNFLMESFLPTRAVEMREFFKGLNGRIHVAFEEGTQATWLYDLIEPLVKEVVVCDPRRNKLIQSGNKGDRVDARKLARLLRLGELHAVYHGERGTRGLKELVHAYEQLVGDTARTKNRLKGAFRSRAIGCRGEKVYGARERKDWLAKVDTPAVRDRIASLYEQLDCLKRLRDQAHKEMVKEARKHPAYKLIMSVTGLGSVRTSQIIATVGSPHRFRTKRQFWPYCGLAVVTHMSSEYEVVDGKRRRKNKPMQTRGLNKNFNRTMKVVFKGASETAIKKAPFKQYYQRMIDNKMRPEMARLTVARKISAITLAVWKKGEEFDPEKVNQAARDSDDQR

SEQ ID NO: 104464 - protein, 355 aa, unidentified
MDSIRYIGLDLHRDTVSAAVLDSDGTVMMQSVLATRAGAIIDFLNGIRGTLHVTFEECNHSSWLYDLLARRVAEVVVCDPRKNKLLKSGNKSDRVDARKLAELLRLRSLSPVYHGETSALDVQHRVRNYTGLTEDTTRVMCRLKAVFRSQAIACPGKKAFRKENRESYLVQLGSAALRERAESLYRELDALHPLRLRAKREMLAECRKHPATKWLQSIPYLGKVRSAVLIGRVQTPHRFRTKRQFWAYCGLALETRSSAEYTVVNGQIQRKLKPLPIRGLNWNHNHDLKGLFKSTATMASVRDGVFHEFYLGLLAKGMRPEMARLTLARKISAITLKIWKEGGTFDAKYLKLQAA

SEQ ID NO: 104465 - protein, 423 aa, unidentified
MDVIHDCVAGLDIHKDTVVACVRTMSQPRAMRECRTYETTTDGLLALLEWLSSSGCSVAAMEATGVYWLPVWKMPSDGDFKLVLANAAHIKAVPGRKTDMNDAMWIADLAAYGLIKASFVPDEQVHELRTLTRTRKQLTREQTRHVQRIQKTLTEANIRLDSVISDIMGASGRRIIEAIISGQRDPGKLAALAHRSVKATPKQLYDALHGRLTDHHRFLLKLHLGQWDAIDASIRIIDREIEARVARLDAQGPADKPRFSELIDLLDPMPGVNRLSAVSILSEIGTDMTRFDSDGHLVAWTGICASQNESAGKRKRTRLRKGNPWLKTTLVQCAWAAKNAKTSYYRAQFLRLKARRGPQKAICAVAASMLTAIYHMLSNGTVHQDLGADYFDRRSPEAKVGRLVRQITKLGYQVSVQPTIKAA

SEQ ID NO: 104466 - protein, 403 aa, unidentified
MSTVFAGLDWASRTHAVCVIDEHGAVCKQWEVAHDADGLRELLRQLRALHVLRIAIERPSGLLVDALVDAGFEVVPIHPNAVKASRPRYRSHGGKSDASDAYLLADLLRTDGHRFKPLTPQSDEIRALRALVRGRDDLVATRVQLANQLRSLLQSFWAGAPEVFADVDSPIALAFIQRYPTPEAASRLGPKRMAAFCAQHAYCGRRSAEQLLQRLRQAPSVSVGELQMDAKGEIASSLARTLAILVDQIRLLSSRIEHHVAASDDGRILMSFPRAGRICAAQILAELGSVRERFDSDEHLAAEAGVAPVTYASGKHKAVVFRWACNHRLRRALTTLADNSRHASTWAAAVYAKARGRGCDHPHAIRVLSRAWLRIIWRAWIDRKPYDPAAHGGLQTMLKTAGG

SEQ ID NO: 104467 - protein, 443 aa, unidentified
MINPNAAGIDIGHREHWCAVPADRSAQPVQRFGTFTEDLEKLADWLKECGIKTVAMESTGVYWIPAFQILERRGFEVRLVNARAVKNVSGRKTDVLDCQWLQRLHSYGLLNASFRPADEMCVLRSYLRYRDELTCARSVQCQHMQKALQQMNVQLHQVLSDITGLSGLRMIEGILAGERDAQKLANLADRRVHASKATIQKALKGDYRAEHLFLLKVAFELYGTYEKKIHECDEQIIAEMAKLPARVDPKEKPLPPRKPGRAPIRDRVAGKDIREELYRWTGVDLTAIEGIGVLSAQVILSEIGTDMSRWRTEKHFTSWLGLCPDNRISGGKILSSHTRHVINPVADALRIAATTLERSKSALGAFYRRMKARLGPASAITATAHKLARLIYRLLKHGDAYVRQGMEVYEQKHRERLIHNLKKTAASFGFQLTETKELTQCVS

SEQ ID NO: 104468 - protein, 340 aa, unidentified
MNYAGIDVSLECSSVCVVDANGKILREAKVASEPEALIAWFRSSGFDLERIGLEAGPLSQWLFAAMREAGLAVELLETRHVRKAFEAMPVKSDRNDARGIAQLMRLGWFRPVHCKSMSAQETRTLLTARKLVQSKLHDVENSLRGILRGFGLKVGKTTELKFAGRIEELVAGHPHLQVIAKALLAVRAVLRTEYAAFEKQVRKLARSDMRTRLLMSTPAVGPIVALTYASAIDDPARFKSSKQAGAHFGLTPKKYQSGETDYTGRISKIGDSSVRTVLYEAAHVMLTKPVKGCSQLKSWAMRIARRAGMSKAKVALARRLAVIMHRMLADATPFNAAAAA

SEQ ID NO: 104469 - protein, 342 aa, unidentified
MNKVNTIGEDLAKNVIQVSVLSPSNKELTNKELPRTKFAEFLAKQPISVVAFEACSTAHHWARLAKRLGHKVKILPAKVVASFRQGHKTDKNDALAVAEAANRPNVKEAPLKELEQQGLQSIQRSRELLVQIKTCLSNHIRSFLMEFGVFIPKGFSSLFKNVPDILEDGENDVPDMFRATLNLMYQRLLDLRDDVELLNEQVKQLVKSNLACKNLTEMEGVGPISAILLFATLGTGEAFKNGREFSAYIGLTPKQHSSGGKASLMGISKYVANKRLRSVLIQGARAYVHRMKSVTTKKDVWLVKLIERAGYGKAAVALANKNVRTAWALLTQGTEYKKELIV

SEQ ID NO: 104470 - protein, 412 aa, unidentified
MDTIVAYIGLDWGDERHSVHLQTAEGAIEHVEVEQKPAVLHEWIAQLQQRFGAGKIALALEQRKGAVVHALLMYDFFVLYPINPKALARYREAFQTSGAKDDPLDSELLLDLVVRHRDRLRAWVPDTVESRKLQLFCEQRRKLVNHRVALTNRLTSLLKQYFPQALEWVGDVASVQACDFLTQWPTLAALQRTRPSTVRRFYQAHNCRTASVIEARLAAIVTARPLTNDPAIVEPLSLAVQTYATQLHVLIGAIHTFDDRIAQAFAAHADHDVFASFPGAGDVCAPRLAAAFGTDRSRWHSASELQSHSGIAPVTERSGKSLWVHHRLACPKFVKQTFHEFADQSIRFSQWARAYYDQQRGRGNDHHAALRSLAYKWIRILFRCWKDRKPYDEGQYLDALRRRGSPLVKNFA

SEQ ID NO: 104471 - protein, 340 aa, unidentified
MSTINILGIDIGKFTFHLVGHDLSGREVYRKKFSRPKLIQVLSTLEITTIAMEACSGSHWLARKCQEFGHKVKLIPPQYVKPYVKTNKNDFIDADAIAEAAARPTMRFVSVKTESSQVTSVIQRIRSSYVKDRTACMSRIGATLLEFGMSFPKSHAKMKVLFQWLAEHGEPIPPMLLLELRDHHDYYLRLNNLISVQDKKLKQVVENDERGQLLMTIPGVGNLTASRCLSDISSATDFKNGRNFAAWLGLVPRQYSTGGKPTLLGISKRGNKGLRELFIHGARAVLVRPEKAVAVFGNWILALLSRKHFNVVVIALANKLARIAWSVLSTKQAFEVRIQA

SEQ ID NO: 104472 - protein, 346 aa, unidentified
MKQVSTIGLDLAKNVFQIHGADAEGAPIFNRKLRRAEVLRFFEKLPPCLVGLEACGGSHYWAREIAALGHDVRLIPPAYVKPYVKRGKTDAADAEAISEAVTRKTMRFVPIKSADQQAAVMVLKTRALLVRQQTQAINALRGHLSELGVIAGVGVTKVKALIEIVRDGADDCLSKAARLALAEIADQIEALTRQIDKLERGIVAEAKRDEDMRRLTTIPGVGAITAATVKALVPDPDGFKSGRHFAAWLGLTPKSHSSGGKERLGGISKMGNPTLRSLLVCGATSVLRRVKGNDKAPQWLIGLLARRPFKVVAVALANKMARIIWVLLTKGGAYRNTDGASSAANA

SEQ ID NO: 104473 - protein, 389 aa, unidentified
MALFVGIDVSKDKFDACGIGGEGEKVFSLTASMDRKGLEKLTFHLKGKRSLLLGLESTACYHIALFSYLTAQGYRVVIINPLLISNFAKLQLRKTKTDKKDAHTIAEFLMQKKQALENQTVSTDLMELRDLSRRRERLTDQVTRLKGNMKRILSVTFPELEHLTGVFTKSILELLIRFPSAEALRKADVETIAALIVPRSWGRKSRAWVETLMATASSSIGVSSPAKELILKQDASLLLYVQEQIKETTKALTSLCTDRMKNDIEILTSTKGIGKTMALNFVVEMGGDITLYKNDKSLIAASGLDPTTYESGQYKGQSKLTKRGNRHLRRVIWLMATRVVFSNDLFRTYFYKRRHEGLCYKMAVLATAHKLIRVMFAMLVHQTCFEEGK

SEQ ID NO: 104474 - protein, 421 aa, unidentified
MQVLYERCAAVDVGKDVIAVAVRLPGDGPDGRQMIKRTFRTFYGVLAEAARWLDSLGVTRVAMEATGIYSMPVCHALIEHGRFGQVLVCNAGHVKNVPGRKTDFADAGWLVHLLECGLLRGSFIPPAGIKAARDILRYRAKVVQNRTAEVQRLGAVLQDAGIKIGSVASSITTKSGRAMIESLIDGERRPKVLAGLALGKMRSETADLERALEGRFGDHHAVMCRLHLDHIGHLEEMTARLGAQAEVMMAPFRAGRALLTTVPGIGPLAAAGVISEIGAGVKQFFPGAGHLASWTGICPGNHESAGKRHSGKRRKGNPHLQPILVESAWAAVRHDGYLKSLYHKHVMKWGGYRSPTAKKKAIIVVAHALLVIIWHVLATGKPCHELGAGYFTHRLDPERETRRLIAKLEALGHSVSLQPAA

SEQ ID NO: 104475 - protein, 402 aa, unidentified
MNCVGIDVSKGKSMIAVMRPFGEVVVSPFEVRHTASELSELARLLKSLDGETRVVIESTGNYHAPVAWLLHDAGLYVSVVNAMLVHDYGNNSLRRAKTDKKDAVKLANYGLDHWLILPRYVPEEDTRLMLKTCYRQYQQYSKVQTMLKNNLISLLDTTFPDANRLFTSPPRADGSEKWVDFVATFWHCECVCGLSKKAFTAKYQKWCRKHGYNFSQDKALDIYASACGRFGVMPKTNTAKLLVEQAISQLRATSAALAALKQEMQSLAASLPEYPVVMEMFGVGPTLGPQLMAEIGDVRRFHSKKALVAFAGIDAPPYQSGQMDVRSRSISKRGSASLRRTLFLVMSVILQHAPMNEPVYQFMNKKRSEGKPYRVYMMASANKFLRIYYASVKAYLDSLEHD

SEQ ID NO: 104476 - protein, 385 aa, unidentified
MSQLNDLSRSLTSLEQDNAIIAVIEMSQSSWLVAGIVPGIERHPLKKLEPNEAELLRLLMRWRAEATKMGCTITRIAVAYEAGRDGFWLARWLRARDIEAYVIHPTSVAVSREHRRAKTDRLDTGLLKRVFIGWLRGEPDHCHMAAIPTLAEEDAKRPNREREGLVRERTRIVNRMKSCLARFGVRSFKPTLRKAPERLATLVTPEGVPLPANTLLELRRDMARLRFVMDQIKEVEEARGQRLEQAPQEKSHAMVRLLARVIGVGIETADMLVHEILSRSLRDRRAVARYAGLTGAPDESGSKRREKGLAKAGNARVRRGMIQLAWRFLLFQKDSALAQWYRTRTESSGKKRKTMIVALARKLLIALWRLVTTGEVPAGVVLRAA

SEQ ID NO: 104477 - protein, 388 aa, unidentified
MQIITDRPQAPTAIRTDLGAIFVSLELSRSTWLITSLSPGGGEKISKHTVRSGDVAGLWARFSQLKDKVQVRTGQVAPIIVIQEAGLDGFWIHRLLQDEGVESHVVDPASIATSRRRRRAKTDKIDGEALVRALLAYKRGEPRVCAMVRAPTPQEEDRRRICRERKTLTAERVEHVNRIKGLLFAQGITDYEPLSRKRRERLEELRTGDGRPLPEHLKAQIGRELDRLELTLQQIKSVETERDAMLSPSDESTPAPAAMLKNLKGIGPEFAGVLWAEGLFRSFSNRRQVAAYAGLAPTPWRSGSVAHEQGVSKAGNPRLRTTMIQLAWLWVRHQPRSILTLWFHQRVQLNGGRVRKMLIVALARKLLIAFWKYVTAGVVLEGAETTAA

SEQ ID NO: 104478 - protein, 381 aa, unidentified
MDQQLIRQCVGIDISKESFTACVCSYYRSGEEQLTEVVEFKNQKTGFNQLVKWSRKITSASVPVGFVMEATGVYYEALAYHLHRLNQPVSVLLPNKVKYFAKSWNVKTKTDIVDARIIARMGAERKLSLWEPPLPIFKQLRDLTRAYSELMKEKTAFSNRLHALNSSYEPLALIVKSNKSIIKKLDEQLVRFKAEIEKVIYSESWLAEKVKKVLTIKGVGLMTVAVILAETQGFEFVDNIRQLCSYAGYDVVQRESGTSVQGKTRISKKGNSWIRAALHFPALVASRHNENLKNTYLRINEKKPSKMIGATALQRKILVLIYTLWKNDTVYDEAFEKKRKADRSEVHKKTLRQNKTKAGRSINNLPAQDELKVKDLLSSLV

SEQ ID NO: 104479 - protein, 311 aa, unidentified
MPAKAEPHYVGLDIAKDQLDYCINDAAEGRIPNTPEARAGFIEKLKLLDTARVICEASGGYEKIVVAELLAAGIEMCVVQPGRVRAFAYAEGLLAKTDRIDARLLRRYGEKIAPRLAVPTDAATATLRELIEHRRQLTTQLSEVEGRLALAGPTLCKLLQRQKTFLQKQIKAVEAMISDHIDHDPDLRSKSERLQQVTGVGPILSATLLAYVPELGKIESAQLSALIGVAPYPKDSGTMHAPRHVRGGRAQVRHVLYMAAVSAARSNPILAAFYQRLLANGKPAKVCLIAVMRKMVCLMNRLIKDPDFVLA

SEQ ID NO: 104480 - protein, 400 aa, unidentified
MRTVFGIDVSKASSEVTILVNGEKVHGYTMSNDAIGFARLLGDLKTVHKPEIIFEATGVYSRRLQAFLDEHSYAYTRLNPLEAKKQLDSLRVRKTDQIDAEKLAQSQFVLNRKPTYVQEEVYQNLRDLSRFYQNLTEDIVRAKNRLHKVLQVTFPELETILSTPSGQQYWNLVIAFPCKDFVLELSKDELSESIRQSTSKRISDKRVAYLAEKLIALANQSYCAVKKTSPILEEVRYYAKELLRLSEQRQAVLDQMVELAQPLPEYDILLSIPGIAETTATSIIGELGDIRRFQSANQINAFIGIDLRHYESGNFLAKEHITKRGNPYARKILFKCIHNIASASHTNPCHISDFYEKRKRQSQTTSTKPHTIASIHRLIRTMYYLITHNKLYDYTLTKNQ

SEQ ID NO: 104481 - protein, 317 aa, unidentified
MSTVPFEQVILRGCGIDVHKDVVVATISGEGLKAETRGYKTFSSSLTELKEWLLSNGITHVAMESTGVYWKPVYKVLECPQLKVWIVNARHIKYVPGHKTDKKDSAWICKLLLAGLLKPSYIPEREQRELRDLTRYRNKLIQHVSSEKNRIVRILEDCNIKLSSVMSHLDGVVATKLIDILIEKGHVTMDDISRVYHKRLEASPELLYQACEGFIEPHHTYMLQTIRKDMEQTEAIIADLTSRVKDVLSPYENVIDLLQKVPGLSRKTVEDLIAEIGVDMEAFPTEKHLASWAGMCPGNNESAGKKKGVGPPMATNS

SEQ ID NO: 104482 - protein, 401 aa, unidentified
MTTMQDNVQRVKRFRELKATLRTEHHRLLVGLDIAQAEHVVHVRHAHTRVVIPTLTIPNTTRGFTQLWTRIQQAQRATGCREVVCGLEPTGTYHQAVATFLDAQGATVVLISSSVAYWNRRTQDGTWDKHDRKDAANCADLLEQGKILFYSQPEGPLAELRHLVKCLRRARAELAACKARWRTTLRPALGPMGEPLPNRLRVELPAVLQAWEAAAPGRPAVPKGRLPLGLATACADLGAQVTAVQARIAAIEQALTPLAERLPAYTLLRTIPGIGPTVGAILLAEIGDIAWYTKFSQLRKLAGFDIVRVQSGQFAGQARISKCGRGLLRWALYHAAMGMARTAAGRARLAAFKAKRHGDRYAGFKAIVELAAKVLRIVWGVWRSGTPYDPLRTGGLRRQPR

SEQ ID NO: 104483 - protein, 351 aa, unidentified
MPHKLNSAIAVIGIDIGKNSFHVVGHDKRGAIMLRQKWSRGQVEARLANLPPCLIGMEACVGAHHLSRKLQMLGHDARLMPAKYVRPYSKGQKNDFRDAEAITEAVQRPTMKFVATKTAEQLDLQALHRVRERLVSQRTGIINQIRAFLLERGVAVRQGLRFLRAELPRILAAPCDALSPRMLHVIEDLAGDWRRLDERIEGLSSEIEALARQDKGCERLMTVPGIGPIISSAMVAAIGTGDAFSKGRDFGAWLGLVPKQISTGDRTILGSISKRGNRYLRALFVQAAWVVLVKVGPKHWARYGLKSWIEAAKKRLHHNVLAIALANKLARIAWSVLAHGRTFEASKIQAA

SEQ ID NO: 104484 - protein, 391 aa, unidentified
MIYIGIDVAKDKHDCFITNSDSEVLFKAFTIANNLDGFNDLYQKIESVMDDVTKVKVGLEATGHYSYNLLGYLIDKGLPTYVINPLHTNLYRKSLSLRQTKTDKVDARTIASMLMSDVNLKSYSDTSYHNEELKSLTRYRFDKVKERAKLKTSVSRLVCILFPELEKLVPTLHMASVYALLSEFPSAKHVATAHLTRLTNLLSESSKGRYGKDTAITFRDAARASIGSNMPAKSLELKHTIKLIQELDSEIDEIENEIKIIMDEINSPILSIPGINYRMGAMIIAEIGDFNRFDSPDKILAYAGFSPSTYQSGQLDGAYAHMEKRGSRYLRYALYNATKYVCHWDPTFAAYLAKKRAEGKHYNVAISHAVKKLVRVIYHLEKTKQQYIKVA

SEQ ID NO: 104485 - protein, 352 aa, unidentified
MFHQPGEATEMKITSVGIDLAKNVIQVHGVDEGGKAVVKKQLKRDQVASFFANLPPCLIGMEACGSAHHWARKLEAFGHTVKLMAPQFVKPYVKTNKNDVADAEAICEAVSRPNMRFVPIKNGEQQAVLALHRARQGFVKARTAQANQIRGLLAEYGIVIPQGIGHIAKRLPEILEDGENELPGVFRQLLQRLGDHLKELDRQAGELEVQIQSWHRESEASKKLAQIPGIGPITASALVASIGDAKIFENARQLAAWLGLVPRQHSSGGKQVLLGISKRGDTYLRTLLIHGARAVIRVAENKVGHADSWLARLMGRRNQNVAAVALANKNARTVWALLAHGRDYEANYGVAA

SEQ ID NO: 104486 - protein, 385 aa, unidentified
MYQLSGSTQAALDYNSIMIGALELSEKKWVLAVQLPGVRRHSRHVLEACGDGLASFVERLKARCAAAGRKIARVILTHEAGRDGFWLARFLARRGIEIHVIQPSSLPVDRRARRAKTDIIDVEMLLRTLMAWLRGEPRVCSMVPIPSEADEEARRAYREREDLTGERRSIVNKIDGILATLGVKGYKALRRDRREQLTAVRQPDGDPIPQKARARIERLLDRLDLVLKLIEQVESARDAVLKKDAPADEAERMIRSLTDLRSIGPDFATLLVREAFVRKFRNRRALGGYVGLGGTPFSSGGSEREQGIGKDGNRRVRAAMVELAWTWLRWQSDSALSVWFRARVGAMGGRIKKIMIVALARKLLVALWRYVMDGVIPDGAKMKAA

SEQ ID NO: 104487 - protein, 419 aa, unidentified
MKEPNIGDFACLIGIDWADRKHDFCETDDQGKTYAYGVISSKPEAIHDWVMTLKERYPNQRIGISCELKKGPLVHALLKYDHLTIFSINPSTVAKYRKAFVHSGAKDDPSDAKFQVDILRLHMDKLRVIEPDSADIRALGQLVEYRRKLVQDRVDLSNRIAGILKSYYPQPLEWFKEKDTIIFCEFISRWPDLASAKRARKSTLINFFNQHNSRYSAVNEDRIASIKSAFALTHDEGIIDPNRLMISLLVPQLKLLIEAIDVMDKDIKTRYKAQKDKAIFDSLPGAGPQLAPRLLVAFGSNRARYETAADMQKYAGIAPVIERSGKKSWTHWRYSCPKFLRQTFVEWAGQSVRFSFWAKAYYQQQIEKGKPHNTVIRALAFKWVRIAFSCWKTRTVYDESKYLEALKKRGITTASVCCK

SEQ ID NO: 104488 - protein, 296 aa, unidentified
MESITRNEKILYVGIDVHKDTYSLCSFDFHKNELSDEMTIKATTKAVIKYLEAIKKKHMEEILFACGYEAGPTGYGLCRGLQKAGYGCVVMAPTTMSNPDGKKRVKTDRIDARAIARILAYKSYSQVHLPSEEMEALKEYTRARDAKKRMFKKAKQELLSFQLRNGKSYPESGNYWTEKFFKWIKTVQFSEKWMQEAFNEYLAEVYSLKAKIELMDMKIREIAELEIIKDKVDKLVCFSGIDVTTAVETVVEIHDFTRFATAAQFVSYLGLCPGEDSSGKTKNMLPLSSRKRGTSA

SEQ ID NO: 104489 - protein, 371 aa, unidentified
MADIDGVAGIDAHKHVFTVAVLDARGGRCGIESFPTSPEGLAEVLALLDSFEFAIGRIGVEGSAGLGRHVAAFLVAAGYDVREVQANRTAERRRRRRRHKTDREDAEAIARETLADPDLPPAGKQRRPDPCWDELVAVRNRRKSLIGQRVRLLNEAEAVLTGLPLTIRAALPQTSRVRPRLRALDRGAASSVQVAAADRVNLAWLVEAAGDIARLDARVTELDKQIPALLGRLGCTLTKEYGIAAVGAMDLLVEVGDPTRFATEAQFARWCGVAPVAVSSGEGDQAPTHHRLDLAGNRQVNSTLHVMHVTQVRGYPPARDYIARKRAEHKTKREARRAHKRHLANIVIRRMWADHAQRFETAHKPAAPVAA

SEQ ID NO: 104490 - protein, 343 aa, unidentified
MLHAGLDLSRKKIDVCLLSAAGEVVDEWASPPDSDGLRGLAARAVMWGGSVRGVIESMNGARFVHDRLEEHGWEVLIADATKVKGLAPLACKTDKIDARVLATLSARDLVPEIWLPDPSVRRERELARFRLHLVRHRTTLKNRIHAALIAFGHPCPVSDLFGHAGRELLDRLEIPDPWRSNIDVSLELIDDLDLQIATLTVQLKRQGADHRYIPLLVTAPGIGWINAYTIASEIGDIGRFASPAKLCGYTGLCPRVKQSGATDARGPISKHGPKYLRWALFEAALNACRHPYYAERYQQNKRRLGRQRGPKVAQIDLSRRLTEAIWHMLTRHQPFAPAGAPVV

SEQ ID NO: 104491 - protein, 641 aa, unidentified
MRIVCALDVHRRQITYAIVDVRSGEMSRGRITPATRESVREWLARFDGVDEVGFALEGTTGWRFVVEEVERAGHRAHLADPAETAAKRGRKRRAKTDRADCDLLLRLLSARELPESWIPPAQILELRTRVRLRKTLIDERTAWQQRLQAQLFHQGVPRGLRPRTRAGREALAKVELSPAGLELVALALRMIETIDDELAPLDRVPSLYARHQPGCRALIARLYGVGPVTATAIVAELGDARRFGCSDDAVRHCGLDVTVRQSDRKRAPGHLSHEGPELLRWISWMGPPAAAIASRPRQVRIDEGGPNEMVYAAIDIHKRIFQAAVLDAETGELAQERLSATREALNDWAMRWQGKLEAVALEATTGWRWVARELQARGIDVRLCDPGEARALGGSKRRPKTDRLDAAWLARLLAKEMLPEAWLPPDEIQYLRDRTRLRHALARDRNRWAQRLHALLTHEGWPCGRGRLLTVSGQRWASALSLPTPARASVDAMLAIIRALDEQIELLDVELRQLARSDRRLQALCAIFGVGPVLAAHILAELGDVRRFRRARQAVRLAGLDPVVSESANVRRRGRLSKQGSPELRWALAEAAHHACRHRSPDHDLYLAVKGRRGGQRATLTVARKIARRAYHTLNELEQAA

SEQ ID NO: 104492 - protein, 402 aa, unidentified
MNCVGIDVSKGKSMIAVMRPFGEVVVSPFEVRHTANELSELAGLLKSLDGETRVVMESTGNYHAPVAWLLHDAGLYVSVVNAMLVHDYGNNSLRRAKTDKKDAVKLANYGLDHWLTLPRYVPEEDARLMLKTCYRQYQQYSKVQTMLKNNLISLLDTTFPDANRLFTSPPRADGSEKWVDFVATFWHCECVCGRSEKAFTTQYQKWCRKHGYNFSEDKALDIYASACRHFGVIPKTDTAKLLVEQAISQLQTTSSALAALKQEMQSLAASLPEYPVVMGMFGVGPTLGPQLLAEIGDVRRFHSKKALVAFAGIDAPPYQSGQIDVRSRSISKRGSASLRRTLFLVMSVILQHAPMNEPVYQFMNKKRSEGKPYRVYMMASANKFLRIYYASVKAYLDSLEHD

SEQ ID NO: 104493 - protein, 371 aa, unidentified
MKKCSTMLYVGLDVHKETIAVAYAPDIHGAEVVSLGNIGTRQCDIDKLTRKLTSKSPRLFFVYEAGPCGYWLYRYLTRKGFACAVVAPSKIPRKPGDRIKTDHRDAAQLARLMRSGDLSLVYVPAVEDEAIRDLSRARGDVVKDLKAAKFRLKSFLLRHDIRYTGRADWKPAHLRWLARVVCPTPAQQIVFQEYLRAITEEHERLKRIESELRELVPRWRLAPVVEAIQAMRGVQFVVAVTTIAELGDLSRFDRPRQLMSYLGLIPSEDSSGPRRRLGSITKAGNAHARRMLVEGAWAYRYPAKITPHIQKRVERTPRFAQDIAWKAQVRLCKRYRRLKARGLHPNKITVAIAREMTAFIWDIARQIPVPA

SEQ ID NO: 104494 - protein, 431 aa, unidentified
MNTFTNNDNTQNNYAAFIAIDWADQKHTFSLKVAGQSKKETGTLEQKPESIGPWVAQLRERFGGRPVAVAVEQSRGALIHALLAYDFLVLYPIHPTTVAKFREAFKFSGAKSDPLDTDQILEILTKHWELLKPLKPDTEATRLLGRLVEDRRKTVNLRTRHIQALLASLKEYFPQAIELVSGNLSSRLAADFLKKWPTLEAFQQAKPSTLKRFYYGHNIRSPELIERVLSLATTAKALTTDSAILESGCRLSQMHAHLIQTLNPLIEGYDQRIEKVFHDHPEFPLFSKLPGAGPVMAPRLMSCFGTDRSRYPNAQNVQTFCGISPVSRSSGKTRVVYFRRACPKFQRQSFHEFARLSVASCQWARNYVDHYTAKGKKYNTIIRALAFKWIRILFRCWKDRTPYDDNKYMDILKKRGSIFATLHLEQKNENC

SEQ ID NO: 104495 - protein, 478 aa, unidentified
MAAVKMNRKQRKELVRRMRSEDPGLEVVHPDAAGIDVGNGAHYVAVRPDRDAEPVRRFECFTADLHRLADWLQACGVKTVAMQSTGVYWIPLYEILEARGFEVYLVNARHTKNLPGRKSDVQESQWLLKLHTYGLLNNSFQPTSEIRVVRTYWRQRGEHVHGASTCIQRMQKVMTQMNLQLANVISDLSGLTGQTIVRAILAGERDPAKLAALSHPQVRASRAEIAKSLEGNWRPELLFVLKQEVEMYDTYQRRIVECDGELEAHLKRFADKAERKEEEPTADNQKGKKTPKTKLGQSGKRAQGNAPRFDLRSELFRVSGVDLTRIDGIHVMVAQTVISEVGLDMSRWNTEANFSSWLGLCPDNRISGDKVLSKGTRRVVNRAATALRMAASTLIKSQSYLGAQYRRLRSRLGAPKAITAMAHKLARLVYRMLKYGQEYVDKGMQFYEDKYRCQQVDRLKKTAAKLGLQLIEIQAVEG

SEQ ID NO: 104496 - protein, 343 aa, unidentified
MDHFAGLDVSVKETSVCIVDDTGKIVREVKVASEPDALLAVLANPTYRLRRIGLEAGPLSQWLFSALANAGLPVICVETRHIRAALKAQINKTDRNDARGIAQMMRAGLYRAVHVKTLRSQKLRMLLTHRKLLQSKAIAIENDLRGTLRNFGLKVGMVGTVRFEERIKELVENLPDLAVLVEPLLIVRQTLREQFGILHRRLLAIVRDDEVCRRLMTVPGVGPVVALTYRATVDVPARFRNSKAVGAVFGLTPSKYQSGEINRTGGISRCGDEMMRMMLYEAAQVMLLRSAKWSWLKAWAMKIARNRGMKKAIVALARRLAVIMHRIWVDGTEFRWTREFAAA

SEQ ID NO: 104497 - protein, 413 aa, unidentified
MLKIVYPICCGMDIHKNFVVACIATTDDQGVTTYKKKRFSTFTNDLRRCASWLAENNCTDICMESTGKNWIPIYNALESSCRIVLAHPKYVKAIPGKKTDEKDAKWIADIFKHDLVAGSFIPPADIRQLRDLMRYRWKLTNCTVGEKNRAQNCLTVSNIKLDDVFSDVFGKTASAITDRLLKSNKPFDVTPYLSRRIKTPVEKIQAAVDGEVCAEQAEKLRIIRSHMNSLDLCKANLESLILSTAQKFLPQLELVMTVPGIQSYSAIGIISEIGVDMSVFPTSKHLCSWAGLTPQNNESAGKKKTTRISRAGAYIKPLLVQCALAVCKSNKHPEIKNRYLSLKKRRGHKKAIIAIARMLLTAIYNILKKNEPYNPELYLRCNNTPPEHRAVSVEEAIFILQRHGYLVTPSAPG

SEQ ID NO: 104498 - protein, 436 aa, unidentified
MNQTKLNRKTIASDGGDFAALIGLDWASQQHALALYDCATGKRESSTLEHAPEAIAQWAHGLEQRFGGRKIALCLEQAKGALINALLEYSFLVLYPINPATAARYRQAFKTSRAKDDPTDAQVCLEIVLHHREKLTPWLANDGATRELSRLLEARRSLIDLRTLLSNMLRDALKSYYPQALQLAGQDLFAPLGCQFLLKWPSLGQLQKARTESVRKFYYAHNCRRMDVIEKRLHSIASMIPLCRDPALIEPAIVQVKMLARQLLQLGIALKEYDFRIEQLFTQHKDASIWESFPGAGPTLAPRLCCAFGNERSRYQSALAIQQYSGIAPVIERSGKNQHWVHRRWGRPHFVHQSFFEYASQSLLHCSWAKVFIQDQIARGKAYPTAVRALAFKWQRIMFVCWRDRLPYNETIYLNSLKRRGSHLTSKLNHDLPKAA

SEQ ID NO: 104499 - protein, 342 aa, unidentified
MDDYAGRQFVGIDLHRQRSVIVRQSESGEQLSAVRIVNDPVTLQLELERAGADPEVVLEATYGWYWAVDVLQACGARVHLAHPLGVKGFRYRRVKNDVRDAGDLADLLRMGRLPEAWIAPPATRELRELVRYRAKLVAIRSGLKAQVHAVLAKAGVLIAVSDLFGVGGRQRLAKVPLGSAYAERVRSLLGLIDVLDDHEARFAGLIAKRLDTHRGYQALQQIPGIGPVLAAVFVAEIGDVHRFAGPAQLCSWAGLTPRHRESDTVVHRGHITKPGSKLVRWAAIEAVQRHQTTAKISADKDRIEARRGKNIAKVAAARKLLTLVYYGLRDGQIRALDWARAA

SEQ ID NO: 104500 - protein, 332 aa, unidentified
MVAGTTWFVSKTGIKKMTEHKTNTCCAGIDVSKEKLDAVVMPGAEHLVVAYTKEGLKELDAFLSRHKVERIGFEASGGYERRLLEHLRAGSIPAVRVQPKQVRAFGTAKLRRAKNDRLDARLIALFTASLEHLPPLPGPLSIELAEHLTFIEQIEDRIVLAKTSLETTVNPRLRRLHSAEITRLETRRKAELMRLAKAVEASSELARRMARVCSIKGIGLRTGLALVIRIPELGRLSREEVAALSGLAPYDNDSGKSAGRRHISGGRPRLRTSLFMAGFSAIQWNPDIKAFYDRLRAKGKHHLSALVAAMRKLVILANAVVARDADWQPTRP

SEQ ID NO: 104501 - protein, 368 aa, unidentified
MEKFITFVGLDVHKNTIDVALADAGRNAEVRHYGKIGGGLDDLDRLVKKLSSPNKELHFVYEAGPCGYDIFRSLTDNGFDCAVVSPAHIPKKPADRIKTDRRDAMTLARLHRAGELTYVFVPRADDEAMRDLTRAREDAKKAQRVAQQQLNGMLLRLGFRYPKDNWTKQHFLWLADQKMPMPAQQVVFQEYINSINETNARVERLTQQIETLVPAWRMASVVKALQAFRGVSIIVAATMIAELGDLTRFDHPKKLMTYLGLVPSEHSSGEKTQRGKITKTGNGHARRVLVEAAQAYSHPARITRPLLKRQEGLSQDARDIAWKCQVRLCTRFRRLMAKGKNRNAVITATARELAAFMWDIANHTPIAV

SEQ ID NO: 104502 - protein, 352 aa, unidentified
MKISRVGIDLAKNIFQVHGVDGRGKVVWKRQLRRSNWLRVLVEQIEPDCEIGMEACGGAHHWARELKTRGYQVKLIPPQFVKPYVKGNKNDASDASAICEAMSREDMTYVAVKTVEQQDIQAVHRVRASVIGQRTATGNQIRGLVAEYGLVAPKQLGSLRRAIPDWLEDAENGLTSRFRTLLHGLWEELLRLDQRIDVLDTEVKVIAETQPDAKRLMQLRGVGPLVATALVARFGDASHFKRGRQAAASVGLTPRHHGTGGKNRIYGLSKQGDRYLRSILIHGARAVVSQAKRRDDRLSLWVTDLKERSHINVASVALANKTVRVAWSMLRNGTDYEPELAAGERYRGWVMA

SEQ ID NO: 104503 - protein, 422 aa, unidentified
MSYCPVAGIDVSKRFSDMCILSPDNKIFAQEKIYHDETSINRANALLQKAERLFFSKPVIVMESTSHYHLILFQFFSEHGYNVIVVNPLQSNSMKDFSIRKRKTDRVDAFKLAMMYRTKTLRPSQIPQTATRALRQLCRHRAELLNDVSSYKNRLTALLDQTFPGYDKVFSDVGGITSCAVLVRFPTPTILLVEEESELVEVIAAASKSGYSFAKKKAGLLISAAQKAQTLGIHSCADETLIVCTIQMLRTLSESVLQIEAAIDNLLAQIKEMRNNVSLLQSIPGVGSHSAALLLGEIGDISLFKKPKQLAAYFGLDPTERQSGSFRGTKNKLSKRGSPYARAALHMGVVNAICKHGKDSAANPVLLSYYEKKCKNKPAKVAQAASMHKLVFIIFAVLRDQKPFELKTPEQHAVEQGFVKAA

SEQ ID NO: 104504 - protein, 418 aa, unidentified
MEPNRFRHYIGIDWATEAHRICLLDHNGQLCAKVSIPHSGAGLDQLLEWLASHGVEPAFAAVAIETPRGALVETLVERHYAVFAINPKQLAHFRDRYTSAGAKDDDRDAWVAASALRTDEKAFQRVAIDAPELIQLRELYRTADELREEVQRLTSRLREQLNRYYPQMLALYSAADQPVLWDLLELAPLPATAHQLTLPQVETVLRKRRIRRFPAGKVLEQLRATPLTLAKGAAAAASQHALVLVAQLRVIYELRKQTLKRLAGVVKKMRQTTTGSGAPSDAAIVASLPGAGILSTAALLSESSRAVAERDAPALRAYAGVAPVTQQSGKTLKVSMRYACNNRLRNALYHFAMGSLRDPLARRHYDRLRGEGHSHARALRGVADRWVTVLMAMLRSGTLYDATRRKAWSAADAAGVTA

SEQ ID NO: 104505 - protein, 316 aa, unidentified
MTTAGGFVGIDVAKAELEVVVRPSGARWTVTNDGSGLAQLQERLQVLAPSLIVLEATGGYEVAVVAALAMAALPVVVLNARQVRDFARATGRLAKTDAIDAGVLAHFAEVVRPPVRPLPDAMTQDLQAWLTRRRQLVEMLLAEEQRRSRAPRPIQRHIDQHVRWLRAQLGAVEKDLARTLRESPVWREKDDLLRSVPGVGPILTTTLLGDVPELGQLNRKQIAALIGVAPLNRDSGTYRGRRAVWGGRARVRATLYMATLTAARYNPAIRVFYERLVAAGKPKKVALTACMRKLLTILNAMIARRTAWKPPVAVSA

SEQ ID NO: 104506 - protein, 422 aa, unidentified
MNKMLNEEQFAAFIGIDWADAKHDLCLQAVGCEKRESSTLEHTPEAIEAWASALRRRFGGKSVAICVELNKGPLVYALGKYDFMVLFPVNPLMVARFREAFATSGAKDDPSDAQLQLELLLKHRDRLKPLKPSSPAIRALEQMVEHRRRLVADKVRLNNRMSSILKNYFPQVLEWFKDRDTKLFCNFLTRWPTLERVQRARRSTLEHFFHTHHVRSSVLINKRIKGIGAAIALTTDEAVIAPNELLTKALVAQLRVVLVAIGEFDDEIALRAQRHADFALFDTLPGAGPVLAPRLLVAFGDQRERYACAADLQKYAGIAPVTVRSGKQCSVHWRWRCPKYLRQTFVEWSAKSIHHSFWAQAYYQQKRAQGKSHQVAVRALSFKWIRILFRCWQDRCPYDESVYLRALQRRGSPLFKYLAQST

SEQ ID NO: 104507 - protein, 340 aa, unidentified
MRLIGCDLHASQQSIAMLDRDTGAVIEKTLKHEGEAVREFYASIPPPVVVGIEATGSMGWFLRLMEELAIECRVGHPVAIRKAEARRQKHDRRDAALLLRLLVEDRFPTIWMPSTELRDLRALLLHRHQWVRMRTRVQNALHAIAMAHGVRRGHTLWNREGQALLASLPLAPHTAHRRSELQSLYQHLDAHVDRLGERVKQVAEERPRATLLMTHPGVGSVTALATEVFVGDPARFLDGKALASYVGMIPSEYSSGKRQRLGALTKQGNPFLRFLWCEAAAHAVRRDPELQRFYRRKVAQKGFAKANVAAARKLGIRLWIMLRDQIDYAEFCRRGLARQS

SEQ ID NO: 104508 - protein, 346 aa, unidentified
MLDTTTGEVVEVILKHEGDNVREFYSSLPRPVRVGIEATGSMQWFLNLMEELGIECRVGHPAQIRACAPRKQKNDRRDADLILKLLEEDRFPAIWLPSQELQDLRSLLRHRHQWVRMRTRIQNALQSIALANGLRRGTALGSHDGQSRIASLSLAPHTAYRRSELQAMYEKFEAEIEKLNQRVEQQACQRPGARLLMTHPGVGPITALATEVFLGDPARFADSKALASYVGMIPREHSSGGRQRLGGLSKQGNPLLRFLWGEAGAHAARKDPELQRFYRRKLVQKSLGKASVAVARKLGIRLWIMLRDQIEYNEFCRRGQKQQKSSDAYAGMPETPYGAKSHRPID

SEQ ID NO: 104509 - protein, 407 aa, unidentified
MDLLKTVFGIDVSSRKSNVCIMVNGQKVNDYAISNDMVGFNQLLDDLKQVTNPQIIFEATGVYSRRLQAFLNMHELRYVMMNPLEAKRKTKDDLHQNKTDKLDAMYLAKLQSEHPQRLAYVQSEEYQELMANNRIYEQASHDLITNKNRLHKAIQLTFPEIEHVMATPRGKNYWSIVLRFPHPDIVLETKEADIIDFLKSLSGIGKKRANDIMQKLIRLAKVACPAVKKDSAYVHGLKIAINNILSAEEECQTALQEMAKLAPKRDLEILTSIPGIGENTALRIISELGDIRRFKKPNQLNAFVGVDPQVYESGNLTAHLSISKRGTAIGRKVLYLAINQIQSAKKAGNPCHIADYYEKRKRSSETASHKKAAIASIHKLLRTIFALIKNDQLYSYDVAKHNQRLLS

SEQ ID NO: 104510 - protein, 365 aa, unidentified
MWEAPVIRQRTSVGLDVHARSVIGCALDGETGEVFERRLTPDYGEILDWLRSLPGRVAVAYEAGPTGFGLARFLIAAGLLCLVAAPSKLVRPAGDRVKTDARDAAHLARLLHLGQIVEVTVPTVTQEAARDLVRAREDCRGDLMTARHRVSKLLLRQGIIYSGGNTWTGKHELWLRQQRFDAPGLQLAYDSAFDAMVICRDRRQRLDEAIETMAATSEFTPVVSRLCCLRGIATLTAFGLAVEIGDWDRLTGRSIGAYLGLVPSEYSSGTSRAQGGITKTGNGHARRLLVEAAWHHRTRYQPGAVMQRRWDVASPAARARGHAGNRRLNQRWARFDERKKRPVVANAAVARELAGWCWSLAVLTD

SEQ ID NO: 104511 - protein, 343 aa, unidentified
MKLMRIGVDLAKNVFQIHGVDCHEKPVWRQRLPRERWLQTVLEKIEPGCEIGMESCGGAHHWARQLEARGFRVKLIAPQFVKPYVKSNKNDANDAEAICEAMSRPSMRFVAIKTVEQQDIQATHRIRSGLIEQRTAKANQIRGLVSEYGLVAPKELLSLRRAIPCWLEDAENGLTLRFRHLLDGLWGDLRALDERVKELDSEISVIAANEPRAQALQQLRGVGPMIATALVVAIGDARQFVNGRQFAASLGLTPRQHSSGGKDRLLGISKRGDTYLRTLMVHGARSALRTAKSKDDRLSQWAVRLAERSHANVAAIALANKTARMAWAMLRNGTHYQPELAAA

SEQ ID NO: 104512 - protein, 342 aa, unidentified
MTLYIGVDIHARQQTVSYLDTSDGTTGVVALSHERDDIKGYYSQFEGEVIIGIEACGYTNWFEELIERLGHKLLVGDAAEIRRLARRWQKNDRRDAQLILELLVHGEFPTLFRYSKESREVLRQLRYRHKLVKLRTMVVNSLHALAINAGLSLRAKLLTRDGRQQLRGLSLSAISQQQRDELVSLADELTRRIGTVEQWLKEQAKQDVRVRRLQTHPAVGLLTSLCLVHTLGDVSRFSSLRKVAAYAGFDPMEDSSAERKAYGGISKAGSKLLRYLLVEAAQTAAKDDEQLKQFYRRLLPRRGKARAKVAVARKLLIRCFIMDRAAIDYAEFLRRGKQKETE

SEQ ID NO: 104513 - protein, 398 aa, unidentified
MTESSDYESVQVFIGVDVGKDTHHAVAINRSGKRLFDKALPNDENKLRSLISDLKQHGQILLVVDQPATIGALPVAVARSEGVLVGYLPGLAMRRIAALHAGEAKTDARDAAIIAEAARTLPHALRTLKLADEQIAELSMLCGFDDDLAAQTTQASNRIRGLLTQIHPALERVLGPRLDHPAVLDLLQRYPSPEKLASLGEKKLAAQLCKLAPRLGKRLAADIAQALAEQTVVVPGTNAAAVVLPRLALQLITLCKQRDEVALEVEQRVLAHPLYPVLTSMPGVGVRTAARLLTEVACRAFASATHLAAYAGLAPVTRRSGSSIRGEHPSRRGNKALKRALFLSAFAALRDPLSRAYYTRKMSQGKRHNQALIALARRRCDVLFAMMRDGTFYTPQAS

SEQ ID NO: 104514 - protein, 333 aa, unidentified
MSKFKHFVGIDVSKEYFDAVVILDGTKEKSIHSQFANDYKGIKSLCKWLKEEGSTYENTLVCLEHTGMYGKLIINYLTSFKFDIWVEMSLKIIRSIGLQRGKNDKIDAERIAYYAMKNQEEAQIYEPPRKVIEQLKKLISLREHLVTTRAMLLRNSKELKGFEPELSKIYAKFCKSTVKGLEADLKNIEKELDNIIKSDENLSNVYEKSTSVTGVGKVTTLYLICYTNEFKMYETPRQLACYCGVVPFEYTSGKSIKGRSRVHYMANKKLKKQLHMCAISSIRAKGDFKDYYDRKVAEGKNKMLVINNVRNKLIHRICACIRNNKNYELRLAS

SEQ ID NO: 104515 - protein, 402 aa, unidentified
MADGPTRFFGLDIHKEYFVAVGVNAQREVVFGPQRVSNYQLDEWVARVLTIQDSVVLEMTTNTYLFYDTLVPLVHSVIAVHPPNVALVTNVKVQTDKKAALALAQLHAAGLLEGVWIPPQEVRDLRALIARREKMVRLSTMAKNRLHSIIHRNHLILPEKPFDPEQHSWWESLSLSSTEQFLVRSDLDTLEFAQKQVAQAEECLKKASAQDERIPLLVQLPGVAMLTAITILAAIGDVTRFPNAKKLVGYAGLGTRVHDSGMTHNSGRITKTGRKDLRRSMVNAANHAIEHHPHWKKEFERLEPHLGRSKAVVAIARKLLVAVWHVLSEKAADRFADPANVARSFFTYAYRVGVRNLPEGRSALSFTREQLDRLGIGQDLLEIPWGSKPHKLPASKLLPEKE

SEQ ID NO: 104516 - protein, 320 aa, unidentified
MSESIERFVGIDVSKGSLDVFADPSSQQLPAHCGYDDVALKALCDAVAQLAPTLVVMEASGGLEQRAAAELAARGVPLAIVNPRQVRNFARASGELAKTDALDARILCAFARAIRPAARTPKDADTRALADLLSRRRQLVDMRVQELQRQHSASSRAMAKSLTEHLAWLDKRIQRLDKDIGQRLLESDVWRAKDDLLQSIPGVGPVLSRTMLGMCPELGELNRREIAKLVGLAPLANDSGKYRGRRRIWGGRADVRRVLYMATQAAIRHNPDITAFAQRLKTAGKLPKVVIVACMRKLLTIMNVMLKTGQTWHASQAAQT

SEQ ID NO: 104517 - protein, 359 aa, unidentified
MNYKQNEKINQVKESTLVVGIDIGSTTQYARAFDWRGIELGKVFTFSNSREGFEAFKAWMQRLQDKYRKSDVIVGIEPTGHYWFDLGAYLEDEGILLVMVNPYAVKQTKELDDNSQSKNDRKDPKVIAKLVTEGRYSAPYTPDGVYADLRIMVTNRKRLIREMTQIKNRFARWFAIYFPEYTDVFGDYEAQSSMLLLKKVCTPEAIVELGAEKINQIWRDAKLRAVGMKRATTLCETAKRSIGLKKGSSAAQYEMKLLLEDYEYKKAQLDAVIEEIEKLCRKIPESEQMLAIKGIGVITVAGFLAEVGDVRRFESPRQIQKLAGLSLRENSSGKHKGQTTISKRGRVSCGQYCSMQRFR

SEQ ID NO: 104518 - protein, 403 aa, unidentified
MERVIERCCGLDVHKKTVVAGVRVPGGTGGRDQHVRTFGTTTAELLALRDWLEAYGVTHVAMESTGVYWKPIFYVLEDAFTCVLANAAQIAQVPGRKTDVRDCVWIAQLLEHGLVRGSFVPPVPIRELRDLTRYRKALIHEHTREANRLQKGLEDAGIKLASVASDVLGVSGRAMLDALLRGTTDPDVLADLARGKLRKKLPALRQALAGRFRPHHAFLVSQLLAHLDYLDEVIETLSTHIAEVIAPFAEEVSRLDTIPGVNRRTAEVLIAEIGVDMGVFPTAAHLASWAGLCPGNNESAGKHKSGKTRKGNRWLRGALIKPSWPPAPDRRRAPSRLGIGALCGIAAIRRLSSPWRTRCSWPPTTSSPARPRTTTRAPTTTSADMLSESAIAPCSSWNVRGTA

SEQ ID NO: 104519 - protein, 462 aa, unidentified
MTQSIPRKPPELPAETLPDAKTIDGVWTQLNRTVRQAVAKVVPRKGRHAAPDGGVDRLDHMSARRRGDPSHSMQVARVAPDWPVAILMHGGRVVGDRITYVGLDVHKDGIVVALAEDGLRGEVRDYGRIANTAAALQRLARKIGQEGVELRLCYEAGPCGYGIQRQLSASGHGCIVVAPSLIPKRAGDRVKTDRRDAASLARLHRAGELTAVWVADAGHEAMRDLVRARLDAVHALRRARQQLSGFLLRQGCHYRRPAWTKLHRRWLAGLRFEQAVHHIVLEDYIAAVEAAQARRDRLTAQIEAMLPNWTLAPVVKALQTMRGMALVNAATLIAELGDLSRFANPRQLMAYLGLVPSEHSSGTSIKRGGLTKAGNSAARRLLIEAAWCYRFPARVSRELRLRQEQQPKPIREIAWKAQLRLCARYRRLARTGKPANVVTAAIARELAGFVWAIARQVPPALG

SEQ ID NO: 104520 - protein, 437 aa, unidentified
MSRFIGLDVHKRETQVCILSPTGEKLLALRIPTTREALTTFARSHLQATDSLALEATTNTWAIVQLLRPFVQKIVVSNPLQTRAIAAAKVKTDKIDASVLAHLLRLGYLPEVWQPDVATQEARALCHRRAALVADRTAIKNRLHALLAMRLIVPTEKDLFGKKGLAWLQKVALDPLGRTALESDLRLLAALQTEITALDLQIATRAQPNDSVRLLMSLPGVDMAVALGLFSAWGPITRFASAAQAASYLGLAPRTKQSGDHCYHGPITKQGNSHVRWLIIQAAQHLDKHPGPLGVFFRRLCHKKNRNVAVVAAARKLALIGWHMLQKNQPYRYALPAATAAKLARLRIRAGGERRKGGNPKGQKAVAKLGAGLRSRTVPGLGRVYEREGLPALSTPPAGETRLLLTLKLQETMQNLHQEQILAKAKPAAQPQPMEVA

SEQ ID NO: 104521 - protein, 397 aa, unidentified
MYIVGIDIAKRKHEAAVIDGEGTVIIKPFSFTNNCSGYNRLLAMLTKAKLPLDEVSFAMEATGHYWLALFTRLQKEGFRVQVINPVQTNSIRSFYIRQAKTDPRDALLIAEVIRFGHFSESTLHPENIYELRELCRGRHAIVSMQADVKRKVVALLDQVFPEYETAFTNLFGDTSMAILQTCPTPKELSEMPFEELCHLIEVSSHKRFRMAKAQELQELARNSFGFAMAGDVFSMMIRLYAKHLDFLKQQVREMDRKIAEIMDTLDTPITTITGIGPTLGAYILSEIGDINRFSSAAKLAAYAGIDPTMRQSGEYNGVRNRMSKRGSPYLRHAIWLAASSAVLHDPALKLYFQKKRDEGKPYMASVGHACRKMVSIIYAVMRDNKAYVPCIPSEISA

SEQ ID NO: 104522 - protein, 346 aa, unidentified
MVLIGCDFHPSWQQVSWLEVETGETGDHKLVHEVGAVDKFYRRFPAGSRIGMEATGNCQWFIESVNRLGHELWVGDAAKIRASDDRQQKHDQRDARLLLRLLVEKRFPRIWMPSREEKDLRQLLIHRYKLVRIRAQVKNGLQHLALNQGLQKKRRLWSKAGQQALCELPLASWASRRREDLLKLMSELDAKTDLLDQAVVEAAEKNEKAKLLMTQPGVGPITALAFVLTMGDVARFPRGKQVASYLGLIPREYSSGGHQRLGSISKQGSSFLRMLLVEAAQMAVRCDAGFRKEYLYRCHTKAKGVAKVAAARKLAIRLYWMLRTMTQYPEIVRSESSSRVPLVSES

SEQ ID NO: 104523 - protein, 338 aa, unidentified
MNYVGIDHHRQYSHITWLDEKGEVVKSGRVGNLRRELEEFLQGARDVKAVIEAGRSSYTMVDVLADLGIETTIAHPKDVKAIAKAKVKTDERDSYKLAHLLRTGYIPEVHKRSRENRSSQRVLRQRAFYVGKQTAVKNRLRALLAQQGEEIRLEVERVENLFTEKGMKVLKGLALPEREAKMVGALLKTYHHLEERINETNALVKELYEKMPYARLIQTVPGFGVFLSVLVAVEIEDLGRFEDVSKLHAYAGVIPSTHSSGDRSYHGKIIKEGNRWLRWAAVEAVRPALRADFDIRCFYDRLKRRKGANSAKVATARRLLAIIYRMLKENRPYIPHKR

SEQ ID NO: 104524 - protein, 408 aa, unidentified
MEVLHPKCAGLDVHKDMVMACARTAEGGGIQQEVRSFATTTRGLSELAEWLIDAGCTHVAMEATGVYWKPVWHVLEGSFELLLANAQHVRNVPGRKSDVNDAMWLADLLAHGLIRGSFVPPAPVQEMRDLTRTRKQLVREVAQHTQRIQKVLEDANVKLSSVISNVLGETGRTILDALVGGETDPTKLAALAHPRIHASSAELAEALRGKVTEHHRFMLKLHLEQIDSLQKAVRDLEARMGDALTPFREQVARLTTIPGVSDIVAQVIASEVGLDMSRFPTPGHLISWAGLCPRMDESAGKRRSTRVRKGAPWLKTTLVTAAWAAARKKTGYLRSQFLRLKSRRGPKKAIMAVAASMLTAVYYMLSRKADYADLGADHFDRRDKAKVAKRLIKRLQDLGITVEVKAAA

SEQ ID NO: 104525 - protein, 378 aa, unidentified
MHNQPTRQEEFTGNRGVLYLAFEMGSKEWKLGFVTQAGQKARLRTIRSGDLLNLEEEIRRASEKFGLEEPQVVSCYEAGRDGFWLHRYLTSRGIANVVVDPASVEVNRRSRRAKTDRLDAQMLLTRLIRFHSGEKKAWSVVRVPTPEQEDARHLSRELDALKKEQTRHLNRLQGLLASQGLFLTIKRDFLSELDRVRLWDGSPLGPELKERLRREYERLQRVQEQTRALQDKRKQRLATGEDPVAEKVKHLMRLKGVGEMSSWLFVLEFFAWRQFRNRREVASLAGLTPTPYQSGDGNREQGISKAGNPHLRRMIVEIAWSWLRWQPQSRLSLWFKQRFGQGNRRLRRVGIVALARRLLVELWRYLQTGVVPDGAILS

SEQ ID NO: 104526 - protein, 348 aa, unidentified
MKNIIIGIDFSKETFDATVLDLSKTSGVLPSSFNGMHERFQNSKRGFQQLLAWIKKSTKQEPSKDWVFCGEQTGKYSHGLCDFLFDKGLDMWIEAPLRIKRCMGIARGKNDSLDSLRIAEYAYRYQDKMTTYQPVSKAIAQLKELFLARLKFVEQRKALFVRNNTSTEYSKGSDAEKTVAKLSRNLIKQYDESIRQLEEEMQAIIDSDEEILETFENISSIKGISLINASAFIIYTNNFKDFGANPRRIASYWGVAVFAQDSGTSVHHPARTSPLCSKMLKSLLSEAAVAARLYNPDIKRYYNRLIAKGKHKGVALNNVKNKLVHIITALAVNKTEYVEGYECFRKPS

SEQ ID NO: 104527 - protein, 360 aa, unidentified
MAKARTLVGLDVHAAKIVAATLDGETGELRSFGLPGCPVETAKFCAALPAPVRATYEAGPTGYGLARELARREIECVVAAPGKIPRAATDRVKTDRRDAEHLVRLLLAGKLHPVRVPGEREEAMRDLVRAREDIRSDLMRARHRLSKLLLRHGLRFDGDAWSERHRVWLGSIELQERAAQATFCDYHGAIEALLHRRAELEREIEALIPDSAWEREVGRLRCLRGIDTLSAVGLCAEVGDFARFERAGQLMSYVGLVPSECSSGEQRRLGSITKTGSRHARRLLVEAAWHYRRAPRIGRGLERRQERQPAAAIAISWSAQRRLHRTWERLRAKGKRPVVVAVAAARELAGFCWAITAIED

SEQ ID NO: 104528 - protein, 345 aa, unidentified
MKITIVGIDVAKSVFHIHGVDEHGKTLLRKQLKRSEVLKFFANLPVCLIGMEACGSAHYWARKLIERGHTVKLMAPSFVKPYVKTNKNDRNDAEAICEAVTRPNMRFVPIKSAEQQALLALHCARSGWVKARTAQANQIRGLLAEFGIVVPQGIARLRCTLPELLEDARNGLPGLMRSLLNTLLAHLKVLDEQIQALEREIVAWHRRNEDSRRLERIAGVGPITASALVASIGDAKNFRNGRQVAAWLGLVPGQDSSGGKTKLLGISKHGDVYLRTLLIHGARSVLRHLKSRGDQTHSWVARLVVRRNRNVAAVALANKNARVAWALLAHQREFKPDYVSAAPTH

SEQ ID NO: 104529 - protein, 404 aa, unidentified
MWYAGIDWADQHHDALVIDEKGRQVGSLRIDHSPQGFAKLNTFFEQIVGDAPKEQMACIIETTHGLLIAHLLEAGWPVYPVNPRTVDRRRAASGAKTDTIDAYLLAKTGRADLTDLHRLTPDSETMTELKLLTRDQDALIQMQTRLVNQLTACLKAYYPVALELFGKLQQKSTLQFLQAYPTPQEAMAASVEQIKVVLKHGRYPHPTAGAATIVEQLHQPHLQADAVITRAKSRLMLALVSQLLPLIEQIAQYDKEIETLFLTHPDHELFESLPRAGQHLAPRLLAEIGDDRLRYQDASSLQALGGTSPVLFQSGMYAKAHRRLGCIKPLRNVLHQFAWQTTLSEPWARDYYQRKRAEGKSHTVAVRALANVWVRIIFAMWQHHQCYQAATFVQAQHQHARRAA

SEQ ID NO: 104530 - protein, 363 aa, unidentified
MKQLIKKQPRTANRKPERVAGLDLGDRYSHYCVLTGDGELVEECRLQNTEASLRKQFANEPRMRIALEAGTHSPWVCRLLESFGHEVLVANPRKIRAITSSESKNDRNDAEKLARFAACDPKLLSPIRHRSPERQQDLNLIHARSSLVRARTGLGNALRGLVKSAGGRLAACSPKSFPDKMRTAIPAELRPAAAPLVEQIAQLNLAIAGMDRQVEALGDKHPEIKLLRTVPGVGPIVAGCYVLTLDRPDIIQDDRQAGAFLGLRPRQSQSGDKNPQHGISKTGNTCLRSLLVQAAHYILGRFGPDSALRRWGLGLAASGGKRGKKRAVVAVARKLAVLLHSMWRNRTPFVPFPQRSTQATVAT

SEQ ID NO: 104531 - protein, 351 aa, unidentified
MLIVGCDYHPSVQQIAWLDTESGECGERRLLHSNGEAETFYRKLKEQGVSVRVGIEATGHARWFERLLAELEYELWVGDPAQIKAKRVRKQKYDQEDARLLLKLMMEDRFPRVWVPGVENRDLRQLLWHRHRLVQMRTRVMNQLQAVALNEGVRRKKALWSDAGRSQLESFRLGPWATRRRQDLLQLLDQLNSSIAPLTASVEQQAGQHLEAQRLMTHPGVGALTALAYVLIIGSPQRFRCGKQIGSYLGLIPCEDSSAGRQRLGHISKQGNSLLRFLLVEAAQAAVRSNADWRREFLHLAMRRQRQIAKVAMARKLGVRLYWMWRKGWDYETFLQFGSHVGQPEVGYGVK

SEQ ID NO: 104532 - protein, 355 aa, unidentified
MESNNISQAEVIGIDLGDRTSHLVGLNTNGEVVAMGRLTTTAEAMTKEFGSIGSKVIAIETGTHSPWISRLLTQLGHRVVVANSRKLRLIYENRRKNDRVDAEYLARLVRMDPKLLEPITHRSERDQQHLSLLRSRDKLVRTRSGLITHVRGTVKSIGLRVPACSAEAFVKRARPVIPKELKAAVDPVLGTIEHLNKQIAGYDRRVEQLARTEYPAAQLLMQVSGVGPVTSVAYVVTVGDPGRFAKSRTAGAWVGLTPGQSASGQQDPQMRITKEGDSYLRRLLVSCAQYILAPNRPDSDLRRHGLALAARGGKNAKKRAVVAVARKLTVLLHMLWRTGVVYEPLYNANAIRAAA

SEQ ID NO: 104533 - protein, 402 aa, unidentified
MNAVGIDVSKGKSMVAIMRPFGEIVSTPFEIKHTSSDINSLVKLIKSIEGESRIVMEHTGRYYEVLAHQLSEANLFVSAINPKLIKDFDNDSLRKVKTDKADSVKIARYALDKWQNLKQYSVMDELRNQLKTMNRQFGFYMKHKTAMKNNLIGILDQTYPGVNTYFDSPARSDGSQKWVDFASTYWHVDCVRKMSINAFIDHYENWCKRKKYNFSKSKAEEIYGKAKELVPVLPKDDITKLIIKQAVDQLNSASITVESLRTLMNETASKLPEYPVVMAMKGVGTSLGPQLMAEIGDVSRFTHKGAITAFAGVDPGVNESGSYEQKSVPTSKRGSSDLRKTLFQVMDVLIKTHPQDDPVYQFLDKKRAQKKPYYVYMTAGANKFLRIYYGRVKEYLASLPKS

SEQ ID NO: 104534 - protein, 400 aa, unidentified
MNPVIGLDVSKGESQVQAFLDKRKPFGKSFSVSHTTEGLDALLHYLKVVENETGIKPSVILESTGHYHTPVIQFLEEQNYLYIMINPLLSYQAKKSSLRNVKTDEIDAFRLCELYYKEELEPYKKRGIQRLNLRHLTRQHETLTGLYVQAKLQFHAILDQVFPEYKGVFGDLYSKVSLNILLEFSTSESVVQAGENKVTDKIASLCMSRSERWAQERAKKLYEAAQRNPFKSIVYQSHLISLEMYIQLLLQYQEHLAKLDDQIDALAGEIEEYKIIQSIPGIGEKIAATIISEIGEIERFNHPKKLVAFSGIDPSVHSSGKFTATINRITKRGSSRLRHALYMAVLCGIRSSRNKKLKEFYDRKREEGKPFKVAMIACVNKLIHWIYALLKRKEAFLDLA

SEQ ID NO: 104535 - protein, 362 aa, unidentified
MLESTPIVAFDQHAASVTAAVLVSGSRRPALHQLAPDLPTIRRFVKKLQRHGAVRCCYEAGPCGFELQRALTADRVACDVIAPALIPRRAGDRIKTDRRDAAQLAILYRAGALTPIHIPTEQEEAVRDLLRCREDIRADLLRARHRLSKFLLRHGRRFTGTKKAWTRAHDVWLRAQTWPFPALTQTHDAYLRAVDEARARLQTVETHLQACLTLEPLATRARRLRCFRGIDDLTALTIAAELSDPRRFPAARSVMAYVGLVPSEHSSGAKRARGGITKTGNAHLRRVLIESAWHYRHRPFVGDTLRRRQRGQPDTVCAQAWQAQQRLYRRYRQLTGRGKPKQHVVTAVGRELTGFLWAALTR

SEQ ID NO: 104536 - protein, 343 aa, unidentified
MQTVTTIGLDIAKSVFQVHGIDAAGQVVIRRQLKRRYVLAFFQKLPPCLIGIEACASSHHWSRELQALGHTVRLMPPAYVKPYVKRQKNDATDAEAICEAVTRANMRFVVTKTPEQQSGLVLHRARHLFIRQQTAVINAIRAHLAEFGIIAPVGRHGVEELLNVVADPNDKRVPEIARACLLAFGAQLRRLKEQILEFDRMIRAWHRSSETSRRLDDCPGVGPALATALVATVADPKSFRSGRNFSAWIGLVPKQHSSGGKNRLGSISKQGDRYLRGLFVAGALAVIRYAKIHGTKHRPWLTALLARRPTKVAAIALANKIARMAWAMMAKGERYKEPIALAA

SEQ ID NO: 104537 - protein, 331 aa, unidentified
MYDHYVALDWAQRNMAIARMTAVSSRVTTVDVPSNIADLQLYLSQLKGKKTLTFEETTTSQWLYTELREYVDELVVCDPRRNRLLSEGPKTDRIDAEKLVRLLRADLLKPVFHSGDQFIYLRKVVSGYQDLVQSGVRIQNQRAALFRAQGQAKSEACLQHPAGRFVLEGIERAISQYEQEKARYQGHFEKLASKHLMIRNLTALPGVGAIGAVKIAAIVVDARRFKNKGHFLSYCGLVKLDRVSGGKSYGKKNPRYCRPLKSVFKTAAFTAAVRDNRRGPMRQYYLQLLEHGNYPEHNARHKVARRIAILAYGVMKSGKRFDVRRLSCKAV

SEQ ID NO: 104538 - protein, 312 aa, unidentified
MATTSKIFMGIDVSKATLDISVGGEHFKISNKEDSLKSFINDKLVDLDIELSVLESTGGYERLALRVLNESGIKVHRAHPNKVYAFAKACGHFAKTDKLDSKLLEKYAKFIKHEKLVYTEVDTVSIELQALRSVERNLETELHAEQCRLDHISGRALWYVKKQIEFIKKQLSLIQKDIYQLIYENKALREKHIILTSYKGVGKKIANSLLCDLPELGTLSNKEAASLVGVAPKTNESGKKISASHISGGRFFVRKVLYMAALVSAFSNQKMKKKYTELLEKGKAAKVALTAIMRKIIVCLNAMIKNNKPYIA

SEQ ID NO: 104539 - protein, 315 aa, unidentified
MEEGVYVGIDVSKAELVVAAHPLGECMKLSNDRDGIRQLLARLGKWAPELVVMEATGGLQRQVMAALWSARIPAAAVNPAWVRSFAKGRGLLAKNDRKDAQLLALFAERERPQPRPPADSETQALQELVMRREQLVAMLVAEEHRLKRASAPVRKELRHHISYLEGRIKDSEEEIDKTVRRSDAWRRKRDIVHSVPGLGKVFCAMVLAKMPELGTLNGKQAGALVGVAPVARDSGTRHGPRVIAGGRFEVRHKLYMCALSAVRANPELKQFYRRLIARGKPKKLALVAVMRKLIVILNAMLKTNTLWRPPCPASA

SEQ ID NO: 104540 - protein, 398 aa, unidentified
MSKAFIGIDVSKEHSTAQSIDSDEKKLFYLRFSMDSEGFAELRTAIKGCGVNLDDIVVAMESTGCYHINLFSFLCAEGLRCAVVNPLLISKFVQGSLRKTKTDKKDAMTIAQFLLNNEKKLCVITSSQDAQDLRDLARERESQSWMIASLKNDLKRLLQSTFPELETLRKNIYTETMLNFVRQYPSARLIRQAKRKDVDKALICPGEKRKRVQISADDLIEAAKRSVGSAGTAKELIVSEKATTILYLQEKCEKITEALVDACEATRIEDLEIMKTLDGVKDILGSSFLAEMGELSNFKSFKSLIAYMGFDPSTNQSGKHVGPSKISKRGNRHMRRITHLMTLGSIKSDNIFREYYFRRIAEGLPKMKALMATSHKLIRVIFSMLTHRMPFKKGVAAV

SEQ ID NO: 104541 - protein, 431 aa, unidentified
MKNRTSQRIYEISLGTLIVGVDVAKEVHWARFVDYRGMEYGKALSFKNNRKGYESILAKILEISKDKTLRYPIESVVIGMEPTGHYWKALASYMKEAGYRVVGVDPYKTKQAKALDDNSQTKNDKKDAITIARLVKDGRYFDPYLPQEIYGELRVLSNGRVSAQKRSSAVKNTITAIIDEYFPEIYTVFKKPLKGKTSRQILRICPFPVYILEMDEADILAEIRKVVKRTVGMKKVLELKSTAKDSIGVGYGLDAARMRIKWLLDELELLERQVAEIEQAMEVILNKTGYADQILGIKGIGIVTAASFLGEVGDPLRFQNAKQIANYAGYNLTEDSSGKSKSGTIISKRGRKQLRSILYQMAFTMVGANAEMKELYRHLTTRKNNPLKKKQALVVISKKIITVIHSLLKKQETYKPELVLGAVRKEMLKAS

SEQ ID NO: 104542 - protein, 385 aa, unidentified
MAEQIFKYSVGCDISKDTFNVCILEVDQEMESKVKASHKFKNETKGFKEFESWIKKHKKHDVQTGFYMEATGVYYENLAWYLFEQEYTVYVLLPYKTKHYLKSIGIKSKNDKIDAQGLARMGAEQKHNPWRPHSKSIYTLRALTRQHESVTKLRTSLGNQLHANEHSAVRNVTVKKQLNATIRLLEKQLDELSGEISNLIDADEKLNEKYSHIDPLRGISKLSWATIIAETSGFETFENQRQLVSYAGYDVVENQSGKHVGKTKISKKGNSRIRRILYMPSLVSVRIKEPVLYNLYQRVTERTGIKMKGYVAVQKKLLVLIYHIWKNDKAFQSDYSKIFGEDESKLLFPFGFGETIKESSPDKRATQDEHSYELSSKVLFPLAQI

SEQ ID NO: 104543 - protein, 322 aa, unidentified
MQGKVTTEDAMAPVYAGIDVCKERLDVYLHPLGEQFSVMNDSGGWRRLLRRLAGHRVAAAVMEPTSKYHRAAHRHLDSAGIAVALIAPHRARLFAGACGQLAKTDRIDARILALAGERLDPAVSSPPTAEEEALEELAGARAAAVAEHTATSNRLRTTTSAFLRRELGNRLRGLDRHLERIEARIATMIATDARLARHAAIIRSIPGMGPVNVLAILTGLREIGRITGKEAAALAGLAPFADDSGPRQGQRRIRGGRAALRRALYMAAVAASRCNPELKAFYQRLRAKGKSAKAALIAVARKLIVLANTLVTENRTWRPTRP

SEQ ID NO: 104544 - protein, 345 aa, unidentified
MESMYYIGLDVHKKTINYCVKDGSGRIHAEGKIPATRFDLDLWMKTLPRPWTVAMEATIFTGWIYDHLRPHAAAVKVAHPLMLRAIAAAKKKNDRIDANKIADGIRCDFLPECYMAPTEIRERRRTLHYRNLLVRQTVQLKNRISGLLMEAGVSYNKQKLHKVGYFRELLKSNLDIDESLRPLLQLCRETLVRLQKTESALIRSLARDRFLVERVEHLMTIPAVGPITALTWALEVGEVSRFSSIKKAISYCGLCGDEQSSGEHIQRTPLSKQRNKHLQCVLVEAAHMAPRLSPELALLYDRERQKGNANRATLAVARKLVAYLVAIDRRQRDFLVVEKKNQAAA

SEQ ID NO: 104545 - protein, 376 aa, unidentified
MIRIIYTGMDVHKDTYSLCSYDAKENFMFSETTVKAETAAVLSYITAIKKRYSEDDVMIVCGYEAGPTGFSLCRELQKKNIACVVMAPTSLPKAPDAKKRKTDKGDARSLALHLAHKTYKAVHVLSPEIEAIKELTRTRAAALKAQKRAKQNLLSFLLRKGMVYPFGGRARYWTQKFYAWLKTLEFTNSIERYTFEEYLSEVNHQMSRVSRLDEKIAEIAENPLIKEKVKKLCCFSGISTLTAVSLVSEIGDFNRFEKARYFASYLGLCPGIHSSGLSSQTLGITKAGNKNLRCLLIEAAQAMSRSQLCGKKSLRLLTRQKDMDPLVVSYADRATERIKRRRSSMIFRGVNCNKATTAAAREMACFIWGMMTNNIA

SEQ ID NO: 104546 - protein, 350 aa, unidentified
MLIIGCDFHSRFQQIAMVDTETGELIERRLDHNNGEAKKFYAELKKPVRVGMEATGYAQWFERMLATLGYELGIGDAAEIRAAMVRKQKTDSRDALHILDLLLANRFPRIWIPSPGERDLRQRLRHRHKMVCLRTSVRNQLQALAMGQGVYRKRKLWTAGGRAELEALGLDPWASRRRQELLQILDRLDPCLTELDRAVAKEAEQRPAARCLMEQPGVGPVTALMFVLTIGPVERFRRSKQIVSYLGLNPRESSSGGRQRLGAISKQGNSMTRFLLVEAAQTASRYDEELRRDYQRLKFRRGTAVAKVAIARKLAVRLYWKLRKHSSLVPSTRMQGSSEHPVVGASLSGN

SEQ ID NO: 104547 - protein, 346 aa, unidentified
MKINRVGVDLAKNVFQLHGADYKGKTVWKRQLSRSKWLPVLCDTVEPGTEIGMEACAGAHHWARQLMQQGYPVKIIPPQFVKPYIKSNKNDANDAQAICEAMGRPDMYPIKVKTVEQQDLQAMHRIRDEIKSHRIGKANQIRGLVTEYGLVAPLQLHALRRAIPQWLEDADNGLTFLFRQLLQGLWGDLYALDQRMAELDKQIAVVAQEDPTARRLQQLRGVGPLIATALVATIGDGKQYRKSRDMAAALGLTPRQHSSGGKDRLLGISKRGDAYLRCLLVHGARSAMRTAKDKDDRLSRWIIDLQSRRHANVVAVALANKMARMAWAMMTSGVDYDPDLAAASVN

SEQ ID NO: 104548 - protein, 424 aa, unidentified
MGRSIGLDVHRDFCQVAIADGGRARSAGRVKTSPAELELFAQSLAPTDRVVLEATGNAVAIARIIEPHVEAVVLAHAKHVRAISHAKIKTDKVDARVLADLLAADLVPAVWTGDERSRSLRRLVSRRRGLVKRRTQIKNEIAAVLHRNLKGRSPMTDAFGIEGRRWLADLELPVDERLTVDGCLRQLDFLGDELARADRVIAEQVVDDRDVRRLMTIPGVHVTTAATLVAVIGDVRRFPTARHLVGYLGLHPTVRRSGNRPARHGRTSKEGSAAARHVLVEAAWSAARSPGPLRAFAERTTARRGRHIAAVAVARKLAVLAWHLLTRGEDYAFAQPGQVQRKLRMLELAAGAARRKSGPNGNPVWPSPAQQHAEKRLAEQAEAAYRRLISDWRASGPRAGAGATPERASQRPSKGKATRQATSS

SEQ ID NO: 104549 - protein, 424 aa, unidentified
MKVTYKTCCGVDVHKSFLVATIITTTGGIEPSYQKKRYSTFNNSILEFKQWLLDNDCHDLCMESTGKYWIPVFNLLEDEINVTIANPKWVKAVKGNKDDTKDSKWIGDLFRLGLVKGSYIPCKKIRILREFTRYRYKIVSCRSSEKNRYQNALTVCNVALDSVVSDIFGKSSTSIIDYLLEQSGNSINHEEIASKLLKSLKSKEDAVIESIEGYQMTDSQKYRMHLVRAHMDYITAEINDVDREIEKLISSDPDFENALQFLMTIPGVKRDSAITVISEIGIDMTQFSSSKRLCCWAGLTPGSNESGGKKKSVRVTRAGVYLKPALVQCAHAAVKSEKSPYYKKKYESLMKRRGKKRAIVAIARMILTAIYQMLSTGESWNPSDLYKIGIPEALLEKQKAKAIKQAMKLLQREGLYPPPEPIAS

SEQ ID NO: 104550 - protein, 324 aa, unidentified
MSKIKEFFGIDISKDVFDVVDASDKHHQFKNDPSGFKEFSKLLSEKSHCVMEATGSYYQGLATWLYDSSIIVSVVNPLSVKRFIQMRLKTSKTDKLDAQMIRMYGESEQPKLWNPPSKLIIEATELHKLIELLVRQRAGLKNRLHALESKGITRSLVLTSVRRQIRNLSNEITDLELKLESVIKEYEPDLLTRLCSIPGVGKRTAIYLIVLTQGFEKFESSRQLISYFGLNPIIRESGSSVRGKSRISKTGDNQVRKLLFMCAFTACEHNKACREIYRRLTAKGKSKKLALIAVANKLLKQSLAIAKSGLYYDENYRSVNMNLA

SEQ ID NO: 104551 - protein, 355 aa, unidentified
MKRTTKYVGLDVHQATIVAVVRDETGRVIARTILPTEAAALTAFVGPWRGRVEVAYEEGTQAQWLHDLLRPLVARVVVCDRRAVRRQGNKSDWRDAEELAALLQRGAVRAVYHGGGPQQAELKELARTYVTLVQDATRVMTRVKALYRARAIPTRGRGVYHAGERATWLAKLPAGGVGFRATTLYRELEVLLALRATAKAALLGAARRDPAWALLQTIPFLGPVRVALLLGIVQTPWRFRTKRHLWAYAGLAVVTRTTAEYTLAGRTPVHRRRAPLTRGLNRNHHRLVKALFKSAATAATARPGALQDWYQQRLAHGMRDELARPTLARKLAALTLHVWKTGEAYDPAKLTRPAG

SEQ ID NO: 104552 - protein, 347 aa, unidentified
MVAEGADFVVGVDTHGKRHWFALVEVRTGALVREWELPARADGYRRALELVRHLGAGRRLWALEGSGCYGAGLARFLLAAGESVREVERPLRRGSQGRLKNDSLDALRAARAAFERPLPTPRADGAREGLRVLLATREQAVDVRRVGLNQLRSLLVTGPDGLRQRLSGLSPRRLPGRCSTLRVPADAGEAERASVLALKLCARRVLAATHEAQTLEREIEQTVRTLAPTLLAEPGVGPISAGFLLPGWSHHGRLRSEAAFARLAGSAPIPASSGKLTRHRLDRGGDRRLNRALHTIVLARRRSDPATIAYIQRRVSEGKSTREAVRCLKRYLARHLYRLLEQTTTTT

SEQ ID NO: 104553 - protein, 318 aa, unidentified
MDTTLIFVGIDISKAYLDSAFRPGIRTAARDPNDPAGIAALVSRLKLLNPTLVVVEATGGLELPLVAALQVAKIPVAAINPRQARDFAKASGKLAKTDRIDAEVLAHFAEAIRPEARPMASAEVQALDALLSRRQQLLEMRVMESNRLGACANPTVRAGLERHLAWLEAEVADADHRLAEAVKASPAWREKDELLQSIPGLGPVSSLTLLAALPELGTLDGGKISALVGLAPFADDSGKRRGSRHVRGGRAAVRRVLYMAALSAVRHNPALKAFRDRLSARGKKPKVILTAVAHKLLVIANAVIRTGLPWNPELAMSH

SEQ ID NO: 104554 - protein, 428 aa, unidentified
METPALNPEVVAWVGLDWADQCHAICLQAADSPRIESFTVEQKPEALHAWIAGLRARFPQGRIALALEQSRGAVIYALMNYDFLLLYPVPPKGLVRYREAFATSGAKSDPTDAGLLLELVRTHRDRLRAWQPDDALTRQLRLLVEHRRRTVADRTRLTNRLTALLKTYFPQALDWAGDLRGPAACEFLQTWPTLQAMQQARRSQLRRFYHDHRRLSAENLNKLFHVMDHAQPLTRDRALVEASALMTQTLAGQLEAVIAALERLDQAIEELFGQHPDQDLFSSLPGAGEALAPRLAAAFGSDRHRFQSAEELQQFSGVAPVTEASGKMHWVHWRMACPRFLRQTFHEFAAASVRKSLWARAYYDRQRQRGASHHAAVRSLAYKWIRILYRCWQTRTPYDENLYLEALRRRRSPLWLAAAASSTQEARG

SEQ ID NO: 104555 - protein, 426 aa, unidentified
MSKIDKTNQKPIAAFVGIDWADQKHDIALRAAGAEAKVEHCSIKSDPEALTDWVLELRERFGNQGKILICLEQSRGALIHFLMGYDCFELYPINPKQLDNYRKAFRPSGAKDDPTDAQLLGEFVRLHYQQLHPWRADDEHTRKLALLCEKRRQAVDSRSALSNQLKSELKQYYPLALAVVDNDLTTVLAADFLLQWPNFESLKKASVHKLRRFFYGHQCRSEQKIQERIQLIQAAQALTKDRAIIEASTLTAQMFAQQLKALAPYIRLYEEQIAELFSQHPDSVLFNNLPGAGDNLAPRLLSAFGSDRERFTSPLQVLTFFGIAPVTQRSGKSTWTHFRWACPKFLRQAFHEFANHSVRFCDWARAFYDYQRARGKKHHAAVRALAYKWIRILFRCWKTRQPYDPQLYLTALARRGSPFAPVNNSP

SEQ ID NO: 104556 - protein, 354 aa, unidentified
MQHDAPNREIIIGIDTHKDTHAAVALNVLGVRLGATIVPVNRVGYRCIDAWARSFGTVTAFGIEGTGSYGAGLARALRETGHHVLEVNRPDRSTRRRNGKTDMLDAEAAARAVLSGQASAEPKTGTSTVEMIRHIKIARDAAVKAKTQAMQTLKSIIVLAPAELREQLEGIRGPITLVRHLASMRPSPLTSPLSSAKTALRATARRWLALHQEIEGHDRDLDALVAATAPHLTTATGIANMTTAELLLLVGDNPKRICSEGAFAKLCGACPIPASSGRTNRHRLNRGGNRQANAALHRIVVTRMRLHQPTIDYVRRRTSEGRTKPEIMRCLKRYVAREVFGSLCRSRPPSPAGP

SEQ ID NO: 104557 - protein, 349 aa, unidentified
MTVRCMAGIDLHSNNLFCAIVDLDGKRVFEKRLPCDLENVLQALKPFKRRLEKIVVESTYNWYWLVDGLQDHGYTVVLANPAAMEQYNGLKHADDKSDGFFLAEMARLNILPTGNICDRKIRPVRDLLRRRMGLVHHRTSLMLSLKSLHTRMTGRDLGTGRIKTMGPEEGEKQFAHPADRLITRVDLQLVEHLGRSIQEIETRILAEAKRMRRYQVLQTMPGVGEILGLTIMLETVDPKRFAGPGQYASYCRCVDSRRLSNGKKKGENNSKCGNKYLAWAFVEAANYAQRYDAACRKFYDRKKAQVNGIVATKALACKLAKAAWHMMSNNTQYDGGRMFPKVKMNKLNQ

SEQ ID NO: 104558 - protein, 444 aa, unidentified
MGKPQVFDDQEQGRVFERVAAVDVAKASGVVCLRLPHPAQPAGRRSQVWEVPATMHAVTELARRLTAEGVQKVTLESTSDYWRIWFYVLEEAGLAVQLVNASQARNLPGRPKTDKLDAMWLARLTEMGLLRPSFVPPAEIRVLRGYARARTRLTHDRTRCFQRLEKLLEDALIKVSAVASKLTTRSVQDMIRAMIAGQRDPQVLAGLARTRMKAKHDALAEALAGLFTDHHAELAQLLLDQIAFLDTQIARLAMLIGEQLASLRAAGGTGADGATGPGPGAIALPVIARLDEVPGVGAELAASIISETGLDMTRFPSPGHLASWAGLCGRTIQSGARTRTGKGQGNAWLRGYLGRAAIAAARTSTFLGERYRRLARRRGAARAQVAVARSILIIIWHLLNDPAARYHDLGPGHYQARTDKNRKARNHIRQLQALGYTVTITQAA

SEQ ID NO: 104559 - protein, 357 aa, unidentified
MSQRSKNCAIAVIGIDIGKNSFHVVGQDQRGAIVLRQKWSRGQVEARLANQPPCLIGMEACVGAHHLSRKLQLLGHNARLMPAKYVRPYSKGQKNDFRDAEAIAEAVQRPTMKFVATKTADQLDLQALHRVRERLVSQRTGVINQIRAFLLERGVAVRQGLRFLRAELPGILATQTDELSPRMLRVLEDLSADWRRLDARIEGLSGEIETLARQDQHCEQLMTVPGIGPIISSAMVAAIGTGDVFSKGRDFGAWLGLVPKQISTGDRTILGSISRRGNRYLRALFVQAAWVVLVKLRPTQWERYGLKSWIEAAKKRLHYNVLAIALANKLARIAWAVLNKGRAFTCVRTDAMASRPA

SEQ ID NO: 104560 - protein, 388 aa, unidentified
MQTVADRPEAPTAIRTDLGAIFVSLELSRSTWLITSLSPGGGEKMSKQVVRGGDVAGLLERFARLREKARARTGKVFPFVVIQEAGLDGFWIDRALQNEGIESHVVDPASIATSRRRRRAKTDGIDGEVLVRALLAYKRGEPRVCAMIKAPTPEEEDRRRLCRERKVLIVERVRHVNRVKGLLFSQGISGYEPLRRDRRERLDTLQTGDGRLLPDHLKAQVCRELDRLELLLEQIKAVEAERDVLLAAQQVAAPAPAAMLLDIKGIGPEFAAILWSEGLFRHFDNRRQVASYAGLAPTPWQSGSVDREQGVSKTGNPRLRTTLIQLAWLWLRHQPQSALTLWFEERVRRNGGRLKKTTIVALARKLLVALWKYVTAGVVIEGAVMKRT

SEQ ID NO: 104561 - protein, 436 aa, unidentified
MLFDIGANFHLVAIPEDRAEENVRKFGPFTSDLHQLADWLTEHHIETVVMESTGVYWIPVFQILEQRGFEVKLVNAAHVKNLPGRKSDVSDCQWLQQLHTYGLLNGSFRPKDEVCVLRSFLRLRDTLVKDCSSHVLRMQKALTEMNVQIHRVLSDITGYTGRAMIRAILAGERDALKLAQMKHPLVRASTQQIVKALEGDYRAEHLFALQTALELYDAYQLKITECENKIEQQLEQFDSKLDFEQVLEQSGALKVRSAQVRLQLQRQAHLSSVCGVDLTRLPGLSTLAVEVIISETGLDMSCWKSEKHFCSWLKLCPDNRISGGKLLSSRPRKTKNRAAAMFRLAAQGAMQSKTALGAFIRRLKARLGAPTAINAGAHKLARLFYRMLKFGAAYVEQGQAYYEQKYKDRLLRNLTKRAKEFGFQLTPFEPATDLVS

SEQ ID NO: 104562 - protein, 451 aa, unidentified
MAKRAEKRERRSMVLQPDAAGIDIGAEEIFVAVPPDRDEESTRRFSSFTRDLHALADWLGRCRIQTVAMESTGVYWIPLFQILEERGFKVYLVNAHYLKSVPGRKSDVSDCQWIQYLHSVGLLRTSFRPPDAICAIRTLWRHRGSLLETAAEHILHMQKALSQMNLQLHHVLSDITGTSGQAILDAILSGKRDPVELAQLCHSRVKSPRDKVAQALVGDYRPEHLFTLKQSLAGYRYYQKLILELDQETARLMQALPSATEHPMPPRTKATAYHRQGNDPQFDLRSELYRIAGVDLTDIPGVSAATAQVILTEIGTDVSRFRHASAFASWLGLCPEKRVSGGKMVSCKTRKVKHRAATALRMGANSLCRAKGYFGEFFRRMRAKLGTAQAITATAHKIARILYHVLLTKEPYAETVFHRCDEQAQRRAEIRLRKQAAHLGFQLLPLTTTGE

SEQ ID NO: 104563 - protein, 398 aa, unidentified
MYKQFVGIDISKDSFDLTLLQSSGEIKLEVKLTMDRDGFDTLLEYLSSYSKEELLIAMEATGIYHLPLLSFLLENSFKCVVINPILIKSFIGSTTLRKTKNDKKDAASIALFSLKSYQSLHLATPDIIENIRPLIRERENLSKDIARLKTEIKANLVQLFPELLKNTNIFTKSILNLLLKAPSRKAIRNLREKTIQRILDDTSGNKVKITAKDILTLAKTSIAVSDKYLEKVLTSKIRRLIAIQDELSILDLELENSLEDTDINDDIDILQSIPGVGSVTSKNFMVEVSSIDRFNSVKQLCASIGIDPSVRQSGTSINYKGKISKRGNANLRRTIWQMAIGTIRSCEKFKLYFSKKREEGKKFKQAVIAVANKLLKTIFVMLKNKTKFDENLALGVSK

SEQ ID NO: 104564 - protein, 366 aa, unidentified
MKIIHWIGIDDHADKWTIAHLRGNEDKPAREFELVPGGEGYRKLIKYAKELDGEVRIVYEAGPCGYELYRRLTKADLKIDVAAPSLTPRKPGDRVKTNRRDAAKLARYLRAGDMLTLIVVPDQGRESLRDLVRARHAVQKDLLSVRHRITKLVLRYGHRYREGSAWTNRFWTWLSTIKLEGEHSQFVLDELIVAHGHRLEQRGRYDDAIEAAAKTPQYAPYVAALTVLRGIDRLSAMTILSELGDLRRFATAPQVMAAIGLVPGEASTGDDTNRLPITKTGNAHVRHIAVEAAWQYERRISNGPVIRRRRKDQPKALLDIAEKCDLRLNRKFHRMTSRGKRSTVAAVAVARELMGFIWAIGQIVHP

SEQ ID NO: 104565 - protein, 352 aa, unidentified
MTKITTIGLDLAKKVLQVHGVDVEGKVVVARQLRRKEVLAFFAKLSPCLVGMEACGGAHYWAREITKLGHTVKLMPPKYVKAYVKRGKTDAGDASAICEAVTRPSMTFVPVKSIEQQGLSMLHSVRSQLVSQRTQLVNAVRGHLSELGIVAERGVLGLAELAEIVRDKSDERLPVAARSALLVMVNQIETLGAEITRVDTALRKENKATDLGRRLETIPSVGPVIASAFRARVTKPELFKNGRHLAAWIGIVPENDSTGGKPKQKGLSKKGDRYLRALLVSGAMAVVRQARMHPDKHAWVASLLARMSAKQAAIALANKNARIAWVIMVRGGVSAAGHRAPAYRDAALSAVA

SEQ ID NO: 104566 - protein, 407 aa, unidentified
MIFAGVDWAETHHDVYVQDEQGRRLAGGRLPEGVGGIARFHELAAAHAAGPGEVVVGIETDRGLFVAALVAAGYRVFAVNPMSASRYRDRHRSSGAKSDPGDAKVLADLVRTDRHNHRPVAGDSDLAQGIRALARAHQSMIWARRRQANQLRSALREFYPAALAAFDDLTSGDALAVLKAAPQPALGAALSRPQITAALRRGGRARRLAERTAALQPALRAPHLQPAPALATAMGAAVAAQAAVITEMNTQITALERQLAADFELHPDAPVVRSLPGLGTILGARVLGEFGDAPDRYPSAKSRKNYGGTSPITRASGTRRAVLARHARNKRLADAIYLWAFAALTASPGARAFYDHRRAAGDTHHQALRALGNRLVGILHGCLASHTLYSENTAWGHRATQQPGCAA

SEQ ID NO: 104567 - protein, 407 aa, unidentified
MICVGIDVSKRKSTVFFMAPGDKIIRRPFDVKHTKEELQPLVDEIRVQAKYDEIKVVMESTGVYHLSIAYFLQQNGIFVSVVNALKVANFNKAENFRHTKTDSIDSTNIARYGIAYWAKLPQFDLNGDKYFLLKRLCDAYLNFSEERSRILLQLQSQLEQTMPGIFDLFGGFDINSGKDKLLDFLERYCHIEDIIAKSEAEFVASYCGWAKEKGYRSNESKAATIYAQAKNGIPSIPNNPIVRETIMWYVGLLRRADEALMASLTRMEDIAKDLPEYELVGEMGGVGRVTRVALIAQIGDVRRFKNKHSLICFAGLTPSIHESGKFRASQNHIVKKGPARLRKVLYQVMMSLVMHKIPKDDAVYRFIKKKEAEGKYKKVAKVAGMAKFLRIYYGRVMHLYRDLGLAA

SEQ ID NO: 104568 - protein, 386 aa, unidentified
MPKFDDLSRSLVALDQDSTLIVVIEMSQSQWLVGGIVPGLEREPQKKLTPDAPALLALLHRWREEAAKAGRGVKRVCVAYEAGRDGFWLARWLHEQGIECHVIHPTSIAVSREHRRAKSDRLDLELLKRAFLGWLRGEKKHCSMAAIPSLAEEDARRLNRERQSLTGEASRIVNRMKASLARLGIRDVNVKLPGAAVRLDELRTGEGAALPPLTRAELRRELARLALIRAQLKEIEAARQQQRQQAPAAYRRKVGALSQVHGLGAATADMLTVEVFSRALRDRRAVARYAGLTGAPDESGKKRREKGLARAGNARVRHGMIQLAWRFLKFQPDSALAQWYRAQTASGRSDIRKTMIVALARKLLIALWRLATTGEVPHGIRLRPAV

SEQ ID NO: 104569 - protein, 357 aa, unidentified
MADHTSVEANVTLGVDTHKDSHVAVALDGLGRHLGTLSVPTTTAGYRKLLGWARELGTIEQAGVEGTGSFGAGLTRFLKAEGIQVREVIRPKRRDQYRSGKSDPIDAEAAARAVLAGTATGEPKGADGTVEMIRSLRATRRSAVKARTQASNQLKGMLLSAPQELREELRSLSTAKLVCRTSRFRLSGNPDTVEAATKFALRSVARRYQHLQEEIKELDEQLNRLVEQAAPELVAVDGVGTDTAAALLIAAGDNPERLKSEAAFAHLCGVAPIPASSGKTVRHRLNIRGNRDANRALYVVAFGRMSRDERTKAYVARRTAEGKSKKEIIRCLKRYIARELYRILVSPLSKAPSISVP

SEQ ID NO: 104570 - protein, 321 aa, unidentified
MTIIAFDVSKRELVGVRADKNGAVKEDFVLPNESGAIEQFFTDAVQKYPKLVMGSEATAEYHRLVAMSAIERAIPFHLINPILTKQYTRSTIRKRKTDKTDAAIIAKLIANGEGTLLTKSSLGTIKPLNRTANSITVLRKTLSATLAHVQHVCPEEVAIHEEIQLSIEMLEKTVEHIRKRVQDRTDRDLKKLLMTIPGIGETIAATLIAEIETVERFSDANKLVAYAGLDPRVRQSGVSLNRNTKLTKRGSPYLRQSVYIAAYIAARFDPELKEYCDKKRKEGKRYKEATVATARKILYRVYAVWKRGTPYEKRGSLQSPS

SEQ ID NO: 104571 - protein, 414 aa, unidentified
MDIVHTHCAGLDVHKKTVVVTIIVPGPNGGWQKETRTFGTMTTDLLALSDWLMELVVSHVAMESTGEYWKPVFNILENNFEVLLVNAQHIKAVPGRKTDVKDSEWIAELLRHGLLKASFVPPLGQRELRELTRYRSTFIKERATLVNRVHKVLESANLKLASVATNVTGVSGRAILQALLEGTATPEEMAELAKGRMREKRTELTRALEGHVKAHHRFVLTELLCQIDSLDEAIVRFDDQIVEYCRPFEETVTLLDTIPGIARETAEIMVAEIGTDMSRFPSADHLASWAGVAPGNNESAGKRRSGKTTQGNHALGVALNHAANAAAHTKHTYLSAQYHRLAARRGKKKAIVAVEHSILIIAYHIIQRRKPYHELGSDYFDQRRPEATAQRLVKRLEHLGFQVSLLQTQAPLAV

SEQ ID NO: 104572 - protein, 343 aa, unidentified
MDHYAGIDVSLEQSSVCVVDATGQIVREAKIASEPDALTGFLSMLGLPLTRIGLEAGPLSQWLLAGLVKAGYDAVLLETRHVKAALSAMVVKTDRKDARGIAQLLRMGWFRPVHCKSPSSQEVRALLVARKQLQAKMRDIELSLRGLLRGFGLKVGEISKGRYAARVRTLTAGHEMLERIAEAMLQAREALRTQFGELHRAMLRIVRGDEVCRRLMTVPGVGALIAVTFTSAVDAPERFARSKAVGAHFGLTPRKYQSGETDITGAVSRVGDAMVRTALYEGAHIMLTRAVRFSALKRWAMEVAKRRGMKRAKVALARKLAVILHRMWVDGSTFRWGREAVAA

SEQ ID NO: 104573 - protein, 410 aa, unidentified
MSIALPNQQFVGKPHKILHNSIDSLTTAVSKIKEAEELYSLESRIFLESTGIYHYPLSCYLRDKGFNCSVINPIITKNSTNINIRKVHNDRFDSKKAALVGLNPDLKVSLMPSDLALNCRNLCREYYDLMDNRSAYVNKLQGELRMAFPQYLGIFSKVTINTSLTLLETYTSAFLEADKQEIIDIIRSTARFGLTYAQNKYNAIIQAATDANQFGYIIESNIKRIRLYISFIRKYDEEINSILESLHELVDANEDADFVKQIHLIETFKGAGFLSAVSIMGEIGDFSAFSKPKQLFAYFGLDPAVKQSGKFEGTKVQMSKRDSAIARRVIHTLTLQTISISRNGEAKNPVLREYYLNKCGSKPKLVAMGAVSHKVCNMIFAILRDNKSFEIITPQEHIKQYNASKCDMAA

SEQ ID NO: 104574 - protein, 405 aa, unidentified
MELHDAIGIDPDSRGCVACLVKRNGQKPIAKSFSLTARGREALAAFIARDPGVLVGIEGRRGQSSPLEAFFEQSGIAYYSLPAVNVGNYRTAMVGAQKNNQNDARAVAEFLLDLEAKGQLKSFVQPEKVDEELRILARERLRMGEDLTVLTNRLWKALKESANDLYLALSGGDEDVEKTNLHTMRFLRLCTACPDVSKWSALSEDDIKQFSGNKGTRGWENFLRTVQTPIAAPVGFGHQLVLKQTAESLLQMLAQKAELEKMLETIVAERPLVAALRDNYKGMGNFSAALIAEEIISISRFKNDDHLASYAGLTKRDYSTGSNTNQRQAASCNKRLKDAFITFARTYLLFNKGSHLDKYHEHLVKTGMSRMEALKRIARVLSRDVYRFMKQQQCVAEQKKEKSVA

SEQ ID NO: 104575 - protein, 406 aa, unidentified
MLSIGIDVSKGKSTVCGMKPGGEIVYAPFEVQQTREGMLELVSLLRSSGEEVRAVLESTGSYHCPVVTALLENGIFVSVVNSLRMKRFCSQSIRKVKTDRIDAMQIALYGLAYWQELQPTRLPEDTYRELQLLARQYYQMTSLLIKAKVDFNAICDQVLPGMQELMSDHAGRHKLSDFVLRYCHTTHILEMGETRFRKDYCKWAEKKGYRNCERMAALIFATAQNGIPVLPNAPSTQIVITEAIRVLHTVEASRDAILTQMQALAKTLPEYSLVREMPCIGDTLAPRLIAEIGDVRRFHSKRALIAYAGIDAPPYQSGKFCANNRHISKRGNRYLRKTGYEVMQSYVMHKPANDPIFTFIEKKRGEGKSGKLAMVAGLNKFLRVYYGNHHKIETSQKCHRQPLFVG

SEQ ID NO: 104576 - protein, 369 aa, unidentified
MSNDTTVFVGLDVHKDSITAAFTGTNPDAPVIDAGTVGTQHYAIDRLCKKLSGRGALRVVYEAGPCGFWLQRHLAAKGIDCQVVAPSLIPKKPGDRIKTDRRDARNLALALRAGTLSYVHVPTLGQEQFRDVVRAWHQSKRDVSAGRQRLKSFLLRQDIRYSGTASWSKAHRRWLADLTMPSPAHYLVFQELLEAINERERRRDRLEHQLDTLAPQWSGFPLANALLAFRGIQKTVAYTVVAEVHDLARFPHPRHFMAWLGLVPGEHSSGNKRRQGPITRCGNRYARTLLVEAAWAYRYAPKVSRIIEARAQDVDPAIRDIAWKAQLRLHHVYKKLINKGKHVNVAVTAVARELSAFIWDAARQLDKAS

SEQ ID NO: 104577 - protein, 431 aa, unidentified
MSKLHNLNAAGIDISVKEHVVAVPEDRDKESVRSFKSFSRDLHKLAKWLKSCNIETVAMESTGVYWYHLYTVLLDYGFTVDLVNAAHVQNVPGRKSDVSDARWLQELHSFGLLRGCFQPDNLTRSLRNFVRQRKTIIKDMTTQTQRMQKALEQMNIKLNNVIRDINGKTGRAIIVKILEGERDPVVLSQYADGRIKCKRETLIKSLEGNWREEQLFNLKQGFDHLSFLEQQLIDCDKESEKMTSKFSSVEKDKLPPNEKKKNQPCFNVKQYLYEIHGVDVTKIHGFKNTTALTVFSEIGPNIEQKFPTLKQFLSWLNVVPDNKITGGKVISSRVRKKKNRAGQAFREAANALWNANNPLGDTLRHKKAKSGSSSALVSTAKKIATIYYKMIVNQEEFDPDKLAKKSKEHLTKKLEKLKKSIEKTELQLAYL

SEQ ID NO: 104578 - protein, 433 aa, unidentified
MSYCPVAGIDVSKRFSDMCILSPDNKIFAQEKIYHDETSINRANALLQKAERLFFSKPVIVMESTSHYHLILFQFFSEHGYDVIVVNPLQSNSMKDFSIRKRKTDRVDAFKLAMMYRTKTLRPSQIPQTATRALRQLCRHRAELLNDVSSYKNRLTALLDQTFPGYDKVFSDVGGVTSCAVLARFPTPTILLVEEESELVEVIAAASKSGYGFAKKKAGLLISAAQKAQTLGIHSCADETLIVCTIQMLRTLSESVLQIETAIDNLLAQIKEMRNNVSLLQSIPGIGSHSAALLLGEIGDISLFKKPKQLAAYFGLDPTERQSGSFRGTKNKLSKRGSPYARAALHMGVVNSICKHGKDSAANPVLLSYYEKKCKNKPAKVAQAASMHKLVFIIFAVLRDQKPFELKTPEFSIFHCPCSLLGVSDDRVISGEY

SEQ ID NO: 104579 - protein, 367 aa, unidentified
MAYYLGLDVSQKQTALCLVDDKGTIVAEGKALTDPGDIQSWIKTKGLALESIVRAGLEAGAMSSWLCTELVKSGLPVICMESFQAYQFLKTQRNKTDKNDARGLAQLVRMGETFIKEIVIRSQSRQELRTLLTLRQQLVNQKLALENNITGALKPFGLVTPRGRACQKTFEARVLETLRLAEERNIHVRESMTLSLAVHKTLCQQLVNFNKRIMEAVRNDPVCRRLMTAPGVGPIVACSFMTAVDNPKRFRGADDIGAYFGLTPRQYQSGETDIRGPTSRRGNTMTRTHLVQAATTLLTGKKSSTLKAWGMRLARKKGFCKARIAVARKLAVILHKMWINETDFCWTTSQADKISPATPASAILQVS

SEQ ID NO: 104580 - protein, 452 aa, unidentified
MSASQRQPQGIAPASPYRPPEHPSVTWSQHGTVDRKATWAAQFPVHVGVDTGKTFHKLVARGSDGRRLAAVRVDVSRAGFDEADAYLADSFPGISRTQMLVGLEFAGHYGFTFADDLHRRGYQIVNVLASVTKRLKEVEDNNPRKSDDKDAAQICKLLAQGYFVSYPFLSDTAAELRFLSVERRRLAVEQTRHRNRLLAVLDLAWPEFMRHFSLIVKPTPIALLRAWPLPADLAAAPRRAVNKLAREASQNHMPKPRLDALLADARTSVALTAGSDARRAEILRLIDRLLLVREHIAEVELRLGALVEITPAAKALTTVPEIDVVCAATILAEVGNPHDYVSPRQVLKLAGMNLARKESGVSVRGKLRQTKRGRPALRRQLFLLAGRWCQQRGLARAEYEAMQARNGGAKIAAMCAIARKLVPMLLHLMQTGEAFRPDVWIGRHNGSRPASR

SEQ ID NO: 104581 - protein, 416 aa, unidentified
MIHPKMQYTYVGIDSHKDTHTAVFIDCFFEKLGEITFSTMPSKFPAFLDDALKLRRDGTTLLFGLEDVSMYGRTLAVFFRENHLPAKHINAFLVARERKNQIVTEKTDAVDAECVARVLLSKFDELPNAEPDDKYWILKTLVAQRSLVVKHNISLKNHLHNLLTQHYPNYAHLFPDIDSKAALAFFKRYPSPSTLKDITFEELAEFLQEASSHRVGSGKHGSVKAREILDTLQDTTMPYQEVRDEAVRSAVHQIESNLEEVKRLEKSMAVFMEEFKCPLTSMTGIDIVSASQILSCIGDIKNFPSPAKLARYAGIAPVTHASGKKDIQFANKRGNRELNAIFYLLSVRLITAPANKMLNAFFYEYYHRKLSEGKTKRQALKCIQRRLVNIIWTMLTNNEEYVNPPLMGLTEALKAG

SEQ ID NO: 104582 - protein, 418 aa, unidentified
MKTYILRDPKAVEPQNPRPPRRKDPARTVTVASGPPPPGPVLFLGLDVHNDTIAVSLAPSDSTEVRRYGIIGGQHDDVLRLSKKVSAAHPGAALKFCYEAGPRGYPLCRFIRQHGAECLVVAPSKVPRQPGDRVKTDRRDADQLARLLRAGELTGIYVPDPQDEAVRDLIRARYQVQKQQHRARQQLKMFLLRQNIRYAGTKPWSPAHLRFLARVKLPFGEQQFVFQEMVNVISEAGQRLARYEKEIASVVENWRWQPVVAALMSLRGVALLTGATLVAELGDLERFASAPQLMSYLGLCPSEHTTGQDRRQGGITKLGNGIARKAIIEAAWNNSRAPRISRTILARQEDLPKAVTEAAWKAQTRLHQRYQHLTGVGRKKAQVAAAALGRELAGFVWAIGRMVKPRALPMEDRKPQAA

SEQ ID NO: 104583 - protein, 404 aa, unidentified
MKGPIVSIDVSKGKSDYQAFKEMNVKYTGSRSIKHTKEGFDEIVSLVREMEKKLETEVCVVYEATGVYHRVLKKVLEDNNIKQFIINPLLSAKTRKNDSLRSPKTDKLDPKSIAKTYYSHSLHNSHKPETIYHELRELSRYYEDILVHLRKDKVAFRAQLDVVFPGYDTLYDDLYGPVALAVIEKYPHPEMLQKKKINTVSKVIQSKTCHRQAMSDTMADKAIEYSKTIYSGCDKDDIEVLILQRFIKKLKEDMAEAERTIGEMIKLVQELPDFSIIKSIPGIGDNLAARIIAELGDMTRFKKKNELVAFAGLDPRISESGQNDGDHMHITKKGNKRLRCLLYLAVTCSIRLKRDDNSIKDFYIKKKQQSNPMCSKAAKTACASKLVRIIYSMCKTGELYQYNK

SEQ ID NO: 104584 - protein, 316 aa, unidentified
MDVHKDSVVACILKTCTASESKQTNADVEKEIRIFGTFPDELAKLREWLESENCTNVAMESTGIYWHPIYEAIEDACGDEMNILVTNARHMRNVPGKKTDMKDAEWIAGLLRAGLLAGSFIPPQDVRKLRQLTRYRKSVVQDINTQKNRIEKTLQQAGFKLSSFLSDVFGISGRNLIGVLIKNGKLLPHDVDNETRRISEEKKADIKRAINGKLTEKQRHFLQLQITLLDGLQTHLETIEESISELSAKWNDDIERLSSIPGIGLTSATAIIGEIGSDMNKFPTAEHFCSWAGVVPGDNTSAGKKKVQESLSATPI

SEQ ID NO: 104585 - protein, 419 aa, unidentified
MKENTTQNGDGYMALTCGVDWAEAHHDIALVDEDGALVARARIDTGATGFTNLLALIAEHGGSAAETPVALETDKNLLVVALAEAGFTLYPINPRAVARYRERHAQAGGKSDPGDAAVLAHILRTARHLHRPLPVVTEHARAVKALARQHQEAIWALHQTISRLRSVFLEFYPQALHAFPNLKHRAAMTVLAAAPTPAAGQKLTRRRLVTLLQRSGRGNHPALAEQILTDLHTPALRQPPRVEQALGHTVAGLLGIVIAMQRAVDDLETELAREFDTHPQAVILRSAPGLGPVLAARVLAEIGDDPTRFATPGNLRAFAGTAPVTRASGRSHYVKARKVRNKRLGDACHWWAFAMLTKSPGAREHYDKRRAAGDHHNAALRNLANKLLGRLWWCLANNQLWDDNAAWPHRAEHQNPVAA

SEQ ID NO: 104586 - protein, 413 aa, unidentified
MEVFCGIDWAEDHHDIALVDAGGQLLARRRISDDAAGLAALLGLLAEHGDSAEDPIPVAIETPRGLLTACLRATGRKVYPINPMAVSRYRDRHSVAGRKSDHGDAVVLANILRTDAHAHRPLPADTELAQAIAVLARAQQDAIWARTTAHNKLRTCLREYYPAFLAAFADVRGGITRPEARTILAAAPTPAAGAKLTLTQLRSLLRKAGRSRGIDAEATRLREAFRAPQMRQLPLVEDAMGRQALALLRQLDAACQAADDLEQATIESFNQHPDAGIITSFPGLGPLTGARVLAETGDDRSRFQDAKGLKAYAGAAPITRASGKTRAVLHRRVKNQRLAAVGYVWAFAALTASPGARAHYDRRKADGDRHAAAQRNLFGRLLGCLHHCLSTGQHYNEQTAFPAPKPTAHAKAA

SEQ ID NO: 104587 - protein, 451 aa, unidentified
MNKKVSMQIINPNAAGIDVGSRSHFVAIGQGKEDVKEFGVYNEDLQAIAAWLLLHKVTTVAMESTGTYWQSLFAVLQNAGIQVILCNGKFTKNIKGRKTDVQDCQWIQKLHTIGLLSGSFLPDEATEQLRTYCRHRANLLDNAADTTRKMQKYLRLLNLRLDVVVKDITGLTGLAIIEAICKGEVNAQVLASLRHGNCKKSEEEIAKALQTNGRKDYLFGLKHEYKMYQSLQSAITSCDVEIEKMLTEQINNNDDKRQHIIDKKIHKRINKNSPKNIDINLMAYQYFEGVDLLAIEGVSHSTVLSIMSEVGPEGLKKFDTAKQFASWLRLVPNNKISGGKVLSSKIPKGSNRLKIALRNAANAIGNLKDTPLSNFFNRINFRKGRVSAISATARKLAIIIWNMIIKKQPYNNEHGYEFLDQKRKRKVKEMRKLIHKFDIKTDELGLQLSGL

SEQ ID NO: 104588 - protein, 349 aa, unidentified
MTLYIGVDFHPHQQTIAWCDTETGETDTVDLLHDLDRVREFYTTLPEPAIIGIEASVRAAWFENMLFETGHKLLVGNPVLIRKRATSRHKNDRRDAKLILQLLLRNEFPALWRRPHESNQVLEILRLRLNLVGQRTQIYNRLQALAHNAGLPKGKVKTPAFQALIKAVETDESGEMARLHLFSLLETFNKQIAELEMWLKEKAAPDEKVKLLITQKGVGYLTALATVHTLGDVNRFTRISKQVVGFAGLDPLEDSSAGKVRFGSISKAGPPLLRFQLGQAANIAARWDVKLKSFYKRLAKKKLKAVAKTATARKLLVKLSIMLRDNITADEFDLRGRTVGNARRTQGLK

SEQ ID NO: 104589 - protein, 370 aa, unidentified
MLDTTTFIGLDVHARSIKAVSLDVMTGEVRAATFGYDAGAVAEWVRSVDPRARCVYESGVTGFDLQKRLSGLGVDCVVGAVSKMIKPSADRRRKNDRNDAEFLARMLSVGNVVEVWVPDDECEAARDLTRALEDARDDLSRSKQRLSKFLLRHGLVFDERTPTGRRKGNWTRAHWSWIESIRFAERADNDVLAYYVDAVRRAAEEKARLEGLVEAEARKPRWRRRVDSLRCLKGVDTASAADLVFEAGEFSRFGNARSFAAWVGLTPSEHSSGESDRRGAITKAGNKHLRKTLVEAAWHYLTCSGRPKGLAKGQAPDRGARRHAAKGVRRLVERREALLARGVHGNKANVATARELACWVWAVGLMAEEA

SEQ ID NO: 104590 - protein, 410 aa, unidentified
MIKVGIRSPGDKPWTRRSEVLQYRTFYGVLQQMAADLRQRGVTHVVMEASGACTEPVYYALAERDFDEVAVINPAHAKALRGHKTDARDCLRVAELFECGLLRGSYIPAAGLKEVRDLTRYRMKTVQARTSEIQRLGKALESAGIKLGSVASELTGKSATAMIEALTDGERRGRVLAGLAIGRMRTAGKLAGLSQALTGRFTGHHALLCRLHLDRIAIFDTAVAGLEDKIALRAARWQREQDLLRTVPGFGDAVACAWLAEIGPAPHAYFASHEKLASWVTLCPGNHISAGKRKHGRTGDAGTYIKPMLVQAAWAAIRVRGRLQARYSRLVRRFGGEKNPAAKKKAITAIAHTLLKIAYQVLRSGKPYEDPGADFCTRRESPQQRQAYLMRQLQKLNPGCTITITPAEAA

SEQ ID NO: 104591 - protein, 324 aa, unidentified
MVEQKLPTTKQAMKHVFGAMPSSRVALETGAHSPWVSRQLTQLGHEVIVAHARNVRLIGESSRKDDRLDARMLARLARLDPRLLSPVQHRSAEAQIHLTVIRARAALVGARTALVNAARGLAKSYGERLRKCGTQQVSKNLAAGLSAELRAALEPLLAEVASLNQRIAEYDRRIEQIATEVHPEVALLKQVKGVGTLIALSYVLTVGDPHRFRHSRDVGCYLGLRPGRRNSGHSQPQLHISKEGDGYLRTLMVQGAHYILGPFGQDSDLRRWGLKLCERGGNNAKKRAVVAVARKLSVLLHRLWVGGEVYEPLRNHSGVAGAAA

SEQ ID NO: 104592 - protein, 404 aa, unidentified
MWYVGLDWADTHHDVVILDEAGRRVGSQRFVHSPEGLNELKQLVLRIAGSPEQLACIVETTHGLLIAFLLEAGFPVYPVNPKTANQLRKAAGAKTDQIDAYLLAKTGRFDLAELRRLEPDRAIVAELKTLTRDQDTLIQTQTRLVNQLTACLKEYYPAALHLFAKLQQHSALVFLQTYPTPQAAQAASLEEIIATLHTGKHTKSRQVAPKIFEELHRPQLVATAVIVRAKSRLMLALVKQLVVVIQEITSYDKQISTLFLTHKDQQIWRSLPRAGQRLAPRRLSEWGEDRSRYADASSVQSLAGTAPVPFQSGNYAKAHKRFACLKPLRNALHQFAWQSTLQEEWALAYYQRKRAEGKTHSMAVRALANVWVRIIYRMWVSETCYQTATFEAAKLAHAPRQHAA

SEQ ID NO: 104593 - protein, 356 aa, unidentified
MKRNHFIGIDVHSQFCEVAVMTPAGQVVQRERCATTIPALSELLDKAPRPCSVVLEEGPMAGWLWRNLHDKVNTLVVAEPRRNRLIVRDGDKDDDIDAEKLALLHRGGFIKPVHQSGSLEQAVFKQLVALYHYRVRQRVREAHRITHLFRQHGIVIRERAYADRADRPALVQRLPAEGLLPELVRSMWTSYDALVQQEDQWRKRLLRAAKQVEVVCRFQDLPGAGWVRAATLYAYLDTPWRFRSKAALWKYLGIGLERKHSGKGKEYLGVPKQAHRLLKCTILGAARSAATARDNPFADMYRRWVEEEGLSPARARRNVARRLAATAWGMWKNGNAYHPEWVGGAGTAQAAAQESR

SEQ ID NO: 104594 - protein, 322 aa, unidentified
MTENTKVYVGIDVSKAHLDVSVGTHQASWQVENNLVGIGELVEKLSEVRPALIVLEATGGYEMAAAGALALAKLPVAVVNPRQVRDFAKSLGRLAKTDRIDALVLARFGEAVQPEPRALADAQTQQLQAILGRRRQLIEMLVAENNRLHLVHKDVLVNLKDHIAWLEQSLDNLDKDLQDLLKNSPIWHEKDDLLRSVPGVGRVLSTTLLAELPELGTLNRKKIAALVGVAPYNCDSGKMHGKRAIWGGRASIRSVLYMATLSATRCNPVIRAFYERLIQAGKEAKVALVACMRKLLTILNAMMRNQKHWESALAITKTRATP

SEQ ID NO: 104595 - protein, 345 aa, unidentified
MQVTTIGLDLAKNVFQVHGIDDAGIVIVRRSLRRRQVMPFFGKLEPCLIGMEACGTSPFWARELRAMGHEVKLMPPIYVKPYVKRGKTDAADAAAICEAVGRPTMRFVPIKSAEQQSVLALHRTRDLLIGQRTQLVNMIRAQLAEFGIVMAKGIEHALRLVDQLVEGIVPDIPSLACKVMIALAEQIQALQTRIARLEDEIRMGFRGNELAKRLATIPGVGIITASALAASVTDPRRFTSARQFAASLGLTPRADCSGGRERMGRISKMGDRYLRRLLVNGMTSQLQAARRKPEAHPWVAGLLSNGKPNKLVAVAMANKAARIAWVVMTRGEIYRSNRPAAEGTA

SEQ ID NO: 104596 - protein, 367 aa, unidentified
MKKISTVAMPTSEKVAGLKLTIGLDLGDRSSWYCVVEQSGQMLLEEKVSTTPKALRAVFGRMPRSRIALETGMHSPWVSRLLIRLGHETIVAHARNVRLIGESRRKDDRIDAHTLARLARIDPQLLCPVKHRSAKAQADLTVIRARAGLVRARTALVNTARGLAKSYGERLRGCNVRNMNPEKAQGLSPELRTALEPLLAGIESLSERIRECNQGIERLAQESYPQVALLKQVKGVGTLIALTFLLTLEDAHRFRKSRDVGCYLGLQPGRRNSGQSEPQMHISKEGDPYLRTLLVQGAHHILGPFGADSDLRRWGLKLAERGGRNGKKRAIIATARKLAVLLHRLWVSAEVYEPLRNRSRRTMPAAA

SEQ ID NO: 104597 - protein, 370 aa, unidentified
MNDLIRIGIDTSKSVFVLHGVNAAEQPVLRRKLRRRQMGEFFAQLPPVQIGIEACGAAHYWGRELAALGHEVRLLPPQYVKPYVQRGKNDAADASAICEAMSRPRMRFVPVKKAEQQAALMLVGVRDQLVARRTQLSNMIRGYAAEFGVTAAKGLDKIEPLLARLAREPGVPEEAKALFAVLGEEFAALKPRVRKLEAQLLVWHRHNELSRRLVEIPTIGPIGSALLTMKVTNPHAFRCGRDFAAWIGLTPKDHSTAGKQRLGVITRAGDETLRRVLVVGATALIQQARKGRGDPSPWLIELMRRKPPKLVAVALANKTARIAWKLMVSGERYNRQHARGGFVPPTGSLAPGARRQGRVAPPAAVACGQP

SEQ ID NO: 104598 - protein, 358 aa, unidentified
MPSNLRYLGLDVHAETIAVAVAEPEGEVRSLGMIPNRPEAVAKLIRKLGSREHLRVCYEAGPCGYVLYWQLTRLGVHCDVVAPTLVPTKPGDRVKTDRRDAEKLARCYRAGDLTAVWVPDAAHEALRDLVRAREAAKQDQLRARHRLGKFLLRRGIRPPAGAKPWTQAHRRWLDSLHEVDHAVARLDRLEQALDAAVAAAPGTLRSVIAALQCLRGIRQVTAATIVSEVGPLSRFPHPRQLMGYSGTVPSEHSSGSRVHRGAITKTGNAHLRRVLVEAAWAYRFPPKCAKALRTRQRGQPDAITAIAWKAQHRLSTRYRRLLARGKPTPHVITVVARELVGFIWAIGVAVEREQAMAA

SEQ ID NO: 104599 - protein, 419 aa, unidentified
MSQSTLTKKLASVKSGTLFVGVDLALDRNVAVVMDERAKRLDRFRFDNSLEGYSYFHRRLCKAKEKDQAPAVLVGMEPTNYFWKLLATDLEARQVGYRLVNPYTVKKHREGDQLDRSKDDPRDAFVIADLLRTGKYTETRLLHGQYAELRQSVTLRDRLLRDIRRQKTLVNNIAGQLFPELSCEFKDLNGQTALAMLSSHAAATVIRQLPLDVFINDVRSVFRGKRLMVSKLRRAHALAHSSVGLKDGVQALQLSIDQYIETLEHLQRQLAQAEETLMEVFLALPEAKYMLSVPGLGVIAAATILSEIGDPSHYRQAKQLIKLAGTQPVPNASGRKSRSKTPMSHKGRPRLRTALFFAVMRLVRFDEAFARQYRHLQTRNKNPLCKMQALGVLMNKLLRILWALMRKHTLYVPDFQPTI

SEQ ID NO: 104600 - protein, 339 aa, unidentified
MRCYTGIDLHSNNSTVVVINEQDQVIYRKQLSNVLTVVLQALEPFRADLAGVVVESTYNWYWLVDGLEGAGYRVHLANTAAIQQYSGLKYSDDNSDAAWLAHLLRLGLLPEGHIYPKETRAVRDLLRKRGQLVRQRTCNILSIENLTSRNQGIRIKGNAVKQLSTEEVETQYENQDLALAVTSTLSIVEALNQQIGKIEKRVKEKVRLAPSFERLKTVSGIGDTLALTIMLEAGQISRFPSVGDFSSYCRCVSSEKLSNGKKKGSGNVKNGNAYLSWAFIEAAHFAIRHDPVIRRFYQRKQAKTLRVVALKAVAHKLARACYYVMRDQVPFEVAKCFGH

SEQ ID NO: 104601 - protein, 401 aa, unidentified
MEGPIVSIDVSNGNSHYMCFIKNNKRFGKVKKIDHDIEGFKRLLEDIQKLEAETNEKVCAVFEATGVYTKPLERFLSKNSIKTYMINPLESARKRKEEIHNKKTDKLDPISISKVYYDKEKMMELKKKDETYNWLRKKNRLYEDQLNHLRKYKVTFQNQLSICFPGYLDLFKDGYSGIPMIILKKYPHPDLLKNKKAETVARYLEKNTCHNHKVSLEYALKIIEFAKKTYPGCEKDDVEVEIFKILLDKVIETQRECEKTLNEMITVASTLEEYRYISSIDGIGPNLTARIIAEIGDIEEFKSREALVAYAGLDPHIYQSGDQDGKHLKISKKGNKYLRCLLFLAVGCSIRGAKDNPVNRFYQKKKQQSNPLNSKAAKTACTAKLLKIIYGICKNKTTYER

SEQ ID NO: 104602 - protein, 343 aa, unidentified
MKLMRIGVDLAKNVFQIHGVDRHEQPVWRQRLPRDRWLQTVLEKIEPGCEIGMESCGGAHHWARQLQARGYQVRLIAPQFVKPYVKSNKNDANDAEAICEAMSRPSMRFVAIKTIEQQDIQATHRIRAGLIEQRTAKANQIRGLVAEYGLVAPKELLMLRRAIPCWLEEADNGLTVRLRRLLDGLWGDLRALDERVGQLDSEISAIAASEPTAIRLQQLRGVGPMIATALIAAIGDARQFANGRQLAASLGLTPKQHSSGGKDRLLGISKRGDTYLRTLMVHGARSALRTAKSKDDRLSQWVVRLAERSHPNVAAIALANKTARMAWAMLRNGTDYQPDRAAA

SEQ ID NO: 104603 - protein, 345 aa, unidentified
MKLYGGIDLHSNNCVIAIINEQGETLSCKRLNNDISVILSFLAPYKDKLAGLVVESTFNWYWLVDALMDAGFKLHLANPAAIQQYSGFKHADDHSDARWLAEMLRLDILPEGYIYPRELRAVRDLMRKRMDIVQQSTKNLLSVQSCYMRHLGYKLGSNKIKQMAAIRKGVDTEQVHADFSSMNTALSVISNLSLIRCAQQQINAIEGAILKQTSLSPEFINLSSIDGIGNTLALTIMLETGTIKRLDSPGNFSSYCRCVKGARYSNGKKKGATNQKNGNRYLAWAFTEAANFAIRYNPTVKKYYQRKLAKTNKVVAIKTVAHKLARACYHVLKDNVPFDEHKAFA

SEQ ID NO: 104604 - protein, 407 aa, unidentified
MQVIYPRCAGLDVHKQTVVACVRIAGNGPPLQEVRTFATTTSGLLSLADWLDSFGVEHVGMEATGVYWKPVWHVLEGHFELVLANAAHVKNVPGRKTDVNDAMWLADLLAHGLIRASFVPPVAVQELRTLTRTRKQFVRERSAHAQRIDKVLEDANLKLSVVLSDILGKSGRAVLQAIVDGHTDPERLASHVTTRVKASRAELLEALRGRVSTHHRFMLKLHLGHIDALDRAIADIEKEVGLGLEPFRQAAKLLSTMPGLSEVSAHVIVAEIGIDMSRFATAGHLLSWACLCPRNDESAGKHRSTRLRRGGKWLKTTLVQAAWSAVRVKGGYLQAQFHRLRARRGAKKAIIAVAASMLTAAWNMLRDGTEWHDLGATHFDRADAHKTANRLIRRLQQIGFAVQITPA

SEQ ID NO: 104605 - protein, 342 aa, unidentified
MQNMMIGVDLAKNVFQVHVASRAGEVQYRKKLSRKQFSAFMAQQEPSLVIFEACGSAHYWAREVEALDHEVRLIAPQYVRPFVKRQKNDAADAEAIVIAARQPEMRFVEPKTIEQQSRAAVFRGRERLVHQRTADVNALRALLYEHGHVFPAGIRHLNRMTALIEEKTSGLPMLIREECKDLQAQIAEKTARITERTAKLKTLAAQSNKARRLQTMPGVGPLTAVAVEAFGPDMAQFKTGRDFAAWLGLVPKQHSSGGKERLGRMTKAGQADIRRLLIIGAMSRLTWLGRRAIPEGSWLSRMLARKPKMLVAIALANKMARQIWAMLTKNENYRDPALAVAA

SEQ ID NO: 104606 - protein, 417 aa, unidentified
MEKGEKASTCRYIGLDIHKYYSVVAGVDRDGKEVLSACRVEHMELEDWLKKHLLPTDRVVIESTTNAWHVYDLLEPLVAEVQVANPIKVKQIACARVKTDKKDTFILARLLAANLVPTVWVPPMHVRELRQMVSHRRRLAGMHTQVVNRMHSVAHRHHLSHPKGKDFQEKNTGWQKDGSLSRLEKMQLELDMEMREHLEKQVGRMTRELARLSHEEPWASDMLYLMQVPGCGVVTGMTILAAIGDITRFETPKALASYSGLVPGLEQSGVKLRGKGITKEGRKELRWVMVEVAWRAVKADPHWKKYFETLQKRMHKNQAIVAIARDLLTMVWYVLTRHEPYSHYSPERIAYKYLTWAWALDREQRQGMTRPQFARYYLMRLGIGNELERVALNPKFPYRLASMEDVLELHPELRPPE

SEQ ID NO: 104607 - protein, 365 aa, unidentified
MIVIGIDPHKSTHTATALDPASHTELGSLRIDATTDGYTRLSNWAAQWPQHTWAVENASGLGRHLSQWLLAQHAVVVDVPATATARVRELSGSRRKNDRLDAAAAAGIAAAQGHSHPVDPEGPTTVLALLDEHRTNLTGRRTRIVNQLHALLRDLLPGGAPSRNALTAATASRILEQVRACSNVERIRVGLSRELIEEITRLDGALTRNEKQMALMLDEHGTRLREVAGIGHIIAATLVGRTGRPDRFPSAAAFASYCGTAPVQVASADFEVHRVSREGDRQLNCAIHMIATTQIRMPGSAGRSFYDRYLAAHPPASSGRTAGVRARRAAKRALKRHIAGYVWKLMLADHNRRCSKSGRESSAVA

SEQ ID NO: 104608 - protein, 346 aa, unidentified
MHYIGMDCHITTLDFAVVNEAGRLVKANSVATGVKGFMEFVKTVPPPRTIYMEEGTLAAWALETCVRFREKLVITDAKKNHWIGSSGQKDDAIDALKLAQLARGGYIKEIHHPVGQRRRFRELMTAYHDTVRSTTRIKNKIKARFRQNGIQCTGATVYLETYREEWKDKLPQEATPLLILDGLWRQLEQSEQTEEGLLAAARAQSKQYPEIKLFKDIPGIGFISAATISAILETPYRFADKRKVWMYAGLGIMTKSSGGKVYSEKLSTDYNHLLKYTLKQAAEAAIRAKDNPFRHKYLDMTLLHGIAPHRAKLTIARDMLATMWAMWRKGEKYRPEIREKAAYKQG

SEQ ID NO: 104609 - protein, 415 aa, unidentified
MKKHSNSRKKSEPTSKRAKSQGPVQRDPKEVLAELVGKLREKLDSKVVAASAREEDQRDELRPNFDRLTVGVDLGDQWSHYCILGLEGETLAEGQLRTTPQDVTEFFEALNAARVVVEVGTHSAWVREVICGYGHEVLVANPRLMEGSKRRKRKNDRIDANKLARLGRVDPQSLHPMQHRRAEVRQDLVMLRARDALVAARTELINATRGLVKSMGARLPKCSSPSFAQKVEEAVPAEIQEALLPLVRITAALSDSIQGYDEKIERLGREKYGHTALLRQVKGVGPITALAYVLTLENPERFAKSRDVGPYLGLVPKQEDSGESQPQLGISKAGDTMVRRLLVGSAQYILGPFGPDTDLRRYGLRLCEHGGKNAKKRAAVAVARKLAVLLHRLWVTGEVYEPLHHAKSVPIAAAA

SEQ ID NO: 104610 - protein, 359 aa, unidentified
MRVQINKLDFKGQNIYVGIDVHLKSWSVAVMSEGTLLKRFSQNPSADALHSFLTDNYPNALYKSVYEAGFSGFGAHYRLKELGIDNIVVNPADVPTMMKEKLRKTYAIDCVKLARGLRSGDLTGIYIHPQEALEQRSLIRLRETITKDMTREKNRIKAFLYFNGIPYPEQFDSGKSHWSKRFMDWLRSIELKTRYGRDTLQFYIEKAEYQREMLLRQTRLMRVLSRSAHIGSQLKLLTSVPGIGLTIGMNFLTELGDISRFRSSDQLAAYIGLIPMCHSSGDKHNDGDITLRKHATLRCYIVEAAWRSIRTDPAMTMAYEEYCKRMKPSKAIIKIARKLINRIFFVLKRKQEYVSCVVK

SEQ ID NO: 104611 - protein, 369 aa, unidentified
MEERIKVYVGLDVHKDSIVIAAAEAGRSAGRLIGQLAHDVPKLLKALAKLGEPGVLHVVYEAGPTGYGLQRALSAKGYGCEVIAPSLIPRRAGDRIKTDRRDCVRLAELSRAGELRAVWIPDAGDEAIRDLARAREDAVNARTQARHQLKAFLLRHEIRYGGKTAWSKAFYRWLGELNFGDPSSQVAFTEYHLAVQAGDQRLERLTKALTASVAGWRFEPVVQALQALRGIDVVSAIGLVAEIGDFARFDHPRKLMAYLGLVPSEHSSGDRLRKGSITKTGNAHARRLLTEAAWNYRFTPRIGRAAQARQEKLAEPIKAIAWKAQLRLSARYARLNGRGVHHNKVCVAVARELAGFVWAIAQTCSAQAH

SEQ ID NO: 104612 - protein, 420 aa, unidentified
MKVVSIETKPRNAMSVVEFPQLIDRGCGLDVHKDNVVASIRGKGLAEETRTFLTFTNDLEELTAWLRSHNITHIAMESTGVYWKPVYYILEDFFEIILVNARHIKNVPGHKTDKKDSEWIAKLLLSGLLKHSFVADGPIRELRTLTRHRRKLINERSREKNRLQNILEDANIKLGSVISDVFSKTGTGIMELLLNGITDPVILANQAKGSLVNKKDILQRALHGRFTERHRFMLSLISQTIDSLSNLIKQVENQIELYIQDMQQQINLLQTIPGVARQSAIGIIAEIGIDMSQFCSDKHLASWAGVCPGNNESAGKVRSSRVTHGNTHLKTTLIETAWAASHTINTHLSFKYGVLAHRRGKKKATMAIAHDILTASYHIIRDKVPYKEPFLREDILMQRRKAEMVRLEKRLLKLKILASK

SEQ ID NO: 104613 - protein, 363 aa, unidentified
MLLRWCLIFSAPYMEELVMALNHRWCVGVDLHKDTLTACLFCGCCGEVTFQKIACRSRRQIAEYFAALPRPHAVAIESVGFYRWLWEMLEPIVEELVLADATQARALAGRRLKTDREDALNIAQLLASGRLPTSYAPPIEVQWLRDLTRHRNSFSRQHARILHRVKSIMNANNRPGPARMQSEGLIRYLKAQGEKLPARHVEMLWQCLDALVLTERQIAQVERTIGQVMRRNFFCEVYGILTSFPGVALVTAATVIAEIGDFKRFTGAKAIGRYAGLNPRVYASGGKQRMGHIAKTGPSDLRWILQQAAWTAIRYDEHVKRIFLRIAKRAGRKAAAVAIARKLLTWMHAAVIKGEPYRTRVAA

SEQ ID NO: 104614 - protein, 338 aa, unidentified
MTILMGLDQHRAQITADWLDTATGEVSRARVAPADRAGVRRFLARFAGQPLEVALEATTGWRFVVEELQRIAAAVQLAEPAHTAALKGNKKHAKNDRADARHLRELLIAGRVPESWIAPAHILDLRARVRLRHTLSEQRGEWQQRIQSVLYHHGCPKRGDLINHAGLTWLGALPMPACAREQVTVALAMIDALDHQLAPLDQELGGYARRQPGCKALMRHYGIGKVTSVTILAELGDPSRFSSSREAVRFAGLDITVYASDRRRAPGHLSRQGPPALRWALFEAAQCARRPASPDHAYYVQAAGKLGGNRACLSVARKLLKRSFHTLRELGQEALQPA

SEQ ID NO: 104615 - protein, 357 aa, unidentified
MQRERTVKIKNPKNVYIGIDVHLKQWNVCIYQGGLRRKSFQQPPEASALLSYLQRVYPGLSYFSAYEAGVCGCSIHYDLESHGIRNIIFNAADVSQTHKERVRKTDAVDAAKIARSLANGELRCVHIPPQWRIADRNLLRLRSTWVSDMKRQKARLRHYLHVNGIIIPPEYGPGRWPLAFFRWLKETAESDGGNTGQALGMMVGDLENARDELRNLDRRLLTLMKTERYSTDYELLRTVPGVGPRTAICLLLECGDLADFGSAEAFCAYVGLVPDMDRSDEHDGHCGITRRRHKVLRYMLTECAWRAIRSDDHLSGLYAAYSRRMPSNKAIVKVANKLAKIIKFVLKNKKKYVQPKK

SEQ ID NO: 104616 - protein, 371 aa, unidentified
MWTAPYGISLCQNEVWLKSQTREPSVNQIIRIGMDTSKHFFQLHGVDTAERPMLRRKLRRNEVLGFFAKLAPTVIGMEACGAGHYWARELRKLGHEVKLMAPQHVKAYVKRNKNDGRDAEGLCEAMSRPTMQFVPVKTEEQQAALMLAGVRQQLIARRTQLSNAIRGYATEFGLITAKGLDKIEPLLGRIAQDERLPELGREMFAMQGRDYARLQIELKAIEARLLAWHRANADSRRLAKIPGVGPIGATALVMKAPDPRLFPSGRHFAAWIGLTPKDHSTAGKTRIGKITRAGDEMLRSVLVAGATAVIQQARNGRGRQSPWLLALLARKSPKLAAVALANKIARIAWKLLTTGESYDGARMPGASALAA

SEQ ID NO: 104617 - protein, 386 aa, unidentified
MQTLNDLSRSLIALEPASTLIAVIEMSLSSWLVAGIVPGIERQPLKKLAVDESALLRLLHRWREEAEKAGCRIERIVVAFEAGRDGFWLARWLKARSIEAHVIHAASVAVSREHRRAKTDRLDAELLKRAFLGWLRGERNHCKVVAIPTLKDEDAKRPSRERESLVGEQSRIVNRMKAALIRLGIRGFNPKLKRAAGRLDSLRTPEGEPIPPNTLAELRRDMERRRLISNQIRQIEEARLKHFEQAPNDGPHAMVRLLARVIGVGIETADMLVHEVLSRNMHDRRAIARYAGLTGSPDESGRKRREKGLARSGNGRVRRGMVQLAWRFLTYQKESALAQWYRARTENARGARKPMIVALARKLLIALWRFVWQGVVPDGVVLRPAQ

SEQ ID NO: 104618 - protein, 372 aa, unidentified
MEARMIYVGLDVHKETIAVAAAHRDPPAELEELGTIPNRPEAIQRLMLKLRSRASLRVCYEAGPCGYAIYRQLRGLGIDCMVVAPSLVPVRPGDRVKTDRRDAVKLARLFRSGELSAVWVPDPAHEALRNLTRLRAVAHHDLTRARHRLGKFLLRSGCVAPAEAKPWTQRFLDWTRAVRLEQPLDVRVRDDYFNLVVHLQDRITALNQALEDAASTSPMARRIAALCSMRGVSIVTATTLVAEWGEIARFTRPRQLMTYTGLVPSESSSGARTQRGGITKTDSSYLRRVLVEAAFAYRHRPLLGGVLRRRQQGQPEAVKRIAWKAQQRLHRLYTRLMARDKRHQKIVVAVAREMVGFLWAIDREVTSASPTA

SEQ ID NO: 104619 - protein, 454 aa, unidentified
MSVVNPKAAGIDIGSRSHFVGIGQGKEHVREFGVYSEDLMALVQWLLDNNIETVAMESTGDYWQNLYIELIKSNIDVYLVNGKFTKTMNRKKTDVIDCQWIQKLHSLGLLHRCFLPDESTEKLRTLCRQRGNIIAAKADASRKMQKYLKFLNYRLDVVVKDITGQTGIAIIDAITKGEHDPYKLAKHRHYNCRKSEEEIAKALHGNNREDYLIGLQLEYERHLFCVSQLEKCDIHIAELLKIHIASMADVIDELPSDKKHKRLNKNSIKTIDLNINAFQYFGGVDLLEIPGVSYGTLLSIMSEVGPNGLDNFPTAKHFTSWLRLAPNNKISGGRRISSKVPRGSHRLKVALRNAAYSIARLKDSPLNKFYKKIAFKKGGIKAVSATARKLAVIIWNMLTKKIPYRAKEEYLFLDQKRKQIAMMRKKMAKFGIDPNDLGIFTRPEYKLAHDKKTQ

SEQ ID NO: 104620 - protein, 345 aa, unidentified
MQYDAGIDVSLEQSSVCVVDAAGKIVKEAKVATDPHVLVTFFKGLGFPVTRIGLEAGPLSHWLYAGLTQAGFDVVLLETRHVKAALSAMVVKTDRKDARGIAQLIRMGWFRAVHAKSASSQEIRALLTARRLLLDKLRDVELSVRGILRGFGLKLGKVTQRGFETRVHELVANHPMLQQITRSMLLARATLQREHNTLHKALLKIVRRDKVCQQFMTVPSVGPIVAITYKTAVDDPHRIKKSKGAGPLFGLTPTRYQSGETDVIGGISRIGDAMVRAMLYEAANVLLSRTMRFSALKRWGLAVAKRRGMKRAKVAVARKIAVILHRMWIDGTSFRWSNQKAAAYA

SEQ ID NO: 104621 - protein, 412 aa, unidentified
MPLALPEALFFTGIDWAAATHAVCVMDAAGKITAEFTIAHSADGITQLIRRLARYGDPACIPIAIERPNGRLVDLLLEAGHPVVPVSPNAIKTWREGEVLSGAKSDAGDAAVIAEYLRLRRHRLQVAVPCSGETQALRTVVRTRSDLVDLRVAATNQLSALLEASWPGAKAIFADVESPISLAFLTRYPTPAPAAHLGEKRIAAFCASQGYSGKRPAAELLARLRSAPAGTADPALTTALGTAVLAMVAVLRALNTAVRDLDRSAAARLGEHPDGAIFTSLPRSGQVNAAQMLAEWGDCRQAYGGPDSVAALAGCTPVTRESGKHRAVHFRWACNKRFRKAMTTFADNSRHASPWAAKIYNDARAAGKDHPHAVRILARAWIRVIWPCWLNHTPYDPARHGAAAALAEPIAA

SEQ ID NO: 104622 - protein, 332 aa, unidentified
MKKHSKSSQRSEPSLKRTKARGPVQRDAKEVLAEVLEKLTGKLDVPAVSTSAKENRRANTVGPNRDRLTVGVDLGDRWSQYCILGLEGETLAEGQLRTTQDDVREFFQALTAARVVIEVGTHSAWVQDVITEWGHEVLVANPRLMEGSKRRKRKSDRIDANKLARLGRVDPQSLYPIRHRSREVRQDLVVLRARDALVSVRTELINTTRGLVKSMGTRLPGCSSPSFTDKVKDAIPVEVREALLPLVQLVETVNDCIAKYDQKIEELGREKYGHTTLLRQVKGVGPITSLAYVLTLEDPQRFSSSREVGPYLGLVPKQEDSGDSQPQLLIRS

SEQ ID NO: 104623 - protein, 343 aa, unidentified
MKVIRVGLDLAKNVFAVHGVDAEDCPVLQKMLRRDAVAQFFAELPPCVVGMEACSGAHYWARVLTELGHDVRLISPQFVTPYVKSNKNDRNDAEAICEAVGRPSMRFVPPKSSEQLEIQAVHRIRQRLVSDRTRLVNQIRGLLAEHGIVIGRDISRLRRGLTLIVDGAADGLGDVLRDLVRDVHHELAELDQRIARYNQRIRHLFRTNEECQRIGQIEGIGPITATALVAAVGDRNCFKNGRQFAAWLGLVPKQRSSGGKPRLFGISKRGDRYLRTLMIHGARAVLGKAKGKDDPRSQWIGRMRERRHPNIVAVALANKNARIVWSILSRAEFYRPDETVLAT

SEQ ID NO: 104624 - protein, 427 aa, unidentified
MNGIEFNSIDRFRQFKKEIRGSKDHLIVGLDIAKRKHHGFFGDANGRTLLKGLIVENSAEGFRHLLTQVRFYMDREGLRQLVFGLEPTSVYHKPLAEHLIEQGHLVVYATNEAIKKNRSLIDGRWDKNDTKDSANVADLVAQGKCHYYDLPQLRLRDLRSLLLFRKRLKKQLHSCRVRIRNNLVAQYFPELDRFWNNAEAENLAIVHWFLDPGSIRQLSCEQFIAKVTTHHGGLRQQRRLRHIWEAAGQSIGCRPGPAMALEAELVVEMLQSVQAQLGRVEHAIQKIAKGFEEYGYLKSIPGFGPYVSAMALAAIGNPHRFENRAQLIRLAGFDLSASRSGEKSNTAVPVISKKGKADLRYALYQAALVASSLTSHFRAYYSRLLDGRQREQGIRTKMLVKIAAKMLVIAWTLMKRKEPFNPAHIQA

SEQ ID NO: 104625 - protein, 449 aa, unidentified
MSRPQVIDDEQHERVHERVAAVDVAKDSGVVCTRTPHPSRPGARRSTVWTVKARMNAVRALGRQLRKDGIEIVTLESTSDYWRIWFFVLEACGLAVQLVNAAQARNLPGRPKTDKLDAQWLARLTEMGLLRPGFVPPRAIRDLRDYTRARIRLVHERTRCWQRLEKLLEGALVKVSSVASKLTTVSAQDMIKAMIAGERDPQVLAGLARTRMRAKHDDLVQALDGMFDDHHGELAGLLLDQIAFLDGRIAQLGARAAELTAAMPEAWGVNRDGTTGPHAGATPDAPVLNAVARLAEIPGLSPDLARAIIAETGLDMSRFPTAAHLVSWAGLCPSARQSGPRTRAGKKGQGDTWLRGSLGQAAIGAARTATFLGERYGRIARRRGKAKAQVAVARSILVIIWHLLKNPEARFTDLGYGYYQARTDTDRRLRNHIRQIQALGFEVTLTKNP

SEQ ID NO: 104626 - protein, 400 aa, unidentified
MAEQLAHLWVGIDAGKTHHWLAAVDEVGATVWSKKVPNDESAILTALGEIFALSDHVDWAVDIAGTASALLLALLGAQGQQAVYVPGRTVNRMSGSYRGEAKTDARDAYVIADTARLRRDFTSINAPAQLAADLALLTAHRTDLIADRVRMLNRLRDMLTGIFPALERAFDYADHKGALILLTRHQTPAAIRRHGQARLTAWLKGRKVRNPDAVAATALQAAGTQHATLPGQEVAAGIVADIASQILALDDRLKHVDEQIRRTFRTHPQAHIIESLPGMGPILGAEFIVAAGDLSAYADAGHLASAAGLVPVPRDSGRRTGNLHRPKRYSRRLRRVFYLSAQTSIIREGPNRDYYLKKRSEGCKHIQAVIALARRRVDVLWALLRDGRPFTLHPPIAQAA

SEQ ID NO: 104627 - protein, 423 aa, unidentified
MAYRIAGIDVHKKKLAVVVADVEVDDAYQFERRWFASNPEQLQRLAEWLLEQQVEEVVMESTAQYWKPLWSALERYWKPGCQNREGAGKMSGTLHLAQALSNRGRRGRKKDFPDAERLVKRLISQELTLSFVPDTEQRLWRTLTRTRYQRTRDKVRLQNQLEALLEEAHIKLSSLVSDLLGVSARRMLHGLAEGETDPASLAALAHQGLRATPAELRDALGACTELNPVYRRLVRLALDDLQLIEQQIGKLDQETASLLQQHQDAVQRLAEVPGLGVDSAQQIIAEVGAKAATFPSAKNLISWVGACPGDDETAGVNRSKRSPKGNRQMRRILNQAANAAVKHKGSIFEIVYRRFVPRLGHNKTIGTISHRLCQLIWIILHNGVRYEERGPSVCEKAKRARTSRMIRTLRNLGYRVEPAAVPA

SEQ ID NO: 104628 - protein, 370 aa, unidentified
MLDTTTFVGLDVHARSIKAVSLDVMTGEVRCATFGYDAGAVAEWVRSVDPKARCVYESGVTGFDLQKRLSGLGVDCVVGAVSKMIKPSADRRRKNDRNDAEFLARMLSVGNVVEVWVPDDECEAARDLTRALEDARDDLSRSKQRLSKFLLRHGLAFDERTPTGRRKGNWTRAHWSWIESIRFAEGADNDVLAYYVDAVRRAAEEKARLEGLVEAEARKPRWRRRVDSLRCLKGVDTATAADLVFEAGEFSRFRNARSFAAWVGLTPSEHSSGESDRRGAITKAGNKHLRKALVEAAWHYLTCSGRPKDLARGQAPDRVARRHAAKGVRRLVERREALLARGVHNNKANVATARELACWVWAVGLMAEEA

SEQ ID NO: 104629 - protein, 482 aa, unidentified
MKKKTIFQNQSQEILTLFEMAQDRSKVMCIPIDYAKKDHVAMFCNGNGRIIRKPFSIKNSPEGKDYLIGQVKKSCRHHGIKPQHVFYGGEDCGAYADNFIAALRLENYLVAGVNALDAKKHRENVQASTDRLDLLGISKVLLNCRGNCSPAQSGIYWNLRAFVRERRKLVHIATGVRNRIHNIVDRIFPGFLNEKKSGIFPFSKGSLALMENRFSVNQIRRRRRSTLAKFLARNLVHHSDHCAEKLQQYTSQVLQPPTDRIATLQISLKQQVKLFNCLQESILHLNKEIAEHLAQTPGAVLTSIRGIGITLAAGVSAEIGDPNKQGSLSNLTSYAGIIPRVKQTGGVQGKTVVKKVGKRCNRILKDYIVQSANHIGLYGPDDLKMDYKRRDAQGQHADFGIARRYLRMAICLMRTEQTYLPKILRSSRSNMKERAEYYITSWPTFHSKWKRSGALDLAFDKDMLLGQWRNMIQELYGIELTL

SEQ ID NO: 104630 - protein, 347 aa, unidentified
MNEVSTIGLDIAKRVFQVHGVDASGQVVLRRQLRRGEVVKFFAKLPPCLVGLEACATAHYWGREIAALGHRVRLIPPTRVKPYVRWGKKNDKVDAQACCEAVARPSMQFVPLKSVSGQAALMVHRARQLLVEQRTRLGNAIRAHMAELGIVARRGQAGLAALLAIIERPEDAQLPGEVRPVLAVLAEQWRGLGPQIAALERQILAGHRDNADSRRLATIPQFGPILSSALVATAGDARRFNSGRQFAAWIGLVPRQNSTGGKPRLGGITKAGDRYLRQLLVVAATGLVGRARANPDKHPWFARLLARMPARKATVALANKMARIAWALLAKQTAYRVPAPIAPAQAA

SEQ ID NO: 104631 - protein, 348 aa, unidentified
MYKQIAVDLAKSVYQVAESVRAGQVSQRKRLNREAFRRYIQEQAEPVEWLMEACGTAHYWGRFAQALGHKVTLLHARYVRPYRRRNKTDRNDCDAILEAARCSGIHPVPVKTHEQQQLQQLHGLRETWKKSRTQRINLLRGIFREMGLEAPAATAAFLRSAHELVEQPEVVALRGQLQIVLAEINLYEQCMDECEQQLARWHADDAIVRKLDEVSGIGVLTASALKSAVGQPERFASGRQLSAWLGMTPREFSSGDRRKLGHISRQGNVYVRTLLIHGSRAALLAAQRLHRRAPERLTRLQRWAVETAARIGHNKAAVALANKLVRICWAVWCHERRFSGDWQSSKPA

SEQ ID NO: 104632 - protein, 412 aa, unidentified
MQTLIERGCGLDVHQATVVACLLMVRRDGKVQKQMRTFGTTTRELVGLREWLLSEGCTHVAMESTGVYWKPIYAILEGALEIVVANAQHIKKVPGRKTDVKDAEWIADLLCHGLLRSSFVPPKPIRELRDLMRYRRKLVESQAAERNRLLKVLETANIKLANVATDVFGMSGRLMLRALIAGKATPQEMAELAKGLLRKKIPELELALEGKLEQHHRFLLELQLQRLEAAEKDLAVLEQRIRRMLEPYAAQLALLDEIPGVDWTLAAVIIAELGVDMSVFGNVSQLASWAGVCPGNNESAGKRKSSRIPSGNVYLKSGLVEAANAAARAKGTYLRDKFFRLKARRGYKRAVVAIAHKILVAIYHMLSQQVSYNDLGDLYLDKLNKNHLTRNLVHRLERLGYAVTLTLQQKAA

SEQ ID NO: 104633 - protein, 449 aa, unidentified
MERYAGVDWASEKHDVLVQDSVGAEVLAATFCHDERGLSALCATLVRLRVALVAIERPDGLLIERLLDAGLRVMAIHPNQVAAARPRFRTSGGKSDGFDAFVLCELARTDSHRFRVLVADSDKTKALRALSRAREDLVQTRVALANQLRAELERFWPAAATIFAEIDSPIGLAFLARYPSPSDARGLGEKRLAAFLARNAYCGRKTPAQLLAKLQVAPHGRAGDAELEARRAIVLAMVAALKPIVNKISELTREIAHRVRTHPDGHVFLSLFRDPKSVVCAAALLAEIGDCRARYATAEALAADAGMSPVAVESGKRKVACFRRGCDHRLRSALATLADATRHWHPWAADRYATARARGQNHQRAIRTLGRAWCRVLWRCWQDNVAYDPAQHRGLQQHIAVTIPDTSRPRLDLAATQRMAGATVTEPAARSAERKALDGKPTSATQPEG

SEQ ID NO: 104634 - protein, 353 aa, unidentified
MNSLTDLREVVDVVIGVDTHVHTHSAAVVDAATGGVLDEITVEATAEGYSELVEFANNHPMLRAWAIEGTGGHGAGLSRHLLEMSEIVIELDRPKRAARRNGAKSDPLDAIRAAREAMARPRLGTPRTGGERQALSVLLAARRSAINASTEAQQQVFSLVIASPEPIRVRFRGQKLAAMLNTAANLRVHASWDIETTSTVVALRTLARRAHAMLKEARELQKAIVAIIRSWRPDLLEEFGVGPIVAATVLCAWSHPGRIHSEAAFAMLAGVAPIPANSGQVTTRYRLNRYGDRQLNNALHTVVQSRIQYQPATRDYVARRTAEGKTGREIKRCLARYVARDLYRLLENTATAA

SEQ ID NO: 104635 - protein, 308 aa, unidentified
MNSVYHTELSSLEETRCQFNGGKADIKLGIDVHQDFYVVVMQQDGTNPKPPQRFQKAAFLHWAAKLKRGGAEVHAVYEACGFGFTLQRQLSALGIHCYVVCPQKLDERNKRIKTDGLDAKALCLKLDRFVEGNRDALALVRVPSEKEEQLRAVHRQREQLVKVRKQLEAQGRSLMVNHGLEPVQQWWKERAFSKLPVPEWMKELLGNTQPILMALEQKIAALTLQLQSAATAEQPRGLGRMTSVLIDREIGDWHRFSNRRQIASYTGLCPGEYSSGNTRLQSCVTKHGNPRLRAALVELAWRLVRFQP

SEQ ID NO: 104636 - protein, 319 aa, unidentified
MDVLGIDVGKRELHAMLLQGKRTASKSVTNSQTGIDQLQAWLKNRKADHVHACLEATGGWSEEVAIALVEAGHVVSLVNPSRVKAFAQSEMLRTKTDRIDAGLIARFCLLHQPEPWTPPAPEIRVLQGLVRRQQSLIEMRVEEENRKGAPLVPAPVLASIEATLDHIERELQRVEHEIEKLFGDFPTLRRQRELLITIPGIAETTAARILGEMPNITGFRDVKAVAAYAGLSPRHYQSGSIEYRSRLVKTGNAQLRRALFFPAISAMRHNPRIRALAERLRSRGKAKMTIVAAAMRKLLTIAYGVLKSGEPFKSLPATP

SEQ ID NO: 104637 - protein, 391 aa, unidentified
MIYIGIDVAKDKHDCFITNSDSEVLFKAFTIFNNLDGFNDLYQKIESVMDDVTKVKVGLEATGHYSYNLLGYLIDKGLPTYVINPLHTNLYRKSLSLRQTKTDKVDARTIASMLMSDVNLKSYSDTFYHNEELKSLTRYRFDKVKERAKLKTSVSRLVCILFPELEKLVPTLHMASVYALLSEFPSAKHVATAHLTRLTNLLSESSKGRYGKDTAITFRDAARASIGSNMPAKSLELKHTIKLIQELDSEIDEIENEIKIIMDEINSPILSIPGINYRMGAMIIAEIGDFNRFDSPDKILAYAGFSPSTYQSGQLDGAYAHMEKRGSRYLRYALYNATKYVCHWDPTFAAYLAKKRAEGKHYNVAISHAVKKLVRVIYHLEKTKQQYIKAA

SEQ ID NO: 104638 - protein, 355 aa, unidentified
MHAERTSVGLDIHARSVAAAAIDGVTGELRRARLTPSHDHILSWIEQLDGPVAVAYEAGPTGFGLYRALSAAGIGCVVAAPSKLQRPSGDRVKTDAKDAVHLARLLRLGEITPVTVPTVAQEAARDLVRAREDCRGDLMRARHRLSKLLLRHGQVYSGGAAWTGPHDRWLRKQRFTNPATMAAFESDYETVQVVTARRDRLDAAIAAMAVDSEFTPIVYRLGCLRGIATLTAFALAVEIGDWHRFTGNSIGSFVGLVPAEHSSGASRVQGSITKTGNTHARRLLVEAAWHYRRPPRVGSTIERRQQGQPAAAIAIAWRAQQRLHRLWRLEHVIQTPPHEALPDGRPVPRDLWEVP

SEQ ID NO: 104639 - protein, 455 aa, unidentified
MPRKKGKPKSDRAMSMVHPNAAAIDVGATLLMAAVRADRTPEPVRSFGTFTTDLHRLVEWFAECGVETVAMESTSVYWIPIYELLDARGFAVFLVNARDAKHVPGRKTDVSDAQWLQRLHSYGLLRASFRPKGQFTALRAYVRQRERLLEYAASHIQHMQKALTEMNLQLHHVVADITGATGLRIIRAILSGEHDPKVLAGLRDYRCHATVETIEKALTGSYRAEHLFALEQALALYDAYHEKVSACDARIEAVMKDLSIGRGHDTGALTPSRRRTDQVNGLAFDVRSALFALLGKDITKIDGFGPYLSLKLVAECGDDLSAWPSAKHFTSWLGLAPNNKISGGKVLSARTKRSGSRAAALLRLAAVTLGRTDTALGAFYRRLSARIGKAKAVTATARKIAVLFYNAVRHGMEYVDQGASFYETQYRKRVVDNLHRRAKAFGFVLQSVEPGGAVS

SEQ ID NO: 104640 - protein, 337 aa, unidentified
MSVYVGIDVHRKRSQVAVVTEDGTVQLNKNTVNGTEPLLRLIGDLPPGTPVAFEAAFGWGWLVQLLEDYGFDPHLVHPLRCKAIASARLKNDKVDAAILAQLLRADLLPEAWIAPAEVRQLRALLRHRASLVRLGTQQRNRIHAVAADHGYDRSASYWTGPGRGWLAELDLPAASREIVTDCLAVIDGLAPVIDRIDAQLRLHAKADPRVKVLTTLPGVGQFTALVMVAEIGDISRFGSARKLASWAGLTPTVRGSDLTVRHGHIPGQGSAWLRWVLNQAAQTAKRSPEFAASYAAIAKRRGKKIATIAIARKLLTRAYHLLADMQATDASTPLQRP

SEQ ID NO: 104641 - protein, 357 aa, unidentified
MSEGTWVGLDVHARKVVAGVLDARSGELGMLRVPPGSEEIVAWLAGFPGPVRVAYEAGPTGYGLARACAAAGIACTVAAPSKIPRASGDRVKTDRRDAERLARLLRLGELVPVRVPEPHEEAARDLVRAREDARGDLMRARHRLSKLLLRHGLVYDATAWTLAHDGWLRRQRFVSKPLALTFDECYGTVLQAKTRRDALDVAIVELAMEPPFTEIVGRLCCLRGVSTLTAFGLTVELGDWGRFRPQSLGPFLGLTPSEDSSGERRSLGAITKTGNTHARRLLVEAAWHQRRPLRVSATLERRRQGQPAAVRARADQSARRLHARWHALEGRGKRRTIVAVAVARELAAHCWALATME

SEQ ID NO: 104642 - protein, 348 aa, unidentified
MRFYTQQHRYTCGIDLHARSLYLCILDDTGQICVHKNSKATPEALLKLIAAYQDDLIIGVECMFSWYWIADFCEDHGIEFVLGHALYMKAIHGGKARNDKIDSEKIARLLKGGMFPYAYVYPRGMRAHRDLMRRRIKLARDRGDLMAHIKNTLSQYNLPAHPENLRYAKHRKAMYAAFPDPSVQRSIDLDLARIEFYDGQLGKLEWYLKKTAKSVDSNTMIRLQSVHGIGDILSLVILYEVHDIERFPRVQDFVSYCRLVKCSRESAGKKHGTGGARIGNPYLRWAFGEAAALFLRGNPAAQRWLEKKTRKHNKAKAMTILAHKLGRAVYFMLKRKTLFDQDRFLAAS

SEQ ID NO: 104643 - protein, 387 aa, unidentified
MSEAFDPRKSTTAFDQASTLVVVVELSGKSWRVGANAPGVSRRPLRTVAARDIGAVLEAIERWKGEANKVGCEVGRVVVGYEAGLDGFWIARALRAHGVEVYVMHPAGISVERRGRRAKTDRIDVDILLRTLLGWLRGEPRHCTMAPIPSEAEEDMREPGRQREALTAARLKVENQMRSLLARFGVADFRPRLKKAAELLTRLRTFDGRPLPPNTMASLERLLAQHRLLSKQLKGIETAREQVVAVADPDRLQRMIQLLAGVVGVGVETATTLVYEVFSRRFRDRRALAAFVGMTGTPYDSGGSKREQGLSKNGNPRVRRILTQLMWRWTIFQPQSALTRWFVARTGGAKGRIKKIMAVALARKLLVALWRYVETGVVPEGVRLAAA

SEQ ID NO: 104644 - protein, 391 aa, unidentified
MDQAWAGVDAGKEFHWAHVLDPSGTELLSRRVENDEADILRLIDEALSLAEEVVWAVDQPGGGAALLLALLWEGDQKVLYVPGISVDRARQTYRGESKTDARDARVIADQSRMRSDLGELAPGEQELSELRLLLGRRRDLITDRSRVIARLREMLLSLFPALERALDVNSKGPLILLTHYQTPTQLRRAGHRRVAAYLRNRSVKGSDKVASKALRAAGSQSVVLPAQEVASRIVAQLAAEVLTLKERIESIDEEIGERFFARPEARILASLPGMGPILGAEFLVCVGDILAFESADRLAAYAGLVPAARDSGKRVGNRRRTRGGNKALKRIFYQSAFASLRGCAQSRAFYDRKRAEGKGHTQAVVALARRRVNVVWAMLRDGTEFEERSAA

SEQ ID NO: 104645 - protein, 400 aa, unidentified
MTHPQSCPVVTPTRIGAGCRGRPLTQKRKDTATVTIVAHTHPFVIGVDTHARNHALSILGMPHGEVIDDGEFSTTSAGIARAIEWVGRRTGGDLEVLWVIECSATYGAQLARSVTAAGYQVVEAARMNAADNRGVGKSDPMDARRIAASVLALRADQLRYLRKDDGPRAGLRVLLAARDHMTSERTATINALIALLRILDLGIDARRPLTGKQVIEVSRWRSRAEAVEVGIARAEAVRLARRVVDLDDELAQNIRTTTVLLRKSAARVLLDKPGIGPVTAAVALAAWSHDGRLHSEAAFASLAGVSPIPASSGNTVRHRLNRGGDRRLNKALHMAVIVRMTHDAETRAYVDRRLAEGLTKREIRRILKRYLARQIHRALTAASRADHLPINSTPATSFPT

SEQ ID NO: 104646 - protein, 343 aa, unidentified
MQAVKTIGLDIAKSGFQVHGVDADGQVVFRRQLKRRNVLAFFQKVPTCLVGMEACATSHHWSRELQALGHTVRLMPPAYVKPYVKRQKNDATDAEAICEAVTRANMRFVATKTPEQQSGLMLHRTRHLFIRQQTAVINAIRAHLAEFGIVAPVGRNGLEQLLHVVADAGDKRLPEVARTCLMALGTQLRALKAKLLELDRMITAWHRSNETSKRLDAIPGVGHVLATALVASIADPKVFRSGRDFSAWIGLVPKQHSSGGKDRLGSISKQGDRYLRSLFTAGALAVIRYAKIYGTKHRPWLTALLARRPTKVAAIALANKLARMAWAMMSRGERYKEPVALAA

SEQ ID NO: 104647 - protein, 420 aa, unidentified
MNKEVRAWIGIDWADEKHDVSLYEVATGRQERLEVKQSPEALAEWIGQLRTRYGNAGQVAVVLEQGRGALLNVLMGCEFLVLYVINPKSLSCYREAFYGSGAKSDPVDAELMREMVRQNPERFRAWHPDDVLTRSLRLMTEGRRDLVNQATAVTNQLTALLKGYYPQALRWIGALDTHWACDFLDQWPTLQALQSSSRRQILRFYEKHPRHHLDLEQQIQQFHQTLPLTGDEAVLQYSTLMVQALIPQLRALLDSIDEFDRKIAEVFRKHPDRPIFESFPGAGAALAPRLTAAFGADRDRYAAASEMQQFSGIAPVTEKSGKQHWVHWRMACPKFIRQTFHEFADHSRRWSAWAKAYYQLQIERGKKHNAAIRALAYKWIRILFRCWKQRVPYNEQLYLASLLKHQSALLSKSAPAVEKL

SEQ ID NO: 104648 - protein, 428 aa, unidentified
MKYNTQNAKIKSITEKTLIVGIDVGSETHFARAFDWRNYEYSKKPLEFSNTQAGFATFKAWMEDIAEKYGKDVVIPGMEPTGHYWFNLGAYLQDNGMKPVHVNPHHVKKSKELDDNNPNKNDRKDPKTIAALVNEGRFSYPYIPTGIYAEIRSLSNLRLQTQEEITRIKNRIARWFSIYFPEIKDVYKKPDSVSGLMVLKVAPLPQDIVKLGVDGINQIWRDAKLRAAGSKRAKTLITAAEHSIGSQEAPDSARIELKNLLNDYEVYCKREEELMGMIEEKLSGIPYIDKLLEIKGIGIKTVSGFLAEVGDITRFDDPKQLQKLAGYAIVECSSGKHKGESHISYRGRKRLRYVLYEAAISLIARNEEFKEIHRYYRTRKENPLKKMQSVIAVACKALRIFYTILAKGVTYDGVKMLQDIKRPQVTVA

SEQ ID NO: 104649 - protein, 423 aa, unidentified
MMKLKYSICCGLDVHKNIIVATIVTTNKEGISEYTRKSFSTINSDIQKFHDWLIENNCYHVCMESTGKYWIPIFNYLEKNIDVCLTHPKYVKAIKGKKTDKKDSKWIADLYKFDLVRCSFIPPKDFRQLRELARYRFKLVCMKSSEKNRIQNCMTVSNIGIASVLKDTFCKTATEIMSYLLEHTSDTIDEKAVRRLIKKGTKATSNEIIEAIKGYNIETDQAKKLELARNHLDYLENMITQTEVELYVRIKPYSEFVEFVSTMPGMTELSTTIVLDETGVNMEIFDDAGHLCSWCGLAPANNESAGKKKSVRITKAGEYLKPVMVQCALSAVRSKKQPYFAVKYNAIKKRRGHKKAIIATARMMMVCIYHMISEKKPFAPTDYEELMDSREQNKRVVLNEENALAFLAAQGYDTSQLVKCNDN

SEQ ID NO: 104650 - protein, 339 aa, unidentified
MDRFDHYVAVDWAQRNMAIARMTARSGKITTVDVPASVKDLQVYLGELHGKVALTLEESTASQWLYTELKSHVHELIVCDPYRNHLLKEGAKTDKADAEKLVRLLRGGLLKPVFHSGDEFIYMRKLVSGYIDLVKSGVRLKNQRAALFRANGIAPGKGELEQPAELFVVDGLERGIASYQEEKLRYESEFSRLCKKHKMLRLLVSIPGIAEIGAMKVASRIVDPHRFPTKGAFLSYCGLIRLDQISGGRSYGTRTSRHCPMLKEVFKTAALTATVDGVNHSFRHFYQYLMREKGYPEHQARHAVARRVAVLTWGVIKSGKPFKPNPEWRPPSQAKRTRS

SEQ ID NO: 104651 - protein, 343 aa, unidentified
MQTIATIGLDIAKSVFQVHGVDAAGQVVVRRQLKRRQVLAFFAKLPPCLIGIEACASSHYWARELQALGHTVRLIPPAYVKPYVKRQKNDAADAEAICEAVTRPNMRFVAIKTIEQQGCLVLHRTRHLLVRQQTATINSIRAYLAEFGIVAPVGRRGVEQLLEVIADFNDARLPEVARACVAALGVQLRQLKAQILELDRRITAWHRSSETSRRLNQIPGVGPLLATALVASITDPKVFRSARDFSAWIGLVPKQNSSGGKDKLGNISKRGDRYLRSLFTTGALAVIRYAKIHGTKHRPWLVALLARRPTKVAAIALANKLARIAWALMTKGSSYRQPAALRV

SEQ ID NO: 104652 - protein, 304 aa, unidentified
MNGIGIDVSKRQLDVGTTDGEILQVSNTAAGFAELEVWLKEHPADQIVLEATGGYEQRVLDFLHKAGRPVVRANALRARRLAQGMGHVAKTDRLDAYALAKMAVLVKLHAYQPLEPWQQRMREFVRARRQAMQALTVARQQQEMVGDRELRRLLQANITRLQTLVARLGTQIGEQVAQQPRLAVLKSMKGVGPALQAVLASYLPELGRISGKAIASLVGVAPMSHDSGTMRGKRSIHGGRAEIRQVLYMAAMSAMRHEPRLRDFYRSLRARGKEGKVAIVAVMRKMLVILNARVRDAESGPIPA

SEQ ID NO: 104653 - protein, 357 aa, unidentified
MSIMVGIDMHVKELVCEIGYGTEEPKRVRYANTYEGHMELLKTIGKLKESTGREDVLVCYEASGLGYVLYDRIEKAGYRCEVLAPTEMQRSASGYKRKSDAKDAHYIYETIRGHVLAGNRLCHIWVADRQLRDDREVMRLRYDITQQITRVKIQIRTLLRKNGIKSNDGQRSWTKQFCQWLLSITEVQGSGFGFTMETLLERLRFLETQQARADRKIKQLSEQPRYRESYRRLIGIYGVGMITAMSFLTELGDLSRFPNRRALGAYLGLVPASYESGETSDRKGRITRQGPYRVRGILNQALWMHLRYNGELKGVYERIVERNPRHKKKAVVACMRRLAILMWHTAQGGEERERQVA

SEQ ID NO: 104654 - protein, 412 aa, unidentified
MTVMIGVDPHKGSHTAVAVDETEQALSQFKVSSGPAQLERLMAWAERFPERSWAVENATGLGYLLAQQLVGAGERVVDVQPKLAARVRLLDSQSVNKNDPHDARSVAIAALRSAAPVEVRAEDHSAVARLWSKRQRDLARARNKVACRLHSLVCELVAGGVPDEIYATKVAKLLASVQPDGAVAAARLELAGELLEDMRRLDEQIKESRRRLAAVVKASRTSTTKIFGVGPVVAATAIGLTGDVTRFPNRDHFASFNGTAPIDVSSGGKKVYRLSRRGSRHLNHAIHMAAVTQIRHRHSEGRAYYERKVAEGKGHKEALRCLKRRISDALYACLVEDAKRDGRLLERGPGGQSGNGSVSSAAGSHPETPALRTSHSRTRRQATTARRTASPAKARARAKSVAATRKATRKVS

SEQ ID NO: 104655 - protein, 321 aa, unidentified
MSWIGIDVAKHSFTAAQRSAQRFAIEIFPMSVAGWRRFCQWAPEDSFQVCLEATGPYWLRLAQWLEQAAIPYSVANPRKVRRFAQASEQRSKTDPIDATILVRFAETFALAPVSPETGPSRMLRALSRRILQLQIELNRERDRLEKSQADPATPASVLSSYAVLHNELQRLIDDLEHQAKRLILQHSTLEPAYQLLLSIPGIGEKTARTLMAEYGQRLLSASPKQMTRFAGLDVVLYESGSSVRKKPRISKQGNWRVRRALYMAALSAIRYNPTLAPYYQRKRQQGLQPKQALVAVMRRLLHLVYGVLKHQQPYDPDYKMT

SEQ ID NO: 104656 - protein, 400 aa, unidentified
MELSQYHTQKGDLMIYVGIDIAKLNHFASAISSDGEIMLQPFKFTNDYDGFHLLLHKLDSFDPDSLIIGLESTAHYGNNLLEFLVKHNYKVCVINPIQTSAMRKNNIRKTKTDKVDTYIIAKTLMMDPHRFFSQHDLSIMHLKELGRFRMKLIKKRTQGKIQLMSYVDQAFPELQYFFKSGIHQKSVYAVLKEAPTTKDIASMHLTHLSHLLEVSSHGHFKKDTATELRILAQKSVGCNDSSISTQITQTIELIELLDSQVHDVESEMELIVNSLASIIMTIPGIGFINGGMILGEIGDIMRFSSPSKVLAFAGLDPTVYQSGNFNASHTKMSKRGSCPLRYALINAAHNVVKNNKTFKDYYDQKISEGKSHYNALGHCAGKLVRIIYKMLTDNVSFNLD

SEQ ID NO: 104657 - protein, 397 aa, unidentified
MKGFCISLDVSKGSSFYQGFKGLDEPITKPKKIEHNLEGFKELLKLKEIIRKEYDSDCIVIFESTGIYHKALQTYLDEHDFKYTIISPLLSAKVRKSDIRGTKTDAKDCASIAKVFYLKDLRIYSKIDEIYDDLKEKSRYYDFLVDEMKRWKIEFRRLLDIIYPGFDKIFENLYIDYVQALLLEYPHPEIIRKKRLDTIAKFIEKHTCHKESFSLKQAQALKDYAENCASGCSYKSYLVSQFDTVIHTLNSQIKHLETTLDEIIEIAKKLPNYEIIRSIPGIADNLASRILAEIGNIDRFDNASQLVAYAGIDPQIYQSGQTSGLHFKISKKGNKKLRCLLYLAVTCMIKTNRDTQIVEFYKRKKADGLAARSALVASMNKLLRIIHSLCKNGCLFK

SEQ ID NO: 104658 - protein, 355 aa, unidentified
MVTETQTLVYGGIDTHTDTHHVAVVDHLGTPLEDIQVPATSSGYRAAVRFLNRWPQLAALGVECTGSYGAGVSRAAREAGLNVVEVNRPNRFDRRMQGKTDTFDAYAAAEAVLSGRANAAPKGGDGLVESLRVLRTSRTSALSARTATTNQIKAMLISGPEQLRSRYRGLSNMKLMTSLAASRPARIPVSAEEATAYSMRLLARRWKHLTEQIEDLSLHMERLLNDHTPELMEVFGVGRDTAAQLLITAGDNPDRLRSEAAFAALTGACPTPASSGKTNRHRLNRAGDRQANSALYHVVIVRMRYDQATRDYVERRTAEGKTKMEIIRCLKRYLVRQLYPVICRSLAGRTLTPNA

SEQ ID NO: 104659 - protein, 374 aa, unidentified
MSIVMGVDQHRAQITAEWIDVVSGEISRARVRPADRAGVRRFLERFAGQQLEVALEATTGWRFFVEELRAVGAVVHLAEPAETAARRGNKQRAKTDRADARHHRELLLAGRLPESWIPPDHILDLRAQVRLRHTLIEQHSEWQQRIQAVLYHHGCPQRRQLMKGDGRDWLAALTLPQTASQQLTVSLTLIDGLDAQLAPLTKELRDYGRRQTGCKALIDQYYGIGEMCAVTILAELGDCRRFDNSRDAVRYGGMDITVYQSDRHRAPGRLSRQGPPALRWALYEAAQAARRPGSPDRAYYEQAAERLGGNRACLALARKLLKRCYHTLRELGEDALAPPADERPGSGAARRAASGGARRTERPATHEPADALAA

SEQ ID NO: 104660 - protein, 313 aa, unidentified
MKKTICGVDVSKARLDVCIEPGHRLASFNYDTAGIAELAKFCREHAVDLVVMEASGGYERRAFIELWEQDISCALTNPRSVRRYAEAMGILEKTDRIDSSVIARFADAKGLAPTPLPSQAQQRLKALVARLRQVTDDLTVQKQRRSSMFDNTEMQASVDEVIALLKRQSRSLEGEIASMIDDDPLWAKLADTWRELKGVAGRTVAWLHADLPEIGTLSNKAIAKLTGLAPIANDSGKRKGKRPTRGGRAGVRSILFLVAAIAARYDRSLGEFRDRLLKAGKEKMVVRIALARKLLVRLNAKAREARAQYAIAT

SEQ ID NO: 104661 - protein, 372 aa, unidentified
MEERTKIHVGLDVHQDSITVAEAEPGREKARLIGKVTHDVPKLLKVLAKIGAVEELHIVYEAGPTGYGLQRALTKRGYACEVIAPSKTPRQAGNRVKTDARDSLELAEYSRAGKLVAVWIPDPADEAIRDLSRAREDAVNSRRQVRQQLKGFLLRHDRRYGGKTSWCGAHDHWLARQSFEAAAAQTAFTEYWQAVKSADERVERLTKALQGSIAGWRFESVVNALQALRGVAAITAIGLLAEIGDLNRFEHPRKLMGYLGLVPSEHSSGERTSRGSITKTGNGHARRLLVEAAWNYRFKARIGKEINARQEGLSEAVRTMAWKGQLRLTERYAALQKRGVQVNKVCVAVARELAGFVWAIGMQAQREKGAAA

SEQ ID NO: 104662 - protein, 403 aa, unidentified
MALDTPTQTADYLPTTPQDSPPRPPIPSTPVLFMAIELASKQWKIAFSDGGTKEIVRELKHERSIAKLREQLTVVIAQMKRRFGLADDVVVISCMEAGRDGFWPHRLLSEMGLRNVVIDPASVRVNRRSRRAKTDRLDAVMMLADLVRYHGGDTQVWSAVRAPSPDQEDARRLHREIERAKEERTEQSQRIQSILATLGSTATVGDVLKRLDRLVQWDGSTIPPGVRAQLQRAADRYRLVNLQILEMQKEQRAALEAETKTKELRAVECLTWLRGVGLDSAWLLVFEFFSWRKFENRRQVAGAAGLGGTPFNTGQSTREQGISKAGNPMVRTRMVELAWLWLRYQPEHKLSRWFQEKFASAGARRKRAGIVALARRLLIVFWHFAEHGVVPDGAVVRVAKEAA

SEQ ID NO: 104663 - protein, 348 aa, unidentified
MVLIGSDFHPSWQQVSWLDRETGETGDQKLVHEAGSVEKFYRQFPAGSRIGMEATGNCQWFLELMAKLGHEVLVGDAAKIRASDARQQKHDKRDARLLVQLLAEDRFPRIWVPSREEKDLRQLLIHRYKLVRIRAQVKNGLQHLALNQGLQRKKRLWSEAGQKALCELPLAPWASRRREDLLKMRSELDAKIDLLDQAVMEAAEKNEKAKLLMTQPGVGPITSMAFVLTMGDVKRFPRGKQVASYLGLIPREYSSGGKQRLGSISKQGNSFLRMLLVEAAQGAARYDAGMRNEYLHRCHSKPKGVAKVAAARKLAIRLYWMLRSNMKYPEVVHVESSSRVALVVRHGG

SEQ ID NO: 104664 - protein, 315 aa, unidentified
MTTSSEKFVGIDVAKEKLDIAVLGETKASQVTNDEKGIASLIGKMIALRPDLIVVEATGGYQRAVVLGLYEAGLPVAVVNPARVRQYARACGLLAKTDKLDAFNLAEFGKQVKPRQFEAKSEAGRYLSALLVRRRQVEEMLKAEKSRLRTVHADMRTSLERIIEVLKEEIKHLEKDLDRFMKEHEDWLEQEQILCSAKGVGRVTAATLLAELPELGKLDRKKIAALVGLAPMNSDSGKKRGYRKTKGGRIEVRSALYMSTLVATRYNPLIKAQYQELLRRGKVKKVALTACMRKFLTILNAMMRDRVPFQQTVLA

SEQ ID NO: 104665 - protein, 356 aa, unidentified
MTTCDERTVVGGVDCHSQVHHAAALDGTGRRLGERAFPATQPGYEQLLVWLRGYGPVTTVGVESTGSYGAGLTRYLLQSGVRVVEINQPHAHLRQRRGKTDAIDAEAAARKVLSGEATSVPKETTGAVEAIRQLRLTRRSAVKARAGALRQLGDLIVTAPAKLRERLSRKTLPGQAAICARFRPDRQRLADPVQAAKLALRTLARRIAALDAEIAQLDAHLEQLVRATAPRTIALLRIGPQHAGQLLVTAGQNITRLHGEAAFAHLCGADPIPASSGKTTRHRLNPGGDRAANSALHMIAVVRLRYCERTQKYAKRRIAEGRSKREILRCLKRYIAREVYRALCVDLAHLDMATAA

SEQ ID NO: 104666 - protein, 410 aa, unidentified
MEVLYSHCAGLDVHKDSVVACVRHMAEGKVTAPVKTFKTTTAELMLLSNWLSAEGVTHIVMEATGIYCKPVWHILSDGEFHLILANAAHVKNVPGRKTDVNDATWLADLMAHGLIRASFVPDEPTQQMRDLLRTRKQMVRERSSHVQRIQKTLEDANIKLDSVVTDILGLSGRRIIEALIAGQTMPQALATLAHRRIHASTDELEAALRGRLTKHHRFLLKLHLDQIDAFDAAIAAIDQEVNVNVEPFRGAIELLSSIPGIGNLAATVIVSEIGIDMSRFPADGHLISWAGLCPRNDESAGKRRSTKMKKGAPWLKTTLVQCAWAASRTKGSYLQAQYHRLRSRRGSKKAICAVAASMLTAAYHMLKNRTFYEDLGADHFDRREKGRQILRLVNRLQSLGYAVEITPRAA

SEQ ID NO: 104667 - protein, 408 aa, unidentified
MNAVGIDVSKGKSMVAALRPMGEVALLPQEFLHTEVGLEQMAYAIIALGEDTRVIMEATGRYHEPVAAALHEYGIYVCVLNPLFIKQSGGGSIRKVKTDKADAMKIAKYGLDNWVDLREYTPMDTVRQQLKLCSRQYNLYMKTVVSLQNNLISLTDKTFPGVNELFSSPERADGHQKWVDFVMTFYHCDCICRVSENAFAERYQKWCKRKGYHFSAEKAQDVYLGSCGHFTTLPKNDNTKLLITTAAQQLLAGKMTLAALRTEMTRLAKQLPEYDIVRAMYGVGETTAVQLMVEIGDVRRFPRRSSIVGFAGVDPAVDQSGKHSAKSVPTTKRGSPHLRKTLYQIVCTYLKKSPVDEPVYQFLDKKRSEGKPYFVYMTAAQNKFLRIYYARVKECLEAFDAQQDTSQR

SEQ ID NO: 104668 - protein, 368 aa, unidentified
MAKRSTFIGLDVHKESIAVALAESGRFGEVRADGTVGGDVEALDRVRRTLRASGRTLHFVYEAGPCGFTIYRHLTRRGEDCAVVSPSMTPRRAGDRVKTDRRDAVTLARLHRAGELRAIYVPNESDEALRDLVRAREDGVEVTREAKQRLKAFVLRHGLRYRGRAGWTIPYRRWLAGLTMPEPAPQIALQEYLATVDEAEQRVARLTDQLRHLVPTWRWAPVVDALQALRSVSFITATGLVAEIGDVRRFARAPELMAYLGLGPSERSSGPLTRRGRITKAGNPHARRLLAEAAWAYRSIPRIGRVMQQRQEHLSAPVRALAWKAQLRLCGRFRRLSARGKPRVVIATAIARELTGFVWAVAREVPAP

SEQ ID NO: 104669 - protein, 351 aa, unidentified
MSRKTEAGLACTIGIDTGKNTLHLVGLDAKGAVVLREKLARGRIAARLANVPPCLIGIEAGMATHYVARELLVLGHDVRQVPPSYAKPFRQGHKNDFRDAHAIAEAVQRPSTRCVPVKTDAQLELQALHRVRSRLIGGRTAAINQIRSFLLERGITVRQGLRFLRQQLPQVLATRTDVLSPRTIRIIEDLSSDWRRLDERIEHVTEEIELLASDSEACRQLMTVPGIGPIIASAMVAAIGNGAAFAKGRDFAAWLGLVPKQMSTGDRTILGRITKRGNRYLRTLFMQGARVVLLRPTNWAKHSFGPWIAAAAKRLHHNVLATALANKLARIAWTVLAQGRSYERRAVPGIV

SEQ ID NO: 104670 - protein, 347 aa, unidentified
MNSVGIDLHRKRSHVAVIDADGAEVLSRRIVNDPRTFLELLGEIDGESKIALEATYGWEWLADLLEEAGYELHLAHPLRTKAIAAARVKTDAVDARTLAHLLRTDLLPEAYIAPRELRELRDLLRHRVALTRIRSALKQRVGAILAKHGIARPYSNLFGPGGLRFLDELELREAPRRRLDGLLSLIADFDREIDATSREIDQRAEADPYVEVLCQIRGIGRYIAMLVIAEVGDIGRFPSARHLCAWAGLTPTVRSSDGRARLGHITGQGSPALRWALVEAAQHAGRGGGPLRDAYDRITKHRGKSVAKVAVARKILTLCFYGLRDGEIRCLTPRAKARTKRTVAVAP

SEQ ID NO: 104671 - protein, 339 aa, unidentified
MNKVSTVGLDIAKKVFQVHGVDAAGVVKVRRSLRRSQVVTWFAKLAPCLIGLEACATSHYWGRELRKLGHEVRLIPPAYAKAYVRRNKNDAADAAAICEAVSRPGMRFVAIKTEAQQAIGGVHKVRALLLKQRIMLINHLRGLMAEFGLVVATGPQHVGELLAILADPEEGGVAEPLRGALLGMTEVLRGLERRIEAIDRQVVAWGRSNTTYRHLITIPGYGPILASAVAALVTDPTTFRSGRDFSASLGLVPRQEGTGGKVKLGPISKRGNGYLRRLLVNGAMSVLGSKRARQNPWIAKLLASKPRKLAAVAVANKLARIGWAVMMRQEDFRTQPAAA

SEQ ID NO: 104672 - protein, 368 aa, unidentified
MKKLSVVGIDIAKQVFPLVGMDEHGTILVRKRLYRAQVMACIAPLPPTLMGMEACGGAHSWARRFRAHGHEVKLMAPQFVKPYVKANQNDLRDAEAIAEAVTRPTMRFVPITDVAQQDLQALHRVRERLRGRRTALVNAVHGLMHEYGMVIPKGVARFRHAVVEKLESEQDTLTPLSREMFGKLVEEFVALEEQLAYDQEQLEALATTHPECQRLTTIPGIGPVSATALVAAVSDASALKNGRQFAAWLGLVPRQHSTGGKERLLGISKRGDSYVRTLLIHGARVTLRWVGLTTDRRSQWMRQRLERRGKNRTAVAVANKNARIVWALLTSHQDYQPVQGERRGRAWESRCCCSPHGGRRPGDERCQA

SEQ ID NO: 104673 - protein, 410 aa, unidentified
MDLLRRELPASSLVVAVDPGKAFNRVWLTSGERGLIGEPVSLGVLRDGVEELERLIGASGVPGPPVIGLEATGALHRAWAAEIERRWPGSLRLFAPSETTAARAQLGSRRFKTDDRDCAALVWLLRQGAGRPAEPEVVEAMLGTVRHRAQLVDARQVLQQRLHDQLNMLCPGLSAPAGHGRALKLASPTGQAVLECAAAFAGRPASKRSLIARAPGRLSDATATFWAGRWQRVLDPPPDAELRAVRLGQDLRRWQQLSADIQFAEDQLTGLLSGSDGQILTTLPGVAVVRAAEFSAYTLPIDRWPTPEHLYSATGLAPASYQSSTLNRRGRISRQGLAEHRNALMGIAWGLSQRSQAFRVRDHELRARGFRPMQARVALARHACRLCWRLLQTQHPYDDQRYARSRRRGR

SEQ ID NO: 104674 - protein, 448 aa, unidentified
MPGSSSPSRRRRARLRVVNPRSAGIDIGSRFHVVAVPAELDDDPVRKFSSFTNDLKSIAEWLLAIDIKTVAMESTGIYWVPLYEILVRRGIEVFLVNARHAKNVPGRKTDISDSQWLQQLHSYGLVRASFQPDPCIAKLRAYFRQRDILVRYRSSHQQHMQKALMQMNLQLHHVVKDITGQTARRVIDAILSGERNPEKLATLRDRHCKETEATIAAALDGNYQEEHLFELKVAVEMFDAYSEKIRECELAGQVVLNELAGGDYVKPEKQASDCQIRSNGFSFNPQALITSLAGHDLLSLPGLGPATVITLISECGLDMSRWPSAKHFVSWLGLSPQNKISGGRVLSSRTRQGATRAGSSFWMAAVPISRTNTALGAFQRRLSARVGKGKALIATARKIAILYYKMLRYGMAFQEPGASAYQKASQERHVRGLERRAKALGYQLVSTG

SEQ ID NO: 104675 - protein, 432 aa, unidentified
MLDQVIIGVDPHKLSVTIEARDNREILRATGRFGTDTRSYHQLLKAARQWPERTWAVEGANGIGRPLAQRLLADGERVLDVPAKLAARARVFDTGQGRKTDATDAHAVVMVALRDKGLRELRIDPELMVLRMLCDRRDELSRARAQALNRMHRLFLELLPGGAPVKKSVSQYQVLLATVRPRDLAGKTRRRMAAEELDDLHRLDAKLKAMKAELKAAVQATGSHLMDIHGIGPASAARILADVGDIARFPDRGHFASWTGTAPIDASSGQHLRHRLSRAGNRRLNHVLYMAGIVQLRHDTPGRAYYRRKRAAGKTSMEAMRCLRRRLSDAVYRQLVTDAAARDAGPGGHSGATLSSSAAGLPPGTGTSDQPLPGPAPKTLPPPPEQLKTPAAPAAATSRQRARGVNVQRPTGRTTLTPTSAVAHSTAQGPRT

SEQ ID NO: 104676 - protein, 363 aa, unidentified
MTSITTTTGPVTGGVDTHGETHHAAVLDQVGRELGDREFPTTPSGYRALLAWLAGHGQLDRVGVEGTGAYGAALARHLRAGGVTVVEVDRPDRKARRASGKSDPLDAYAAARAALSRRATGTGKSRDGRVEAIRALRIARCSAVKARAAATNQLKSLLVSGPAELREQLRHLSTTVLITTCANLRPTSDLADPVQATKAALRRLARLHQNLSKEITEADVDLKNLVTAAAPCLLALRGVGIEVAGQLLTTAGDNPDRLRSEAAFAHLCGVAPVPASSGRTHRHRLNRGGGRAANNALYIVVLSRLCYDARTREYVDRRTKEGLSKPEIIRCLKRYVAREIFTLLTARTASEQSHQVLPMSTVA

SEQ ID NO: 104677 - protein, 446 aa, unidentified
MKKSFQMSIIHPHAAGVDIGAEFHVVAVPPDADAAPVRTFQSFTGDLHRMSDWLKTCHITTIAMESTGVYWLPAFEILEAAGFNVILVNARDAKNVPGRKTDVNDAQWLQKLHSFGLLRASFRPEHDISVLRSYLRQRERLTEYRAAHIQHMQKALMQMNVQLHHAVSDITGVTGLSIVRAIVSGERDPSVLIQYRDVRCKKTPEVLQQALTGNWQPEHLFALEQSVAFFDFYQEKIRECDDQIETSLLQLSTGTEEPEGVLPSARHRTKQPNQLSFDVRPLLWKITGADLTQIHGFGPYLALKFVAECGTDMNRWPDASHFTSWLCLSPGNKISGGKVLSSKTRRSSSRIAAALRLAATTIGRSDTALGAFYRRLSSRIGKAKAVTATARKLAILFYNALKYGQKYVDPGADYYEERYRNRVLDGLKRRAKSMGYFLQQDPELCV

SEQ ID NO: 104678 - protein, 316 aa, unidentified
MTGTPTYAGIDVAKDRLDVVLRPSGEYVEATNDERGIRSVVRRLRKGDVALAVLEATGGLEQPAAAALALAGVPVAVVNPRQVRDFAKATGKLGKTDRLDAAVLAHFAEAVRPEPRPLADEHARELSAVVLRRRQILAMTTAEANRARTAPKAVSKRIEAHLRWLRKELARVDGELKQVVEESLVWKERAALLMSVPGVGPTLSATLLAELPELEHLDRRRLAALVGVAPLNRDSGTLRGIRTVWGGRSGVRTTLYMATLCATRHNPAIREFYGCLVASGKPKKVALTACMRKLLTILAAILRNRTPWQPRLLPDS

SEQ ID NO: 104679 - protein, 402 aa, unidentified
MNCVGIDVSKGKSMIAVMRPFGEVVISPFEVQHTASELSELAKLLKSLDGETRVVMESTGNYHTPVAWLLHDAGLYVSVVNAMLVHDYGNNSLRRAKTDKKDTVKLANYGLDHWLTLPRYVPEEDTRLLLKTCYRQYQQYSKVQTMLKNNLISLLDAVFPEVNRLFNSSPRADGSEKWVDFVSTFWHCQCVSTLPLKSFSARYLKWCRKHGYYFSQEKAFEIHSKAQSCIGVMPRNETTKLLVQQAIAQLKATSAALAALKQEMQSLAASLPEYPVVMEMFGVGSTLGPQLMAEIGDVRRFHSKKALVAFAGIDAPPCQSGQMDIHSRSISKRGSAALRRTLFLVMGIYLQSAPLDEPVYQFMDKKRSEGKPYKVYMMASANKFLRIYYASVTAYLNTLARI

SEQ ID NO: 104680 - protein, 347 aa, unidentified
MKKIVKQVVGIDVAQKELVITLGRMQDDWMPELYARKSFENTKKGFTALVSWVGKLTVDGCQIRYVMEATGVYHESLAYFLDENGHGVTVVLPNKISNYFKTLEVKTITDKTAADAIALFGLEKKLNLWKKPKPIFKKIRQLTREREQLIQSRTIAKNQLHAEQSEAEPGKKTIERLKKQIAFFNKQEKEIKEELDALQQSEEQVNKTIKRISSITGVGKLTAATVLAETNGFELVRNKRQLSSYAGYDVREKQSGTSVNGSSRISKKGNKYLRKAMYMPALTAIRHDDRFKAVYARLIARHGIKMKAAVAVQRKLLEMIYTIYKANVPYDKNYLKKKGEKKHIEVE

SEQ ID NO: 104681 - protein, 358 aa, unidentified
MSTTMQDTTARAIWAGLDAAKDSFDAAVYLAVEPGQTIEPTDVPVRTFPRTHRGVEQFVRWADSLVAHCDTQHGPFVIRVAMEATGTYSLELAAWLVAVRPTLAPAIVNPARVRAFGRSLGVRNKTDVTDARTIARFGAERKPRPYEPPSDQLRQLRALSRERDTVVSILVAQRLHSSDPSPCAVVVSEQKRLIRNLEQSIARLEAAMTDLIEQHPPLRRDVELLQTIPGVGRITAIVILAELGDLRRFERSRQLGAFAGMSPQRHESGSSVRRQTHLCKQGNRRVRSALYMAAMAAIRSDNSLAQFYHHLVEQGKSNMAALGAVMRKQIVLARAILISGQPYQHDFIPVHERSKTCE

SEQ ID NO: 104682 - protein, 454 aa, unidentified
MNNNGFLGLDISKGYADLYVINSDKIPVEAAFRLYDVQDGHQRIEELIDKWFEKQSFETLYCGVESTGGYENNWINLLQELAIKRPLKIARLNAKGVKSLSDAALKRTITDSVSAENIAMYLFDFRHKIKWIDDPQSFKKYTDGRRHNTFIRMLKKQRIQISNQLEKLLYQELSPILTYCRHGAPGWLLNLLLKHSSVAAINKAGVKGLLKIKGITTEKAEAILNKTRESKHCTSAHISSVIKGTIKQMLHLDETIKEEKNKLIAEYSDSEEVKLLTSISGLGNQSAVEILIEIENIHRFEDAKKLSAYFGLHPVFKQSGDGKWGNHMSKKGRSEIRAVLFMSSLTAIRYSDLFKNIYSNARAKGKNHFNAMGVVMHKLLRVIYGVLKNKIAFSQAIDAKNVENAELKQQAEKEKSKEQKREQVQKLERYNRAELDHSPISKRHAKKRKVLQVT

SEQ ID NO: 104683 - protein, 391 aa, unidentified
MIYVGIDVAKDKHDCFITNSDGKVLFPVFTIQNNRDGFDVLFSRIQSSSSDVSNIKVGLEATGHYSYNLLGYLIDKGLHTFVINPLHTNLYRKSLSLRKTKTDKVDARTIALMLMSDVNLKSYSDTSYHNEELKSLTRYRFRKVQERAQLRQSVSRLVTILFPELEKLVPSLHIASIYALLSEFPSAGTIASCHLTHLTKRLENASKGRYSREKAIEIRNAARASIGSNMPAKSLELKHTLRLIGELDSEISEIESEIKRIMDEIHSPILTIPGIGYRMGAMILAEIGDFSRFDSPDKILADAGASPSTYQSGKMESSYSHMEKRGSRYLRFALINATKYVCQWDETFGAYLQKKISEGKHYNVAITHAAKKLVRLIYAMEKSGKPYIKTA

SEQ ID NO: 104684 - protein, 412 aa, unidentified
MLFVGDDWAEDHHDIEIVDEQGRRLARRRLPEGLGGVTRLHALIAGVMPSEWADLPASDAAGQVKIGIETDRGPWVASLVAAGYEVFAINPMSTARYRDRHSTSRAKSDPGDAHVLAEIVRLDRSHHRPVAGDSDDGEAMKLVARGHQTLIWERTRHVLRLRSALREYFPAALDAFDDLDAPDALAVLAAAPDPDRAARMSTARISTALRKANRRDAEARARQIQAILRAPALRQPPAVQQAFAAIVAGQVRLIVALNAEIDALGEVVVEHFGRHPDADLYTSQPGLGFILGARVLAEFGDDPKRYADARARKNYAGTSPITRASGTKKTVLARHVHNDRLVDAVHQWAVSALRGSPGARAYYDAMRARNIGHHAALRQLGNRLVGILHGCLKTRTVYSEARAWAHHNAATA

SEQ ID NO: 104685 - protein, 504 aa, unidentified
MTTPPWELAFRLVKPLRKSVSPFGGDLCFGWLGGLRLYLYEPLGCVSAFWNWMPAGKDKTMHYQKVLRMLQSIPYLSVGLDVGADFTWMSIMLPNGTLTGKPFKILHSDPHSRDLGVAKIKEAQETYSLESRCFLESTGIYHIPLLCFLRDKGFDCSVINPIITKNSTNMNIRKLHNDKFDSKKAAKVGLDASLKTSIVPDDAVIDLRNLVRDYYYFKDLQSAVVLKLHAELKVSFPAYLNVFSKITTQTSLKLLEAYPLAADMLAAPKDELVESIRQTARFGEKYAVSKYEAICAAAKDAAVFGRALPSNALRIRLYIKTYREYQEHLGSILKELHKAVEKLEGTPVYDRILLLQSLRGVGFLSSVVLIAEMGSFDLFPSPKKLYAYFGLDPAVKQSGKFNADKVHMSKRGSSLARRILHMVALNNLKVDKGTKTPVNPVIHSYYADKCKNKKKNVAVGAVMHKICNIIFAMLRDNKPFEIITPEEHCERYLETHPDKAQNAA

SEQ ID NO: 104686 - protein, 427 aa, unidentified
MTTQSSDLNKFAAWIGLDWSDGKHDVCLQVATGGSREHGQIEHSPEAIDEWARGLRARFLGRPIAISLELERGPIVYALRKYDFIVLFPINPTSLAKYREVFTHSGAKDDPSDAELALEFLLKHPERLHALNPQSPQMRALEQLVEMRRRLVDDQTRITNRLTSSLKNYFPQALQWFEDKGTLLFCDFLKRWPTLKAAHQARRATLERFFHEHNVRQAKSIAWRIESIKTSVALTDDEAVIQPSALLVQALVEQLRVTIEAIKTFDHEIAARAPAHPDFQIMQSFPAAGQVFAPRLLTAFGEQRERYPNASDLQRYAGVAPVTQRSGNSCWVHWRWSCPTFLRQTFVEWAALTIPRSFWASAFYRQQRSVGKSHQAALRALAYKWIRILHRCWSMRQSYDETLYLNALKKRGSPLLKFIAEADAAPA

SEQ ID NO: 104687 - protein, 344 aa, unidentified
MSTIKVVGIDIAKSVFQVCVWMADGSVAWNRKISRQKLLHTMRQFPAQTLIAMEACSTSHFWGRTLMSMGYDVKLIPTQHVKAFARHQKNDANDALAICETACRPGIHFVSVKTTEQQDIKALRSARQLIVEQRTALANQLRALLAKYGVIIPAGLQRLQRQLPEVLEDGDNTITFTLRRLLSLLREDMQMLTERIDVLDKELAELSSQQVAYHHLLTIPDVGPLIAAAVVSEVDATQFSSGRELSAWCGLVPRQRSSGGKQRLSSMTKSGNHNLRTLIIHGARAVMRCVQKRDDSLGRWVKAIELRRGFLKATVALANKLTRIIWRVLTDSVDFSMNRAFAGS

SEQ ID NO: 104688 - protein, 422 aa, unidentified
MVLKGVPMALKIVYQICCGIDVHKTFVVACIASTNKQGVTTYKRHRFSTFTQGLKELLQWLLDNHCKDVCMESTGKYWIPIYNVLEKDCNIVLAHPKYVKAIRGKKTDKKDAKWIADLFKHDLVAGSFMPPADIRQLRDLMRYRFKLTCFMSSEKNRLQNCLTVSNIQLASVVSDTFGKSSQRILDKILENPDDTSFDIEPLIHGSMKKKLPELELAIDGFITPEQAGKLKVIKKHFEDLESRKAELEKLILALASPYQQELDLILTAPSFKNKFTAIGIISEIGVNMEAFPSAKHLCSWAGLTPTNNESAGKKKSVRVSKAGCYIKPLLVQCANSVVKSEKHPEIRNRYLRLRKRRGHKKAIIAIARMLLTALYNMLKNKEPYNAELYRKSEILPVNREITIEQAILMAQFQGYKIKSAAE

SEQ ID NO: 104689 - protein, 353 aa, unidentified
MSTIYIGVDFHARQQTVCSLKTAEGVVVTHNLKHQDKDEVRAFYQQFSGRVVVGIEASGYSPWFEQLLEDLGHEVWLGDATEIRRRARWRQKNDRRDAELILDLLVHDEFPRLQRPSAQSREILRMLRYRQKLVKIRTMGKNSLQALALQSGLAKRSQLFSKSGQQELRRTTMSPAMQWQREQWFQLLEPLNERLLETMLWLKQQSQDDARIKRLRTHPGIGLLTSLCVVHTLEPVSRFRNQRKVAAYAGLEPMERSSAERKHFLGISKAGSRVLRYLLVEAAHTAVKKDDDLKPFYQRLATRRGRPKAKTAAARKLLIRSYIMLRDEIDYAEFRRRAVAARLARQSSRPPCL

SEQ ID NO: 104690 - protein, 317 aa, unidentified
MSTPCFVGLDVAKAHLDLAVHPTGEQWQVANTPDAFPALVTRLQALAPTLVVLEATGGYETAVLSALAVAGLPIVAVNPRQVRDFAKALGILAKTDQLDAGVLAQFADRVRPPVRPLRDEATAELAALLTRRRQLLEMLTAERHRLAQARPAVRRNVAQHVRWLEQRVRDLDDDLTTRIHQTPVWRAKEDLLRSVPGVGPILARTLLADLPELGRLSRRALAALVGVAPFNRDSGRVRGRRTIWGGRARVRAALYMAALVAARRNPRIGAFYQHLLAAGKPKKLALTACMHKLLTILNAMVRTGQPWQISIAEPTLD

SEQ ID NO: 104691 - protein, 386 aa, unidentified
MQKSNDLSRSLTALEQHGTLIAVIEMSLSSWLVGGIVPGVERHPVKKLAVDESSLLKLLHRWREEAEKAGHRITRIAVAFEAGRDGFWLARWLKASGIEAHVIHAASVAVSREHRRAKTDRLDTELLKRAFLGWLRGERDHCKMVAIPTIKDEDAKRPNREHESLVGEQSRIVNRMKAALIRLGIRGFNPKLKKAAARLEELRTPENEPIPPNTLAELRRDMERRRLVRDQIRQIEEARVERLDHAPCDGPHAMVRLLARVIGVGLETADMLVHEVLSRNMRDRRGIARYAGLTGSPDESGRKRREKGLARSGNGRVRRGMVQLAWRFLMYQKDSALAQWYRARTEKARGTRKPMIVALARKLLIALWRLVRQGVVPDGVVLRPAQ

SEQ ID NO: 104692 - protein, 365 aa, unidentified
MREAPVRFERTSVGLDVHARSVVAAGLDGDTGEVFERRLSPDPGEILAWVSSLPGPVRVVYEAGPTGFGLARFLSAAGVETLVAAPSKLQRPSGDRVKTDARDALHLAKLLKLGEIVEVRVPSVEQEAARDLVRAREDVRGDLMRCRHRLSKLLLRQGIVYSGGRAWTLKHDVWLRSQTFDQPGRVLAFDAAYEAMLFTSGRRDRLDVAITTMALDSEFTEVVHRLSCLRGVSTLTAFGLAVEVGDWHRFSGNTIGAYLGLVPSEHSSGGSRSLGSITKTGNGHARRLLVEAAWHHRKTYRSPGAIMRARWEQAPPAARARGHEGNQRLHQRWQVFTDRKKKPVIANVAIARELAGWCWSLEVLE

SEQ ID NO: 104693 - protein, 409 aa, unidentified
MLFVGDDWAQDHHDVEIQDESGHRLAKARLPEGVAGMARLHALLGEHLDADTGADRQADQVAVGIETDRGPWVRALVAAGYRVFAVNPLQSARFRQRHHVSGAKSDAGDAHTLADMVRTDSHQLRQVAGDSELAEAIKVVTRAHKTLIWERARHVQRLRNALQEFFPAALVAFEDLTGGDALELLAKAADPAAAARLTRTQITAALRRAGRRHVAERAERIQTALRTEQLTQPPTVAAAYAATVRSQVAVLTTLNTEVATMQGEVEAHFGQHPAAEIYLSQPGLGVVLGARVLAEFGDDHDRYADAKSRKNYAGTSPITRQSGRQKFVLARYVHNDRLLDALGRQAFSALSASPAARNYYDQLRDRGKDHNAALRQLANRLVGILHGCLKTGTTYDEHTAWPSSQNAAA

SEQ ID NO: 104694 - protein, 390 aa, unidentified
MRSVGLDLGVRHIAYCEVVDGKVVSRATVKSLSQLESRLGPASPPARVAFEACREGWHVYDKLKAWGNEPHMLDTTRIRQLGVAQHRRKNDPIDAEVIAQALDTGRIAEAHVLSPERRKLRAQLSVRGALIETRSQYVTTIRGLARAAGILLPACKTENFPRTVDAAKLDEETKTLIAPLMTVLRSLETELAVVEELLARMAQADSILQLCATVPGVGLIVAATFVSVIDDARRFKNAHAVGAYLGLVPSETTSGGPDKRRLGSITKQGNRMARAMLIQSAWTILRLRDTSDPLKRWAEGVAKARNKRIAVVALARKLAGVLWAMWRDGTVYDPKTEAQAAAHGVRVAARQHERRADALERAARKLRREPKMLAPAKSPKRRKTSQEIAM

SEQ ID NO: 104695 - protein, 332 aa, unidentified
MLEEAADREEIIQRVAALDIGKAELTCCVRVPAEGRPGRRLQEVQAYPAMTGSLLRLAGHLRCLGVTRVVMEATSDYWKPVFYVLEAHGFDTWLVNAKDVKHLPGRPKTGRLDAVWLCKVAERQMIRPGFVPPPEIRRLRDVTRYRIDLVAVRTAEKQRVEKLLEDACIKLGVVASDIFGVSGRAMLDALAAGERNPKALAQFARTRMRGKISVLEEAFTGHFTGHHAFLPAKMLARIDGLNADIAELDARIEEMTAPFASAVQRLDEIPGIGRIAAAVIIAEVGLDMARFPTASHLASWAKFAPGVKESAGKKKGKGSTGHGNRYLARVLG

SEQ ID NO: 104696 - protein, 372 aa, unidentified
MKHTILYIGLDVDDTHYHGSALSKHTGETIDFQCRPTLKGLLAQLNKMARHFPGHSLKLCYEASYIGYCLQRDLADKGFHCDVVAPTSIPTPRGRAIKTDRIDAGLLAQFYANDLLTIVQPPDVQQEQDRDLLRTRQNLIKQRTDLRKHMQSLLRRNGLHYKAETGNKTHWTQLHYGWLDRTIDGLSGSVKINLELLLRQLKGTNGILTEYAQQVEELAKTPRYEKPVQALTCYKGIKQLFALTMITEIGDIKRFPHPRKLMSWVGMDIREYSSGGKHNRMGITKQGNRYLRTAFVEANQRGYRTARISKDLKARRVNTAPEFVAIADRCLRRLNKKGNRLLLAGKHPNKVKVACAREMVGFVWESLNQAAA

SEQ ID NO: 104697 - protein, 412 aa, unidentified
MRRVIGMDIHRSFAEVVIWEQGQLRRAGRVDMTRTALEGFGKSLQASDEVVVEATGNTMPVVRVLSLFVARVVIANPLQVRAIAHAHVKTDKIDAGVLASLHAAGFLPEVWTPPAETERLRRLVARRNQVVRHRTRIKNEVHSILHAHLVPRCPHADLFGRLGRAWLKRQILPADEIAAIDRHFRELDRLAEDLELLDREIAQSGLEDPSIKRLLTIAGVNVTVAAGLVAAIGDIKRFSSPQKLVSYIGLNPRVRQSGLGFAQHGRISKSGRSHARSMLVEAAWAAAKAPGPLHAFFVRIRAKRGHQIAAVAVARKLAVLCWHLLTKEADYLWARPALVAKKTRDMELASGQPMKKGGKPGSAYAYNVKTLRNQEKTIAENAEHAYEHLVGAWQTRRPKNAVRGRLKTTRHE

SEQ ID NO: 104698 - protein, 436 aa, unidentified
MAKVFIGVDPHKLSATIEVVDERETVLARGRFGTDKAGYAAMRKHVAAWPERVWAVEGSNGAGRPLAQRLLADEQDVVDVPAKLSARTRLFDTGHNRKTDAHDAHAVAVVAVRTQGLRVLSYDEALEALRMLADRREELTRQRVQTVNRLQRLLSELIPGNGKKDLTALQAKAILASVRPRDLPGKTRRRLAVEQLAELVAVEKKIKALTAELKQMVKASGSGLMDLRGVGPVVAARVLADVGDIARFADRNRFASWTGTAPIETSSGEIVRHRLSRAGNRRLNHMIHIAATTQIRLQTPGRAYYRRKVTAGKTRAEAMRCLKRRISDALYRQLLADAKTVHAAGPDAGPGGHRGATLHSSAAGSHPHTGTSDQPLPGPAPTTLPGTKPHANPCAASAPRPSRRRAGAVKVERPTGRTTLTATSAGAHSAAPKPPS

SEQ ID NO: 104699 - protein, 357 aa, unidentified
MKSKIKQLDFTGETIFTALDVHKKNWRVTIGSREFELEHYTQNPNVKELAKHLKKNYPRAKYIVAYEAGFCGFGIQRCLKEEGIECMVVNAADIPASDKEKRRKQDKIDSRKIYKRLAAGDLEAIYVPQTEMEHARSLVRERSRIVRDQTRCKNRIWGLIMFSGLNVDSDKPKQYWSRKFVESLKQLDCRSEPLRQTLDLAIEEYVLIRQLLTKATKRVRALSGTELFTEIQEFLQSIPGIGLINAMVIHTEIQDISRFKTLDHLCSYAGIVPDSDSSGDKEIITGITHRSNNYLREAIIESSWVIVRKDPAMLMLYKRYCARMNENKAIIKIARHLLNRIRFVWENQTTYEIGIAA

SEQ ID NO: 104700 - protein, 344 aa, unidentified
MSTVTVFVGLDYHQDFVQVSVLDSQGKQLLNRGCRNDWRQIADAVAPLGQVKRAAIEACCGAADLAEELAANAGWHLDLAHPQYVARIKQSPDKSDYSDGRLLADLTRVGYLPRVWLAGAYERDLRQLVNHRQSLVDQRRAVKLRVGAVLREHRATSGQKLSRWSRAWVLWARSAPQLSEQARWIVNDLLEEAEHLDKKVWVADARLRQVGDGDPLIERLMNEPGIGEVTAWVLRAFIGRFDRFASGKQLGRYCGLSPCNASSGKRQADAGLIQGCNRLLRATLIQAAHRLVRTEQRWIDLATQLRGRGKPACVIVAAVANRWIRGLFHRMNQTTPSSDKTMLN

SEQ ID NO: 104701 - protein, 349 aa, unidentified
MVIFGIDAHKRTHTAVVIDEVGRRLGEKTTTSTTTEANLELLRWADSFGSERRFAVEDCRHLSRRLEADLLAAGEELVRVPPKMMAHARDAARTYGKSDPIDALAVARAAQREPNLPIAHLDGPSRDLRLLVDHREDLVRERTAQINRLRWHLHEIDPAWDPAPRSLIRFKHLDAAAARLAGVEGTVAWVARDLVSRIRELTVAANELERRIVQLVARLAPALLGIAGVGALTAAKIVAETAGVRRFRSKDAFARHNGTAPLPVWSGNKVRHRLSRTGNRQLNTALHRIAVTQMRIHDDAKAYLERRMAIGNTKMEAIRALKRKLSDVVFRALLVDADTAAEACFSDAA

SEQ ID NO: 104702 - protein, 347 aa, unidentified
MLHAGLDLSRTKLDVCLLSQAGDHLDQLVSPPDGDALRTLARRVEETHREPVCAVIESMTGARFVHDTLEQAGWEVEIADAQKVKGLAPLACKTDKIDSQVLATLSHRDLVPAIWLPDPSVREERELARFRLHLVKHKSALKNRVHSTLINFGKPCPVTDLFGVEGRRLLERLQVPEPWRGNITASVELIDDLERQIAEINRRLKEGHADHPYIPLLLTAPGIGWVLAFTIAGEIGEIERFSSPEKLTGYTGLCPRVNQSGDKDRRGPLTKHGPRYLRWALLEATMHALKHPAYSQRYQRNKKRMGKQRGAKVAQIDIARRLTHAIWHMLSRKQQFAPRGAAFRLAA

SEQ ID NO: 104703 - protein, 313 aa, unidentified
MYYIGIDISKKALSVFDGKISLEFENVAGLKPFYRYLKKHYKHFDNLVLIFEATGIYSNNLRELCATHQIKAYILNPKQSHNFAKSLGVRSKTDKIDAQTIWRYQSLIPKERIQIPVIDPEIKMLASYLTSYQFIQVQRTAVSNHLESVTDKTLRKLLQKELDRKRQLEAKLLSDIESYIQEHPGLAGDFKRLMTISGIGEKLAFSLLFLFRHYQGTNRAQITALVGLDPIYKESGSSVKGKVKISKNGNRYIRKMLYLPTLCAIKNNQKIAVFYQRLLNNHKPKKVAVIAAMRKLLLVAHAVYENKTEYVPG

SEQ ID NO: 104704 - protein, 410 aa, unidentified
MISPILKRCCGLDAHKDSIAATLLKEGRQGKITKTVKEFSTFKEDVIKMKKWLIKEKCEAVCMESTGVFWSPVYDILHGELDVRIVNARSVKNVPGRKTDVLDSEWLAELLRCGLLKSSFIPSKELRNLRMKTRYRVAILKQYQAEKNRVTKVLEVAGIKLGNVASDIFGQSGLLILNDLLEGSKSALEIAQSSGKRLRADTVHIAKAIDGDLDNDKKFLLNEMKKHLEWLARKLMKLNDEILFSIEPYKEEWKLMQTIPGIDVISASSVIAEIGCTMEQFDNNADHLSSWAGVCPGNNESAGKRKSPKTRKGSKQLRRVLCEIANAACKCKGTQFEYFYKSLLIRRRHKRAIMALAHKILRITFSVLKNKKPYYEPNVNHEMLTTKRNSQRWMRALKKYGYIAPKEDNL

SEQ ID NO: 104705 - protein, 340 aa, unidentified
MRKYIRIGVDIAKNSFQVHALESEDCSATKRKLSRSGIVKFLAEVEPCAIGMEACGSAHYWARRFRAMGHEVKLTPPIYVKPYVKRGKNDAADAAAICEAMSRPNMRFVAVKSEDQQATLMAHNTRELLIKQRTMSVNALRGHLAEFGVIAAKGISHVEELVERAAAAGLPGMVQATLAVLLAQLRSLDAAIDELERAIVADHRRDPVSRLAASVPGVGALAASAILASAPDPQVFKSGRDFAAWLGATPKQNSTGGKEKLGSITKQGNRYIRRLLVLGAISVLRAAPKRKGALCDWLAALRARKPPKVVAVALANKLARIVWAIITTGEVFRTSIYAKA

SEQ ID NO: 104706 - protein, 316 aa, unidentified
MAKRVEKITFGIDVSKDSLVVFDWQSQESFTLANEPQAIRQWLDSLPLLAQIAVEPTAHYHRVLVDEALSRGTTIYLVDQRQLVHYREVVNVRNKTDLEDAQLLARYLVREHDQLRSFRPHSRKAQRLWELILRRGTVVQCRQRVQQSLAEVQIPVKAVITQLNALLLRLQQQILRLIRELGWEADYQSCRSVPGLGPDNASALTAAYHRGAFAGADAFVAYLGLDIRLRESGTYKGKRKLTKRGEAELRRLLFCASRGATCYQPFAQYLQKKRDEGHPKIATRMMLGRKLARIAFTLMARQEMFVKKEIATGKSP

SEQ ID NO: 104707 - protein, 343 aa, unidentified
MTHYAGIDVSLETSSICIVDGAGTIVRELKAESEPGALAAALTATELPFSRVGPEAGPMSQWLHAGLAEAGLPVVLVETRRLRAATKTMPVRTDRIDARAIAQVVRTGWFRAVHVKSELSQETRALLAARKLLVAKLRDVDNGVRGLLRGFGLKVGTVGERAFPRRARELAHSRPELAAVVEPLLQVREALLAGRERLHRLVLAAVRDEPTCRRLMTVPGVGPVTALTFCSAVDDPARFGRSRALGAHFGLTPRRYRSGETDRVGHISKQGDGLARQALYEAANVLLTRTSRWSALKAWGMSVARRAGMRRAKVAVARKLAVVLHRTWRDGTEFRRGRETAAA

SEQ ID NO: 104708 - protein, 393 aa, unidentified
MRKPKKQKKPLNDLSRSLIPFDPNRTLICVIELGKESWLVAGIVPGVERQPLKKLPADENGLLKLLERWRAEAEKTGRKITRIAVAFEAGRDGFWLARWLGARGIETHVIHAASVAVPREHRRAKTDRLDTEHLKRAFLGWLRGERNHCKMCAIPTAAEEDAKRPHRERDTLVGEQTTIINRIKATLARLGIRSFNPKLKKAPERLGHLRTPEGEPIPPNTLAELQRDLARKQLVAEQIRQIEKVRLEQLKQAPKAGPNLMVLVLMRVIGIGIETADMLVREILSRNLRDRRAVARYGGLTGSPDESGKTRREKGLARSGNARVRRGMIQLAWRFLDFQEGSALAKWFRARTENARKSRKKMIVALARKLLIALWHFVRDGVVPEGVVLRPAH

SEQ ID NO: 104709 - protein, 350 aa, unidentified
MDNGTRWVGIDLHRRRSQIAVIDEDGELTLSRRIVNDRAAFLELLGDAEGTHVALEATYGWEWLAELLEEAGYDLHLAHPLRTRAIAAARVKTDAIDAKTLAHLLRAGFLPEAYVAPREVRDLRELLRHRATLTRMRSAVKNRVHAILAKHGIAREHSDLFGNGGREFLAKLQLRDAPRRRLDSLIALICDFDREIEQTTQEIEQRARADDRVDVLTQIRGVGRYTALLIIAEIGDITRFPTARHLCSWAGLTPTVRSSDGKARLGHITRQGSPALRWALVEAAQKITTGSGPLREKFERIAKRRGRKIAKVAVAREILTLAYYGLRDGEIRCLARRSRASAKEKLAAAA

SEQ ID NO: 104710 - protein, 348 aa, unidentified
MRNQPLGAVVYGIDLGKTRFDVVGCDAAGRPIQRVKFSRDTLFAFFATAPKALIGMEACPGAQWMARKLIELGHTVRIIPAQFVKPFVKSNKNDARDAEAIAEAVIRPTMRFVEIKPCEQIDLQALHRVRDRIVGNRTQLICQMRAFCLEYGIAIRPGTGAFKLDIARIITDETNDLTPAIRVLLKELWDELKIVDIRLAAVSRQVEVLAAKHDTARRLMTIPGIGPIGATALVAAVGDARQFRKARDLAAWLGLVPRQNSTGGKTTLLGISKRGNPYVRRLLIHGARSCMIHLDRSRDRMGVWLDALDGRMHRNKAIVALANKIARIAWVLLRRPQTLYERIAPAHA

SEQ ID NO: 104711 - protein, 445 aa, unidentified
MHRTVGIDLAIRGDHVAQIFENGKPVGRPIRFRHDAPSLDAFVASVSADVHTGTAVQAIMEPTGMSWFPVAHRLGDAGVEVARVKGKRVKALRRYLSEHAKTDLADAHVLAAIPSFGGPRLDPVHVPSPKSHALQRLTKQRGRLQDEVAASKRRLMDLVRWASPVLERVLPDLRTRLSLAVLQHWLDPDRVLRARKSTLARFIAEHASGNQPHSGPFVDALVDGIRDAARQARKLHRHHVDFVELQMEVAVEIELVLRKIELLGTLERRIERLYSELQPDDVLRTIPGVGQRLAPVLAGVIHDAGRFRSERHLRGFCGLFPRRADSGGAERPGQKITASGNDRIKRALMLAADTARKIDPKLAETYWRLMTTKGHHHKQALCAVANRLANRIYSVLRDGRPYVLRDVDGLEISVADAKAIIAERYHVPNGLRASRRASRAPRAGA

SEQ ID NO: 104712 - protein, 360 aa, unidentified
METMITNRIKEFRQFKNEIRGSEQHLIVGIDIAKDKHHAFLGTANGHTVQKGLIVENNLSGFSYLMGRVQFHMDRDGFEAVVFGLEPTSVYHKPLAEFLIEQGCLVVYATNEAIKKNRSLLDGRWDKNDMKCSANVADLISQGKCQYYDLPDIKLRDLRNLLLLRKRLRKQLHSSKMRIRNNLVAQYFPELDKFWKTREEENLAIVRWCLAPAKIAAMKFEDFCCLVTSRNRGDRQKQRLFKIWDSASFSIGCFAGNGLELEAKVLVDTVKLIQAQIVEVDGAIEVICEQFEEYPYLLSIPGFGPYVSAVVLAAIGNAHRFENTHQILRLAGFDLSAIRSGKKSTTAVPVISKKGKADLR

SEQ ID NO: 104713 - protein, 337 aa, unidentified
MLHYGLDVHRKYTSICVMDDGGLILAEGKAVTQELTSHPAFSLKGEKRAVLEAGGNWHYLYELLEPAVNEVLLAHPLRVRAIAAARVKTDAIDARTLAHLLRADLIPAAYIPPPAVRESRELFRFRYDLVKQRSALKNRVHALLAQEGLNSPFTDLFGRHGREWMAQLALADSKRTRLESFLRVLDGFTAEIQAADRIILERVKTDEKAKLLMTIPGVGFRTALVILAEVGEVSRFPDANHLVSYAGLAPRVRSSGGRTKLGNITKQGSSALRWALVEATHLAVRKPGYLQEMHRRLRRGKSAAVAIMACARQLLVAIYFMLLRGDAFQPTATRTMS

SEQ ID NO: 104714 - protein, 418 aa, unidentified
MKHSKTKKIGTINKKTLIAALDIGKKVHYGYFRAPSGKDFQPFAFHNTRNGFDKFWERLCNFKEKQMLEEIIIGFESTGPYAEPICHYLRHKSVKLVQVNPMHTKRIKELTGNSPNKTDKKDPRVIADVMSLGHSLTVIVPEGAAAHLRRLTQARERAIERRTAMSNQLQHLVFLIFPELVHIIKPSTKTGMYMIKHYSDPKKLLFAGIDKLNAIIKKVSRGRLGTDRAEQLHGAAKKSVGITEGKESILFEITHLVSKIESENHYVEDLEKQMGDYLKKIPYSHSILSITGIGHVTAAGLIGEVGDFRKFKTISAVLKLAGLDLYEISSGAHQGCRRISKRGRAIMRKLLYFAAINTTRKNGILHGPYQRHLAKGMPRIKALMAIARKLIGIIFALVRDHSNYIPDYSSQLVFKKAA

SEQ ID NO: 104715 - protein, 390 aa, unidentified
MSQSFDASRSLTAFEQDSTLVAVIEMSQSKWLVAAVIPGIARQPLKKLDADAGALLKLLQRWREEARTAGREVKRIACAYEAGRDGFWLARWLQAHAIEAYVIHATSIAVSREHRRAKSDRIDTELLMRSFLGWLRGEKRHCSMVAIQTMAEEDARRPSRERENLVGEQTRIVNRVKAVLALFGIGGFNPRLRKAAQKLETLRTVEGTPLPENAHAELRHDLERLRLVHDQIGTIESERLRRLAQAPAAATGPHAMVGLIARVLGVGIETADMLVNEVLTRNLRDRRAVARYAGLTGAPDESGKRRREKGLARTGNGRVRRGMIQLAWRFLIFQKDSRLVQWFRERTADGRSTTRKTMIVALARKLLIALWRLVTTGEMTEGVKLRPAGT

SEQ ID NO: 104716 - protein, 316 aa, unidentified
MAEPKRYVGIDVSKEWLDVAVRPEGTGWRVAQDEAGIAALVVRLREEAPCLVVMEATGGYETLVAAALGAAGIPLAVVNPRQVRDFARSLGRLAKTDQLDAQVIAHFGEATKPVAQPLVETEARELEALVARRRQVLQMRVAEQQRHQRALPVVRQRIDRVLAVLDQELRDVEQDLGNRLRHSPLWQEHQDLLKSVPGVGPALTFSLLADLPELGALSGKQVAALVGVAPMNRDSGHWRGKRACWGGRASVRAALYMPTVLAVRWNPVLRQFYERLVAAGKPKKVALVACMHTLLTILNAMLKHRTAWEPNHAYTS

SEQ ID NO: 104717 - protein, 404 aa, unidentified
MWYVGLDWADTHHDVEVLDEAGKRVGARRFAHSHEGLNELKQFVLSIAASPDQLACMVETNHGLLITFLLEAGIPMYPVNPKMANQLRKAAGAKTDQIDAHLLAKLGRLDLAELRRLEPDSPTVQELKTLTRDQDALIQTQTRLVNQLTACLKEYYPAALHLFAKLQQRSTLVFLQAYPTPQTAQAASLEEITATLRTGKHTNPSKAAPKIFEELHCPQLVTTAVIVRAKQRLMLSLVKQLLVVIQEIASYDEAIRTLFLTHNDQQIWRSLPRAGKRLAPRLLAEWGDDRARYADENLVQTLAGTAPVPFQSGNYAKAHKRFACLKPLRNALHQFAWQSTRQEAWAASYYRRKRAEGKTHSMAVRALANVWVRIIYRMWVSNTCYQTATFEAAQLTHAPRQHVA

SEQ ID NO: 104718 - protein, 365 aa, unidentified
MNANAALPVVGIDVANTVFQLAVADGTWRVTEEHRLTRSQMERWFANRAVGLVVMEACGSAHHWGRWLNALGIEVRLLPALYVRAYVKRNKTDAADACALLEAARCADITPVKVKSIEQQALQGLRRTRSLWMATRTSRINALRGFCREFGIVIAPGARLGVERIARVLADPHSDVPELIRGTMKLLIEEIRLLEARVAQLERELTVVARTSGACTRLLTIPGVGLLTATAMVAATSGSVQHFRDARHFASWFGLTPKEHSSGELRRLGRISKRGDRYLRMLLTHGARSVLHAADRAVQAGRNIDPLRQWALTVQARTNHNKAACALANKLARICYATLRDEQSYGEPVRRPNKKIERTSFELAS

SEQ ID NO: 104719 - protein, 411 aa, unidentified
MEKVYDKCCGIDVHKKLIVACLRKGNKQEIRDFGATTRELLELADWLKEGGCEMVAMESTASYWKPLYNILESSDLNTMVVNAHHMKAVPGRKTDVKDAEWIADLLQHGLLQASYIPAKDQRELRELVRYRKSLVGERVRELNRLQKMLEGANIKLSGTVSDINGKSARSILEYLITGASIDSDKYDEMYEKKVIAHNLKASKEQIIDDLNGVMTPLQRRMMKELLSHLDELNIHIKNLDDEIDNFMKPEEKQATAVIEDVTGIGHTSAQAIISVIGTDMSRFPTDAHMASWAGLCPGNNESAGKRKSGKIRKGNALLRSTLVTCAHAATRNKSSYFYAQFTRISAHRGPKRAYVAVAHSMLVAIYHILKDGVVFKDLGADYYNQFNKERKINAYLKKLKALGWEAPVVAA

SEQ ID NO: 104720 - protein, 354 aa, unidentified
MPSKADTAVARTIGIDTGKNTLHMIGLDERGAIVLREKISRARIAARFVNLPPCLVGIEAGMASHYVARELVALGHEVKQVPPAYSKPFRHGHKNDFRDAHAVAEAVERPSTRCVPIKTDGQLDLQALHRVRSRLIGNRTAVINQIRGFLLEHGIPVRQGHHFLRKQLPLILATRTDVLSPRMIRIIGDLMADWKYLDERIERVTDEIEALAHADEGCQQLITVPGIGPIISSAMVAAIGNGAAFCKGRDFAAWLGLVPKQRSTGDRTILGRITKRGNRYLRMLFIQGARAVLLRPASWAKHGFGSWLTAATRRLHRNVLAVALANKLARIAWTVLAQGRRYEARVEPRVEAAA

SEQ ID NO: 104721 - protein, 383 aa, unidentified
MDQKQGNLDRERDAQAPVLYVAFELANSTWKMACSDGSKLWHVTVTAGDLAQVQGAIIRAKRHFGMGDKVHTVSCYEAGRDGFWLHRYLQSRGIDNVVVDSASLEVNRRLRRAKTDRIDAGKLMSMLVRYHGGEKHLWRVVRVPSWEDEDARHLHRELEALKSDRTRHRNRIHGILIQQGLRVRNPSTKKFIKELDLMRTWDGRELPAEMKVRLARVHERLRLVEEQISSMLKEKTHRLKEESARMAQVTQLLRLDGIGPVSSWTFVMEFFGWRRFQNRREVAALAGLTPTPYDSGKRLREQGISKAGNRRVRTLAIEVAWAWLRFQPRSKLSRWFLERFAEGGSRLRRIGIVALARRLLIDLWRFLEYGVVPEGAQIRPLAV

SEQ ID NO: 104722 - protein, 427 aa, unidentified
MNCNTQNARIAEVDEKTLVVGIDVGSEYHYARAFDNRGVEYSKKAFKFGNTEEGFEAFKAWILSICKEQSKNKVIPGMEPTGHYWFNLGKYLQDNGMRPVLVNPFHVKTSKELDDNNPTKNDRKDPKVIAGLIKDGRYTYPYLPTGIYAELRTASNLRYRLQSELTGIENRLARWFSIYFPEYKTVYGSLDAISGLMVLKTAPLPEDIVALGVDGVNQIWREAKMRAVGKKRAQTLVAAAEHSIGTTEGLTAARYEIRLLLEDYESRSEKLKEVMDLIEELVHQIPMADKLLKIKGIGIRTVSGFLAEVGDLRRFSDPKQLQKLAGYALKENSSGKHRGQSKINRRGRKRLRHLLFEAAISLVGKNQEFKAIHHYYTTRKDNPLKKMQSLIAVACKLIRVFYAILVKGVEYDPKKMVSDIRRPAMAA

SEQ ID NO: 104723 - protein, 348 aa, unidentified
MVVIGVDSHKRTHTVVAVDEAGRKLAERTATTTEEGHLDLLSWSRRWPERSWALEDCRNLTRRLEADLLKAGEAVRRVPTKLMAGARRSAREPGKSEPIDALSVARAALREPDLPLARLDGVERELRLLVDYREVLIADRTRHQSRLRWFLVELGIPEPPSRKLAVRVVLVGIGRALVERTEPCARIARDLVARISELTVAIDDLARQIGDQTETVSPRLLELVGCGPLTAAKVVAETAGIGRFRSRAAFAAHTGTAPIPVWSGNLVRHRLNRGGNRQLNAALHRIAVTQLRCPGPGQAYVAKRLAAGDTKTEAIRALRRRLSDEVFRRLQADEAARASIEGVARAAA

SEQ ID NO: 104724 - protein, 403 aa, unidentified
MKDSGKRYIGLDVHKHYLIALGVDEDLNVVLPARRVELSHLESWMKKTFTRQDEIVLEMTTNTWHLYDELSEHAGSVMVVHPPHVALITRSQVMNDKIAASILARLLAKGLLVGIWVPPQEVRELRGLLAQRKKMTGLATQAKNRLHAVLQRHHLVHPGGNPFHETQQSWWLALPLGTLERVNVHSDLETLRFAQAQQVHLTSIMEEIASQQEQVTRLLQIPGFGVVTAVTVWAAIGNMQRFADPQHLVGYAGLGTRVHDSGMSTRTGRITKAGRRDLRVVLIEAAQIAANTHPHWKAELARLEPRLGRNKAIVAIARKLLITVWYVLSQHTTDRFAQPERIAQKFLKFAYQLGKARRPNGQSAAHFVRQHLDALHLGSELTSISWGSKKPIPLPPLQHPENK

SEQ ID NO: 104725 - protein, 373 aa, unidentified
MEHNITIVGLDAHKNSIEIVTAETAGNQEVRHYGKIGGDMTSLDKAIRKLRSVRSNGEELRFVYEAGPCGYEIYRHLTKQGFQCVVVAPSMIPKKSGTRIKNDRRDAENLARLERAGELTKVYVPREEDEAMRDLTRAREDAVKAQRAARQLLGAFLLRHGLRYPGKQSWTPAHMRWLSDITMPHPAQQITLQEYIHAITESTGRVTRLTDQIQKLLPEWHMAPVVKALQALRGVAPIVATTSVAEIGDMNRFERPRQFMTYLGLIPSEHSSGESIKRGSITKTGNGHVRRALVEAAQAYSFPARVSRPLLKRQEGLPQSVREIAWKAQVRLCGRFRRLMARGKQRNKVVTAIARELAGFMWAIAKEVQVPGV

SEQ ID NO: 104726 - protein, 338 aa, unidentified
MKLYCGIDLHSNNSLISVINERDEVIYEKRLPNDMNTLLNALRPYQDSLHGVVVESTFNWYWLVDGLLAAGLDVRLANTFALKQYQGLKYTDDKTDARHLAHMLRLGILPEGYIYPFEMRCVRDALRRRLLLVRQRVTQHLSLQSLIARHTGKRLTGPQVKKLDGDALDALLTHPAARLTAGIAHDMMKTLGEAIERIERNVAAYCQPTPGYEIITGITGIGPMIGQSILLETGPIDRFPTARDYASYARCVPSQKISNGKKKGEGNRKNGNRYLEYAFMEAAHYAAIWEPRIKRYYQRKAQRSHKMIAKKAVASKLAKACYYMLMRKEPFAIDRAFA

SEQ ID NO: 104727 - protein, 362 aa, unidentified
MRRFGAFTADLYALAAWLQQCQIETVVLESTGVYWITLFEVLEERGFDVKLVDAHYARQVPGRKTDVKDCQWLQELHTYGLLHGAFRPEEQVCVLRSYLRQRSMRVAMASRAVQHMQKALEQMHLTLTEVVSDINGKTGMAILRAILAGERDSQRLASHRDRRCKHDQATIAKALEGHWRAEHLFALQQAVEQYEFLQQQLQACEQQIEACLQTFVTHVDVDTPPPAPARKRRARQRHAPDFDVHGYLVAMTGVDLTQIDGIDALTALKVISEIGLDMMRWPTGKHFASWLGLCPGNKVSGGKRSRMRSKPTANRAASALRLAAQGVVNSHSALGAYYRRMRARLGAPKAITATAHKLARLV

SEQ ID NO: 104728 - protein, 370 aa, unidentified
MDKDSELFIGMDTSKLKISVAVADGGRNGEVRFYGDILSDPGSVASMVEKLAKRASRLHFCYEAGPTGYELYRQIIELGHACEVVAPSLIPKRSGDRVKTNRRDAVSLARLHRAGELTGVWVPDETHEAIRDLVRAREAANEALKKSRQQLQAFLLRRGHIYSGRSPWTQIHRRWLAELSFTHPAHHIVLAEYIQAIEDAEVRVERLTKQVAATVASWSMAPVVEAYQAMRGVALLTAVTFVVEIGDVRRFETAPQLMAYLGLVPSESSTGERVKRKGITKAGSTRARRVLIEGAWTYRYPARVSRAIQARLEGLPRPVREIAWKAQIRLCARYRQLIGAGKLKAVAIIAIAREMAAFLWAIGQEVAPAA

SEQ ID NO: 104729 - protein, 392 aa, unidentified
MIIVGIDVASEKHDYFMLRKETGESFSSSAITILNNEAGYKKLHKDIQTFCGATGDSKVRIGLESTGIYHTNIIAFLLEQNYETMMINPILTNMARKASKVHTPKNDNLDAQTICKYLVDNESSFAPYTLTLYHIQSLKSLSRKRFYIVEDLRKAKLAVSNLIQLIFPEFKTLFSNIYGESALSVLKAYSSPQKLARAHTARVASLLHGRCKCTADQLIEAARHTVGLKSDCYAFELLDAIEELEHIQRRVDNYDAQIKRYVDEICPNLLSIPGVGYTTAGLIAGEIGDIGRFHSTDTLVSFSGIDCTVYESGKYKARHCIPSKRGSKYLRYALFQVSRVIWQWDPIFREYYDKKAAEGKHYYVILGHIQKKVIRVIYSIMKSGQNYVARTA

SEQ ID NO: 104730 - protein, 393 aa, unidentified
MFFVGIDIAKRSHEATVIGHDGNSIVKPFKFPNSTLGFNKLMEAVNSVSADLSAFEFGMEATGHYWLNLYCKLVEVGATVHVVNPVQSDALRGLYIRKTKNDSKDAFIIAELIRFGRYSETTLSNPDLISLRELTRQRFYLVDCISDAKRKVISLVDKVFPEYEQLFSDMFGATSLALLEQFPTPDLLAEISTTKLVNFLKSVSHGRHGRSKAEQIKSLATNSFGSSVFAAGSAFALKQFIQQIELLERQVSDIEDYIAELLPKFNSSLTTITGVGTTLAAVFVSEIGDVNRFDSPDKLAAFAGIDPSVSQSGEFNGSKAHMSKRGSPYLRRAFFLAAVAANLHNPALKALYDRKRLQGKHHLVAISAVMRKLVNIVYSLLKSGLPYIMIMPD

SEQ ID NO: 104731 - protein, 358 aa, unidentified
MSMQHVPPHRRVVVGVDTHKHVHVAVAIDELGAVLDRRSFAADSGGYGQLIDWGESFGGKLTFGIEGTGSYGAGLAGAVRRRGIGTLEVMRTDRRDRRLRGKSDTLDAENAARAVLAGLATAIPKSADGTVEMIRQIKVAKDIAVKARTSAMISLKQVIVNAPDDLRQELQPLSKMALIHRCAALRPGQVTTIIASTKHTLRSIARRWEVLDAEISGHEKLLAELTAQIAPDLAKAFAVGPDTAAEMLIVAGDNPERIRSEAAFARLCGVAPIPASSGMTTRHRLNRGGHRQANAALYRVVIVRMQHHEPTKAYVARRTTEGKTKSEIIRCLKRLLARELWAAMRPIREARPSLQIAA

SEQ ID NO: 104732 - protein, 379 aa, unidentified
MNEFSKFVGLDTHQDTIAVAVSEASGGTARYYGEIANTPKAMAKLVKTLTAKGAVVSFCYEAGPCGYGIYRQLTELGQACMVVAPSLIPTKPGDRVKTDRRDSESLARLHRAGELTPVWVPAPEQEAMRDLTRAREDMKGLERITKQRLNAFLLRHGRIYDRKKCRWTQAHGRWWEGLKFESVVQQMVFQEYVDAMKQAQARVAGLKKEMAKALQEWSLAPVVEALMALRGVKLITAMTVMAELGDLTRFTSPQQLMAYLGLVPREYSSGQTRRRGGITKTGNSHVRRVLVEAAWGYRFPARKTAHLQRRAEQTSEAVQAIAWKAQKRLCGRYRHLLAAGKLKVQACAAVARELAGFIWAIACEVMPPTPMPTQEAMTP

SEQ ID NO: 104733 - protein, 365 aa, unidentified
MKDSISVLEKGTAVIGLDVSDDQSTYVGLDTDGAVVEEGKVTTTRTGLEKRFGGRGGGCLVAIEAGTHSPWVSRLLAELGCQVLVANPRQIALIYRNRRKSDRLDATNLARLARSDPELLHPLVHRGRQAQEDLAVLRSRDALVRSRTQLINHVRGVVKSAGERLPSWSAESFHHKAARQLPAGLEAALSAVIEQVAQLTASIKKYDEKVEELAQKRYPEALAVRQPNGVGPITSLAFVLTLEDAHRFSSSRDVPAYLGLTPARRQSGASDPELPISKAGDVFLRRLLVQAAHYIIGPFGKDSDLRRWGLRLAGPAVGKGSKSRRKRAVIAVARKLAVLLHSLWVSGEVYEPLRLSPSEGGRLAS

SEQ ID NO: 104734 - protein, 342 aa, unidentified
MHHAAIDLGSKESQICIRQPDGAIVEERKLPTRKLTELVKTWPTSRVVMEACAEAFKIADAALAAGHQVRVVPGTLVRLLGVGERGVKNDQRDARQLSKASWQTDVPSVHIPSQTARELRSLCGARDVLVDMQRKLSNNIRGWVRAQLWKLPSGKMATLPERLRTHAQTSHCELPEHIERQLTMLTQATVQVQAANKQARKLAAEHPVCRRLMTVPGVGPITSLRFVAAIDDPKRFPTAHRVQSYVGLTPGEHSSSERERKTGITKAGPSELRRCLVQAAWSALMVRRTHPMLEWARQIAERRSRPVAAIALARKLAGILFAIWRDGTTYEPKRSARPSPPM

SEQ ID NO: 104735 - protein, 454 aa, unidentified
MKEAFLGIDVSKGYADFFLIDKKKKILEPNFQLDDTAKGHSKLIEVLKTLKQKHRITMIYSAVESTGGYENNWLNLLKEKGPEINLQVARVNPYGVKQDSKAGMIRTETDGESARCVAEYLVNHPEKVPYNDPGYDLFDSLRRLFKHIRTIVKQKAQLQTKLEKHLYLVFPELLSYCREEMPMWILLLLQKFPTVKEVREASLKALQQIPGISERKAQILKEKAKKSVASVNDHIIARLVTSTVSEILLKTETIKELKKILEKEAGNDGQVSLLTTFIGIAEYSAVGLLVAIEDINRFSSSKKVCSFFGLHPVFKQSGDGVFKIRMSKQGSSEVRAILYMVAMAALISNPHIKLIYDKHRARGMSHNKAMGVIMHKILRIVYGMLKNNSPYDPEYDMQMQVRSIEKEKANIKIEKKHRYESPNEDAPISKRQVNKRKGQVDAPSLITKTYTASS

SEQ ID NO: 104736 - protein, 318 aa, unidentified
MRFAGIDVSKAQLDAVVRGDVEEIWSTANDAAGIRSMVERLQAHAPGLIVLEATGGFQAACAAALVEAGLPVVVANPRQVRDFAKATGQLAKTDRIDAAVLAMFAERVRPDVRALPDDQAQALQALLARRRQVLEMITAEKNRLGFSSAAVVRKGIEKHIRWLERQLEDLDSDLDRFIQDSPVWRTKENLLRSVPGVGPNLARTLLADLPELGRLSHKQIAALAGVAPLARDSGTLRGKRMTWGGRANVRTALFLSTWSASRWNPSIRPFYDRLRAAGKPPKVAQVACMRKLLTILNAMIRDGTAWNPALEPELQHGC

SEQ ID NO: 104737 - protein, 443 aa, unidentified
MSKKRVSHLRGERGQAFAELIRGVPAERILCVSIDISKYFHVAMIHNGLGEIVQSPFEVDIYQSGYDQLCQAIDQAKVQTQAQVVLVGMEPTSHYFENLARHLLERPDPVKLVNSFAVKQNREQQLMRREKSDQIDAAAIGDLLRRGEGTPYQPAQGLYLQLQQLDRVRLGKVKIAGILKNQILGHLDRIFPGLVLIDESAKQRYTPLFNVDFWKCQTLQDLIRVCPNPHELVKLSPTALVQAFHAQGRRLGPVTATKIIALAHRTLLPDPELATIRGELLQYDLTLLEHVQALIDQLEQRLNQLVAQTPYQAWTHLKGLSSVQVASLAAAIGAPTHYTSAAQIFRRSGLVSGRNDSGNRQRRGKGNHVLKTGDVYLRRALMNSVATLLLHQPSLIRYSHHLQLSKHPGVARVATARKTIGILWAVLRDQSSNSLIYCKGAEM

SEQ ID NO: 104738 - protein, 446 aa, unidentified
MRSTASLPILRPHAASADIGAHEIYVCLPGADHPQLVRTLGVSTADLHALADWLKEHHIETVVMESTGVSWIPLFETLEAAGFRCCLVSARSLRRIPGRKSGVLDCQWIQTLHTRGLLKASFRPNADLIALRSLLRHRAQLIEHRSPPILHMQQALIHMNIRLDQAVSNPTGDTGLRIIRAIVAGERDPHKLAALRDYRCKKDEDAIAQALTGTWRAEHLFVLKQSLELYDFSTRQIEAGDAEIERVYGTVRPGENGCDDDAPASVPEHKRKSHSKNAPKGGAIRKHLKRICGVDVTAMRGRSEVLAQEIVMETGTDMTKFPNEKHFCSWLGLAPKNDISGGKVLRSATLKTRNRARQAFRKAAASVMRSDCVFGVFYRRMKARIGPAQAAVVTAHLMARVYYRMVKDKVEYQPLRVEEYEPRYRQQQVCYLQKKAARLGFQLTPA

SEQ ID NO: 104739 - protein, 361 aa, unidentified
MWIIGCDFHPSGQQVYAVDRETGTIVERWIEHDGKAVDEFYAALPAGSEVGVEASGNMLWFERKLAQYGHRLRLGDPAQIRARDPRKQKHDRRDAEHIATLMLKGDFPELQWVPTLQQRDQRQLLMHRHKLVRMRVQIKNQLQHIALNQGLQKKRQLWSRAGRQLLESLPLEPWTARRRGELLQLLDLLDGYCDRLDQAVEKLAAENSEARLLMTHPGIGPVISLAAVLTLGEMSRFENSRKLVSYLGLNPSEDSSNQRRRLGKISKQGNSFLRLLLIQGAQTAVRGDEELGRQYRRLAVRKNKSIAKVMVARKLAVRLFWMLKTRQSYPELVGMRGSSGHSVMEETVRLSERPASPSVQE

SEQ ID NO: 104740 - protein, 488 aa, unidentified
MVKSVGIDLAGTGEHKVRCLDERAQLCDGFGFQTTPDGLAKLEERVFLDGCNPVIIFEPTGLAWVLMAVYLRARHPDCRLVRVQSHKVATLRKYLRRSSKSDRIDALTLAKMPFIDSERLEELYLPPAKIYAIQRLARQRKRLESEIAARKKRIGSILDGYLPGLREAFASPWSSQARAFLSAHLNPLATISAGENALNTFLAKAKPRGKRDKAECHRVYLSCQNAAVLYELSSSAGVVNDDFFAYLQEEIAREIRLMEFAETESEAIAQHLEGLYKELHTSDNLRTIPGVGQHTAPIFLATVGDPSRFRSQSAFANYTGVVPAARQSSDTEAKGLRMTKAGPAIMKWALYQASQIGRRCDPQLAWVYYRQMVYHGKNHKQAMGAVMSHMGARILTVLREDRPYELRDTDGKPISREEAWKLILSNYKVPEEIKRERRRKTTAAMLKPQTKNREMAVYRTNEAAIAPQPVSLSAISDSKSNSALMRGQ

SEQ ID NO: 104741 - protein, 344 aa, unidentified
MNNLSRVGVDLAKNIFQLHGVNRTETSTWCRRLKRDNWIKVLLNKVEPGCEIGMEACTGAHHWARLLQSKGFHVKLIAPQFVKPYVKSNKNDANDAEAICEAMSRPGMRFVTVKTIEQQEIQAVHRIRSELVGQRTAKGNQIRGLVAEYGLVAPQQINHLRTALPEWLEDAKNGLSDRFRRLLNGLWEDMKRLDERITEMDKEIALIADNDPVAKRLQQLRGVGPMVATALLASVGDGKQFSNGRQMAASLGLTPKQHSSGGKDRLLGISKRGDAYLRSLLIHGARSAIYAARGKEDRLSQWVISIASRRHPNVAAAALANKTARIAWAMLHHDTDYNPEQTAA

SEQ ID NO: 104742 - protein, 450 aa, unidentified
MKKDERTRKPVKKNRVFNSLTVNNPNSAGIDIGSRNHWVAVAPHLTTNNIRKYSTFTSDLIEICKWLKDCKVETVCMESTGIYWIPLFDLLEKSGFEVYLCNATQAKNLPGRQKTDNLDCAWIQKLHSYGLLTNSFIPNLTIRNFRSFMRHRENLTRDQSRYKLRMQKLLTQMNILLPKVLANITGKTGMLIIKAIISGNTEPEQLLGFKHYGVKASDKTFLKALQGNYDKSLIKLLNFELKQYESTKALISDLDDDIKLVFAEILTSDSKKISAKAKLSEKEMLIAYAGVDLTEIPGFDVLSARKLICETGSDMSKWKDSAHFASWLRLSPHSKISGGKLQSSSTLKHKPRAAIIFRQCADTLKRNKSYLGDFLRRKKSQKNYGKALTATARKIAVIYYNMLKYKTPYVELGESFYSLSYKTRSIKRLDNYAKSLGYQIVKNDENITVK

SEQ ID NO: 104743 - protein, 390 aa, unidentified
MPKFNDLSRSLVAFEQDSTIVAAIEMSSSSWLVGGFVPGRSRDPQKKVPAKAQMLLDLLHEWRDQAVAAGKVIKRICVAYEAGRDGFWLARWLCERGIEAYVIHATSIPVSREHRRAKSDRIDLGLLKRSFLGWLRGERKHCSMVAIPSREEEDGKRLLRERDALTADQTRLVNRMKSLLVLHGISGFKLKLKKAEEQLSRLVTAEDKPLPPDALAELTRLVERLRLAKQQIAAIDKAQRARLVKAPKDGPNPLILILARVMGVGLMTAEKLVREVLSRPMRDRRAVARYVGITGSPDESGKRRREQGLAKAGNGRIRRDLIQLAWRLLRHQPESALVKWYRARTSDGRRDTRKVMIVALARKLLVAFWELVTNGTVPEGMKLHPAIVAA

SEQ ID NO: 104744 - protein, 381 aa, unidentified
MGVLVYHNSGLLRPSAPLKTLGERNEKSRNQIRRNRLWKKTLEVIRIGDNSLHQRQQFSTTEIGISKLINWLNPNDVVGLEAGSQSFRIAKSILNKGIQVIVLNPGDLATIYQSLKKTDKEDSLKIARLIQRFPIEELPVVPIPNDEEEDNRRLCTEQENWTRQLTQSKNRLHSLFTQAGLTHITKKHLRTKANREISVALLPSRYQKEAERILKVLDLVEQNLKLIEEEIKEALKKNKAYAQTIMSMPGVGMITSLAIMSYMGNCKRFSSAKQAAYYVGLVPRVDISGDSAYYGRIVNRGCHSIRRVIVQAAWSLVRCQYGGKIKEFYQRLYPKKGAKKSIIATSRKMIEILYTMIKTGELFDSMPEKVLNRKLTQYGLM

SEQ ID NO: 104745 - protein, 323 aa, unidentified
MDPVMTMFLGLDVAKAKVDCALLLNGKVKSKVVPNNQEGFETLKQWLTKQGATHVHACCEATGTYSDAIALYLHDHGHTVSVVNPAQIAAYAQSQLVRAKTDALDAKLIARYCERERPMTWTPPPAAERLLLALLRDLQDLQSMHQAESNRLDTAHPDVRERIERHLEFLGCEIGQLRKKIERHIDDNDQLRGRRDLLDSVPGLGEHTIPWLIAYLGDGQRFPGSKCAVAFCGLSPKPHQSGSSVRGKAHISKTGHADLRHALYMPAVVAYSRCKAFASFVQRLKAAGKPPKVIIVALMRKLVAIAQAILKSGKPFDPSLHCT

SEQ ID NO: 104746 - protein, 431 aa, unidentified
MDQNNADWLGLKQRICVVTGAGGGIGRAVALAMASAGASLVLLDKDAANRPAWLDRSVASPPLRCAHRPVRFSSPFEKGDWFMVMLGIDAHKRTHTVVAVDVLGRELGVRTTTATTTEDHLELLRWASQFGADRVWAVEDCRHLSRRLERDFLAVGERIVRVPPKLMAHARDAARSYGKSDPIDALAVARAALRHPDLPTAQLDGPARELRLLVDHREDLVAERTRCVNRLRWHLHELDPSWDPPARSLIRVKNLDAVAARLATIEGMTARIATDIVARVRDLTVAERALEREITTRVHELAPTLLGIVGVGALTAAKLVAEVADVRRFKSKDAFARHNGTAPLPVWSGTHERHRLSRTGNRQLNAAIHRIAVTQKRCHDDAKAYLERRAVLGNSNREALRALKRRISDTVFRALVQDAHDATATCLPQAA

SEQ ID NO: 104747 - protein, 328 aa, unidentified
MSMIATQAEFNHVVAFEVSKAELVVHRLPADAQSTIANTAKAARRLLMAEQKSIAKQANGRLLVVCEATGGYERHVLEACIALGIACHRAHGSRVRFFAKYLGISAKTDGIDARLLADYGRRSHDLRLYAPPTPDEVALKDLKGRRDDIQAMMIAEGNRLEHARHASVLRSLKQHLATLKKAFDSLEKEIACLVKSCPALAHKASLMRSVKGVGPVTAATLLAYMPELGSLSKGEAARLAGLAPMNRDSGKLSAPRHVEAGRAAVRRTLYMAALVATSDNPVIRAFAGQLKARGKPFKVVIIAVMRKLIVILNAILRSGEPWREAHAA

SEQ ID NO: 104748 - protein, 414 aa, unidentified
MTVLFVGDDWAADHHDVELMDQAGRTLARARLSEGAAGMAKLHALIGEHADVADGENDLEVRIGIETDHGPWVTALAAAGYVVFAVNPLQAARYRERHVVSGAKSDTGDGHILADMVRTDAHQLRPVADDTDEAQAVKIVARAHKTLIWERNRQAARLRYQLRDFFPGALDAYGGLGLDSADVLELLGKAPDPAAAAKLTTAQVSAALKRAHRRHVAGKTTMIRAALRAPQLTQPAQVTGASAAVVRALAAVIVTLNQQITVLQGQVEAYFLAHPDAEIVLSQPGLGQILGARVLGEFGDDPARYASAKARKNYAATSPITRQSGKRKTVMARYVHNDRLRDALGRQAYSALTASPGARAYYDQLRARGIEHDPALRQLANRLVGILHGCLKTRTLYDEATAWPQNDRQYPSVA

SEQ ID NO: 104749 - protein, 316 aa, unidentified
MDGANQAWIGIDVAKATLDLHILPAGQAQHLPNTDAGHGQLRKLLPPPSTCLIVLEATGGYERQLVADLTDAGYKVPVINPKRARDFAKALGLLAKTDRIDARVLALFAEKVQPAPSEKTPEKQAEIQQLVARRRQLIDLRTQESNRWDVMPAKAARKSIQSVINTLEAEIRGIEKLIEALLESDDEWRSKAELIESVPGLGGVTATTVIADVPEIGKLNRQQISALVGLAPYNRDSGAMKGKRSIGGGRKSVRCVLYMAAMAARRSNPVIKAFADRLAQHGKPFKVIITACMRKLLVILNSIVKSGRPWMAQTTS

SEQ ID NO: 104750 - protein, 340 aa, unidentified
MKQFSRIGVDLAKNSFQAHALASKDGRATTRKLSRSAMRAFFSGVKPCLVGMEACGSAHYWARELRAMGHDVRLLPPAYVKPYVKRGKNDAADAAAICEAVSRPKMRFVPIKSEAQQARLMAHKTRELLIKQRTMAVNALRGRLAEFGVIAAKGIGRVEELIEKAADAGLPEIAKATLTVLVGQLKTLNAAIADLTRQIASAQARDPLARLVAGVPGVGALLASAITASAPDPSVFKAGRDFAAWLGLTPRQDTTGGKVKLGAITKQGNRSLRRLLVVGAISLLRVAAKHNGALGGWLIALRARKRTKVAAVALANKLARIIWAIMTTGEAFRTHIFARA

SEQ ID NO: 104751 - protein, 335 aa, unidentified
MNYFSAIDLHSNNAYLVVLDEEDNSVYEKRLPNELALIIDALQPFKNDLVGVAVESTFNWYWLVDGLMAHGFKLHLVNTTAVQTYSGLKYTNDVHDARWLAKLLRLGILPTGYIYPKQTRKLRDLLRKRSGLVQQRTLNIASFKSLYSRQLGITLNTNAIHKDIDQFTFTDPMLEAIAAPHKRLYRLLTHEIKQQEVIIKNHLTPQLDYQGLQTVPGIGQILAATILLETGNIERFEKVGNYASYCRCVKSTRISNQKTKGKGNAKNGNRYLSWAYAEAAHFAIRYAKPIKRFYERKKQKSNGIIAMKAVAHKLARACYFMMKNHVEFDMQLAFS

SEQ ID NO: 104752 - protein, 348 aa, unidentified
MNATRKAVVGVDTAKSVFQVYTVEQATGEVINKPIKRAQFLQWFANRPPGLIGMEACGGSQHWARKLQELGHEVKLMSGKMVKAFVIGNKNDAADARAIYLAAQQPEVKAVAIKTEAQQAVLAMHRIRQQLVKMRTAQMNALRGLLAEYGEVFGTGRKAFDAGIKAALERLAERLPMPLIDALRDQWSELARLDDRIVRIESSLLTWMRQDRAANAIFAIPGVGLLTATTVVAAMGDAKAFRSGREFAAWLGLIPGQTGSGGKVRLLGMSKRGDTYLRTLLIHGARAVLRRPKTLSPWLQQLSQRRPLNVVIAALANKMARTIWAVLAHDRAYDKDHVSMRPDTAVAA

SEQ ID NO: 104753 - protein, 339 aa, unidentified
MQVTTVGLDLAKNIFQVHGVSENGEVAFNQALRRAQLLAFFEKLPPCLVGMEACGSSHYWARELSKLGHEVRLIPAMYVKPYVKRGKSDAVDAAAICEAVTRPTMRFVAIKTEDQQGVLFVHRARDLIVRQRTQLSNMLRGLLGEFGIVIAQGIGSAIKFAKAVLDGDKPNIPEIAIDVLSNLSNQLVALHLRVRWYEMRMLLQAKQDPRVMLLRSIPGVGPVTASAIIATAGDATQFKNGREFAAWLGLTPLNRSSGGKEKLGRITKMGDRYIRRLLVTGMTSRLRQMKTHPERADPWAQALLDRKPVRLATVAMANKTARIIWAVLTKNEYYRPHTA

SEQ ID NO: 104754 - protein, 418 aa, unidentified
MKVVFPTCCGVDVHKSFLVATIIKTPKESLQPSYQKKRFSTFNSDLNRFADWLHENNCLDVCMESTGKYWVPVFNILEKRGIRVTIANPKWVKAVKGNKDDTKDSKWIGDLFRIGLVKSSFIPAKDIRILRELTRYRYKLTSMKSSEKNRFQNAFTVCNVALDSVVSDMFGKSATAITDYLTSDEDFDPQHCVSLLHRSLKKKAEDVLSSIEGYEITLEQKCRIGIVRDHLHYIEKLIERVDICINTMVEKYDGAISLLRTIPGIDRSSAITVISEIGVDMAQFGSSKRLCCWAGLTPGNNESAGKKKSVRISRAGVYLKPVLVQAAHAAVKDKLNPYYALKYERIAKRRGKKRAIVAIARMILTAIYSMLSTGEIWNPVDLFKVDMPEHLKEQQLQKAMKQAVRFLEAQGLTVLDSA

SEQ ID NO: 104755 - protein, 339 aa, unidentified
MKVSTLGIDLAKNVFQLHGVGCNGQTVLKKKLTRDKFLPFLMQLEPCLIGMEACASSHHFARVLRQYGHEVKLIPPQYVEPYVKTNKTDAADAEAICEAVARPNMRFVQIKTAEQQAILVLHTERNILIRERTACANSMRAILAEFGIIMPRTLSQLYKKIPEILEEYDNELSPFVRCSVARQLEHLQGVEDQITLIEQELSRWAKTQPACQRVMKVPGVGLMTATYLVASVGNGQQFHPAKQFAAWLGLVPREFSSGGKQRLGRISKRGDRYFRYLLVHGARAVAAVIERHKDNMPWLYRLLNKKAYNVAVVAQANKTARILWSMLVHHTEYRTLSAV

SEQ ID NO: 104756 - protein, 325 aa, unidentified
MADNVTGIAVVGGVDTHKDLHVAAVVDQNNKVPGTRSFSTTRQSYRQMLAWMASFGALKRIGVEYTGTDGSGLLCYFQNAGLEVPEVTAPDRMARRKRGKSDTIDAECAAHAAFSGIRTVTPKTRDGMIESLRVLKTCRKTARSARRVALQIIHPNIISAPDELREQLRIMTRMQRIRMLGSWVPDASEYRNVTSVYRITLKSLARRYLELHDEIADLDVMIAALVDELVPELITHNTIRYENASQLLITAGDNPQRLRSESDFAALCGVSPVPVSSGKTNRYRGDRAAKSVLHIIAIGHLRTDDKTKAYVARRVAEGHTKMEAI

SEQ ID NO: 104757 - protein, 314 aa, unidentified
MKQNIQINVGIDASKAQLDIYVRGPDEFFSVANDAAGIRTAIRQIKSYQPERVIIEATGRIELAFVVAGHKAGLPLVVSNPFYIRRFAGAVGRLAKSDKLDAQVIAHYGEAVQPRLTDLKPEKARLISDLLARRSQLLEMSTQEKNRLSILPKALHVSLKRILRHLKAEIERVEKRLDKLIDELPQWQEKRDVLMSVNGVGKVLAYTLLSDLPELGTLNRKEIAALVGVAPMNRDSGNYQGKRHIRGGRAKVRRVLFMAIMSAVQSNPKLKKKYQALKAAGKPPKVALVACMRTLLTILNVMVRNGEKWNPEYA

SEQ ID NO: 104758 - protein, 412 aa, unidentified
MQVIIERCAGLDVHQETVVACVLAGTPGQRPTKEIRTFCTMTRDLEALRDWLKAAGVTHVGMESTGVYWRPVYAVLEGHFELIVGNARHIRNVPGRKTDVKDSEWIADLVRHGLIAKSFVPPKPLREMRELLRYRRKLVESQAAERNRLLKLLETANIKLASVASDVFGVSGRAMLKALILGTASSEEMAALAKGRLRRKHADLVLALDGRIEDYHRFLLTLQLRRLDAAEQDITALDKRIDEKLEPYRTQHALLMQIPGVDWLVAAVLIAEIGIDMSQFLSVFHLAAWAGVCPGSYESAGKQKSGRARKGNVHLRTILVGAAISASRTKGSYLRDKFHRLKARRGALRAALAIAHKILVAAYHMLAKGVPYKDLGEAYLDEIGQTRTLANLKRRIERLGYHVILEPQAAAA

SEQ ID NO: 104759 - protein, 327 aa, unidentified
MRYIGIDVSKATFMVAYPLKKGGYRTHEYPNTAKGIHEFIHTLEADDHCVMEATGYYSYLLLYLLNQANITTSMENALKVKNFARTMLSVTKTDKADAQLLSLYGERMRPTPFKMPPESILLLKQKRTALRQFQKQLHATNNLKKSLEALPQRDAITFKSINKIIETLEKQIGKLEEDLVALTKKEFDRQMQKLTSIKGIGASLAAALIITTGGFTYFDNAKQVSRYLGICPTYQQSGTSVNVKGHINRNGDAHLRSQLYVASWSMSLYNAECRKLYLRMKEKGKPGKLIMIAIANKVIRQCFAVVKNDTYYINGFVSQRPLPSKLS

SEQ ID NO: 104760 - protein, 335 aa, unidentified
MENYFFMGIVVTRSKLVYCLMNQNKVLKQGDTANEMSAIRLSISLLLHEFNLAKEQMLICAEHAGQYNYPLIYICENENYRLWLENPNKIKFYCSGLQPSKNYRLNSKQIAVYASRNADKINNCRQPISEVEHLKQLHNELNMLQTDSAKLQSQLFDQRNYMSEEVFNVNATRLIVLIKGLEEAIATVEDEIKCIFAGNKFLSQQMELLTSIEGVEHKVALKMIVETDAFTRFDNYRQFCSHVGIAPLKTVLKANQHFQYPVNVKLDKGIKTLLNEAALSIIKKKDSELRDYFIRKLKEGKDERLVLNAIRVKLVARMFAVIKANQKYQPKYSIG

SEQ ID NO: 104761 - protein, 408 aa, unidentified
MNKLFVGIDVGSRDNAAYIMLPDGEKHSSFPIQNNLGGAQTISKRVVSALTELNLTNVVIGIEATSVYGDNLMCFLREDGALSKFERKFHVLNPKQVKKFKDVHPDLPKNDPVDAFVIADNLRFGRITTAVYMDDYRYKALQNLTRARFYAVQSLTREKQRFMNYLFLKCSGLAQEKVFSDNYGKAALAVFEEFDSPDDIVNMDVEELASFISVKGKNRSPRPDEIAKAVQAAARGSYRLPKTVNDSVNQVMSISISSMRAMQAQIKSLEKEIERQFENIPNTLTSVPGIGKVFSAGIIAEIGDINRFPKGQAGLAKYAGLVWNENKSGMFEGQDTRLIKSGNRFLKYYLCEAAFSLVRCDTEYKRYYDLKFKEVNKYQHKRALALTARKLVRLVFRLLKDNRLYKPV

SEQ ID NO: 104762 - protein, 486 aa, unidentified
MNTSRIVAKSVLPDVLRSAAEANLETAYRRCSGIDVHKKTAMVHVRPVQGQAAGRTLEREFRTFSRDLRSLRGWLKSCRVTEVVMESTGQYWRAVWNILEGAVPRLVLVNPAHVKALAGRKTDWIDARRLARYLENGDLDGSFVPPREIRELRDLTRWRVHLLQEVNRVKNRIGQMCEAGNIKVSSVASDLFGLSGRRMLHAIVEGKRDAGWMADYARGRLRCKRKELTQALEGSFTEAQRWMLREELQHLERLETQIAGADQEIEGRMQDYVELLRRLRTIPGVDRVVAWRIVAELGPDMAVFPDAAHAASWSGMCPGNRQSGGKRLSGRTRKANPYLRRALAEAAWAASHAKDSYLAALYRRLRGWLGHNQAIFAVAHQILRVAYTMLRRGEDYRELGGDYFDRQNKPRVVPRLVERLARLGYEVELKPTAPPEMAPPLPETAGPAPTVQPQKRKRGRPCKCAQRGIPCPHGPGKPESAESGTP

SEQ ID NO: 104763 - protein, 431 aa, unidentified
MKGGDFMKNNFLSTLFVGIDVSSKTNVLCALDFQGNKLLNLKALNNQPGAESVLKSILDCLNSNSFKFVVIALESTSFYSTHIANFLSSNEVLLAYSPMVYCLNPKTISNYRKSFVDMDKTDPLDAYVIADFARCGRIKSQPWRGAQFLALQRLTRHRLHLVEAIAREKTYMVSNIYLKFSQLTVLEKADRPFSNTYGATSEAVLTEFLSLEDIAYSSIEDLVAFIKDKGKNRFSNPVGTAELLQKAARDSYRLDKVLYEPLNIAIASSFNVIKALQIEIKEIDKAIEKNIKGINTTEYQSLISIPGIGPVFASGILAEIGSITSFSSNDALAKYAGLTWRIKQSGDYSADETNMTKTGNKYLRYYLIEAANSVKHRIPEFNEYYHKKFNEVPNHQHKRALALTSRKLVRLVFGLLTKNQIYSNSKVGEVQ

SEQ ID NO: 104764 - protein, 415 aa, unidentified
MEHIYQVAGIDVHKSMLAVVISDAGREGEFQFQKRKFGATAKELRAMHDWFREQGVREAVMESTAQYWKPVWQELEGGCALFLAQAFSNRAPRGRKRDFADAERLLRRHVAGELIVSFVPNPEQRLWRTMTRSKHQLTRDRVRIHSQVESLLEDGRIKLSGCVSDLLGVSSRRMLHGLAKGETDAALLAAMADPGLRATPEQLQDALSAAASLSPMHREILGLFLTRLELIEKQIETLERHIATALHDHQDAVQRLAEVPGYGIDSAQQVIAEVGGSAASFDSPGQLASWVGTCPGREESAEVSKNNRSPKGNRMMRRVLNQVANAAVKSKGSAFQNLYRRLAPRLGHNKTIWAVAHRLCRLTWKILHQAVRYVEYGLRPNPKAVRKRANKLLRGLKALGYQVHITPIGPRAPAI

SEQ ID NO: 104765 - protein, 343 aa, unidentified
MQVVTTVGLDIAKSVFQVHGVDAQGEVLIRRQLKRRYVLAFFQKLPPCLVGIEACASSHHWSRELKALGHTVRLMPPAYVKPYVKRQNNDAADAEAICEAVTRANMRFVETKTPEQQSGLVLHRTRHLFIRQQTAVINAIRSHLGEFGIVAPIGRNGVEDLLDVVADPSDKRVPEIARACLAALGAQLRKLKEQILQFDRMIRAWHRSNEMSLRLDDCPGVGPVLATALAATVADPKAFRSARNFSAWIGLVPKQHSSGGKNRLGSISKQGDRYLRSLFVAGALAVIRYAKIHGTKHRPWLTALLARRPTKIVAIALANKIARMAWAMMAKGECYKQPVALAV

SEQ ID NO: 104766 - protein, 355 aa, unidentified
MDSKKYIGMDVHKESISIAVRNGAGKIVMECVIETKASVILQFIDGLRGDLQVTFEEGTSAAWLYDLLKPHVTKLVVCDPRKNASMREGNQNDKIDARRLAELLRLNHLHPVYHGEHGLRSLKELVRSYLTITKDLGRVMSRVKAIYRSWAIPCSGKQVYAPRHRAEWLGKITEPGVRRRAEFYYQQLDALRALRQQVRRDLLAESKKHPAWKRLCQIPSIGPIRAAVLLGILQTPHRFRTKRQLWTYSGFGIETQSSADHRRVDGQLERAKKQISIRGLNRNCNHDLKNLFKGAAIVASSKPGPFQEFYTTLLTKGLRPEMARLTLARKIATIVLIVWKRGASFDAQHLKPQTA

SEQ ID NO: 104767 - protein, 370 aa, unidentified
MKVVGIDLHTNCFTCCYLTDNSKEKQTETFTLDPQGLRRFYSTINKETYILVEATINTFSFITLFKDMIKEVIVANTYQLKSTGIAAKKTDKLDAAKLVEKLKAQVISGVQQIVPVTIPLKEIRDLRALFATYRALRKEIGQTKNRIHSLLKENLYPFTKEYIFGKKARKEIRAISSDYVLSFQINLLMDSLEHLEEAFEKLVVEIQKAGSLFISQIEILTSMTGVSVITAIAIISDVIDVSRFRNSKHFASYLRSAPRVESSNDKTIIKSTTKAGRKLSLTLLSQSLNHFRDNNKILTNFYERAKVSKKKGVVRMALCRRVITQIYQMLKKQEYHYFYNPILHGRKMTEYRKFLEGKNITFSQNYHFVA

SEQ ID NO: 104768 - protein, 330 aa, unidentified
MEAILNNCCGLDIHKSTIVGCILKTKHILDRTRTADNDYTIEIREFNAYPEGIEQLKQWIISNDCHNVAMESVGIYWIPIYEALETSYDGNIELIVTNARHMKNVPGKKTDIKDAKWIASLYRAGLLKASFIPTHEFRELRQLTRYRKNITHDISTQKNRIEKTLQQAGFKLSNILSDIFGTSGRNLINVLIHKGCLTTKDVDVSVVRISKEKISEIKIAITGTLSEHQREFLKIQMTLLDQLIAHLSLTEDKISSIAVKFATQIAQLETIPGISTTSAISVLAEIGIDMSKFPTSDHFCSWAGLSPGCNESAGKKKALEFNMVTPILRA

SEQ ID NO: 104769 - protein, 410 aa, unidentified
MTMITITQNTPVLVAIDIAKARHEVLIAVPGKKRRRRLTVLNELADFTRLITALKDYGRPVRVAFEATGNYHRALAYHLATAGFEVKLVSSVALARTREALNNSWDKNDPKDAQVILHMMEIGNEQFYHDPLVRGTNDIQELSKTHDIVSKSKTELWHRILTHYLPLYFPEADRFHRSSRSDWFFAFLERYPSPHFISAMSKDAFTADAWDVVGRKVAKERLLADIYEASKVSVGLPVALDSDAISMFRLVLGEGRSLIAQRNQIEARAVALLKDLPDYQLLTSIPGIGPINALTILAEAGDLRRFGHHRQFLKFCGMDLATIQSGTFRGQTKLSKYGNARLRRTLWMAGQVAILQRTNSFRDKFERYISKDRQNTHLRRKAYTAIAAKMARTVHGIIKNGEPYRPFFEG

SEQ ID NO: 104770 - protein, 343 aa, unidentified
MQCKTIGLDLAKNSFQVCGVGEHSTPIFNRKLKRNQLVPFFAQQTPTTVVMEACYSAHYWGRELVKLGHHTKLIPAQHVTPFVRGNKNDHNDALAIAEASQRPHVRFVPVKTEYQQEILSLHRVRERLQRNRTSLVNQTRGILSEFGVIAPVGVKHLRAKLAHVIGDTSCSQGLRNIVANAYVELLDTEQRIEDIEQRLKAFLDEHPCRDIIMSLPGVGLINASAFLASIDKGQAFHSPREFSVWLGLTPQLFASGDSHRMGGITKRGDRYLRTLLVHGARAALSRSRNKTDALSVWGNQLVHRRGYNKAVVAFAHRLARLMWILLQRNECYQPQPALEVYQG

SEQ ID NO: 104771 - protein, 374 aa, unidentified
MTSLKQGIIQDNMRVVFGIDVSKASSEVAILVNGEKVHGYTISNDAIGFARLLGDLRTVHKPEIIFEATGVYSRRLQTFLDDNGYAYTRLNPLEAKKQLDSLRVRKTDQIDAEKLAQSQFVLNRKPTYVQEEVYQNLRDLSRFYQNLTEDIVRAKNRLHKVLQVTFPELENILSTPSGEQYWNLVIAFPCKDCVLELSNDELSKSIRLSTSKRISDKRVAYLAEKLIALANQSYCAVKKTSPILEEVRYYAKELLRLYEQRQAVLDEMVELAQPLPEYDILLSIPGIAETTATSIIGELGDIRRFQSANQINAFIGIDLRHYESGNFLAKEHITKRGNPYARKILFKCIHNIASASHTNPCHIADFYKKRKRQS

SEQ ID NO: 104772 - protein, 409 aa, unidentified
MNTGTITAVGIDVSKHKSTVSARRPGGEVVLLPFDVEHTAEGLKKLVAKLRQLDGEIRIVMEHTGMYWRPIAMTLKEAGFYVSVVNAILIHNFSDNSIRKVKTDRADAMKIANYGLTFWIYLQEYAGEDENRQLLKIQSRLYERTATTAGMLRNGLISLLDQTFPGANKLFRDDSRNSRGHVKWIDFVLRFWHKECVAALSLATFTDTFQKWCKRTGYKFSASDAERIHAIARNAVATLPKNDSTKLLITQATNSLNAIYDSLQAIRTEMDRLASMLPEYELVMGMEGIGKVTGPQLMAEVGDVRRFSHKGALVAYAGVDASPYQSGSFDSKSCHVSKRGSPHLRRVLFVIMSMTLIRANTANPVFCFMDKKRAEGKHFYVYTVAGSAKFLRIYYAKVKEYLNALEETA

SEQ ID NO: 104773 - protein, 342 aa, unidentified
MVISVGIDVSKDKHDCFIVSAEGEVLADVFTIPNNMDGFHCLLQRIQTCATPQDKIKVGLEATGHYSYNLLGFLLDNGLPTYVLNPLRTNLYRKSLSLRKTKTDRVDARTIASMLLSDAGLKPYTDTAYHNEELKSLTRYRFDKVKERAKLKSSISRLVCILFPELEKLVPSLHIASVYALLAEFPGAKQIAAAHLTRLKALLETASKGHYKRDMALEIRDAARNSIGSWMPAKSLELQHTIRLIRELDDEIVEIEEQIQAIMDELNSPITTIPGLGFRMAAMIFAEVGDFTRFDSPDKLLAYAGMSPSTYQSGQLKNCYPHMEKRGSRYLRYALYLSLIHI

SEQ ID NO: 104774 - protein, 335 aa, unidentified
MDSIEMIGIDLAKHNFHVYAVNRVGRLVVERKLKRAQMMQWVAQVPPSIIAMEACSGAHFWGRQFMSLGHTVRLISPQYVKAFVRGQKNDRNDAEAICEAASRPAMRVVAVKSADQQQILALHRVRDLLVKQRTAAINQIRGLLAEFGIVVPQGRRTLMAALPDILEDAENQIPPMMRTLTAEQREWLMQLDDRIAAATKRIEQLARADETAQRLTMLRGVGPLVATAFIADVGNPQVFRNGRQVGAWLGLVPRQHSSGGKTRLSHITRRGDGYLRSLLVHGARSIVRTAARHEDPMSKWILEMEARRGRNRTIVAVANKLARRLWATWRYAEAA

SEQ ID NO: 104775 - protein, 338 aa, unidentified
MCKVDLHTTSRAEGGIVFILGIDIAKRKYDVALLKPDGKFRAKAFANTAAGHAELLAWLGRQEAGLVHACLEATGTYGLAVSEALADAGHTVSVVNPAAIEAYGRSRLSRTKTDRTDARLIAQFCASHQPPAWIATPREVRELQALVRRLDALEGMRQQERNRLAAEPASAVVRASIQHVIDTIDLEMAALKTRIHDHFDQHPRLRQQRDLLTSIPGIAETTAAVLLAEFGPIGRFSQASACAAFAGLVPREKRSGTSVHGRPVLSKLGNASLRKALFYPALTAMRHNPIIKAMRERLLTRGKHRMVIVGAAMRKLVHLAYGVLKTETPFDPGFVKNR

SEQ ID NO: 104776 - protein, 322 aa, unidentified
MAVIGVDIAKRSFDLAVLQSNGKHRTKGRLSNDPSGFAVFADWLQQHAEPGAWIVMEATGTYHEALAEHFHALGYRIAVLNPAQIARYAQSQLQRSKTDKLDAKLIATYGQRHEDSLRAWHPEPVSIRTLRALTRRLEDLQSLRQMELNRLEVSPEKVQDSIRAVVQRLDEQIAWTLEQIKRHIDDDPDLSGKRDLLVSIDGIADKTAALILAELGDIGRFADARAVTAFAGLNPRLQESGLYRGHTGISRMGSVRLRSALYLPAVVALTYNPAIKAQAERLKTRGKKGRQTVCAAMRKLLTIAYGVLKSGKPFDPALAIAH

SEQ ID NO: 104777 - protein, 343 aa, unidentified
MQVIIGIDPHKATHTAVAVSGDEDELARLKLRASRGQVDKLLTWAAPFPSRTWAIEGAEGLGFLLAQQLVTAGETVVDVPATLAARTRVLGTGRSNKNDPNDAMSVAVTALRTRDLRRVQSVGNSEVLRLLSKRNLDIGRQRSRTVSRLHSLLVELAPGGIAREINVSNASAFLAGITPTTAVEQIRYDLANDLLDDIRRLDVQLKESHKKISAAVRASSTTVTELFGVGPMTAAILIGNTGDIRRFRNRDHYAAYTGTAPVEFSSGGRIAHRLSRRGNRTLNAAIHMAAVTQLRHTHSEGRIYFERKVAAGKTKREALRSLKRHVSNAVYRQLLADAHQLDR

SEQ ID NO: 104778 - protein, 338 aa, unidentified
MIVIGVDVHKQSLTAVAVDEAGRMLDERTAAVTQHELVAWADGLGGERLWAIEDCRQLTRSLERELIAAGEQLVRVPPKLMAPERRTGRERGKSDPIDALAVARAALREPRLSRPRSDEQPYRELKLLVDHREDLVDERRRIQQRLRWHLHQLDPAFVVLAKGLDRQVHIDRVGRWLARRPAEVQVRVARELVVRCRSLSRTINQLDHELEQLIAETAPALLELPGCGAITAAKLLAEIGPIGRFDSEAQLARHGGVAPLQASSGRVQRHRLDRGGNRQLNCALYRIAITQARVHPPARAYLERKQAEGKSRREAIRCLKRTLARVIFNTLKNEPLLT

SEQ ID NO: 104779 - protein, 393 aa, unidentified
MPIVGGLDIHRKQITFDYLDTATGEVKRGQITPADRKHVRAWLARFAGRGEVAFALEGCTGWRYIAEELAAAGIAAHLGEPADTAALRGRKRHAKTGKTDARHLRTLLGEGRLPECWIPPGHILEYRALLETYHDLRAEHTAWVQRIHAVFFHQGAPRLGEGALRTEQGLAGLRAAAAAHLSPAGQLQVATALDMLAAVEARLGPLRRQLRDAARHLVGAKVLAARLYGAGPITALALTCWLGGAGRFSSSRKAVRFTGLDVTVHSSDRKGPPGRLSRQGPPVLRWAVYEAGMTHARISAPDHGYYAAVKDRKNGKRAALPGGPQDRPAGLPHPGRARRRRAYRRLTAPTSDGGHAEDTPDPRAGTPAATLPRWGTTAASSCKPPVRRRRLLP

SEQ ID NO: 104780 - protein, 461 aa, unidentified
MKSKKPAGKHKESARPKVDWKALEIVHPNAAGIDVGGSEHWVAVSPERDPEPVRAFRCFTADLRAMARWLVEKGVRSVALQSTGVYWMPVFEILEQHGLEVYLVNAQHTKNVPGRKSDVQECQWLLKLHTFGLLNNSFQPSDEIRIARALWRQRGNLVADASSAIQRIQKVLIEMNVQLSNVLSDISGVSGMNIIQAILDGERDPWELAALVTGGVKAPVEDIAKSLEGNWRSELLFVLRQQVELYRTYQEKIHDCDLELRQHLQSLGSKVDLQAQPIGPKPKGNKGGRNTPQFDLRTELYRITGIDWAQVNGVDVVTAQTVIAECGADLSAFPSEKQFTSWLGLVPSNEQSGGKILKRRTRKVVNRAATAFRNAASTLVRSQSYLGAQYRRLRTRLGAPKAITAMARKLACLFYRLIKHGQQYVDKGMEYYEARHREQQIRSLMKRALQLGFQVVAQTTA

SEQ ID NO: 104781 - protein, 348 aa, unidentified
MAEQRSYTREHIYVGVDVHKATYTVTCVCQRPMVKTATVPAEPARFAESLSRWFPGAILSSAYEAGFSGFVLHRALTTAGITNLVVHPASVAVAANDRVNTDRRDSKRLAIDLADGRLRGLAVPTEAEALARLLPRTRAQIVAHRATMTRQIKAKLPQFGLIPPASRRLMSRRYVREITTWPLPPELCARLTLVADQWRFATRQLLELRRLLRAQATAQAALATVYRSAPGIGEVVARTFATALGDMTRFTNERGLCSSTGLTPSEYSSGAAIRRGHISRQGASRWRHVLVETAWRALPRDPALQEIFDRIAATRGKQRAMVAIARRLIGRIRACFRHGTLYAVGTAS

SEQ ID NO: 104782 - protein, 306 aa, unidentified
MLEVSTIGLDLAKNVFQVHGANASGAVVFRKKLRRDRVLDFLAVQPACTVAMEACASSHYWGREIAKLGPVVRLIAPDYVKPFVKRQKNDAADAEAICEATQRPTMRFVAVKGEEQQAGAVMFRARDLLVRQRTQIINAIRGHLTEFGMVVAKGPFHVAKLVAAIEDNHAGVPAMARPILRLLADQLRSLDGRVVVLDRELARRAREDEEAKRLTTIPGIGPITATALVALAPAAQAFKRGRDFAAWLGLTPLQRSTGGKQKLGETSRMGERTLRRLLIIGASATVRFGNAQGLGHTAVACAHAEP

SEQ ID NO: 104783 - protein, 313 aa, unidentified
MVTPTVFVGIDVAKATLDVALRPSAERWQAGNDEAGIRDLVRRLPTPGLTLVVLEATGGYEHPVAAALAEAGVGVVIANPRQIRDFARATGQLAKTDAIDAELLALFAERVRPVPRPLPTEARQLLEALVTRRRQLIEMLVAEQHRLEHARRPVRRDITAHIRWLERRLADVDRDLDHAVRTSPLWRAQDDLLQSVPGIGPITSRTLLAQLPELGQLGRKQIAALVGVAPLARDSGTRRRQRTVWGGRAPVRAVLYMATVAAARCNPVIRTFYHRLRAAGKPAKVALTACMRKLLTILNAMARTQTPWRSATA

SEQ ID NO: 104784 - protein, 418 aa, unidentified
MVITKKSDVKIYDKVTIATIDFAKDKNTLYCRRCITGPEMKIIPFRHTFKEYNRIYSRVINFARSNGCSEVIFGFESTGVYAIPFINYICHRPVKVVQVNPLHTKRAREITDNSPDKSDKKDPRVIADIIELRRFLSVVVPEGVVADLRNLSHARERSHKRLTALYNQLHDLVFMVFPEFLQVFKKLRTATARYMLNNHLMPIKIVALGLEELTILLRRISRGRYGRAQAEALFSAAHVSVGVRQGIRSVEQEIKMLLHLIQEITQQITTLESQLEERLQYITYSKLILSIPGIGPVSAAGLIGEIADLPSFESIDELMKLAGMNLYEISSGRFKGKRRISKRGRPLIRKLLYFLVLHMIRGGGIFHDEYHQYIERNMGHNQAMGALARKLLRIIFTLVHNETEYSADYESLKNRKTA

SEQ ID NO: 104785 - protein, 462 aa, unidentified
MQDSDRRKDGAGSSRQIEGLPVVRHKVAGIDLGSERHWVCAPTVEGSGREVADFGATTSELIRMAKWLQARKVESVAMESTGVYWIAPHEVLEGEGLEVMLVDTRQLARVPGRDKKSDPFDCEWIQRLHSCGLLMGSFRPKEAVCMLRTLVRDKGNLVAEGGDWLRRMQKSLDQMNVRVHRAVSDIDGVTGMAIVRAIVGGERDARKLAKLRDRRCRKSEEEIAEQLSGHWREDHLFSLRQGLKMYDSIQERITDYEKEILRKLAEMERGECRGQEVPKVKNSQKGKAIQRRGEEPMRQALFRMSGVDLTGIDALGVETVQVVLSEYGPDLSRFPTEKQFVSHVTLAPHKPTSAGKPVKNKKRYSASTRVAAALRMAATSLRHSETALGAYYRQIARRIGGDVAVFATARKLATLIYRLLRWGQPYLDEGAEAYEQRYQVSRIKNLTAKAKELGYQLTPITE

SEQ ID NO: 104786 - protein, 455 aa, unidentified
MAKKGKKTKPIPDNMLIIHPHAAGIDVGAEEHWVCVPADRDAQPVQKFSAFTCDLHRLADWLTACRITTVVMESTGVYWIPLFQILEARGFEVALVNARHVKNVPGRPKTDRFDCRWLQKLHTYGLLAPSFRPPEDICQLRSLLRHRENLIRMTVKHIQHMQKSLDQMNLHLHHVISDITGVTGMRIIRAIVAGERDPRTLAQYRDYRIKSSADTIAKALEGDYRTEHVFTLTQSLALYDFTQQQIAACDQEIERVLATLDSQVDPDAHPLPPPTTTHRQPQRNEPAFDLRTHLYRITGVDLTQVPGFQAPTIHIILAEVGLNMHKWPTDKHFASWLGLCPDNQISGGKVLATGSRRVQNRASRALRMAAQSLRTSPSYLGAFYRRMRSKLGPAKATTATAHKLAKILYHMLKEKTSYRERGAEYYLHRDQERKLKPLRKQATHLGFDLVPQASH

SEQ ID NO: 104787 - protein, 349 aa, unidentified
MNSTTVAVDLAKNVFELAIANGEWKITERLRLNRKSFSAFFVQLAPSRVVMEACGSAHHWARYIAALGHEVQLLPAQYVRAYVKRNKTDRADAAALLEALRCADIRPVPLKTLEQQQVLGLHRLRSQWMSTRQRYVNTLRGILREFGIVIAPGVGAAKRQIAQHLAQSPSELPPAIRPLLTQMLEEIADLERDVQQVERLLTALSRSDERVQQMRQIPGIGLLTSTAMRATVGDIQRFPSGRHFASWLGLTAREYSSAEHRRLGGICKRGDVYLRTLLVHGARSALLAAHQAQRSGRPMDYLRRWALECERQRGHNKATVALANRLARIIWATWKYERSFDGNWAAAVA

SEQ ID NO: 104788 - protein, 365 aa, unidentified
MSSVPSAAELVHLGMDTSVNEIVAAVLCPGGEMPAVDRIPDDVESIRRLIGRFPDRRVLSACYEAGPGGYELHRLLTSMGVACDVVAPSLIPRGASDKVKTDRRDAVRLALTHRAGLLTPVRFPSPAEEAVRDLVRARGDLLDDRKRMQQRLNAVLLRHGRVWRGGAKWSCAHRVWVDRQAFDEPALAEALALYRGGLDAREAELRAAEARLAAWAGREPLAAPVARLGCYRGIAQLTGLTLAAEVAGWRRFASAPAFMGFAGLIPTEYSSGSRTRRGHITKAGPEGVRTALVEAAWACRYRPAIGATLRRRQAGAPPETLARSWTAQQRLHAKYKKMTARGKPAGAVVAVARELAGFVWAEMTS

SEQ ID NO: 104789 - protein, 315 aa, unidentified
MDEPRRVTTCVGVDVSKDRLDAHVRPSGEAFSVARDGKGLEKLVERLAALGVSLVVLEATGGFETTAAAALAGAGLPLAIVNPRQIRDFARALGRLAKTDAVDAEVIALFAERVRPEPRPLASEEAQRLGELVARRRQIVEMIGMEQNRRRQAAHKRLVNKIDRHLSFLQKELADVDADIDQGVRASPAWRETEDLLTSVPGVGPVTARTLIAELPELGNLDRRKLAALVGVAPFNRDSGAWRGHRMIGGGRACVRNALYMAALVATRCNPVIKQSYQRLIANGRPKKVALIACLRQLLTILNAILRTKTHWKTA

SEQ ID NO: 104790 - protein, 388 aa, unidentified
MFYVGIDLAKFKHTAAVVGEGGERLLGGFDFPNRRDGFEALLRRLAAVGATSGESGVCLEATGHYGRNLIAFLEGHGYEVFEVNPLLTANWRRATSVRKAKSDAIDAEALARWLLAGNPTARRRAKDESDDLRTLARSRASLSHMIGDCKRRAVAILDVTFPELHGFFSDDFCVAATAVLMRWQSAEALSHARLDSIRKEVREAGGRLAEARAAELRELARSSVGTASAPLEFCLRQLLAQIAFTRGQMAELEAELARMVEGSPVLTVPGIGTVLGAGILGELGDVSRFASAKKVLAFAGCDPSVFESGEFVGSRAHMSKRGSPYLRWYLWLAAERARLCDPALAAYYARKRSEGKCHKVAVSAVVRKLVSIVYAVLRDGTSYVCPAT

SEQ ID NO: 104791 - protein, 405 aa, unidentified
MQQEFLAVGIDIGSQTHRIAVMSPRGQIIDQWFVKHRYADFKKAARRMQALSREYNLPLIVGIEGYNGYASPFDQYLMDQGITIKQINNLTLDRYRQLFGQPYKTDEYDAQLIASYLMQPLRSKTSAHAENRLQPTCSLSKQIKLLARHQKGLIKERTCYKNRLRKLLLGYFPELFDVYKDIFSPNCLALIALAKSQPELKVMNIKQLSAIKAPGCKRALGKAKAALLKSLLCGYPNLTSHAQEMVAASYAKRINILDSEIKQLDRELSRLIPLHRSGESLLSVPGSGIKTTARIIGETGDISRFSTPDKFSVYSGVVCLRNESGIRSKSKNTKRVNHILKDTFLKVATTSLRVNPESNVYYQRKRKEGHKHFSALKCLAHQIAKVIYKLMSSNSLYMPSYKKAA

SEQ ID NO: 104792 - protein, 318 aa, unidentified
MLNESFVGIDVSKDWLDVGWEPAQQSERLAHDEVAMVGLCERLVQERPCLIVLEATGGLETHLASALAAAGLPVAVVNPRQVRDYARACGRLAKTDRIDALVLAAFARAIRPQVRAPKDDETLELGALLARRRQLIDMRVQEKLRLERASPVQRDSIKEHIAWLTERIARLDTDLTHRLRSSSLWRDKEDLLKAIPGVGTITRVTLIALLPELGKLNRREIAALVGLAPFNRDSGQHRGERVIWGGRAQVRRVLYMASVAAIRSNPVIRAFYQRLRAQGNPGKVALVACMRKLLTIMNAMLKHNTPWNPNALDLEHSC

SEQ ID NO: 104793 - protein, 349 aa, unidentified
MAMLADTADAVIGVDTHTDTHTACLLDRLGRQLAVITIPADDRGCRMLLAWAQRTAPGPRLAWSVEGTRSHGLGLTRYLHAHGQLVAEAGRPARASRRPGGKSDPADAARAARDALSAQRLAQPRSDGSREALRILLTARAQATTARTAAVNTLKALILGAPDDLRRQLRGLSTPRQASRCRSLRVHASQPIAERVLRAELRRLATHIGGWDKELRANKAQLRQLVAQAMPVLLEQPGVGPMSAAQLLVSWSHKGRCRSEAAFAALAGVSPLEASSGRITRHRLNRFGDRQLNRALHVIINWRMLHHTKTQDYTTQRRAGQKTDPEIRRCLKRYAARQLFRLMETAATT

SEQ ID NO: 104794 - protein, 343 aa, unidentified
MEQYIGLDVSLKDTAISIRQGGSRIWRDKCPSDPALLAEIILKRAPLAKRVVFETGPLSTWFYHALTSAGVPAICIEARHAQKILSETLNKTDANDADGLAQLAEAGFYKAVRVKSFEAMLDRTLIGVRKQVAGMSIQLSNQIRGVMKTFGLIVPKSKGRVFEGHVKELLTGNDSLARIILPLLDAWRDIRKHAANLDRQLLAAARNSRATRLLMTIPGIGAITSLSFSAAIEDPANFKRSRSVGAWLGLTTRRYQSGEVDHDGHISRRGDSHLRSLLYEAAVVMLTRTKSRHDSSLKDWGLKLRERLGLKRAAVAVARKLAVIMHRMLKTGEPFHKLASVPA

SEQ ID NO: 104795 - protein, 410 aa, unidentified
MLHPKMQYTYVGIDSHKDSHTAVFIDCFFEKLGEITFDNRPSKFQAFLQSAQPFLMDGTSFMFGLEDCAQYGRTLTTFLTENGHDVRHVNAFLVASERKSQNITQKDDNIDAECTARVLLSKFSELPTPTLQDKFWVLRSLVIRRDSLIDTNKRLKNHLHTLLTQHYPNYRSFFSEIDGYTSLAFFMQYPSPNTLRNTTVEALAAFLEIPSHGHIGIAKAQMILDTLENTAVEFQEVRDSAVQSAVRQLQFNLNEIEQLDKNLAYFLPKLDCTLTSMSEIDTVSAAQILSCIGDIKRFPTPAKLARYAGIAPVTYASGKTDLQFANKRGNRELNALLFWLSVRITSTAGRNRKIMNSFFYEYYHRKMSEGKTKRQALKCVQRRLVNIIWTMLTNNEEYVNPPTFDAPPRD

SEQ ID NO: 104796 - protein, 394 aa, unidentified
MKLVGIDVGKNSHHFCVMDKETGEFNVAPSSFSNNKEGFDFLINSLKPYSKKSILIGMEDTGHYHVALLKFLLSNGYTVALINPKTTDLTRKMEGGITKNDKLDTITICDVLDTPERKKQYRITKVDRFDLYEQRQLTRHHHNLKEELNVYCNRLQKSIDLVFPEFNTLFSSKYSIVYMNLLKTFGSAEAIASTDIRTIRKCFEIKGRGGRISLTPEKLKECAKNSIGISSEVETIQIKHLVSQITLIKEQIAEIDKKIEEFSITNNSPILSIPGISHFSGTSILAELGDIGNYSKPSQIIKFAGVAPYHYESSQYNAQHTAITKKGSKYLRKTLYQIILPVINNNPVLKKYYLLKISQGKGHRCAQGHCIRKLLRIIYHLLETGQSFDPALLR

SEQ ID NO: 104797 - protein, 410 aa, unidentified
MDLLRREVPSSALVVAVDPGKAFNRVWLTSGERGLIGDPVSLPVLRDGVDELERLIIASGVTGAPVIGLEASGALHRAWATELERRWPGSLRLFAPSETTAARAQLGSRRFKTDDRDCAALVWLVRQGAGRPAEPQVVEALRGTVAHRRQLVDARRVLQQRLHAQLNALCPGLSAPAGHGRALELASPTGQAVLACAAAFAGRAPSKRSLLARAPGRTTDATATFWARRWKRLLDPPPDAELRAARLGRDLGRWQALRDDIALADAQLSALLAQSAGQILTTLPGVAAVRAAAFSAYTLPIERWPTAEHLYSATGLAPASYQSSTVTRRGRISRQGLPEHRDALMGIAWGLSQNSDAFRARDTELRARGFRPIQARVALARNACRLCWRLLHSQQPYDDRRYARARRRGR

SEQ ID NO: 104798 - protein, 455 aa, unidentified
MGNYAGVDWASEKHDVLVADAAGEKLLAATFAHDEQGLRSLCRTLVRLGVELVAVERPDGLLVERLLDGGLRVLALHPNQVAATRDRFRVSGGKSDGFDAFVLCELARTDHHRFRVLEPDSDETKALRALTRGREDLVGTRTALTNQLRAELERFWPGPLGLFSDLLAGSRWRSLSATRARSMHAGLAKRACGRFSSESAIAAADAGAAAGQTQLRRAAHGRVGELELATRRQLVLTLVATIKAVNQQIKALERQISTAIRAHPDGAIFTSLFKGTVITAAELLAEIGDCRGRYPSRDALAGDAGQSAVAIESGKRKAASFRWGCNKRLRSAFCTLADTTRHHNPWAQDLYAAACQRRHDHPRALRTVGRAWCRIVWRCWQDGVPYDPARHGALQRHVTVTIPTSSGPVPDLAATQRMAGGAVTRKGARRAERGALDGKTQSAKPTARAAKRKGG

SEQ ID NO: 104799 - protein, 316 aa, unidentified
MRDELTVVGIDVAKAWLDVYVRPAGTLRRVENTEGGCADLTAAVRTVAPALIVLEASGGYEALVVATLATAGLPVVVVNPRQVRDFAKATGQLAKTDALSAAVLAHFGAALQPALRPLPDATAQQLQQWLARRRQLVEMLTAERNRAHQAGPEVRASIDGVVSHLRRQLKDVEGKLRELIRRSPVWRGHQQLLVTAPGVGPVLTTTLLADVPELGHLNRRKIAALIGVAPLNRDSGQYQGKRTVWGGRAHVRAVLYMATLAATRRNPVIQAFYDRLLQAGKPKKVALTACMRKLLTILNAMVRHQTPWAPTIATGA

SEQ ID NO: 104800 - protein, 380 aa, unidentified
MKKDIRHVGLDVDSEKIAVAVAEPGGEVRSLGAIPYREESVRQLMKKLGPPNGLRVCYEAGPHGYGLYWQLSKLGVHCDVIAPTLVPVKSGDRVKTNRRDAEKLARCYRSGDLTAVWVPDAAHEALRDLVRAREVAKKDQLRARHRLGKFLLRRGLRAAAGVKSWTVKHLLWVKTLRFEHAAQEATFLDYLHEVEHAAERVARLERAIDQAIESVPAEMRAVIAGLQALRGIKRVSAATIVAEVGPLSRFSRPKQLMGYSGMTSSEDSTGSSVRRGGITKTGNAHLRRIVGEAAWAYQHRPAMSPLIKKRQEGLSEEVKEIAWKAQHRLCTRYRRLIAKGKLRQKVATAIGRELLGFIWAIGTQVEREQRHSTKEHRRAA

SEQ ID NO: 104801 - protein, 345 aa, unidentified
MKITMTGIDLAKALFQVHGVDKHGKVGLRKQLKRKDVVSFFANLEPCLIGMEACGSAHYWARKLSEFGHTVRLMAPQFVKPYVKTNKSDRNDAEAICEAVGRPNMRFVAVKTADMQAVLALHRARQGFVKARTAQANQIRGLLAEFGIVIAKGIWHIAKRLPEILEDGENGLPGMMRELLQRLGANLQDMDKQVRELERQIVLWHRENEASRKLEAIAGIGALGASAMVATLGDAKSFKNARQVPAWLGMVPRHEGTGGNVKLGRISKRGDVYLRTLLIHGARAVITAVERKPDHTDEWLKQLLARRNKNVATVALAAKNARIAWALLAHQRSYQHDYLTTRKAA

SEQ ID NO: 104802 - protein, 424 aa, unidentified
MKNTAARKRKQVPEGYLVIGVDPHKKRHAAVAITQDFTAQAKFKVDNTREGLETMLGRARAEMTKSCCRGVIFAIETGGHYWRNIAYYLDERGIPFRFINQYTLKRRREGKDLNRRKNDYRDSEVAAQLLCTGEFVESVIPQGVYAELRTSHNAYQRLVKERTRITNLVKGLLDALFPEFTQVFKDPCGLTALSVLFACPIPRVIARMTEDEFVATIEARHKGRRLMRKKLRALHYSAKTSIGIDAGARSVSSEIASLVDKLELIKGQISIMEMTLIKLVDETEEGKYLMSIRGLNYVAVAGLLAELGCFKLYRSAKQMIKMAGSNPTESESAGKRRAKTPMSKQGRPLLRYCAWTAVIPMLRFNEDFRAWAKQRRERPAHANPLNGREVVGAALNRLLRLAFALVKNQTYYQDARSVLTPVAA

SEQ ID NO: 104803 - protein, 387 aa, unidentified
MIYVGIDIAKETHVAAAVDSDGVIVIEPFSFSNNHEGFKLLKSKLDSLDKSNLLIGLESTAHYAENVIFFLHGCGYELAVINPVQTAAMRKTGIRKTKTDKVDSLLICKTLMVNSFRRYTENDIKTLKLKSLCRFSQNLKKSKARLKIQLTSYVDVIFPELQYFFKSGLHIKSCYELLKVYSSPDDIAALHLTKLSNILTKASRGRFGKQDAESLKSLAKSSVGVKNTYISIQITQTIAQIELIESQLNELETVIETAMDELDSVIMTVPGIGKLNGAMILGEIGDIKRFSDSSKLLAYAGLDPVINQSGKFNAKRTRMSKRGSKILRYALINAAWNVSLNNDTFKRYYDSKVAQGNSHYSALGHTAHKLVRVIFKLLNDNITFALV

SEQ ID NO: 104804 - protein, 326 aa, unidentified
MQGKVPSQRSAAAPVYIGIDVCKARLDVHIHPLGESLVLPNDAGGLKRLKKILARYDVVIVVMEATGKFHRPAHRSLHASGFKVAIVNPLRSRRFAEAIGTLAKTDRVDARVLALMGESLKPGALEPTPELMETLQELARGRESAVDSKTAIGNQIQTSNSKVLVRELKRQLTAVETAIENLEAELERQIDADPVLARRFEILTSIPGIGLVAAVALIVELNEIGRLSSKQVAMIVGLAPIARDSGQKTGTREIRGGRKHLRTALYMPANSAKQHNPDLKIFHDRLIKAGKLAKVAITAVMRKLVVLANTLVREDRLWQPRHVIAK

SEQ ID NO: 104805 - protein, 467 aa, unidentified
MSTARRRPGRKAKARSPFIVLDRHAAGIDVGAAEHWVAVPPDADPIPVRCFGTFTADLQALAAWLLACGVTSVALEATGVYWIPLFELLEARGLRVRLVDARQTRALPGRPKDDIRDCQWIQRLHSCGLLRAAFRPDDQVVVLRSYLRQRQMLIGCASDHIRHMQKALEQLNVKLPEVVADITGVTGMSIIQAVLAGERDPVQLAKLRNKHCKQDEATIAKALHGNWRPEHLFCLRQALALYEFYQRQLAACDRQLDAQLQTFADRSAQAPVPPRPTGKYKKRHKHQGNVPAFDARTRLYRMSGVDLTRIEGIEEGTALVLLSEIGLDMNRWATEKHFCSWLGLCPQHKISGGRLLSRTVRPGVNRAAQAFRLAARGLERSQSALGAFYRRLKSRLGAPKAITAAAHKLARLVYSLLKHGQAYTAQGLEEYEREYQERQVRNLTRKARELGYTLVKPELAADAPVSG

SEQ ID NO: 104806 - protein, 355 aa, unidentified
MSTIAQPDVEVTGGVDTHKDTHTAAAVDGAGRILGSAQFPATPAGYATLLAWLAGLGGLVLVGVEGTGVYGAGLARFLRKHGVPLVEVDRPDRKTRRWQGKSDPVDAEAAARAALACRATGTPKQRNGRVEALRNLRVARRCAISHRADIQRRLHALVVTAPEPLRQQLRALAPRRLIEVCAALRPDTTRAGDPAMAAKLALRQLARRHQHLSTDITELDALITPLVTAINPGLLAAHGVGPDTAGQLLITAGDNPERLRAEAAFAMLCGVAPLPASSGKTNRHRLNRGGDRNANCALWRIAITRLATDPRTRAYRDRRTKQGMSKKEIIRCLKRYIAREIYELLVPPKDLGLAT

SEQ ID NO: 104807 - protein, 456 aa, unidentified
MSRKRKNSKKKIGAPVLPYLNVNAAGVDIGATEIYIAVPVDRDAQPVRRFSTFTEDLHAAAAWLKSNHIETVAMESTGVYWIPFFQILEARGFQVFLVNAHHVKNVPGRKSDVSDCQWLQYLHSVGLLRGSFRPEQAVCTVRSILRHRNDLVQMASSHVQHMQKALEQMNLQLHHVISDITGTTGLAILEAILAGERNPRTLAMLRDRRVKATEDTIAKSLVGDYRREHLFTLGQSLEAFRHYQGLIAACDTEIAQYLEAFASKVDPPDGPLLPSEEEQKRKGGEPRFDLQSHLHRIFGVDLTLIPGVHVLTTQTLLAEIGPDFSRFANAPAFTSWLGLCPDNRISGGKVLSVKTRKVKNRAATALRMAAQSLHHSQSYLGHFYRRMRARLGAPKAITATAHKLARIIHHMVTTGRAYDETICAENEMHNHRRLEARLRKQARELGFEVVAKSVTL

SEQ ID NO: 104808 - protein, 355 aa, unidentified
MDNEKYIGMDVHKESISIAVMNGAGKIVMECVIETKASMILEFIDGLRGDLHATFEEGTWAAWLYDLLKPHVTRLVVCDPRKNASMKQGNKSDKVDARRLAELLRLNHLNPVYHGEHGLRTLKELVRSYLTITKDQGRVMSRVKAIYRSWAIPCTGKQVYAPRHRAEWLMKITEPGVRRRAEFYYQQLDALRALRQQVRRELLEESKKHKAWKLLCQIPSIGPIRAAVLLGILQTPHRFRAKRQLWTFGGLGIETHSSADHRYVEGQLQRSKKPVLIRGLNDNCNHDLKNLFKGAAIIASSKPGPFQEFYTALLGKGIRPEMARLTLARKIATIVLIVWKKGVCFDAQHLKPQTA

SEQ ID NO: 104809 - protein, 408 aa, unidentified
MEVLYPRCAGLDVHQQTVVACARVASGSTVQQEVRTFGTATKDLLALADWLTAHGCTHVAMESTGVYWKPIWHVLDGHFELILANALQIRSVPGRKTDVNDAMWIADLLAHGLIRGSFVPPAAIHELRDLTRTRKQLVREGAQHTLRIQKVLEDANLKLTSVISDVMGMSGRAMIEAIIRGEEDPERLADLSQGRLKASRPAIIAALQGRVTSHHRFLLRLHLTQIDALDIAVRDVEARLGEALAPFQAAVDRLMTIPAVGRTVARVIVAEIGVDMSRFPTAGHVVSWAGLCPRQAESAGKRLSTRTRPGNPWLKTTLVQVAWVAARTRNTYLRAQFLRLKSRRGPKKAILAVAASMLTAAYHILNEETTYQELGSDHFERRDKVQITRRLIRRLEELGLSVEVKPAA

SEQ ID NO: 104810 - protein, 468 aa, unidentified
MTINSPKTTKTGGNRHDRNRPSKTQHKINTEANPNAGGIDIGAAEIVVAVPPDRCAEHVRTFTSFTSGLIELRDWLLACGVTTVAMESTGNYWVNCYDLLEEAGIEVCLVNARHVKGVPGKKTDVSDAQWLQQLHAAGLLKKSFRPAQDVLRLRYLVRHRDSLVRENAGHVHRIQKVLTEMNLKLHHVFSDIDGVSGRGIITAILAGERDPKVLAALRDNRCRSCEADILAALEGNYRPEYLFVLGQLQTQWDEIRRHLANLDEEIAGLVGSIGPTAPTAQPTRKTGSKRKQTGKNAIDLDFRKEGLRYYGVDLLEIDGIGSGVLTALMSEIGPRDNLLESFPSADRFCAWLGVCPCNQISGGKVLRTSTRKTRNRLAESLRLSAFGLDKAKCRMGEYCRRMKGKLGKAEGITATAHKLARVIHAMIGSGQSYDEAQAFRTNPGVEKKRLKTLKKLAEKHGFQLVPIQ

SEQ ID NO: 104811 - protein, 320 aa, unidentified
MNSIIVGIDISKETFDAAVLINNKVQTRKFNNNSEGFNKLVTWLKSSRTGHVCMEATGIYWKNLAKYLYDYGYKVSVVNPARIKGFAMSKLSRTKTDKADSVLIADFCKAMKPEAWYPQPLYIQELQQLVNRLNVLIKHKTQETNRLEVASKAIANNIQMHIEFLETQIKEIEQLINDHIKNNKDLHNKAMLLESIPGIGAKTQAVVLAFLADIEKFSSAKQVVAFVGLNPKHRQSGSSVRGASRISRTGNSDLRKSFYMPAMSALRHNCIIKQFSQRLSDTGKPKMLILIAAMRKLLHIIYGVLKHNSPFNPNVSILQK

SEQ ID NO: 104812 - protein, 359 aa, unidentified
MREQRNKISFRGQKIYVGIDVHLKSWSVTVLSETSVLKKFSQHPSPEALYGFLTRSYPGAEYHSVYEAGFCGFWIHERLTALGIDNIVVNPADVPTKSSEKLRKTDTVDSGKLARSLRANELKGIYTPDSVSLEMRSLIRLKNSITKDTTRQKNRLKSQLRYLGIEIPQEFLTPFSNWSKRFFAWLKEIETLTPSGRQALDIHIRHLEELRRQKLEMTRALRTLAKTDRFREPLRLIMSVPGFGQATGMAFLSEICDIARFRNAEQLAAYIGMIPMCHSSGEKDGTGDITIRKHAVMRCNLIEAAWVAVRQDPAMNLFYTEQCKRMPKSKAIVKVARKLVNRLFFVLKHQTEYVNSIVS

SEQ ID NO: 104813 - protein, 331 aa, unidentified
MHFSQFIGVDISKDTLDAAIYPAKDKKMDFLHFDNTTRGLNEMLKWLKSRGIKPSEMVICAEHTGVYTNPLIDFTEKKGLSLSLNSPLDIKHSMGITRGKNDAIDAGRIAEYAHDHKDKLRLYQKPSEAIVKLKYLLTERRQYVRQRTAMLSFNKIMGKYETPEARSRNGSDIHHCETLILKVERQMLDIIKENPELKRNYDLVSSVKGVGLINAINIVVFTNNFKSFETPRQYACYIGVAPFGYTSGTSVKGKTQVSKICRTRQKAELSMAARSAIIYDPGLKRYYQRKMKEKGEGKDAHGVVLNAVKFKLILRMFAVVKSGQPYKILNY

SEQ ID NO: 104814 - protein, 347 aa, unidentified
MRFYTNQHQFYCGIDLHARTMYVCILNQGGEILVHRNMPAGPDPFLKVIAPYREGLVVCVECIFTWYWLADLCAREGIPFVLGHALYMKAIHGGKAKNDKLDAQKIAVLLRGGMLPQAYVYPAAMRATRDLLRRRMHLMRKRAELLTHVQQTNRQYNMPEIGKKIAYKANRAGVAERFADPAVQKSMEVDLALIDYYDELLRDLELAIVRTAKQHDAHTLYLLQTVPGIGKILSLVLLYEMHDIARFPRVQDFVSYCRLVKCAKESAGKRYGTSGTKIGNAYLKWAFSEAAVLFLRNNPAGQKYLARLEQKHGQGKALTILAHKLARAVYYMLKRGTAFDMVQFLHS

SEQ ID NO: 104815 - protein, 477 aa, unidentified
MPVVRSHWPVVGPGGVVSFTANGGTLVFVHPTDPALARVQVGIDAAVVADHHVTIRSTLSDGQVQLSRFHVPPTIAGLSRLGERLSVFPGVVAVAEPTSMTWLGLHVALQRAGCDLSLVGTRHSARLRGAISGKLKSDVIDADVLSLASDVFALSPLDPPLPAELALRRAVVRRGKLVIDGNRARRRLISLARWAFPDVWTAFAGSWPTAIAVLTRWPDLRALAAARRSSVTAVVAAHTRGVPGVAERAGAIRVAAAAWVEFWDGRLDLEALAWETAEHLRDITIASEQIERATTQAQRYWAGLYGDDPLLLSLPGMGPMTAPTIRAFLGDGTRFVSAKAAASYAGLTPSTWSSGTVVQPSRAITKEGPAVLRLAFYQAANGARRVDPQLAAYYQHLMVERGHCHTQATVAVARKLVERTWTVLTRGQPYQFRDATGQAVTRTVAKDQARHDHAVPDDVRARARARSAATHRSKLTK

SEQ ID NO: 104816 - protein, 356 aa, unidentified
MNKISKLDFEGQQIYLGMDVHKKSWSISVLTDEFEHKTFTQPPEVSTLVNYLKRNFPGASYKSVYEAGYCGFWIHDCLQEHGVQCLVVNPADVPTKDKERRKKTDRVDCRKLAKSLRSGEIEGIYVPCRPKVEDRTLIRTRHSMVKKQTRCKNQIKSILQFYGIQIPEELADSHWSKRFITWIEAIRMERASGNFALKAYLEELNNMRKIIAELTRGIRSLANAEEYRQNVCLLKSVPGISILTAMTILTELYEISRFRNLDKLCSYVGLIPDTHSSGETDRDMGITKRRNAQLRGILIESAWVAVRKDPALLMTFNTLCKKMPKNNAIVRIARKLLSRIRYVLKNQQKYASAIVQ

SEQ ID NO: 104817 - protein, 342 aa, unidentified
MKIIGCDFHPSFQQIAMVDMQTGEYTERKLTPDEARQFYAELKGPVLVGMEACGNTLWFERLLALLDIDLRLGDAGKIRAMEVRKQKTDRRDAQLLLQLLLEDRFPEVWVPTLEQRDLRQLLLHRHKLVAMRRQVKNELQHLALNQGVQQKRKLWSAAGRQRLQELPLEGWTARRRQDALELLDDLDRRIAKLDIAAQQEADRDAVARLLQTHPGVGPITALAFSLTLGTIERFARSRQVVSYLGLNPAEHSSGGRQHLGGISKQGNPMLRSLLVEAGQSAARYVPELKRAYQRLKHRKHSGVGKVMVARKLAVRLFWMWKTQQPYAAARTQGSPSHHVVAV

SEQ ID NO: 104818 - protein, 343 aa, unidentified
MSHSLKSSKADSISNFSSNFNSNSNNNYSYIGVDVAKDKLDIFISDTGQFLTIPNNKTNINKFIKSHLSKVSTPLIVCESTGGWERIMLLHLTKSNIAFNVAHATKIYHYAKSKGILAKTDKLDAKTIASFAISEQLSTSNVVDEVQMELKDLVMRKVQLKNNMCSELQRQRKHLSKTVQNSIDRTVSFYRKELLKLDKEINKIFESSDQYIADNKIIKSMKGVGDVTAETMIVLLPELGKVNKRQIAALVGVAPYNNDSGRKSGRRRIKGGRMEIRNVLYMAALSSIRYNPLMKKYYHQLLERQKIKKIAVIAVMRKMLVILNSMMANRVEFIEDKSRSILC

SEQ ID NO: 104819 - protein, 343 aa, unidentified
MTIMIGIDPHKATHTAVAMDSDEKVLDEFKLRASNVQAQRLRSWAEQFEQPQWAVESAHGLGYLVAQQLVAAGETVFDVPPVLASRVRVLGSGRSQKNDPNDARAVAIAVLRSDRLQRVVPDDHARVLRLLVKRHRDMAQLRAKHCTRLHALLLELEAGGISSSMTVNKANRLLEGITVADEVTRHRVLIAHELVEDIARLDTTLKASKQRITVAVAASGTSLCEVYGIGPICAATIIGYTGDVGRFATKGHFATYNATAPLEVSSGERIRHRLNLRGNRKLNHAIHIAAICQIRCDSEGRAYYDRKIADGKTHKEAVRALKRRISDRVYQRLVADARRTRTT

SEQ ID NO: 104820 - protein, 360 aa, unidentified
MNATTVAVDLAKSVFQLAVADGEWRVIESHRLTRSQFERWFQNRDVALVIMEACGSAHHWGRWLNRLGIEVKLLPAAYVRAYVKRNKTDAADALALLEAARCAEIVPVRVKSIEQQALQALHRTRSLWMGTRTSRINALRGFCREFGLAVPQGARTGIEAISRTLADPQTPIPGMIHRAMLFLVEEIRLLELRIGQLERELAELAKQSPACTTLLSIPGVGLLTATAMVAATGGQVSHFKDARHFASWFGLTPREFSSGSSRVLGRISKKGDRYLRMLLTHGARAVLRAASVSRQAGKTLDGLRSWGLAVQARANHNKAACAVANKLARICYATLRDGEPYASSKHLAHTLNRSAFAIPA

SEQ ID NO: 104821 - protein, 355 aa, unidentified
MNAIKYIGMDVHVATISIAVLDANGKLIMEVTIATQAGALLDFIRGLSGTLNVTFEEGTSAHWLYTLLEPQVAKVVVCDPRQNPRRLGEKKSDRLDARKLAEWLRLGTLKPVYHGNSLGPALKELARSYRTLVSDTARVMKRLKALYRARGIRCAGTRVYSPRFRDQWLEQLREPGARGRAERLYRQLDLLLPLRQEARAAMVAESRKHPAHKILCSIPALGPVRVALLLALLQTPYRFRGKRQLWTYAGLALVTRTSADYQMVDGQVTRARKPALVLGLNANHNHTLKGLFKDAAASTLAHPGPFKDFYTTRVAQGMKPELARLTLARKIAAIVLTLWKKGECFNVEHVKAQAA

SEQ ID NO: 104822 - protein, 437 aa, unidentified
MKSLPVLDPRAAFVDVGSEHMHVSVAGDEPTVFGTVTSQLHALRDWLRSQGVKSVAMEATGVYWLPLYGVLEAAGFELRMVNGRQTRNVPGRKTDMKDSQWGATLHMHGLLKAGFVPPADIRRLQDYMRLRADHIASAASHVQHMQKALERMNIKLHDQIASLAGVSGLAVVRAILAGERSPEALLALCDQQIRRAKAEQVKEALRGTWEAEHLFALRQALQSWDHYQAQIAECDMQVQAVLPPHDPDLPALARPKTPRRGGVNSPDIPRLREILAQMCGGRDLTQLPAHTSYGVLQLVGEVGTDLSKWPSEKHFTAWTGLAPGNHDSGKRKGHAKRGRNRAGRIFCMMAQSLVRSKDIALGGFYRRMAARRGGLIATMALARKLAAWYWRVMVKGDDYVEKGLANYDAQVLQTKQRALKRLAKELGQQLVPIAQPA

SEQ ID NO: 104823 - protein, 356 aa, unidentified
MNYKQNEKINQVKESTLVVGIDIGSTKQYARAFDWRGIELGKVFTFSNSREGFEAFKAWMQHLQDKYRKSDVIVGIEPTGHYWFDLGAYLEDEGILLVMVNPYAVKQTKELDDNSQSKNDRKDPKVIAKLVTEGRYSAPYTPDGVYADLRIMVTNRKRLIREMTQIKNRFARWFAIYFPEYTDVFGDYEAQSSMLLLKKACTPEAIVELGAEKINQIWRDAKLRAVGMKRATTLCETAKRSIGLKKGSSAAWYEMKLLLEDYEYKKAQLDAVMEEIEKLCRKIPESEQMLAIKGIGVITVAGFLAEVGDVRRFESPRQIQKLAGLSLRENSSGKHKGQTTISKRGRSNLRAVLFNA

SEQ ID NO: 104824 - protein, 343 aa, unidentified
MKLIRVGVDLAKNVFQVHGVDRSEKVVWRRKLTRENWLKVLRQSVEPGCDIGMEACGGAHHWARQLQGQGFKVRLVAPQFVKPYVKSNKNDANDAEAICEAMSRPKMRFVAVKTVEQQDIQAVHRIRAELTKQRTAKANQIRGLVAEYGLVAPKELEHLRRALPCWLEDAENGLSERFRRLLNGLWGDLRSLDSRMTELDREIAVIAKNDPVAKRLQQLRGVGPITATALVAAVANGEQFANGRQMSAAFGLTPRQHSSGGKERLLGISKRGDAYLRVLLIHGARSVIRTSKDKDDRLSQWVTRLAARSHSNVAAVALANKTTRMAWAMLKNGTDYQHDRVTG

SEQ ID NO: 104825 - protein, 411 aa, unidentified
MENIFPCCAGLDVHRDSVEACVRRIEPNGRWHQQTHHWGTMTRDLLAMADWMAAQGVTQVAMESTGVFWKPIYNILESRFTMLLVNARHLKQVPGRKSDVRDCQWIAQLLQYGLLKGSFIPPRSQRELRDLTRHRTQLVEEKTRTANRIHKVLQDTNIKLSSVATDVLGVSGRAMLEALITGEEDPVKLAHLAQRKLRSKIPELEKALEGHLTEHHRFMLQLLWKQLAQQEELIAELDRKIEEQTRPFAAEIDRLDAVPGVDRRVAEVVLAEVGADMKPFSAHENLASWAGMCPGNEESAGKRRRRRITPGNPWLKPTLAQAAWAASHTKNSYLASQYRRLAGHRGRKRALIAVGHSILVIFYHMLKTGTSYTDLGGDFFDRLQPERLTRYYVKRLERLGHKVTLESRAAA

SEQ ID NO: 104826 - protein, 404 aa, unidentified
MEVTYPRCAGLDVHKKTVVACVITPEAKETRTFGTMTRDLTALADWLAVHRVTHVAMESTGVFWKPVYNLLEETELTVLVVNAQHIKAVPGRKTDVGDAEWIAELLRHGLIRGSYIPDRSQRESRELVRYRRSLVQQRAQVVNRIQKVLEGANIKLSAVASDVVGASGRAILEALVAGVEDPKALAALAKGRLQEKRSLLEESLRGTLGPHQRLLLQSHLRHLGFLDGEIERLNEEVRTRLRPFAETLQRLESVPGVGVQTAQAVVVEIGTDMRRFPTAAHLASWARVCPGNHESAGKRKWSGTGRGNPWLRPALVQAAWSAARTKNTYLSAQYHRLAARRGSKRAILAVAHTLLVIIYHLLRRGTTYQELGGNYFDERQRHSVLSRALRRIERLGYKVTVEAA

SEQ ID NO: 104827 - protein, 293 aa, unidentified
MMGVNAAIDVGKEWLVVQLGSGGEQFSEPNELRAIKRIAKRLSQAGCERVLIEGGSYQSVLIAALRAAELPVVVVNPRRVREFAKSIGQLAKTDDIDAGMLALYGERTQPPLRELPDEQSQTLRASWVRREQLIQMLVMEENRLEHAAENAKAVRHNLRSHIDYLQKQIKQADDDLDRGVRNSALWDKYEILSSVPGVGPVLSVALLSDLPELGRLNRGEIAALAGVAPFNCDSGTLRGQRRIEGGRPRVRRVLYIATLAAVRCTLCSSRSIDACERRGSQRRWHWWPRRASC

SEQ ID NO: 104828 - protein, 338 aa, unidentified
MTYYAGIDVSLESACVCVIDAAGKTIREGKVASEPGTLADWLKAGGANLERVGLEAGPLSQWLHAGLRQAGIAAELLETRHVRRAFEIMPVKTDRKDAQGIADLMRMGWFRPVHCKSVDAQETRALLTARKLVQKQVQEVESSLRGILRGFGVKVGKTTPVKFGGRVKELVAGNPTLERITDSLLATRAVLRREFNGFERQLRGMARNDTRARLLMSTPGIGTIVALTFAAAIDDPARFKSSKTVGAHFGLTPRRYQSGQIDYTGRISKLGDASVRAALYEAAHVILTKPLKGCTALKSWAMRIAKRAGMSKAKVALARKLAVIMHRMLANGTTFQQA

SEQ ID NO: 104829 - protein, 368 aa, unidentified
MKKNTSKKQMAGKGKKETQGDFAFYIGIDLGDKNSDVCVLNPGGEVGKQFRLRMKEEAFQEYFASIPRSRAAVEAGGQSRWVAEVIEKCGHEVYVSNTRKVPYIHQSDAKDDPGDAYKLAELVHFKPRLLHPIQHRSREAQADLSWIRAREVLVESRTQLINAVRGLSKAFAGRLEKCSTESFTAKLAGQVPEAIRSAAAPLLETIDHLNEQIRYYDQMEEHIARERYPKYRLLEQVNGVGVHTALSFMLTIGDPDRFEKSREVGSFLGMRPRKQDSGETKPQLGITKAGDVYLRKTLVNCAHHILGPHGKDSDLRRFGLRLCQRGGKNAKKRAVIAVARKLAVLLHRLWITGEVYEPLRNSKQAVAA

SEQ ID NO: 104830 - protein, 343 aa, unidentified
MRGITTIGLDIAKSVFQVHGIDAEGNVIIRRQLKRRYVLSFFQKLPACVVGLEACASSHHWSRELQALGHTARLMPPAYVKPYVKRQKNDATDAEAICEAVRRPTMRFVETKTLEQQSCLVLHRTRHLFIRQQTSVINAIRAHLAEFGIVAPVGRRGVEELLDVIGEASDKRLPEVARACLATLGNQLRMLKAQILNFDRMITAWHRSNETSKRLDELPGVGPALATALVASVADPKAFRSGRDFSAWVGLVPKQSSSGGKQKLGSISKQGDRYLRSLFTAGAMAVIRYAKLHGTKHRPWLTALLARRPTKVAAIALANKIARMAWAMMARGERYREPVALAA

SEQ ID NO: 104831 - protein, 413 aa, unidentified
MEVLYPRCAGLDVHKAIVAAVVRLVAGGRVAREVRTFATTTAGLLALAAWLGENGCTHVAMEATGVYWKPVWHVLAEGGFDLVLANAAQVKNVPGRKTDVNDATWLAELLAHGLVRASFVPDAPTQELRSLLRTRKQLVRERASHVLRLQKTLEDANVKLDAVLSDLLGRSGRAMLEALVAGETDPEKLAAFAHPRLAATPERLREALRGRVTAHHRFLLRLHLDQVDALEAAIGRIDREVEERLAPFSTAVDLLASIPGVGALAARVIVAEIGLDMGRFPTAGHLVSWAGLCPRNDESAGKRLSARLRKGAPWLKTILVQCAWAASRKKASYLQAQYHRLRARRGARKAVCAVAASILTAAYHMLKDGTVYRDLGPGHLDRRSRETQARRLVRRLADLGYAVELAPLEPAPA

SEQ ID NO: 104832 - protein, 345 aa, unidentified
MKIVGCDLHTRYQQVAMLDRETGELVERRLEHESGEARAFYAALSSPVRVGIEATGHTRWFERMLAELGHELWIGDAAQIRASMVRKQKTDARDAAHVLELLLSERFPRLWRPTMAERDLRQLVWHRQKLVWMRNAVGNQLHALAMGEGVCRKKKLFTKKGRVELEGLGLGVWASYRRQELLTMLDGFDASLQELDRAVAEQAQQNAAAVLLMTHPGVGPVTSLAFVLTLGPVERFERSKQVVSYLGLNPREHSSGGRQRLGAISKQGNPMMRSLLVEAGHTAARLDGELRQDYQRLKLRRGSGVAKVAIARKLAVRMYWMLRRQASYAQLVRMQGSPWATLVGQ

SEQ ID NO: 104833 - protein, 344 aa, unidentified
MQIAILGIGLGKNSCSVVGLDDGGRVVVRRRMHRASVIRFAGSLTPCVVAMEACCGAHHLGRLLRTQGHEVRLMSPEYIRPYVKAQKNDDRDAEAIAEAATRPTMRFVELKAEEQLDMQTLHRVRDRLVGERTALLNQLRAVLLERGITVPQGRRKLEQHLDAMLGVPECSGVAPRMRSLLQDLRAEWRALDRRIEAFDEEFAVRARTDPDARRLATIPGIGVLNATALVAAIGNGETFARGRDLAAWLGLVPRQATTGGKPRLLGISKRGNKYLRKLLIHGARAAMPFLARSATALGAWLRGLLARAHPNTVVVALANKLARIVWAVLRHGREFERADVVAST

SEQ ID NO: 104834 - protein, 315 aa, unidentified
MANLTKSKTVVNVGVDVGKQYLDVCIHEKDIYWREENTVAGIKRIFKRLSYYQVERLVMEATGRYEFELAQLAYSRKIPVCIVKPLLIRKYAGANDQLAKTDKLDAQIIAEFGAVLKPKVTPAKSKNLIAIKDLITRRRQLVNLRTQESNRSGIMGKTLAVSCRRIIRHLNAEISRIEKQLARHVAEQAEWTEKQGLLKTVPGVGDTLVYTLLADLPELGELNNKEISKLVGVAPINRDSGRMRGKRRIQGGRANIRTVLYMATLSATQCNPVIKAFYRKLVAQGKHKKVALTACMRKFIIILNTMIKNKTEWAF

SEQ ID NO: 104835 - protein, 347 aa, unidentified
MSITMIGLDTAKSVFQIHGVDETGKTEIRRKLARNDLISFFKKHELCTVVLEACGAAHHWARILTGLGHDVKLIAPEAVKPFVKKGKKNDAADAAALCAAASRPDMRFVPAKSLEQQGILALHSARSLLVKQQTMLANAMRGLATEFGLTVPKGIGKLEELAVLVEEDETFPMKARQAFTGLFDQCKALTESIMTFEAEIVAHARHDETARRLATIPGIGPITASLIAATVGDIGMFKSARHFAAWLGLVPRQHSTGGKTRLGRITKTGNREIRKLLVLGATSMVYRAPQWNSAAGLWIRGVLERRPVRLATVALANKMARIAWALMTRKEVYRAKGRAEAATEAAA

SEQ ID NO: 104836 - protein, 414 aa, unidentified
MKAPTVEFEQLIGRGCGIDVHKSLLVATVRGTGLQEETRTFSAFTEDIEKLRDWLKLCEVTHIAMESTGVYWKPVFNILEADFEIILVNARHIKNVPGHKTDKKDSRWIAKLLLSGLLKGSFIPPLPIRELRDMTRYKRKLIEQKSSEKNRIHKILEDGNIKLSSVVSNMSGATAEKIVDALISGETDIDKLTSFRHGKMKSSVEDLAKSLLGKLTAHHRFMLQLVKESIKEKEMLIAKLDKQIDEHLKANELELSRELLATIPGVGEEGAEYIIAEIGNDMSAFANEQHLSSWAGMSPGNNESAGKKKSSRITHGDKHLRPLLVQFAWAASRTKGTYLRSKYDSLAGRRGKKRALIAVGHKILIASYFILRDKRPYKELGGEFLLNRKKDKKVNALLRQLNDLGVKVELSQAS

SEQ ID NO: 104837 - protein, 407 aa, unidentified
MRLFAGDDWAEDHHDIEVMDEAGKVLVKRRLPEGAAGMTQLHALIGRFLPEDADGAEVVTGIETDRGPWVAALVAAGYVVFPVNPLQASRYRERHGVSGARSDGGDAHMLADMVRTDSHQLRPAAGDSPEGQGIKVVARAHKTMIWDRTRATQRLRSQLREYVPAALAAFEDLDAPDVLELLGKAPDPDRARRLTRAQVAAALKRARRRDIAGKTDAILAALRGEHLGQPAALTAAYAATARSLIAVITTLNAQVKILEDQVRDHFGRHPDAEIYLSQPGIGAILGARVLGEFGDDPCRYVSAKARKNYGGTSPITRASGKKKVVAARFIHTDRLIDALMSWAFASLNASPGARAFYDEQRAKGLDHNDALRRLANRLVGILHGCLKTRTPYDEATAWSHRESSLAA

SEQ ID NO: 104838 - protein, 345 aa, unidentified
MNRMYYVGIDYHKSVAVACIIDGKGKELETIELPSTPEGMDMFIGKMGKKKFKVLGEAFTYSIDLHNHLIGKGVSSELVRPTDLKLITLSKKKTDKNDAATIAWYLRMKETDQIKLNYSFILKDKQLEFRSVCRLREKISDLKGQMSQQIKSHMRCNGEYLPVKEFGDKPKMSVKRVQKYIIENFDGDFTLQEYLREYIYLEERSKEVEKEMTRFEFDKEAVRLLETIPGIGELSAMELMSMIVDISRFPSSDVMRAYFGMAPKVRDSGDDVNHSHVTKQGDPMMRHVADRVVRLHLMHSDESVIRKSYESVRKRSNHGVAMMAASNKLLDVIFSVLSNKKPYYC

SEQ ID NO: 104839 - protein, 376 aa, unidentified
MEMMQQDGRSRYIGLDVHRATIAVAIAEDDGCPPTSYGSIANEPSAIRKLMARLGGPNVRVRVAYEAGPTGYALHRQLTSMRLECMVVAPSLIPVRRGDKVKTDRRDALKLARLLRSGDLTAVWVPDEAHEALRNLVRARADAKSDELRAKHRLSKFLLRQGSHPPVGIRNWSVRFFQWLRQVKFEHVADEIVFTDYLAAVTAAGDRIKRLEAALRQCAETSSQVALIGALQAFRGIGFLSAVTIVAEAGDLRRFRTAPQFMAYAGVVPSESSSGRTHHRGSITKTGNSLLRHVLGEAAHHARHVPRVAGTLKQRQTNVPQPIVDLAWRAQQRLHSRYRHLGARIGVPKALTAVARELAGFIWAVSHVLEEVPTAA

SEQ ID NO: 104840 - protein, 357 aa, unidentified
MKTSNNISFDNSHFFIGVDTHLKNWKVTIRFNSIELKTLSMNPSPSELVNYLKKNYPHGIYHIVYEAGFCGFWAFRKFQKIGIDCIVVNPADVPTSNKEKVNKNDPIDSRKLARELENRSLKSIYIPDIFHEELRHLMRLRYRIIQNQTRTKNRIKALLYTQGINIPNHFSGNSRWSHSFILWLKDIKLNTNSGNFTLQNMIIQLQQLREHNKNILSQLRLQAKEKQTAPIINALLSVPGVGFITAMALYTEIVDMKRFSNQNQLAAFVGLVPSIRSSDDNIYNNGISFRRNKFLRPIMIEAAWTAVKQDPAMTLRYKELTKRLKPQLAIIKVAKKLLKRIRHVWINQEEYVYSLVA

SEQ ID NO: 104841 - protein, 342 aa, unidentified
MAEYVALDVSLRSTSVHIVDQQGRCLWRGTCPTDVAALADTIRRHAPAVERVGLETGQLATRLCHGLAKAGLPVACMDARQAEAALSCRISKADANDAEGLAQLLRTGFFRQVRVKSEGTMLVRTLLSARRQLVRTGLDLANQIRGLLKIFGLLLPRGGGRAFEAAVRERLAGHPRLAAAITPLLEAWRAVREQVLALDRQAHAAAERDARCRLLLTAPGVGTITALAYVAAVERPEEFRNARAVGAWVGLTPARYRSGQVDHSGRISRQGDVRLRTCPYEAASTVLTRSRAGSALERWGLGLEAGLGRRRAVVAVARKLAVVLHAMWSKEEPFETDAVAAA

SEQ ID NO: 104842 - protein, 362 aa, unidentified
MRHVGVDLHKQTSQIAVLSEEGELTQHRVANDIQRLEQFFTQLPPATPVAIEASGTWWWLVDLLERLGHHAILSHPKQTKAIAAARLKNDRVDAHRLVLLLRGDLLPQVWIPPAPLREARELLRHRMQLVWLRGEIRNRLVALLDRRNLHPTTAKSWFTKRGQRELQQLSLAETPSRVREDCAALLPLLDAQIRRLDAELVANWGRDARVQRLTTIPGIGPFIAILLVLELGDIQRFANAKRVSSYIGLTPRIRASADRVRTGHISKEGNRLLRWALVLAATQAVRRPGPLRAWYHAVKKRRGRSVARVALARRLAEIVYHVWKHECDYFTVLRRGDRAGVSSPGDMGLSTAALIGQPPSRA

SEQ ID NO: 104843 - protein, 353 aa, unidentified
MDTITRVGVDLAKNVFQIHAVDAAERVVARKAIARGHLLSWFANLQPCLVAMEACSAAHYWARKLRALGHDVRLIPPQFVAPYRKGGARVKNDARDAEAICEAASRPQMRFVPVKSPAQQSVLVLHRMRTGYVEERTALVNRLRGLLAEFGVFFPQRISQLHRLFVDCVEDGSNELAGPAREALMRAWAQWQALDQEIAWFDQQIAEHANQDAEAKRCMEMCGVGRLTASATVATLVDARQFKNGRQLAAWIGIVPKQNSSGGKQRLGRVTKQGNDYLRTLLFQGARSTITSAARRNDRLSRWIVQLQARVGYQKTLVAVANKHARILWAILAKGEKFDPCHAPARPRPTAGA

SEQ ID NO: 104844 - protein, 344 aa, unidentified
MANLNQFCNFTKIIGIDIAKSVFQIYSCDTQTGEITNVQVKRDKVLDSFANCGKCLIGMEACGSSQYWARQLQALGHTVRLMDPKLVKPFVRHNKSDKADAEGIYHALVSGVRAVTVKTETERDIQTLLTMRALLVKQRTARINHVRGLLAEYGHVMPRNVNQFDTKVDECINSLEGDAVQLVINMMRDTVKSIRDDQDRIKTLQREISRLANQTRNAKHFLTVPGVGETIMAYMCVLLADPTQFSSARQFAAYLGLVPMHTGSGGKTVTTKIPGRCDKALRAVLVQGAHAVARSKCRTDWVKNILAKKPKKVAMVAIANRMARQCWAVASKGQDWRRMPVTAA

SEQ ID NO: 104845 - protein, 438 aa, unidentified
MKKDISKTTKTQKQGNGKRRQLRETKRNVAALKTAKKRKAKRSEVEREVKEDASHAGEEGQAVVEFKAGEGEGYTIGIDLGDKRSRYCILDKEGKIVRESSVATLPASLKTVFSKLAGCRLAMEVGTHSPWVSRLLTALGHEVIVANAREVPLIYKSRRKNDKLDAEKLARLARLDPKLLKGIRHRGAEGQGDLLLIGARAQVVETRTGLMNMVRGLVKSRGERLPGCTSEGFVVELLEGVDEAAVRALKPVMVLIEQMTEAIKGYDKQVEEMGKKHAEIARLEQVKGVGPLIAATYVLTIEDAERFRRSRDVGGYLGLVPGQSDSGESQPQKRITKAGDGYLRYLLVQGAHYILGPNGPDTDLRRWGLKLGSSGGDRGKKRAVVAVARKLAILLLVLWKTGAKYESLRNSDKQEKEQKQKQDKQDKQDKQEKQKVAA

SEQ ID NO: 104846 - protein, 462 aa, unidentified
MRRRDERETWENRREQLEGLPIIRRNVAGIDLGSERHWVCAPTPNAQGREITSFGATTPELIRMAGWLKERHVESVAMESTGIYWIAPHEVLEAQGLQVLLVDTRQLARVPGRDKKTDPSDCEWIQRLHSCGLLRGSFRPEEAVCMLRTLVRDKANLVAESGDWVRRMQKNLDQMNVRVHRAVSDIDGVTGMAILRAIVGGERDAQKLAKLRDRRCSKTEEEIAEQLSGHWREDHLFSLQQALKMYDAVQERIAAYEKEILRKLGDMERDEHHEQTAPPLPNPNKAKTIKHRGQEAKRQALYRMSGVDATHIDAIGVETVEVVLSEYGPDLSRFPTEQQFVSHVTLAPRVPKSGGKPVKKKKRNSASTRVAAALRMAALSLRHSQTALGAYYRKMAQRRSGDIAVFATARKLAILIYRLLRWGQTYVDEGAEAYEDRYRQRRIGHLTATAKQLGYQLIPVNA

SEQ ID NO: 104847 - protein, 319 aa, unidentified
MMNMYGGIDLHANNSVIVLIDEQEQVVFQTRTPNDVSQILFHLHPFQPRIHGLVVESTYNWYWLVDGLMEAGYSVHLANTAAIRQYEGLKHTNDHSDARWLAQLLRLGILPTGYIYPKEDRAIRDLLRKRSQLVRQKTSNLLSIQNLVTRNTVTSLSGNRIKTLSAEAIRDVLPTPDLALAVTSTLTVMHCVADQITAIEHTIKARVALRHAFRQLLMVAGIGQTLALTIMLEAGDMHRFPTVGQWASYCRCVNSTKLSNGKRKGQGNTKNGNKYLGWAFVEAANFAVRYYPEVQRFYRRKKSKTQGVVALKAVAHKLA

SEQ ID NO: 104848 - protein, 327 aa, unidentified
MTTSPLGLDISKLKFNACLVRQGGKFRHKVFPNNPQGFAQLSDWLKQQAVTQVHACMEATGTYGDSLAAYLHEQSQLVSIVNPAAIKAYAQSRLSRTKTDRVDAALIAGFCSERKPPAWHPPAPEAQELQALVRRLESLTEMHTAEENRLSSGISVKAVRESVEVLLAHLCEQIKRTQALIRDHIESHPSLKRQHELLDSIPGIGETTAAALLAEVADFSQYRSARQVAAFAGLVPRERQSGSSVRGRTRLSKIGNARLRKALYFPAITALRCSEFFKQWAEGLRQRGKCKMSVIGAAMRKLIHLAYGVLKTGKPFDPEWTQKEKIA

SEQ ID NO: 104849 - protein, 499 aa, unidentified
MLPPATALAATTTPIVEAALSTHKSKANPSAAAARARRKARARAQAAAAHQAEVDQVNALPIHHRHAAGIDVGSRSHWVGVGFAARDPSDRVREFPAHTDGLRALAACLHAHGVTTVALESSGVYWIPLYEPLESQGLEVLLVDPGYARQLKVRPKTDRRDAQWIYRLHSVGLLAAAFRPDGPTCVPRAYLRPRGNLVRYAGQHLQHLHKAPEQMNLKRNNVLSDLTGTTGRKIIRAILSGVRDPQRLAALRNYRRRATAAEVAQALTGSYRAEHLFALRQAFPAWQFSPGQPDAVDEQLQAQLAQMKRARPRPPRPPRRGPKANDPRFDVRAALYYVVGLDLTAIEGFGAGTALAVVSELGTDLSKFATVKHFGSWLGLCPQWHKTGGQVRSSRTRPGVNRVAAALRLAAHGLHHSPSALGAYYRRQKARLGAAAATTATAPKLARLLYRALTTGLGYVRPTQAEYEARWRAQQIEALRRRARRLGLEVRAAGGAADG

SEQ ID NO: 104850 - protein, 343 aa, unidentified
MNVFIGLDVSLASTAICVLGPQGKVVEELEAASEPEALVRAMTSLPYAVDAIGLEAGPLSQWLSRGIEEADFDVVLMETRLVKAALKAMPIKTDRRDAQGIARLLQMGWYRPVHRKSVSSQEIRALLTARKSVQQVIINLELSMRGVLRNFGLKLGHVTRIRYEARVRELVEQNEILSASTEALLRARAQLRAELAELDATIADLAKQDDVCRLMMTMPGVGRIVALTVKSAIDDPTRFVRSKDVGPWVGLTPRRTQSGEMDIVGQITRAGDRGLRTALYQAAMILMHRGSPNWLQAWALRVAHRRGSKRALIALARRIGVVLHRMWRDGTPFRHAQSSPATV

SEQ ID NO: 104851 - protein, 363 aa, unidentified
MMVIGVDTHKSTHAMAAVAADSGLLASEREIAATEDGHRQALSWAKELDPERVWAIEDCRHVSRRLEQALIAAGERVLRVPPKMMGASRRSEREPGKSDQIDARAVARAVLREGVERFPAAFLDERTLEIRLLVDHRADFVSERTRQINRLRWHLVDVCPELEASIPARQLSAGATLERIARRLRREQRTGRVRIALELVASIRAVSLKTNALERELRALIMDYRPALLAEQGLGTLTAATLIGRTASAERFPTDAHFARQAGVAPIPVSSGRKDRHRLHRGGDRQLNRALHVIAITRARIDPTTRAYLDRKRAEGKTNREALRCLKRHLARHVHRLLAQPPAHPDHRTRTQLNSAISVPRLT

SEQ ID NO: 104852 - protein, 344 aa, unidentified
MITIGIDPHKASHTAVALDPTGRVVGELRVAATKTTVGRLLRWAERWPDRIWAVEGAAGLGHLLAQRLVASEETVLDVPATLAARARLLARGHGRKTDGIDAASVASVAQSQPGLRRVGPEDHSMVLRLLSDRRDELAQERRRVVNRLHRLLRDLLPGGAPTELSTEAAARLLNKIRPKTTVDLERKVMARALVADLRRADRALAQNRARCAAAVAASGTTLTTIFGISDVLAAKILGHVGDVSRFASADRFASYSGTAPIEVSSGEVTRHRLSRNGNRALNNALHLAARVQTMHAGPGRDHYERKLAGHKSSREALRSLKRQLAKVVYRHLVADRAHRLALAS

SEQ ID NO: 104853 - protein, 448 aa, unidentified
MDLLYPCCAGVDVHKKMVVVCVCTSGETATPRKQIRTFSSMTADLLDLSAWLTQCGVTHVAMESTGEFWKPVYQLLEGSFTLLVVNAQHIKTVPGRKTDVRDAEWIADLLRHGLLHGSFIPPQSQRDLRDLTRQRTNLVADRATVVRRLQKVLEWSNIKLAAVVSDVMGLSARAMLEAIIGGEHDATQLANLAKGRLRSKHADLVRALEGTVREHHRFMLAQHLAQIDFLEEQIAAFDAEIVERIIPGEAGAEPPTDATSTPTPTPAPTTQGDSHACSACATWEEAVAIWDEIPGIGRRIAEQLVAEIGTDMSRFPSAEHLASWAKLCPGNHESAGKQLSGKTGQGNRWLRTALVQAAHAAVTVKDSYLGVFYRRLVSRHGAKKAIVAVAHKLLVIAYTLLSKREHYIDPGPNYLDARQKERTVRRLRDRIEQLGYTVNLQQRETVPA

SEQ ID NO: 104854 - protein, 341 aa, unidentified
MKKYSLFIGVDISKKWIDVALTVDGIKSQMVHRQFDNNQKGFKNLIAWINKDVKQKQFAALKNNWICCMEHTGLYSLPLCRFLEQEQIDYKLESALRIKRSLGIQRGKDDKADSKAIARYVSLHHKTLKISKLPTQALLDLKDLLAYRARLLKQLNALKVAAREGRKFASKESISQWVYEDSKEIIQQLQNKMKMIKTKLVQMINENEAIKNIFDLVTSVKGIGLIIGLQMIIHTNCFEAFDSAKKFACYIGIAPFHHQSGISINKEAKISRLGHKKLKALFSNGVASAIQHDKELKAYYERKLAQGKNKFKVLNAVKNKLVHRIFATVKRGTPYVELYKF

SEQ ID NO: 104855 - protein, 356 aa, unidentified
MKTDYQKGKILAKGKDVYIGIDVHKEKWHVTARVGGEEVFYGSMLSDYRSLRKLLERFKDCRIKVAYEAGPCGFWLYDKLVADGVETIVVPPSLIPIESGNKVKTDKRDSRKLAKLLESNMLKRVYVLSEADRADRELIRTRRQILEHRSDVMRQIKSKLLFHGIKSPFPSKDKWSQRYVKWLKELSFEHQVLKISFDSLIELFEYLNIQLVKISKQIIVLSQSEKYVRKVKLLKSVPGIGILIAMELLVELPDIERFRSAEEIASYMGLTPSEYSTGQHVRQGRITRCGNKRARTCLVESSWHLIVKDPFMRFKYMTLKNRKGAKRAIIAIARNLIIRIRRILLNNEPYKIGLAA

SEQ ID NO: 104856 - protein, 339 aa, unidentified
MKVMIGIDPHKASHTAVAIARDEDQIAGFKVRATSRQVEHLLRWAEPFEKRIWAIESVGGLGYLLAQQLVAKGEDVLDVPATLASRIRVLATGRSNKNDPNDAHSIAIAALRAPGLRLVEPADHGEVLRLLSKRNSDLGRQRSRVICRLHSLFAELSPGGIAKEMYVSDAEELLAKVRPESPAQQMRYDLVLELLDDVRRLDEQIKTSHRRIRLAVRASGTSVTEVYGVGPIHAAEVIGYSGDVRRFTNRDAYASYNGTAPIERSSGGRIVHRLSQRGNRKVNHALHMVAVTQIRNPGTEGRVYFERKVSEGKTKKEALRSLKRQISNAVYRQLVLDAG

SEQ ID NO: 104857 - protein, 389 aa, unidentified
MKKQYLNVASVGMDVHHKFSTVVMRDGKGDVLCRERLDHVGRSLLRRRLTGWPKRVPYVMEASFGWMWLSDEMVAKGLKVNLANCFKLEQMRKARGESKTNGKDAALLSELPFEARQWWRVWLAPAEVRNEREWLRLRMDLVKLQTQTKNRINAIFHRYGIFHEFSDLFGSKGRGLLVHLCQYGRTDEVELPDGALAALRSHVRLLGQVRTRLAEVTRKIRVRLERTDLARRLDGIPGFGEVLSHTVIAEVGRIERFRNHRALASYSLLAPISMDTGESSGKAPLGRHLGHRGNRTLKWAFIEAAHGAVRSGGRWRAMYDRHTDGGRRNKNQGYIKVARSLVKVVYAVWSKGVDYTPSAPSPARRKRRAKSRRSRSGKGQPFQPMAAVR

SEQ ID NO: 104858 - protein, 346 aa, unidentified
MKILAFDLGKYKTVGCAYESESGAHEFKRDFTTPTALRKMVQDIKPDRVVIEVCSIAGWVCDLLWEMGIEVQVANTSDDAWRWRKVKQKDDRRDALKAARLSAVNQLREVYIPQIEVRQWRALITYRQQLVRRRTKIKNHIRDLLLREGQLLARGSKCWNKLGLELLTSLARPLSEVGLAELWRGELHEELQQLQLTQARIVTVEEKLNAIGAADGRVQLLRTVPGVGPRLAEAIVALLDQPQRFRKASQISGYIGMVPKALDSGETERRGRITRQGSRVVRSLLVEVAWAGLRHNAWVRQTYQRLSGGKQARKKIAIVAVGRKLLVRCWAMLRDNRAWDWQPQIT

SEQ ID NO: 104859 - protein, 359 aa, unidentified
MKIVGCDFHPSWQQVAVFDPETGELTELKLVNGDGEAERFYRALEAPALVGIEACGNSQWFIELLERLGHLVWVGDAAQIRASYVRRQKTDRRDAGHILKLLMENRFPRLWTPSAEQRDLRQLLIHRHKLVEIRTRVKNGLQHLALNRGVQKHSRLWSVRGRAYLEKLPLEGWTARRREDLLKLLAELDRHLGELDEAVTRTAQEHPQARLLMTQPGVGPITSLAFVLTIGDVSRFKHSNQVASYVGLIPREHSSGGKQRLGAISKQGNRFMRQLLVESVQTVNRLDEGFRKEYAARCHHKPKGVAKVAAARKLAVRLYWMMRQNVGYPEIALIESSPRVALTGGSHVVTLNERSRIQQ

SEQ ID NO: 104860 - protein, 387 aa, unidentified
MQASTIDTPTVEHCGTIFVAIELSQRSWLVTLHSPDKDKMSRHKLESGDHAGLLALIGRARERAARTLRAVPAMVSCYEAGYDGFWLHRLLLAAGITNYVFDPASIAVDQRARRVKTDRIDGEKMLRTLMAYLRGEPRVVRIVRVPAPEQEDARRASRERGRLIKEQTAHTTRIKALLRLVGMSVGNPRRRDWLSWLAAQRDWQGQAVPRRMLAEIKYEHARLMLVREQLEALAQASAPTDRAPATAQMVERSELLLRLKCLGPAFATTLTNEVFYKDFRNRREVASYFGLTPSPWQSGGIDRDQGISKAGNPRARCAAIELAWLWLRHQPESALARWFRSRTHNNASKRNKRIAIVALARQLMVALWRYLTTGMVPEGALLKAVKA

SEQ ID NO: 104861 - protein, 416 aa, unidentified
MDVHRDFVIACIASTNAQGVTEYQSRRFSTYTGGLRDCAAWLAENKCKDVCMESTGKYWFPVHNILEKSCRVVVTHPKFVKAIKGKKTDKKDAMWIADLFKHDVVSGSFIPPERIRQLRDLCRYLQKLTWMNAGEKNRAQNCLTVSNLKLDSVFSNVFGKSASAIIDFMLEHPGEPFDVAPFLRTGCKSPIEEIQAAVDGSFSPWQADKLKIIREHMADLGKCKKMIENLICRLAEPYQRQIELIMTVPGISDPMTAIRIIAEIGTDMTQFESSKHLCSWAGLTPQNNESAGKKKTTRIGKAGQFIKPLLIECSIGAANPRSKKYPEIAHKYQQLRKRRGAKKARVAIARRLLTAIYQMLLKDEPYQPCVTPVQENIPKQRVMTAEDALAMLRRKGYILVDAAGAVIEGNSLPAPA

SEQ ID NO: 104862 - protein, 339 aa, unidentified
MSIVMGLDQHRAQITAEWVDTVTGEVSRGRVVPADRQGVRRFLGRFEGRELEVALEATTGWRFVVEELCRVGATAHLAEPAETSALRGNKRHAKNDRADARHLRELLMTSRLPECWIAPDHLLDLRARVRLRHTLVDQRGEWQQRMQAVLYHHGLPKRAGLLTGENRAWVEQLALPAAGRELIVVALGMIDALEVRVAPLDKKLRAYARRQAGCRALQAAHYGIGALTSVVILAELGDCQRFSSSREAVRYGGMDITVHASDKRRAPGHLSRQGPPALRWALYEAAQAARRKTSPDYAYYQQAAERLGGNRACLALARKLLKRSYHTLRELGDQALAPA

SEQ ID NO: 104863 - protein, 429 aa, unidentified
MGRLRIVHPICCGMDVHRDFVIACIASTNAQGVTEYQTRRFSTYTGGLRDCAAWLAENKCKDVCMESTGKYWFPVHNILEKTCRVVVTHPKFVKAIKGKKTDKKDAMWIADLFKHDVVSGSFIPPERIRQLRDLCRYLQKLTWVTTGEKNRAQNCLTISNLKLDSVFSNVFGKSASAIINFMLEHPGEKFDVAPFLHKGCKSPIEEIQAAVDGSFSPWQAEKLKVIREHMADLGKCKEMVEDIIFRLAQPYQRQIDLIMTVPGVSDPMTAIRIIAEIGADMTQFESSKHLCSWAGLTPQNNESAGKKKTTRIGKAGQYIKPLLIECSIGATNPRSKKHPEMVHKYQQLRKRRGAKKARVAIARRLLTAIYQMLLKDEPYQPFVATAQEDIPKQRVMTAEDALAMLRRKGFILVDEDGAVIEGNVLPAPA

SEQ ID NO: 104864 - protein, 342 aa, unidentified
MWYVGLDVHWRTSTVCILDENGREVKMVTLRGGWSKMLTWMENQVPRPFAVCYEASCGYGALYDRLWPMARRVVVAHPGQVRLIFRAKRKTDRIDARKLARLLFLDAVPPVYVPSLQVRSWRRLIEGRRRLVAKRTRVKNGLRSLLRSHGMRPPVRSLWTRKGLAWLRQVGWPSQTAALERDLLVEELATLESQVRRVTRELNRVAAAHPGVSLLRTIPGVGPRTAEAVVAYIDDPDRFGHGGQVGSYFGLVPRQEQSGSLNRLGHITKEGPASVRHLVVESAWQVIRRSPSARARFDRICGGQKERRKIALVAVAHWLLRCMHAMLRTGELWRETASAAAA

SEQ ID NO: 104865 - protein, 354 aa, unidentified
MPCLPVEVILGVDTHRDTHAVVLVDLVGRLIATATFPTTRPGLRALIKWAQQRGNVRRAGVEGTGSFGAGLTRALHHEGIEVIEVTRATRVGGRHRGKNDTRDAEGAARSVLSGQATAAPKARDGIVESIRVLRNTRASAIKARTQAILHVKNLIVTAPDELRETLSPLTNRQLVKHCARMHRSSRRDSLAATRHALRSLARRHQDLDCEIAELDELLGDLIAQAAPRLLKQPGIGPEIAARMLLVAGDNPTRLRSDAALAALCGASPIEASSGKTIRHRLNRGGDRQGNSALWLIATNRMIHHPETREYVKRRTTDGKSTKEIRRCLMRHIARGIYPLILADLHDAQQQSALT

SEQ ID NO: 104866 - protein, 335 aa, unidentified
MQIYGIDLAKEKFDVSFFDLTSKKVSNQPSHKVVTNNLKGIGKFFKALPSDAVLVAEHTGVYGDTLLKCCMDSNVKIAFVGGYVIHRYRATPDRAKTDVLDCALLRDFGERYPDKLKYKTFPEEALYELRQLARHREMLVEQRKQLITADRSEDCRPIRSLAVKRSMDRIKEMLDTEIAETEKEMLKVINGHESIHHNYELVKSVDGVGLITAVELLVKTENFTKITTARQYAAYAGTAPYEKSSGKMDKGAHISKIGNRRSKTLLYICAESARLHNKEIKLYYERRTLIDKKPRHYVLNAIANKLLRIIFTLVEKGEYYDANFIRQDPRVVKYN

SEQ ID NO: 104867 - protein, 346 aa, unidentified
MLYAGLDLSRKRLDVHVMDEDGSTVEVTAVHPDADALRTLTAVVSRHRQPVTAVVESMNGARFVHDQLERWGWDVELADAVRAKGLAPLAAKTDKIDARVLAELARRDIVPEIWLPDPSVREARERARFRLHLVRHRTALKNRIHATLIAFGHPVPVSDLFGKGGRELLERMAIPEPWSTTLTTSLAMVDEVEREIRLCEAELRRLGADHAYVPHLMTVPGIGWVLGYTIAAEIGDIDRFASPKKLAGYTGLCPRVHQSGQRDRRGALTKHGPKHLRWALIEAATTAARHPLYKERYQRTKRRVGKQRGPSIARLQLARDLTTAIWHMLTKDEPFAPAGPACPLVA

SEQ ID NO: 104868 - protein, 320 aa, unidentified
MSASSIVVGIDVAKAHVDVAVLGAQFDSRRFDNEAEAHSMLAAALKPLKVALVVMEATGGYESALVCALQAAGLPVAVVNPRQARDFAKSMGRLAKTDAIDARMLAELAGVLSRRKDVHRFLRPVADAQQQWLAALVTRRRQLLTMLTAERQRLQITPRELHPSLKAIIAAIQAQLEDIECQMVSHVREYFGELDRLLRSANGIGPIASATLIAELPELGRLNRQQIAALVGVAPIANDSGSSRGRRRIKGGRFDIRRVLYMAVLTAARRNPAIKAFYERLKAAGKLPKVALVACMRKLLTILNAMVRTNTHWNASLHRP

SEQ ID NO: 104869 - protein, 407 aa, unidentified
MTRYYIGVDWADQAHAVWVGDETGTQVAARLVKQTVEGLSEWGRWLDECRAQGSELWAAIEKPEGRLVDFLLDHGVVVYPINPKALDRARDRFRMSQSKSDVFDAWVLAEFLRTDHSHLQPLVPNSEPAQELKLLTRDYHRLVRQQTRLLNQLTATLKEYYPLPLAVFEDLKTAVARDFLSTHPMPQGVAALTRTQWTKFARAHGLSAARTAELWEQLQQPQLPVPAHVVRAKARLVRVLVAELGTVGDAVDEYRKAVEDFFARMPAAEWARTLPGGKSGTTVPTLWAELGDADGHWQGFRHLQAEAGAVPVTKRSGKSQVVHFRFACNLHLRYAVYWLAFLSLRQSEWARVYYQRHRARGHSHHRALRALGAKWLKIIFVMWKTHTPYDETYHLANMARQHLRQAA

SEQ ID NO: 104870 - protein, 369 aa, unidentified
MVENTLFVGLDVHKKTISVAIVDDCAGSAVRFYGTVENTPDAIRALCKKLSKDGGRLHACYEAGPCGYNVQRHLTRLGHRCDVVAPSLIPRKAGDKVKTDRRDAMMLAQTLRAGQLTEVWVPDQAHEAMRDLVRLRSQAMRDLRKTRQHLLSFLLRHERISPYGHWTKMHRRWLGELRFSHPAQHLALEEMLLRIERAEELCDRLKRAIGELVPQWSLAPVVQALQALRGISLITAAVLVAEIGNFARFDSPRQLMAYLGLNPSEHSSGGTVRRGAITKTGNGLARTSLVEAAWTYRFPARITQIIRDRLKGLPEPIRAVAWKAQVRLSARYRALIARGKSAPTAIVAVARELVGFIWAIARMVEPKFS

SEQ ID NO: 104871 - protein, 318 aa, unidentified
MPQKTRFVGLDVAKSKVDACIRSEGLRMSAPSTPEGRAELVAWVRANRVGRAVMEASGGYERGWAEALRAAGVEVRIVDPKRVRHFAKAAGRLAKNDPIDADTIARFAEAFPDGEAQPHDPARDEIDRLVAARTALKDVEDRIKQQGEHGPPPIVAKALAAIAKTTRAELRRLEAAIAAKIKANPGFARRAEIVTSVPGLAGQTAAGVIAWLPELGRIRNEAAAALLGAAPYDDDSGGRKGQRHIKGGRRKLRNLLFMPVMGAATQHNPVLKAYYQRLRARGKQAKVALIACMRKLIVILNTMLARDETWDPPARAAA

SEQ ID NO: 104872 - protein, 363 aa, unidentified
MRDGICFAGLDVHARKTVGAAVWLGSGEVFRAQIAGSPTEAIGWLQTLPGPVRAVYEAGPTGFGLARAARAAGIEMMVCSPGAIPRQPGDRVKTDKHDALKLARLHAAGQLRAVLVPDLPLEALRDLVRAREDLRGDLMACRHRISKLLLRRGLIWAGPGSTWSQRHLSWLSRVRFDDPLVELVFSEHLACHEVLLARRDRLERAIDERAEAGPWSGLVGRLRCLRGVDTLTAVGLVAEVGDFAAFDHPRRLASYVGLVPSESSTGTRRRQGAITKAGSGHARRLLIEAAWHYRRPPRVSLALRRRQHDQPPAVIDAAWRAQLRLHGRWAALDARRGKKRTTVAAAVARELACFVWEIANQPD

SEQ ID NO: 104873 - protein, 334 aa, unidentified
MAIAFLGIDVGKSDFHCALNVGDDVRTNHFSNSKAGFARLRSWLKNRKVRQVHACLEATGGWSDELAEDLHDHGHLVSVVNPLAIKAFGQSELSRTKTDKADAALIARYCAKMQPSLWQPPTKTQRRLQQLARRRLALDEMRTQECNRLNGPGVSEVASSIESTIMFLNEQISDIDEEMRKLIDDDPTLRGRRDLLESIPGVGPRLITTLLGELPNISEFRNGKALAAFAGLCPQEVRSGTSVSASWLSRRGSSRLRRILYMPAMVAIRVNPILKAFAERLRSSGKRWKQVIVAVMRRLLVIAYGVLKSQRPFDANYCRTKKSTLRDARRPILT

SEQ ID NO: 104874 - protein, 363 aa, unidentified
MTEEKRRYVGIDLGKREYTMAIIGKNGKVSIHLGKTSAQGRQALYKKLDKTDKVALEAGNLAFKMTQEILQQVGSEVRVLNAAKLPFIWAAPTKTDKEDAMKLAHLIEERRDEKLPIVPLPSEKEMEMRKITANKDRETRNRTRHINRLHSLFHNQGHTEIVKKDIATAERRQEAVKVLTGIDRQEAEWILQYLELHEQRIKELEAAIKGEAKNNEDIQRLLTISGIGPITAYAFLAHVGDGSRFSAGAQVSNYIGFVPKLDYSGTIQRHGPITKRGNGYLRGLLVQAAWSAVRSKKGGALRERFIYYTQYRGDSKKKTVVAVARKLAEMMYSVLRNKSEFEVRKWDGPKNKINLQAVLKNCA

SEQ ID NO: 104875 - protein, 361 aa, unidentified
MWIIGCDFHPSGQQVFAVERETGLIVEQWLEHSGKAVDAFYGRLPRGSEVGVEASGNMLWFERKLAEYGHRLRLGDPTKIRASATRKQKYDRRDAEHIAHLMLKGDFPELGWVPSLEQRDQRQLLMHRHKLVRMRAQIKNQLQHIALNQGLQKKRQLWSGAGRELLAQLALEPWTTRRRDDLLQLLDVLDGYCGGLDEAVETLAKENQDARLLMTHPGIGPVISLAAVLTLGDLGRFENSRQVVSYLGLNPSEASSNQRRRLGGISKQGNSFLRLLLIQGAQTAVRGDEELGRQYRRLAVRKNKSIAKVMVARKLAVRMFWMLKTGKPYPELVRMRGSSSHSVVVKTAVLSERPASPSAQP

SEQ ID NO: 104876 - protein, 384 aa, unidentified
MMTTATRNEHSTETHATAPGLFLAFELSEKTWKLGFTTGHGQKPRERTMTARDLKGLLDEVTQAKSRFGLGETAPVVSCYEAGREGFWLHRFLQTHGITNSVVDSSAIEVNRRRRRAKSDGLDVRKLVSMLMRYHHGERQVWRVVHVPSVEAEDQRQLHRALETLKQERASTTTRIKGLLSSQGVRLTSLRKLPEQLDALRLWDGSPLPRGLRQRVLRVYAHHQFLSQQIAELEAERRALLQTSQEANIEKVRQLMHLRGVGINGSWLLVMEFFGWRAFKNRREVGGLAGLIPTPYQSGESAREQGITKAGNRHVRWMITELAWSWVRYQPESALSGWFRERFGGGGKRLRRIGIVAVARKLLIALWRFLETGVLPEGAVLKEA

SEQ ID NO: 104877 - protein, 422 aa, unidentified
MVLKGVPMALKIVYQICCGIDVHKTFVVACIASTNKQGVTTYKRHRFSTFTQGLKELLQWLLDNHCKDVCMESTGKYWIPIYNVLEKDCNIVLAHPKYVKAIRGKKTDKKDAKWIADLFKHDLVAGSFMPPADIRQLRDLMRYRFKLTCFMSSEKNRLQNCLTVSNIQLASVVSDTFGKSSQRILDKILENPDDTSFDIEPLIHGSMKKKLPELELAIDGFTTPEQAGKLKVIKKHFEDLESRKAELEKLILALASPYQQELDLILTAPSFKNKFTAIGIISEIGVNMEAFPSAKHLCSWAGLTPTNNESAGKKKSVRVSKAGCYIKPLLVQCANSVVKSEKHPEIRNRYLRLRKRRGHKKAIIAIARMLLTALYNMLKNKEPYNAELYRKSDALPVNREITIEQAILMAQFQGYKIKSAAE

SEQ ID NO: 104878 - protein, 336 aa, unidentified
MDYGAIDLHKRYTWIRLVTADGVVTLERRVPTTREALTAAFGGRRPARVLIESSTESEWVAQTIEACGHEVIVASPGYALMYGHRDPHIKTDRRDVVALAEACRHGIYRAAHRVSAGQRQRRRELKIRELLVRQRTALINLLRAELRQEGLRLRSCAAERVARQYRVLALPHPRRESLAPVVAGLEDLDDAMAASTAALTAAAQADPVVRRLQTAPGIGPITALTFRAVLDDVERFADARSVAAYLGLVPKEESSGARQHKGAITKAGPPGLRTLLVQASWTVWRQKTGRGALHAWGDRLAARRGKRVAVVALARRLGRILYAMWRDGQDYRGQPA

SEQ ID NO: 104879 - protein, 360 aa, unidentified
MEGNQESSDRRIVGGVDTHKDLHVAAVVDEVDRVLASQCFATTRHGYKQMLAWMRTFGSLQRVGIEATGSYGAGLLRYMQKAGVEVLEVTTPDKHDRRKRGKNDDLDAQNAAHAAFAGKRTVTPKSRDGMIESLRVLKACRKTAVAARRVALQMIQNTIVCAPDELRETLRKMTRMQLIRTRAAWRPDLTDYRNVASAYRITLKSLGRRYLELHDEIADLDTMIVAIVDELAPALVARNSIGHETAAQLLLTAGDNVQRLRSEASFAALCGVSPVPASSGKTTRHRLSRGGDRAANSALHIIAIGRLRTDPRTQAYVAKRITEGHSKLEAIRCLKRYIAREVFSLIKQRSQERHPAPTAA

SEQ ID NO: 104880 - protein, 417 aa, unidentified
MEDEQKASTNRYIALDIHKYYSVVAGVNRDGEEILSPCRVEHLNLEDWLGKHLLLSDRVVIESTTNAWHVYDLLEPLVAEVLVANPIKVKQIACARVKTDNKDTLILARLLAANLVPTVWVPPQPVRELRQFVSHRRRLANMHTQVVNRMHSVAHRHHLNHPKGKDFQPKNTAWQQDASLSQLEKLQLELDMATRAHLEKQIEQMTRELGRMSHEEPWASQMLYLMQIPGCGVVTGMTIMAAIGDITRFENPKALASYSGLTPGLEQSGVKVRGKGITKEGRRELRWALVEVAWRAVKADPHWKRLFEELKRRMHPNQAIVTIAHHLLVVMWYVLTKREPYRHYSPERIAYKYLTWSWALDEEQRQGMTRPQFARYYLMRLGIGNELKRVALNPEFPYRLASVEEVLAIRPELLPPE

SEQ ID NO: 104881 - protein, 408 aa, unidentified
MEVVHERCAGLDVHQHSVVASVRIAAAGKVVQEVRTFDTTTQGLLALGDWLTAHGCTHAAMESTGVYWKPVWHVLESVLDLVLANAAHIRNMPGRKTDVNDAMWIADLLAHGLIRASFVPPTPVQELRDLTRTRKQLVREVAQHTQRIQKTLEDANIKITGVISDVLGTSGRALLAALVAGETDPERLVALTSSRLKASRAQLVEALRGRIRDHHRFLLTLHLAQIDALQAAVRDVEARVGETLTPFHARAQLLTTMPGVSATVARVIVSEIGVDMSRFPTAGHLISWAGFCPRNDASAGKRRSTRVRKGAPWLKTTLVQAAWAAVRKKDSYLRAQFLRLKSRRGPMKAIVAVAASMLTAAYHILRDGVPYRDLTGAHFDARDRTKLTRRLIRRLADLGVQVEIRTAA

SEQ ID NO: 104882 - protein, 422 aa, unidentified
MAELMSLAAMIGIDWSDQHHDISLQESGAPTVEHRRLPHTPEAIVAWMVELRGRFQGRPVGIAVETSRGPLIHALLEHECVVLYPINPRSLRRFRETFAPSGAKDDLPDADLLREMLVKHRDRLRPWVPDDVETRALRRLVEGRRKAVDLRTKLTQQLTAALKEYLPQALSWAGDDLASGLACDFLLTWPTLEAVQRVRPNTIRKFYTAHHCRRTALIEERMQDIQRATPLTRDPAIVQTSALLVQMLAQQLKTLAPAIKRFEAEIAQRFAAHADADLFDALPGSGAALAPRLLVIFGSDRTRFQSAADVQRLSGIAPVTQRSGQRSYVHWRWAAPTFVRQTLHEFAHHSIRYSAWARAYYALQRARGKGHHAAVRALAFKWIRIIWRCWQERTPYDEARYTRSLIQRGSPLAAQLAAAVQA

SEQ ID NO: 104883 - protein, 392 aa, unidentified
MLFVGIDIGKNNHVASMMDEYGKVVFKAFSFSNTTNGGNALFSKLSSYSSNPSDFEIGMEATGHYWLSIYSFLFEKGFLLHVINPIQTDGWRKGTEIRKRKNDTIDSVLIADLIRYGQFVQTRLADEDLFSLRTLTRFRTYLVESISDLKRKVVCVLDQIFPEYQSIFSDIFGKTSKEILLQFSSPIDFETISSESLAELLAQLSRQKIGAAKAEQLKAAASSSFGITFAKNSFTFQLKALIEQISFIENQVKETESEISNIMRKLDSPITTITGIGNVTGAAIISEIGDISKFDNPRKLVAFAGLDATVTQSGEFEASHNVMSKRGSPYLRKAIFQAALIASFHDPVLSVYYQKKKAEGKHHLTCVGAVARKMCNIIYAVLKNNQPYVPKA

SEQ ID NO: 104884 - protein, 414 aa, unidentified
MDVVHTHCAGLDVHKKTVVASIILPDGKASLQKETRTFGTMTSDLLALSDWLMGFGATHVAMESTGEYWKPVFNILENNFEVLLVNAQHIKAVPGHKTDVKDSEWIAELLRHGLLKASFVPPLGQRELRELTRYRSTFVRERATLVNRVQKVLESANIKLASVASDVMGVSGRAMLEAIIEGQASPAEMAELAQKRMREKRELLAKALEGRVKSHHRFVLTELLCQIDSLDETIERFNKEVEEYCRPFEEAVALLDTIPGIGREIAEIIVSEIGTDMNRFPSADNLASWAGVAPGNNESAGKRRSGKTTKGNKALSTALNQAAHAASHTKNTYLSAQYRRLAARRGKKKAIVALEHTILVIAYHLIKRKEPYREMGGDYFDKRRPETTAKHLVKRLEQLGYSVSLQQPVLCAAG

SEQ ID NO: 104885 - protein, 341 aa, unidentified
MLIIACDYHPSVQQIAWTDTGTGECGERRLTHCAEAEKFYRELKKQGASVRVGIEATGHSRWFERLLAELNFEVWIGDPAQIRAKQVRKQKNDRRDAEHILKLMLKDDFPRLWVPTPEDRDVRQLVWHRHRLVQMRTRVMNQLQAIAMNEGVRRKRGLWTRRGRAQLETLQLPPWTSRRRQELLELLDRFDVSVHELTKAIEQEAQRRPEVERLQTHPGVGPITALAYVLVLGTPERFACGKQVGSYLGLIPCEDSSADHWRLGHISKQGNALLRYLLVQSALSAAHVEEEWRRKYVHLAMRRNHAIAKIAIARKLAVRLFWMWRRGWDYEQLKKFGSHAG

SEQ ID NO: 104886 - protein, 417 aa, unidentified
MWVAIDIAKVHNQVLVEFPDGRRRHFRMANTLAEFSRLGAFLASSGCTCHIAFEATGDYHRPLAYFLQAHGFSLSLVSSIAVARTRDALYNSWDKNDPKDAQVILHLLKSGTTQVYYDPLENHYNDLQEMANTYQQISLWKVRVYHSIVTHFLPLYFPEAESYLHSTRAEWGTQLLLLVPCPAAVTKYSREEFLATARRLPGQKIDKTRWLIDFYQAARSSIGLPVTEDSEAIRMFRVVLNEYLHLCRLRRELEEQAVARLSSHDDFRRLQTIPGIGPILALIILAETGDLRRFSHYQKFLKYCGLNLSTEQSGKFRGTTRLSKRGNARLRYAFWMAGTIAVRARQNSFCQKFQDYIRRDPLNPDLRRKAYTAVAAKMARVVYGIIKTGTDYRRFPEAALPGGRIPSPRAVEAISTS

SEQ ID NO: 104887 - protein, 320 aa, unidentified
MAQEGRVVGIDVGKSKVDACIRSLGLWLTQPSTSEGQAALLAWLHTNGVEHAVMEASGGYERNWAAALRAAGIAVRIVDPKRVRFFAKSVGRLAKNDRIDAMMMAWFAETVAPRHAPVHDPERETLDRLVTARRMLVELSIRVDQLEEHPQPRVVEQAMRAIAKTIRAQLAKLEAAVAAKIATHEHFAARAAIIRSVPGLGPHFTAGAIAWLPELGQISNKAAAALVGVAPYDDDSAEHRGKRRIKGGRREIRDLLYMATLAAVTRHNAMLKAHYQKLRAKGKQAKVALVACMRKIIVILNVMLARGEAWDPARSASPAL

SEQ ID NO: 104888 - protein, 392 aa, unidentified
MIYVGIDVAKDKHDCFAMNSDGEILIENFSFQNNSDGFNLFFNSISQFNESFENIKVGLEATGHYSNNILNFLTSKGFNVFVINPLQTNLFRKGQSLRKTKTDKLDARFIATMLISNNLKPYSNLSYHISELKSLVRHRFRLIEERSKFKVSLSRLVTIIFPELEKIVWSISQNSVLYLLNELPSAKNISECNLKHLTNLLQKHSCGKYSRDKAIEIRDLAKISIGTHSPSISFELRQVIQTILFLQSQIDDIDKELKRLVVELDSPILSIPGISYVTAAFILAEIGDINNFDSPSKLQAFAGLDPPTYQSGKFNATHSVMVKRGSKYLRWALLTATRLVCMRDKNFNDYKKQKLAEGKHYFVALSHTTKKLIRVIYHLLKTNTTYQFQKVA

SEQ ID NO: 104889 - protein, 359 aa, unidentified
MREQRNKISFRGQKIYVGIDVHLKSWSVTVLSETSVLKKFSQHPSPEALYGFLTRSYPGAEYHSVYEAGFCGFWIHERLTALGIDNIVVNPADVPTKSSEKLRKTDTVDSGKLARSLRANELKGIYTPDSVSLEMRSLIRLKNSITKDTTRQKNRLKSQLRYLGIEIPQEFLTPFSNWSKRFFAWLKEIETLTPSGRQALDIHIRHLDELRRQKLEMTRALRTLAKTDRFREPLRLIMSVPGFGQATGMAFLSEICDITRFRNAEQLAAYIGMIPMCHSSGEKDGTGDITIRKHAVMRCNLIEAAWVAVRQDPAMNLFYTEQCKRMPKSKAIVKVARKLVNRLFFVLKHQTEYVNSIVS

SEQ ID NO: 104890 - protein, 318 aa, unidentified
MPEPIVVGVDIAKKTFDAAIGCTGDILSLPNDDAGHEALIAALIGRTVALIVMEATGGLERHLACALQAAGFAIAVVNPRQARDFAKAMGRLAKTDRIDARSLAEFAQVLNRHADRDKFIKQLPTAQHQELQALVARRRQLITMLVAERHRLSTSHSVAKKSIEAIIEAIRNQLDTVETGLSTHIEQHHAELSRQLTSVRGIGPASVTTLIAEVPELGILSRREISALIGVAPFNRDSGQMRGKRIIFGGRADVRRVLYMATLAAIRFNQVIQRFYARLVAAGKPKKIAIVACMRKLLTILNAMVKSQKKWDESLHLT

SEQ ID NO: 104891 - protein, 424 aa, unidentified
MNYTQNEKIEQVTDSTMVVGVDIGSQIHYARAFDNRGRELTKRIFSFHNDLEGFNSFNLWAETLKTENEKTAVLIGCEPTGHYWFAFAKYVNDHQKRLVMVNPFSVKKIKELDDNSPKKTDSKDPKTIAKLVVDGRYSIPYMPEGIYAEIRDLVYSRDRIMKQHNISANRIQRWLAIYFPEYLGLYTRFDAISGLAVLEKDVIALGVNGIRKIWHDKKMRGRGVTEDRAKTLVEAAHNSVGLDGGIGTKSELYMLLEEHRLWTSQLEAVNKVLEEMILKVPHVEKLLAIKGVGSITIAGFIAEVGDIRRFDSPKQIQKYAGLELVENSSGKHKGRTRISKRGRRKLRKILYQVMVPLLARNKEFRGIYDYYVTRVKNPLKRRQAMVAVSCKLIRVFYAVLTKGVEYDRFKMMSDIHRKSDIIAA

SEQ ID NO: 104892 - protein, 347 aa, unidentified
MTLYCGVDFHSRRQTVCYCNTDDGEVKIKDLHHYEDDVRSFYEQFKNEQVIVGYETSGYARWFETMLFELGIEVWVGDAAEISRLGKRRQKNDRRDAEHILDLMLKGEFPKLYRTDVKSQEIVRLLRHRQKLVKHSVMIKNSLRRILIETGLIFKAPLSSQKAKQKFRELKLPMLLANEGDRWLELLIEIEKQIVGLEHKLKAEAQSDERVQRLLTHPGVGLLTSLCIVHTLGDVQRFATTRKVAAYAGLEPMEHSSGEKRRYGAISKAGNRLLRFLLGEAAHIATRTDNELKQFFQKLKNKCGTAKAIVAIARKLLIRCFIMLRDQIDYAEFRQRGIEARSARVYT

SEQ ID NO: 104893 - protein, 377 aa, unidentified
MKNVRFVGLDVHAETIAVAVAEASGEVHSLGVIPNRPESVRRLVGKLGEPGQLRVCYEAGPTGYVLYWQLSELGVHCEVVAPTLVPVKTGDRVKTDRRDAEKLARCYRSGDLTAVWVPDAAHEALRDLVRARLAAKRDQLRARHRLGKFLLRQGRRAQGMTAWTAKYLAWVKQQRFEHAAQEATLLDYLHEVEHAAERIVRLERQLDAAVASMPESSRRVIAGLQCLRGVAQVSAVTLVSELGQLSRFAHPRQLMGYAGMVSQEHSSGERVSRGAISKAGNAHLRRIVTEAAWNYRHRPAVSTTLLARQSGQSDAVKAIAWRAQHRLHARYRALLGRGKAKQKVITALGRELLGFIWAIGIELERVPHSSQEIRRAA

SEQ ID NO: 104894 - protein, 420 aa, unidentified
MKAYNVNDFAALIGIDWADKKHDICEHPKNTKQYHYTVIKHKPEALHKWVMDLRLRYPDQKIAIVCELKKGPLIYALAKYDHLVLFTVNPSAVANYRKAFTPSGAKNDPTDAFIQVEMIKLHIDKLSVIVPESTSMRALAQLVEYRRSLVQDSVDLSNKITATLKNYYPQALEWFKEKDTFIFCDFISKWPSLTTVKKARKQTLLDFFNRHNSHYETVNNARLLSIKEAVPLTEDEGVIAPNQLLVEVLIAQFKVLLMGIQQLDKAIKQLYKKQQDKAIFDSFPGAGPQLAPRLLVAFGHNRERYTDASQMQKYAGIAPVIESSGKKTWTHWRYSCPTFLRQTFVEWAGFSIRYSFWAKAYYDQQKSKGKPHNSIIRSLAFKWIRIVFRCWKTKTPYNESKYLEALKRRGSPLLKFAINS

SEQ ID NO: 104895 - protein, 390 aa, unidentified
MYYCGIDVAKRKHAIALLDEHGQPMHRPFTIENTRAGFDQLLQALAELKGPVLIGLEATGHYWWALYEDLTQHDHPVVVLNALQIHAFRKSGVRKVKSDRTDAGWIAEFLRFSQPEPAQPTTAVFLQLKDVSRFRYHLSDQIGDCKRKLLSVLDRVFPEYETLFSSVFLNSSRQLLAKAASAQELAAFDLTELADLLQTASRGRFGRTKAEALHTAAKQSVGVRFLADAAQLEVRCLLAQIDLLEEQRDQVDVALALLMEQVPQHLTSIPGVGPTTGAALLAEIGDVRRFDAPEKLVAYAGIDATVYQTGQFEARQMHMSKRGSPYLRHALWQAASMAIQYDDELRVYYDRKRQEGKPHGTALGAVCRKLLTRVYIVLKENRPYEIRTQR

SEQ ID NO: 104896 - protein, 319 aa, unidentified
MAQNDLVVAGIDVAKDKVDVCVRSLSLKRTFASTAEGRRELASWLRRQKAAKAVMEASGGYERDWAKALRGAKIEVRIVDPKRVRSFAQSAGRLAKNDTIDAEMIAWFAETFDEARSQAYDATREQLHQMVNARQALKGMQAKLESQGEHALPAAVQRMHARILKTITVELVKFEAAIAAMIQATPRFTELAEIIESVPGIGRTTSAALIAAMPELGQANNKIVAALLGVAPYDDDSGRRRGERHIKGGRRRTRNVFYMACLGAATQHNPVLKAFYDRLVAKGKEKKVALIACMRKLISILNIMIERRQKWDASRYALS

SEQ ID NO: 104897 - protein, 320 aa, unidentified
MAMTVLQSIIGVDVAKAEVVVCHIETDELKIVPNNKTELRAWLKSLPVDSAIAIEATNIYHLDTVNLAHGMGHKVYVIDGYRLNHYRKSTGGRAKTDASDARLLARYLKNEQADLRAWNPPPKVYTKLQSLLRRRAALVKMRVGLNQSWAGEPLLKASSKSVSACLARHEGLIEKRILDAVTEAGLLHQIKRCQAVEGIGFLTAVALTMAFQRGEFESADAYIAFLGMDLRVSDSGQMSGRRSLSKKGDSEIRRLLHNAASAGIKSNAWKPLYEGYLGRGLKTTQALVIIARKLARIAFSLMKNLSEYQSKAVLRASPQP

SEQ ID NO: 104898 - protein, 387 aa, unidentified
MTLVDDLSRSLTAFDQDSTVVVVVEMSAASWLVAGMLPGIARQPLKKLEPDPGALEQLLERWRTEAAKAGRTIGRTVLAYEAGRDGFWLARWLQARGIEAHIIHSTSVAVSREHRRSKTDRLDTAMLMRVFLGWLRGERGHCGMVAIPTLAEEDAKRPSRERESLVGERTRIINSMKSALSRLGIRGFNPKLRKAPQRLEAVSTPEGVPIPPNTLDEIRRDLARLAVIREQIDAIERLRLERLEQAPRSGPNAMVLLLARVVGVGVETADMLVQEVLSRALRDRRAVARYAGLTGSPDESGAKRREKGLAKSGNARVRRGLIQLAWRFLMFQKASALAQWYRTRTEGAVAVRKKTMIVALARKLLIAFWRLVTTGVAPEGVILRPAE

SEQ ID NO: 104899 - protein, 343 aa, unidentified
MDYFAGLDVSVKDTSVCIVDGTGKIAREVKVASEPAALLAVLTGSSYRFKRIGLEAGPLSQWLFSALAEAGLPVICVETRHMRAVLKAQINKTDRNDARGIAQMMRVGLYRPVHVKTLRSQKLRMLLTHRKLLQAKVIAVENDLRATLRNFGLKVGVVGTVKFEARIKELVESFPDLVALVEPLLVVCRVLREQIAILHRRVLATVRDDKVCRRLMTVPGVGPVVALTYRATVDVPARFRKSKSVGAVFGLTPARDQSGERDRPGAISRCGDEMMRTTLYEAAQVMLLRSAKWSWLKAWAMQIARRRGMKRAIVALARRLAVILHRIWVDGTEFRWTREAAAA

SEQ ID NO: 104900 - protein, 383 aa, unidentified
MKAVCGLDVHKDSIFLCILHSDGELFEQVFGVLTFQLEEMRKLLQKHHVFEVCMESTSIYWIPIWRVLSPHFTLRLVNPYFIKQLPGHKSDVKDAQWIAECTMKELVRGSFVPPEIIQQLRQYDRRIFDLNAEIVRKVSKVDGVLQRCNIRLSNYVSNIECKSYRDVVRRLSEGVTNPNELMKLVHGRIVNRHGAETILASLTGVVSQAEIDVLRQLHEEIDIAESHRNECQQRMLEICEKHFPEELERLQKIPGIKERAATSLIAEIGTDMSKFKTANHLASWSGLRPRNDESNKKIKSRKITHGNVYLRNTIIQCAWAASRQKDSFFSRFSYHQTIVRRKNKMKVIVAVARKLLIAVWHVLHDKTDYVDFKPDREESANNG

SEQ ID NO: 104901 - protein, 328 aa, unidentified
MECLSVGIDVSKRELVIAVHPTGDQWTTATTPAGIATVVKRLQTLGPGIIVVEATGGYERALVAALAVAELPVAVVNPRQVRAFAQAIGRTAKTDAMDADVLALFGGRLDPAPRPVTDVATQTLAALVARRRQLLEMIGMERSRLEHAPPTGHLTRELRRHIRWLERRVKDVDDEIGTCIAAHPTWRVQEELLRSVPGVGPTTARTLLGELPELGQLDRRAIAALVGVAPFNCDSGQQRGQRHIWGGRASVRATIYMAALSAARYNPVLRVFYRRLRDAGKPAKVALVATMRKLLTILNAMLKHQSPWTTQVASTPASPSGPARAATV

SEQ ID NO: 104902 - protein, 317 aa, unidentified
MRASAAFFVGIDVSKQQLDIAVRPSGESWTVAHEEASLSALVARLRGLAPTLIVLEATGGWEVPVTGALAAAALPVAVVNPRQVRDFARSTGRLAKTDRLDAQLLAQFAEVLRPAPRPLPDAQAQELTALLQRRRQLVEMLTAEKNRLPLAARRIRPQLQAHIAWLHQQIAQFDEDLRQLIRSSPLWREKDDLLRSTPGVGPVLATTLVAALPELGTLSRRQIAALVGVAPLNRDSGTLRGRRTVWGGRAQVRAVLYMSTVVAVRHNPVLIAFYQRLRAAGKAPKLALTACMRKLLTMLNAMLKHHRRWAPVRAQHA

SEQ ID NO: 104903 - protein, 371 aa, unidentified
MEHTRFVGLDIHKERISIAVAESGRSGAVEYLGEISNDPVAIGKLCARLERRGNALAFCYEAGPCGYGVHRQLTSLGHRCDVVAPSLIPHKSGDRVKTNRRDATMLARLHRAGELTPVWVPDADHEAMRDLIRLRSVVRQIVTRTRQHLQGFLLRHGRKHGRGTAWRMAYRRWLSTLAFGHPAQQIAFQDYTDAVMDAERRLKRVEEQISGLLPEWNLRPVVDALQAMRGIALINAVVLVAEVGDFTRFSKPRQLMAYFGLVPGERSSGETIRRGGITKTGNTHARRALVEGAWAYRMKARIGRHKVDRIEALPKIIRDIGWKAQVRLCTRYRRLRARGKTANVVNVAIAREMVGFIWSIACTVQSTLKTA

SEQ ID NO: 104904 - protein, 411 aa, unidentified
MEAAVITAVGIDVSKSKSTVAVRRPGGEIALRPFEVHHTNSDLKKLASTLKKLGGDIRIVMEHTSTYWRPIALTLKEADFFVSVVNAMLIHDFSDNTIRKLKTDRADALKIANYALTFWDTLPPFNNEEETRLLLKMQSRANERITATATALRNGLIALADQTFPGVNIAFDPNTKNANGHEKWVDFFLRYWHKDCVCQYSMEAFTESYRGWCKRKNYKFRTDTAHKIYLLAQEGVATLPKCESTKMLITQACKRLNAVCEAKQSTQLEMQRLAAMLPEYEVVMQMEGAGPITGPALMAEIGDVRRFKNKKALVAFAGIDAPPFQSGAFESKSRHVSKRGSPHLRRTIFIVSNIILTRSNPENAVYCFMDKKRSEGKHYYVYTVAGSAKFLRVYYARVTEFLRSQPSPDAC

SEQ ID NO: 104905 - protein, 343 aa, unidentified
MGEISMIGLDVAKNVFQVHGVNTSGVVALRRQLRRGQVEKFFAELPACRVGLETCGSAHHWARVIGRYGHEVRLMPPSYVKAYVKRNKNDGRDAEAICEAMSRPTMRFVPVKSVEQQAVLAVHTTRALLVRQRTMIANALRAALSELGIVAAQGIKGLRELMRQLETPSEAIPELMRATLLVLVRHWEALDADERALEQHIKRAASADQNARRLMEVPGVGPIIASAVLAKVPDVSAFRTARDFAAWIGLTGRDHGTGGKHRPGPISKQGDRVLRTLLITGASALLRRQRARGPRDPWLRDLLARRPYKVVMVALAAKTARIIWALLTKGERYRDRTPVPAAA

SEQ ID NO: 104906 - protein, 342 aa, unidentified
MSVYVGIDVHRKRSQVAVINGDGEVLANRNVPNGVETILGVIGGLPPGTPAAFEAAFGWGWLLELLEDYGFAPHLVHPLQCKAIASARLKNDKVDAAILAQLLRADLLPEAWIAPPAVRQLRAVLRHWAQLVRLRTLLRNRIHAVLADHGHDRPSGCWSGPGRAWLGSLQLPVVSREVIEDALVLIDTLQQLIDRLDWEVRQHARADARVKVLTQLPGVGPFTALVLLAEIGDVSRFGSARKLAAWAGLTPTVRGSDRTVRHGHISKQGSTWVRWTLCEAAQTAKRHPQFAATYQAIARRRGKKIATTAIARKLLTRAYHLLSEAATGTVSATSREGSPSPG

SEQ ID NO: 104907 - protein, 452 aa, unidentified
MERSKSGALSMVNPRAAAIDIGSTMHMAAINPNADDNPVRAFGTFTGDLHDMARWFKTYGVTTVAMESTGVYWIPAYEVLEGHGFEVILVNARYAKNVPGRKTDVSDAAWLQRLHSYGLLRGSFRPEAGVATMRAYLRQRERLIEYAASHIQHMQKALMEMNVQLHHVVSDITGVTGMRIIRAIVSGERTPSMLAQMRDVRCHATIETICAALSGNWRDEHIFALGQSLALFDFYQTKVLECDRKLEIALKALEINEGHDVRQLPKVRTKRRQVNTPDFEVRSALYRVLGVDLTQIHGIGPSLALKLVGECGTDLAAWPSSKHFTSWLCLAPGNKISGGKLLSSKTRRSSSRAAALLRLAATTIGRSDTALGAFYRRLSARAGKAKAVTATARKIAVLFYNSLRHGMAYHDPGASQYEERYRSRVIGNLQRRAKAFGFILHEMPGEPDMAVS

SEQ ID NO: 104908 - protein, 367 aa, unidentified
MKKISTVVARQSKNFREQKLTIGLDLGDRSSWYCVLDEGGEVLLEQRLGTTPKAMKEVFGEMPRSRMALETGMHSPWVSRLLSELGHEVIVAHARNVRLIGESRRKDDRFDARTLARLARIDPQLLAPVQHRSAHAQAHLMVIRARAGLVRTRTSLINTARGLTKSYGERLRGCSPRNMNAEKAQSLSPELQAALEPLLAAIESLSERIYEYDQQIGKIARESYPQVARLQQVKGVGTLIALTYMLTLEDPQRFRKSRDVGCYVGLQPGRRNSGQSEPQLHISKEGDAYLRTLLVQGAHHILGPFGADSDLRRWGLKLAERGGKNGKKRAVIATARKLAVLLHRLWVSGEAYEPLRHSRAMPLPAAA

SEQ ID NO: 104909 - protein, 333 aa, unidentified
MQTITTVGLDIAKSVFQVHGVDAQGKVIVRRQLKRRYVLAFFQKLPPCLIGIEACASSHYWSRELQALGHTVRLMPPAYVKPYLKRQKNDSADAEAICEAVTRTNMRFVPTKTVEQQSCLMLHRTRHLFIRQQTAVINAIRAHFAEFGIVAPVGRTGVEELLKIASDGNDKRLPDVARVCIAALGAQLQMLKARILEFDRLIMAWHRSNQVSKRLDELPGVGPALATALVASVADPKAFRSGRDFSAWIGLVPKQNSSGDRYLRSLFVAGALAVIRYAKKRGSKNRPWLAALLARKPTKVAAIALANKIARMAWAMMAKGERYKQLAALAAVW

SEQ ID NO: 104910 - protein, 325 aa, unidentified
MTSTLAQNAGVDISKDWLDASISPNNESARFTNNVNGLKALRRWLAARRPARVVFEATGAYHRLFERTLAQAGFPLVKVNPRRARRFAEAIGKLAKTDAIDAAMLARMGAVLELEARPIVSQTLDEMKELISARDALIKDRTAALTREKTVRATLLRNQLAARLRQIDQQLGAVETALKALRSADADLNARFEILLSIPGVGEITAYVLIVEMSELGMLEPEQASALGGVAPFAQDSGKFAGRRCIRGGRERVRRALYMAALSAMTHHPEYSAKYQALIKAGKPPKVALVVLMRKLLLLANALLRDKRKWTPQAPQKQEVSASKA

SEQ ID NO: 104911 - protein, 466 aa, unidentified
MKSFYLGIDVSKGYADFMIVNAKKQPVIQGFQLDDTFDGHRCLYDFLDQFLAERPESALFSGVESTGGYENNWYSSLTQFQGSLNIQTARLNPFGVMHNSKADLKKNTTDKISAQNIAEYLVAHPEKVVYQKDDQQAGLRKQWGFIKMLNKQCTQFLNQLNSLIYTASPELLHYCQTGMPGWVLKLLVKYPCAAKLKNARAKTVAKIPYVSEKRAQHVIDEAKRSVASTTDPVTQQIIMATARQILHLKKTIADQTKQMIDQCRLPEVKLLKSFQGISDSSAIGLIIEIQTAERFASAKKLASFFGVHPVYKLSGDGVGGIKMSKQGRKEPRQILYMITLSAIQCNPLIKQIYEEHQKQGKHNMAIMGICMHKILRIVYGMLKHNMPFNPQIDIANRQQSVQTKNDRPENVTDRRFQDYDAEAPVSMRQRKKRLERDRSNSVADTKFGITGPVPLGNIITDILPQL

SEQ ID NO: 104912 - protein, 446 aa, unidentified
MSRKKRTHLRGERGQAFADKLRGIPVEQILCVSLDIHKYFHVVMMHNALGEIVTPPFEIDIFQAGFDQLRQAIDAAVARTEAQVVLVGMEPTGHYFENLARHLHHDPTLPRPVTLINSFAVSRNRDQQMMQREKDDEIDVAAIGDLLRRGEGTPFQPINGLYLEMQHLARVRLSKVKIRTALKNQVVGHLDRIFPGLVIQGRVARERYEPLFVTDFWSCHTLQHLIRVCPDPCRLAAMTPHELRTAFHDRGFALGIKIAAEIITYAQKVLLPDPEVIAIRAELLARDLAFLEEVERLIAELEDRLHLLLRQTPYWVWTKVRGLSETQVANLAAAVGDPTHYTYAAQVFRRSGLVSGRNDSGTRRHKGKGKRVVKTGDVYLRRAVMNAVLSLIRHQPALRDYFNELHHSKHAGVARVATARRAVGILWAMQRDQQSRTLVLKRGAKM

SEQ ID NO: 104913 - protein, 339 aa, unidentified
MSIVMGLDQHRGQITGEWIDTETGEIQRARVAPADRVHVRKWLARFRGRDLEVALEATTGWRFVVEELRFVGAVVHLAEPAETAGLRGPKKRAKNDRADARHLRELVMVKRLPESWIPPDHILDLRARVRLRHTLSEQRSEWQQRIQATLYHQGCPQRRQLMTADGRAWLAEQPLPAPAREQITVAIAMIDALELQIAPLDKELRAYARRQVGCKALMAHYGIGELTAVTILAELGDCTRFSSSRQAVRYAGLDITVYQSDQRRAPGHISRQGPPALRWALYEAAQVARRGERSPDREYYLEAKERIGGGRACISVARKLLKRSYHTLRELGEEALAPA

SEQ ID NO: 104914 - protein, 384 aa, unidentified
MPFGLHRETGSRPRKGLAMKKRSSTTVRIKDAVETVCGLDVSDRHSRVCLISRESGEIVAEGRVATTRTALRGYFEPYPPMRIALEVGTHSPWMSRLLSELGHEVLVANARKVRLISQNRRKNDRIDAEYLARLARVDAKLLAPIRHRGPQAQVDLALLRSRGALVKTRTELINHVRGIVKATGQRLPAASTDNFATKARTALAPELMDALAPVLDTIAHVTATIRRYEEQLEALATTAYPQTALLRQVHGVGLLTSLAFVLTIEDPSRFRRSRSVGAYFGLVRARQQSGDSDPALHITKAGDPFVRKLLVGCAHYILGPFGHDCDLRRYGERLGAGGSKKAKKRAIVAVARKLAVLLHRLWVDQATYDPFYNLTRTGKHQHAA

SEQ ID NO: 104915 - protein, 373 aa, unidentified
MKTKNKTNLTPSVVSTPTAAIHAGGFTIGLDLGDRNHYHCVLDVTGQILHEGPMLNDRVALALLLTRYPAATVALEAGTHSPWISRYLTGLGATVIVANPRKLHAITRHERKCDRRDALMLARLARADKALLHPLQHGTAQAQHDLLGLKLRDSLVRTRVNLINTVRFTLKSLGHAVSNPSSEAFHKSILTAVPAECLPVVQPVLAVLTLITDQIKTLERDLVVRSKRDYPVTQRLQQIAGVGPLTALCFVLKIGEPTRFGRSRDVGPYLGLCPGRDQSGGTDKQLRISKCGDGLLRRLLVSAAHYILGPFGPACALRAYGQHLMGTSVREKKRAVVAVARKLAVLLLSLWKHGTDYEPRVPAAMPLVLVTVT

SEQ ID NO: 104916 - protein, 301 aa, unidentified
MDKDSMLFVGLDLGDRWSHLAILDEEGQVLEESRVPTTPEALRRRFSTLSHSRVALEVGTHSRWVSQALQELGHEVLVANARKLRVIFDNPRKGDRADANTLARLARLDPKLLSPIEHRSPHVQADLTLLHSRDALVRTRTLLINHVRGIVKSTGARISLCSANFFPSKAAASLPETLKPAVLPILETVHSLNRQIHSYDRQIEALCRGQYPESLQLRRIVGVGPITALAFVLTLENPKRFQKSREVGPALGLVPRQDQSGGSNPQLHITPGLPQGRQDGQDVPASSLGQLSPVHPWALWS

SEQ ID NO: 104917 - protein, 370 aa, unidentified
MKEIITSFVGLDVHKDSIAIAVAQAGRQAPRFIGTVVPRLPSLHKVLRDIGRASRTLVVYEAGPCGYGLARHLNAEGYTCEVVAPARIARSPIDQRIKTDRRDALLLARESRAGNLVPVVVPDERDEALRDLSRTREDVLAARLRAHQQMKALLLRHGLTCPARIVWSAAHERTLSTIHLPQPAQEIAFVEYRNAIKDAHERLERLTEALRLQSSQWRMRPLVQALMCLRGFDFIAAVTFVAEIGDPRRFARPTALMAYLGLVPSEFSSGKSRRQGSITKAGNQHARRMLIEAAWTYCHSPRVSRGLEVRQQGQPKAVRDISWRAQLRLTKRFRHLRMGRKLPQNKVCVAVARELCGFIWDIARQVKPLT

SEQ ID NO: 104918 - protein, 404 aa, unidentified
MDLPVYCVIEKINNNRNYRIQKIGMDVHSTNYTLCAMEPVLGAEDRIYGEIQVAPDYKAIVAFIASIKMKLGLSDKYSFECGYEAGCLGYTLYNQLTSAGIKCVILAPTTMLTQRGKRIKTDRRDARLIAQCLCYGGYNPVYIPTGEDDAVKEYLRMRDDHKLTLKKLKQQIGAFALRHGHQYTGTKWTDKHIAWLRKLELDPIYQETLNEYMASYDEQEAKILRFNKRIEEIAAQSSYKENIGKLCCFLGIRTHTALSLIVESGDFTRFAKGNIYGAYLGLAPGEHSSADDVNRLGISKAGNTHLRRLLIEAANGICKGRIGHKSKELCARQKEQSADVIAYADKANIRLRSRYYKMIRHGKKKNVAIAAVARELACFIWGMMTGNISVVSRAGSSVPAASQG

SEQ ID NO: 104919 - protein, 408 aa, unidentified
MKAMHRRCAGLDVHQEEIVACRRLVVGRKVRTEIGRFSTTTQGLLELSDWLEDGKVTHVAMEATGVYWKPVWHVLDGRFTLILANAAHIRNVPGRKSDVNDATWIAELLAHGLIRASFVPPQPIQELRDLTRTRKELTREIVRHTQRIHAVLEEANIKLASVITDILGLSGRRMLKAIVAGETDARRLAGLGSDRLAAPREALVAALNGRIRDHHRFLIGQHLKTIEQVETTIGEFDARIEAALTPFRDAVERLMGVPGISRTVAQIVIAEIGADMSQFLSADHLISWAGLCPRLDESAGKRRSTRVRKGATWLKPVLVQSALAAGRKKNSSFKTRYHSLKGRIGPKKAAVAVAANLLRVVYHMLKDGTCYQDLGEAYRRPRNPARAAANLANRIRALGYQVDIRQAA

SEQ ID NO: 104920 - protein, 436 aa, unidentified
MEEVTDEPLYRDRVCGIDIGKAGMAATIRVPSDENPARRASETREFATAKRGVLALADWLRAWQVPAVVMEATSEYWKPVFYRLEAEGFECVLADARQVKNLPGRPKRDPSDSRWLAACFERGAVRSCFVPDPEFRIIRLHTRYRRDLTDERTREKNRTEKLLESAAIKLSSVVTDLHGVTGRDIMEHLIAGERNPKVLAQLARARARRKITELEHALDGAEFFTPEHAALLTTMLERIDRLTGDITRLSGVIEQLLAPYEEQLQQAESMPGWGRRSAEDAVAETGVDMSKFPTGGHLSSWAGRTPLDSQSGKRTGRARHKKGNKYLAAVTGETAVAAGKTATRDGARYRKLARSRGKGKAQVALGNTQLKVYHKLLSSPGMRYQDLGPDYYERQAAIRRKIAYHVREIEALGLDVTLTRPAPEPGPDEPANTPAA

SEQ ID NO: 104921 - protein, 339 aa, unidentified
MNHCGLDMGKKSSVFCIMNGKRKILREGAVRNRPEQVAKAFLKMEKAQFVIEASTKAFWMADLLRSIGHEAVVVDPGRTKAIGAAMIKHDKLDARVLATLGAADLLAKVDQPTEEQRVARMPVVARDGLVRCRVRLVMLVRSMLDSEGIELKGCALGVFSREVRSMAGRMPAGITEAIAPVLAAIDTLTEQIARCDESLKESMAQDPTAQLLMTAPGIGPVVAACFQFAVRDPGRFKTGREVGAYLGLVPSLYQSGETYRRGRITKHGNRQARWALTMAANVLLSVVKKPSALRTWGLALAKKRGRKKAVVAVGRKLAAILWSMWRHQRPFEPQLALAA

SEQ ID NO: 104922 - protein, 314 aa, unidentified
MDKQGNIIQNATRPNDWRAVAEVVPEGGTVFAAIEACCGAADFAEELINHTGWSVNLAHPGYVARIKQSPDKTDWADAKLLADLQRVGYLPKVWLAPENIRELRRLVRYRQQQVNHRRNVKLRVRALLRDQRAKSPAEINPWTKAWRAWAENCTEIGENSRWILGEHFAEIESLNVKIRNIEKRLTSMLAGDPVATKLLEQSGVGLVTAATLRAEIGRFDRFRSGKQLARFCAVTPRNASSGQRQADAGLIKAGNRELRRVLIEAAQRLRRLDDHWVEFADRMKDRGKPSNVITAAVANRWIRGLYYEMCNLAA

SEQ ID NO: 104923 - protein, 348 aa, unidentified
MENIGIDVHKTSSQVCILTAAGELIERRIKTTRDSFAQLLGTRLPARILIEASTESEWVAQCLEGLGHEVIVADPNFAPMYATRDKRIKTDKRDARTLCEACRLGAYRAAHRTSEKQRRVRAQISVREALVRTRSRYISLIGALCRREGLRLPTGSPEAFITRVEQAELPECLRAEIEPLLQVMRTVNEQIEQADHRLAEIVKTDQVVKRLCTAPGVGPVTAVTLAATLDSARRFSGAKQVRCYLGLVPREHSSGERQQRGQISKAGNKRARALLVEAAWTIMRSKKTKTEALREWAAKVAARRGKRIAAVALARRLAGILYAMWRDETEYDLRLLGTTEVGGHCMAA

SEQ ID NO: 104924 - protein, 340 aa, unidentified
MQEVALVDTETGEYDERQLNHSDREAEKFYRNLKQRGVNVRVGMEATGHARWFERLMAELGFELWIGDPAEIKAARVRKQKTDREDARLLLRLMSENRFPRIWVPNPENRDLRQLLWHRHRLVQMRTRVMNQLQAIAMGEGVRLRKSLWSRSGRAKLESLQLAPWAAKRRKDLLELLDHLTPQIEELNVAFEQEAWNRPEVRHLMTHPGVGPVTGLAFVLIIGTPQRFGCGKQIGSYLGLIPCEDSSGGRQRLGHISKQGSSLLRFLLVEAAQQAVRFDADWKRQYLHLAMRREKRIAKVAMARRLGVRLYWMWRTGWDGKQALQFGSHAGQLVRSHGLT

SEQ ID NO: 104925 - protein, 345 aa, unidentified
MKITTIGIDLAKAVFQVHGVDGRGKVLVRKQFKRKDVVGFFANLEPCLIGMEACGSAHYWGRTLSALGHTVRLMAPQFVKPYVKTNKNDRNDAEAICEAVGRPNMRFVPIKSAEMQAVLALHRARQGFVKGRTAQANQIRGLLGEFGIVIAKGIGHIGERLPEVLEDGENALPGMMRQLLARLGENLKEMDKQVGELERQIKLWHRDNEQSRKLEAIAGIGPITATAFVATVGDVKSFKNARQVPAWLGMVPRHEGTGGKATLGRISKRGDVYLRTMLIHGARTVVAQLERKRDATDEWLRKLVARRNKNIAAVALAAKNARIAWAVLAHERSYERDYVANRAGA

SEQ ID NO: 104926 - protein, 404 aa, unidentified
MRLPDHHDVEVMDEGGKVLAKRRLPEGAAGMTQLHALIGRFLPEDAEDAEVVIGIETDRGPWVAALIAAGYTVFPVNPLQASRYRERHGVSGAKSDGGDAHMLADMVRTDSHQLRPAAGDSPEGQGIKVVARAHKTMIWDRTRAVQRLRAQLREYFPAALEAFEDLDAPDVLELLGKAPDPARAAKLTRAQVAAALKRARRRDIAGKTDAILAALRGEHLGQPAALTAAYAAAARSLIAVITTLNAQVKVLEEQVRDHFGRHPDAEIYQSQPGLAAISGARVLGEFGDDPRRYVSAKARKNYGGTSPITRASGKKKVVAARFIHNDRLVDALMSWAFSSLQASPGARAFYDQQRASGHDHSDALRRLANRLVGILHGCLKTRTLYDEATAWGHRENLPQSSAAA

SEQ ID NO: 104927 - protein, 412 aa, unidentified
MEVVYPCCCGLDVHKKSITACVLWAEVKGKSRKEKKRFGTFTHDLLQLADWLEQCGVTHVAMESTGVYWKPVWNILAEQFEVLLVNAQHIKAVPGRKTDQKDSEWIADLLQHGLLRGSFVPPQPIRELRDLTRYRVSLVQEINRIANRIQKVLEDANIKLASVATDALGASGRAILEAMLAGEQDAARLAELSKGLLRNKIPELKLALEGRMTEHHRFLLRQLFELLRFTEAKRSEIEQEIDKRMRPFEDKVTRLCTIPGVDRVTAWGMLAEMGMNMNQFPSSGHLASWACLCPGSFESAGKRLSGKMRKGNVSLRRCLSQAAWAISMMKNNYLSALYRRIAARRGAKRAVMAVAHALLEIAYHMLKRKEVYRELGADHFDRIDVNRIRRSLVRRLERLGHKVTLEPLAQTP

SEQ ID NO: 104928 - protein, 392 aa, unidentified
MALFVGIDVSKEKFDACGIEEHGDKVFSLSCSMNREGFDKLIQQLPSRKKASILLGMESTASYHIALFSYLTAKGYRVVIINPLLIANFTKLSLRKTKTDKKDAFTIAQFLFLKKDALATQESPHLTELKDVSRRREKLVDQMTSLKNDMKRILSVTFPELETVTGVFTKSTLRLLAQFPSALAIRKAGYDAVVDIVVARSRGRKPAASVQTLMDAAATSVGVTSPAKELVLKQEASLLLHLEEQTEETMKLMRCLSGETMKKDMRILTSMKGIGEKTALNFLIEMGGDVKAFETDRKLIAAAGLDPTTYESGKYKGKSKLSKRGNRHLRRVIWLMAVRVIISNQAFRTYYLKRRKEGLIYKKAVLATAHKLIRVMFSMLAHERYFEPERRK

SEQ ID NO: 104929 - protein, 364 aa, unidentified
MLYLAIDQHRKQLTVNLRDEGGVVLLRRQVSTCWEPVREFFHALQERSAADGGFVAVVEVCGFNDWLLKLLPEYGCREIIVVQPEKQSRHKTDRRDANTLGELLWVNRQRLLSGQKVQGLRRVQIPDAVDQDDRRLTALRQNSGRELTRTINRIKAILRRHNLEQECPTKGLQTKGARQWLEALKLSAVEQLELNQLVARWDLLQTQQQELETRIKARQTQNPQAVILATLPGSGAYTSLALASRVGNVCRFPHPRSLANYWGLTPGCRNSGEVTQRLGSITKEGSRVARFLLGQMVLHVLRKDGAMRNWYRQIRRRRGSKIARVAVMRRLATIIWHMLRKQEGYQCGGPPRRKLRQVVVSAGG

SEQ ID NO: 104930 - protein, 343 aa, unidentified
METFVGLDVSLGETSVCILDKDGTRIFEGKVASEPAPIARLIRKRAPGVVRVGLESGPTSVWLTHALTAEGLPVVCLDARHAHAVLSVQINKSDRGDARGLAEMIRVGWFKAVQVKSLNAHERKALLIARHQLVDMRVRIDNQLRGILKTFGLVIGKCGRGQIGQRAQELSKGQPGIDGVVASMVAVRDSLLEQIIVCDRAIRRLAKKDDTARRLMTVPGVGPVVALAYISVIDDPKRFTHARDVGAYLGLTPKRYQSGEVDLAGRISKCGDGFARTCLYEAASVLLTRVGRWSPLKAWGVRLMKRIGATKAKVAVARKLAVILHCIWTDGTEFWWTKEAATA

SEQ ID NO: 104931 - protein, 338 aa, unidentified
MYYTGIDLHKFTSYLTTIDSSGVILKQENLKNVAHNFVQYFNSIPREHQATVESAMTWYWLNDLLTSINIPLVLAHAKYVKAIAYAKVKTDKVDSHTLAQLLRMNFIPVAHKISNDNRTLRDALRARLKIVQRHTSVTNSMQLLLAKYNFDSPTQLSGIPEFQYEQLTKVEELLNEQMLELEKQLYPSLIPNDDIQRLLWIPGIGKMNAFTILLEVDDINRFPDVKNFFSYSRLTPSARNSGGKSKQRSSKDGNKYLKSVFTDAAIHAVQYYPVIKKFHNSLLHKKNKFVARTIIAKEIARVVFYTLKYKTDFNNKFKGKELEHTKSLQWPRVVSPSA

SEQ ID NO: 104932 - protein, 343 aa, unidentified
MDHFAGLDVSVKDTSVCIVDDTGRIVREVKVASEPDALLTLLRNQTYRFKRIGLEAGPLSQWLFSALGEANLPVICVETRHMRAVLKAQINKTDRNDARGIAQMMRVGLYRPVHVKTLRSQKLRMLLTHRKLLQSKAIAIENDLRGTLRNFGLKVGIAGWTKFEARIEELVEDVPDLAVLVESLLVVRRVLREQIAVLHRRLLTIVRDDEVCRRLMTIPGVGPVVALTYRATVDVPARFRKSKSVGAVFGLTCSRDQSGERDRPGAISRCGDEMMRAMLYEAAQAMLLRSAKWSWLKAWAMQIARRRGMKRAIVALARRLAVIMHRMWVDGAEFRWTKEAAAA

SEQ ID NO: 104933 - protein, 334 aa, unidentified
MNYTNFIGIDISKRTFDLALIKGNSTEKIDTAKFPNDYKGIVALEQFIRKQELDKQQTLFCIEHTGLYCRVLSSYLVENQYAVWLEMPVQILRSLGLQRGKNDQLDARRIATYAFTFKDRARLWQPPREEVQKIHDLLTLRERLIESRKSILTPIEELEATGLSEVAASLKKHCRKSLDALEKEIEQIEKELDKMIDKDTNLKNKYKLAKSVPGIGRITALSLLYFTNEFTLFSSAKKLACYCGVAPFTKESGTSVRGKPRVSNFANKALKRLLHMAAMAAISSDAELKAYYERKVAEGKNKMSVLNAVRNKILHRLMAVMIRNTPYQTVYANA

SEQ ID NO: 104934 - protein, 338 aa, unidentified
MTKITTIGLDLAKQVFHVVCCDERGKVMGRKMLRRSQVLEYFANLSALRVGMESCASAHYWARKLQGMGHEVKLLPPQFVKPFVRGNKNDYNDALAIAEAVVRPEMRGVAVKTVAQQDIQALHRLRAQCVASRTAVCNQLRGLLGEYGVALPRGVGSLRRRLPALLEDAENGLSELFRRLLAQGYQRLCELDDHIEAYTVEVKRHSRQDDACRRLQTIPGYGPIVASVFHSTVGDGQAYRRGRDVSASLGLVPRQHSSGGKSVLLGISKRGDGYLRSLLVHGARAVVRQAEHKDDKLSRWINKIRAQRGYNKASVALANKLARIGWAVLAKRSVYQAA

SEQ ID NO: 104935 - protein, 334 aa, unidentified
MTTWILGIDISKRKFDAALSMGEKFKTKAFPNTPSGHRALLEWLARYDADHVHACMEATGSYWEALATFLHDEGHRVSVVNPAQIHAFAKGLLTRTKTDRQDARLIARFCEAMKPGFWQPRPREERELFALIRRLDALKGMRDQERVRLQEAHEAVADEIEGHIEGLERAIRELEARIRDHIERHPGLRDKRDLLASIPGVGETTAHQILSRLSVLSLLGSAKQWAAYAGLSPGERSSGQRQAASSGMVRLGDARLRKALYFPAMVAKQHNPVFRSFAQRLRSNGKRPKQIVVACMRKLLHIMYGVLKSGQCFDPSCYGMPAHTISEMRVARTS

SEQ ID NO: 104936 - protein, 347 aa, unidentified
MNFYNITHPYYCGIDLHARSLYVCIIDQKGNTCIHKEIPASPDKLLKLIEPYIGNIIVGVECMHCWYWVADFCDEIGVDFILGHALYMKAIHGGKAKNDRIDSYKIANLIRGGNFPLAHVYPKEMRATRDLLRRRMKIVRHGADLKAHIVNTTSQYNLPPNKVNLKNVSAREQLKSTFPDVSVQKNIDLDLVILDCYAKQLAKVEWFIAKQARQHNPVHLHLLKSIHGVGPILSLTVIYEIGDIRRFESVQKFASYARLVKCKAESAGKSYGTQGNKIGNAHLKWAFSEMAATYLRGNDRAQKYLLSLQKRMSKAKALSALAHKLGRCIYFMLKNESVFDENRFLKG

SEQ ID NO: 104937 - protein, 386 aa, unidentified
MQIVAALIPAAVDYERTLVLAIEVSNESWVLAAQVPGLPHTKAKRTIKPDAESLMAAIAGYRARAAATGHSVERVITVYEAGWSGFWLARWIMRQGMEAYVIQPSSVPVDRRMRRAKSDGIDAELLLRTLLAWLRGEPRVCSMVPIPDEADEDARRCVRERTELISERVGLTNRIGAVLATLGVSDYNPLLRNRHRRLTELRTGLGEPLPRNAQAKIERLLARLELVLAQIAELERERDAVVEAEASDKASKMIQQLTNLRGIGVQSATVLVREAFVRRFANGKTLGSYAGLASSPYSSGGIDREQGIGKAGNRRVRTVMVELAWLWTRYQPGAAQVRWFRERVGSTGRRARKIMVVALARKLLIALWRFVIDGVVPEGAILKPAA

SEQ ID NO: 104938 - protein, 320 aa, unidentified
MTKHNKNLNKVGVDVSKKKLDIEMNDNHFLTIDNTEKSFIHFLEKLDTPIKNLHFVLEATGGYEKKFASFLLSRSIAVSVVNPKRVRDFAKALGFLAKNEKIDAHVIRQFANVADLILLTKKSDTDERLKSFVQRRNQLMRHQTIEKQYLETTADKEILASVRIFLDSLAEQIKSLDKNIQRLMEADTSYSARKRLLTRVEGLGEQTVSAILVYLPELGQLTNKQISALAGVAPFCNDSGGRKGKKMIWGGRKEVRTALYMPMLCAIRYNPVIKAFYERLVARGKIRKVAVIACMRKLLTILNAMLKNNTEWDINYAKRD

SEQ ID NO: 104939 - protein, 340 aa, unidentified
METVTYVGLDVHKKMTSYCAKRQDGRIVAQGEVASRRTELVSWARSIEGPWIGAMEATLFTGWIYDTLKPFARELKVAHPLMLRAIAASKKKNDKIDAEKIADLVRCDLLPQCYMASREIRQLRQVLRYRNLVVSQAVRMKNKIAGLLMESGEEFEKRRLHGAGYFAQLLERIEAPDSVVELLQLSRSSLKMFQAVERRLVRALLGNAQLRTRLGLLMSIRGVGEVTALTWALEIADPHRFSSIAQAVSYCGLTSAQRDSGGKSHRGPLSKQRNAHLQTILIEAAKLAPRWNPQLAAVYERERARSNGNQATLAVARKLVAYLMAVDKAQRPFVAHKAEA

SEQ ID NO: 104940 - protein, 350 aa, unidentified
MVIFGIDAHKRTHTVVAIDEAGRELGAKTTVATTTKVHLELVRWSDRFGVERRWAVEDCRHLSRRLEADLLAAGEQIVRVPPKMMAHARDAARTYGKSDPIDALAVARAALREPGLPVARLDGPSRELRLLVDHREDLVRDRTGHINRLRWHLHELDPSWDPKPRCLVRFKHLDAVAARLDELEGMVVRVARDLVGLIRELTVKANALEREIIGRIGSLAPNLLGLTGAGGLTAAKILAEVADVRRFRSKDAFARHNGTAPLPVWSGNRVRHRLSRTGNRQLNAAIHRIAITQMRCHADAKAYLQRRTAIGNTRTEALRALKRKLSDVVYRALVADAGSSGGLPRRGRLT

SEQ ID NO: 104941 - protein, 410 aa, unidentified
MIFVGDDWAEAHHDVELVDEAGRVLARRRLPEGVAGLSVLHALLADHLGDDDEPAVVVIGIETDRGPWVGALVAAGYTVYAINPLQVARYRERHGVSGAKSDPGDAHVLAELVRLDRAHHRPIAGDSALAEQIKVLTRSHQNMIWARQRQANSLRSMLREYYPAALVAFSEDLAGRDALAVLGIAPDPETGRRLSLSKLAATLRRAGRQRNLEATAARIQDALRTEHLRADPGVVDAYAAAAGAIVAVLSTLAAQEQVLGEAVGAGFGRHPDAEIYRSQPGLGTVLGARVLAEFGDDPERYLDAKARKNYAGTSPITRASGTKRVVLARHVRNRRLADALYQQAFCALTSSPGARAYYDTHRARGATHHQALRALGNRLVGILHGCLRHHRAYDETIAWPKPEHQTTAAA

SEQ ID NO: 104942 - protein, 454 aa, unidentified
MSRKKTRLQSVTEAPQIRRDACGIDISPEVIYVAVGPQQDAPAVRAFGTFTAELYRIANWLRACGVRTVAMESTGVYWIPLFQVLEDRGFEVLLVNARHYKNVPGRKTDVCDAAWLQYLHAVGLLQASFRPPQTVCSFRTLLRHRAGLVQAASQHIQHMQKALDQMNVQIHRVLSDITGVTGLAIVDAILQGERDGKQLAGLRHGGVKASEREIMAALQGDYRAEHLFTLRQSLESYRHYQKLIGECDQQLRQALDEFDSKQGGPPSAPSAQKKLRTKQDEELRQQYYRILGVELTAVPSLNVGTVQMFVAEVGPDLSRFRSASALASWLGLCPDNQISGGKILSSRTRKVDNRLAAALRMAAESLCRDKSYLGQYYRRMRARLGGPQAITAAAHKLVRIIYRLITTGEGYNEGHFARIEARNSERFRLRLAQQARKLGFTLVPATRTVAEGVS

SEQ ID NO: 104943 - protein, 353 aa, unidentified
MSLVERNYVGKNVFVGMDVHRNTYVIAVRCEGKLVKKWTCEANPKSVTEQLLRNFEGAIIECAYEAGFSGFSLHRHLVAHGIKNRVINAASVEVASNDRVKTDKRDAKKIAEQLEAGRLRAIYIPSLEEEERRSITRGRAQAVERCTRISNQIKMKLHYLGFSLPEHQKMSQNFIKWIKMLELKGGNQFVLDELIAAWTHAKLSVKRYDKELEKQASDDELEKIYRSAPGIGAITARTLSNELGDLSRFDNQRQLFSCTGLTPSEHSSGDKVRKGNISRQGSPRIRALLVEAAWRAIRDDKSLKAFYLNVKARRDGKRAIVAVARKMLGRLRCCLKGKEKLLWHDQIVSTKVA

SEQ ID NO: 104944 - protein, 330 aa, unidentified
MKQYKYFFGVDVSKKTVDISLFDQHQTLHRQFINTTSGMEELKQWLQELNQSRSEVLFCMETTGLYCFPLTQFLADNGIDIWIEHAVQIKKSSSLNRGKNDKIDSRRIALYAAKNLDRLRLWKPMSTTLEKIKHLAGLRDRLVETKKRLLTPIKEIEEMGNIEMAKLLTKTVKHSLMAVDKDITNIEAKIIDIVNEDDNLKQLFRLITSVVGIGFVTAINLLIYTKGFTVLNETRKLACYCGVAPFEYSSGTSIRGKTKVHFMANRKLKCNLHMASLSAIKLDADLKTYYERKIAEGKNKMSVLNAVRNKLLARVIAVVNNKKEYVKKIA

SEQ ID NO: 104945 - protein, 356 aa, unidentified
MSRDIKYIGMDVHKEAIVIAVLNSNGKLVMELIVETKASSILQFIHGLHGELHVTWEEGTWAAWLYDLLQPRVQQVLVCNPRRNALLKEGNKSDKIDAQKLANLLRTGMLRPVYHGQHGLRTLRELARSYQTISQDLTRVMNRIKALYRGWGIACGGTRVYAARYREEWLHKIEHLGVRRRAELLYQQLDGLQKLRQTLRPELLAESRKHKAAKLLRQIPCIGPIRAARLLALMQTPHRFRSKRQLWTYSGLGIETRDSAQYCFVRGQLQRAKKPQQIRGLNRNHNHEMKDIFKGAATRASCGVGPLRDFYVGLLDKGMKPEMARLTLARKISAIALTLWKKEERFDAEQLKTQVA

SEQ ID NO: 104946 - protein, 345 aa, unidentified
MEFFAGIDLGKRKSQIQILNQDRKVVEELKIDNDPKEFYRIFKKYKGKIDVACEASSNAFWVWDTLSPIVRRFSVGHTSKIRWIAEARIKTDKIDAGILAELLRADLFPAIAIPPRRIRELRELIRGIIRMRRQALRYRNQVHGLLGRYGIPYKRSEVQDTKLGELVRSVELARPARLAADALLRLEAATREEIRQLQIELEKELKSEDEINSQISLLESIPGVGFFSAALMVLELWDVTRFSDAKHLASYIGFVPGTHQTGETLWHGGMTKQGNVLVRWILVQDAWIAIRNHWFFGRMYERYSKRKGKTRAVVPVARALLKTIHRVWTEKKSYEKLYEEKTLVG

SEQ ID NO: 104947 - protein, 269 aa, unidentified
MQEESMFVGMDVHKNYLQVAVLDERGKVLDNSRVDNNLTKVNEFYDSLHPSSNTKIVMESSGMWYNIYECLSKRHLDIRLSNPAKTRAIASAKIKTDKLDAVKLADLLRGGYIAECYIPTRGTMELRELVRHRAALVRMRTKLKNKVHSIMFMNGTSISYVGTHTFTKGYIEKLKELNDYRINGCLRVIKSLNDEINTVSKRILLLAKEDENAKLLMTIPGIGYYSALLIVSEVGDIDRFPDSYHLCSYAGLIPSTRSSGGMYHIMAAV

SEQ ID NO: 104948 - protein, 370 aa, unidentified
MLDTTTFIGLDVHARSIKAVSLDVMTGEVRAATFGYDAGAVAEWVRSVDPKARCVYESGVTGFDLQKRLSGLGVDCVVGAVSKMIKPSADRRRKNDRNDAEFLARMLSVGNVVEVWVPDDECEAARDLTRALEDARDDLSRSKQRLSKFLLRHGLVFDERTPTGRRKGNWTRAHWSWIESIRFAERADNDVLAYYVDAVRRAAEEKARLEGLVEAEARKPRWRRRVDSLRCLKGVDTASAADLVFEAGEFSRFRNARSFAAWVGLTPSEHSSGESDRRGAITKAGNKHLRKTLVEAAWHYLACSGRPKDLAKGQAPDRGARRHAAKGVRRLVERREALLARGVHGNKANVATARELACWVWAVGLMAEEA

SEQ ID NO: 104949 - protein, 405 aa, unidentified
MFEIEDVGVFLGLDVGKSAHHGHGLTPGGKKVFDKPLPNSEPKLRAVLDKLNEKFGTVLVVVDQPASIGALPLTVARDAGCQVAYLPGLAMRRIADLYPGEAKTDAKDAAVIADAARTMPHTLRSLELTDEITAELTVLVGFDQDLAAEATRTSNRIRGLLTQFHPSLERVLGPRLDHQAVTWLLERHGSPAALRKAGRRRLVDLIRPKAPRMATRLIDDVFNALDEQTVVVPGTGTLDIVIPSLAASLAAVHTQRRAMEAQINALLDAHPLSPVLTSMPGVGVRTAAVLLVTVGDGTSFPTAAHLASYAGLAPTTKQSGTSIHGEHAPRGGNRQLKRAMFLSAFACMNADPASRAYYDKQRARGKTHTQALLRLARQRISVLFAMLRDGTFYESRTPTDVELAA

SEQ ID NO: 104950 - protein, 322 aa, unidentified
MNKYKETFGVDISKDVFDVHGSNKGHDQYKNDEIGFKKFLKELPKSSLVVMEATGYYHYRLAQFLYKNRVVVSVVNPLSIKRFIQMKLAKVKTDKSDAKAICEYALINEVPIYNALTDTQSECLQLFRLLDTYLKQRTATKNKIHGEAVLGIPSKFVYRSLIRNKKQLNKEVAAIESKILSLVKEDQQEQLTLLMSIPGIGQKTALFLIVVTDGFNKFETASQLCSYVGITPTIRESGSSVRGRARISKVGNRKLRNLLFLCSFNACKHNKACREVYERIVNKGKSKKLALIAVANKLLKQSFAIAKSGRPYDETYVSVLPR

SEQ ID NO: 104951 - protein, 443 aa, unidentified
MASSVSCLTARPASTHPFDTEGIPIMTATGEASTLEPEVVQEEVIGGVDTHADTIHVALVSVLGRDLVDQEFATTPAGYADALDFLGSHGEIRRVGIEGTSSYGIGLTRAVRTAGLEVTEVNRPDRAERRRIGKSDPIDAYQAAHAVLSGRATSAPKTEQIDALRALHVARRSAVKARTAAMNQIHQLLVTAPAAIREKYRALKEDALVSALARCRPTTGTSGDLSSRMVLTALKAIAQRHDYLGAQADALRREITVLVHAANPGLLATHGVGPDTAAQLLITAGGNPERLTSEASFAALCGTAPVPASSGKITRHRLARGGDRAANSALHTIALVRMSSGHPPTKAFVARHRDPAHGKQRSSKEILRMLKRAIAREIFKHLTRPVAVPAIDDLRETRRAKNITTTRAAQQFGVWPATISKIELGVRRDDTFANRYREWLLIA

SEQ ID NO: 104952 - protein, 327 aa, unidentified
MQEKLTIGIDVSKQTLDIYLKPSNVHFKLSNDAAGFKNFKRKMKSLVSENVLILMEHTGYYSLRLEKFLALNGVSFCKIPALEIKRSLGVIRGKSDKIDARRIAEYGWLRRELLAPNAVSDDDIRQLRSLLNFRSKLVADRSGYMTRLKEMIATGASARRDLQSNCQQQIITVLTRSIKKIEAEIQELIKSNLGLQRNYQLLKSIKGVGMIVAAYMIAFTENFQKFKNARKFNCYAGLAPFAYESGTSIKGRSRVSHLANKHAKTLLNLAAASSIRHDQELKEYYQRRTSEGMKGMSCLNIIRSKIVARIFAVVKRQTPYEPLRSAA

SEQ ID NO: 104953 - protein, 404 aa, unidentified
MNAIGIDVSKGKSTVAVIRPFGEIVKKPFDVAHTSKDLNDLANFILSLEGESRVVLEHTGKYSAPIAESLCNAGIFVSVVNAKLIYNYGNDTIRRDKTDKVDSLKIASYCLDKWVKLSPYTPENELRKILKIYNRQLSEYTKIKTMLKNNLISLLDQTFPGANELFSSPARQSDGHEKWIDFVAYFWHCECITSLSEKAFTEKYKKWCCKKGYHFSVQKAEDIYAASAGHFITLPKNDYTKSLIISTISQLNKLCETVSIIKSEMEKLASELPEYETVIAMHGVGKSLAPQLIAEIGDIRNFPKRSSLARFAGIEPPENQSGSYNQHSRRISKQGSPHLRRALFQVMCCVLKLKHNSEPTFQFLDRKRAEGKPYKVYMIAGANKFLRIYYARVKECTDILRQND

SEQ ID NO: 104954 - protein, 419 aa, unidentified
MKTQMWFVGVDWGTEEHTVCLIDAEGKVIGERAFRHSGVGLAEMCTWLLDKSGVEPSLLRVAIETPHGAVVETLLERGMMVHSVNPKQLDRFRDRFTVAGAKDDRRDARVLADSLRTDAQSFRALRVDDATIIELREWSRIAEELVHERVRLGNRIREQLLRYYPQMLELTDDAASDWFLALWELVPTPKVAPHVHERKIAQLLKAWRIRRYEAKDVVCTLRQQPLTVAPGAAEAAAAHIKTLVERIRLVNRQIKEANGHLDRLTASPNPAKESEPGQKCEQRDADILRSLPGVGRIVLATLLAEASQPLGKADYHALRSLCGVAPVTQQTGKQGKKRGHKPMILMRRACNVRLRNAVYYWSGIAIQHDPKSKATYAALRARGHSHARTLRTIADRLLALACAMLRDRTVYDATRRMAA

SEQ ID NO: 104955 - protein, 340 aa, unidentified
MPLYGGIDLHANNSVVVLLNEQDQVIYQKRLPNHLPAILEPLSLHHGAIEGLVVESTYNWYWLVDGLMEAGYRVHLANPAAMQQYSGLKYSDDHSDARWLAHLLRLAVLPEGYIYPKAERAVRDLLRKRAHLVRQHTANVLSVQNIMARNTGARFSVKRMQELTKQELQSLLTEEPQVLAVTSSLAVLDCLKHQIKTLEQTVHKRLHHTPSYEQWLTVAGIGTILAQTIALETGDIRRFPSVGNSASYCRCVESNKISNGKRKGTGNVKNGHPYLAWASMEAAQFAMRFQPAAQRFDQRKLAKSRNNMVLARKAVAHKLSRACYYMMRDLVPFEATKAFG

SEQ ID NO: 104956 - protein, 398 aa, unidentified
MLSIGIDVSKGKSTVCGMKPGGEIVYTPFEVQHTREGMSELVSLLRGSGEEVRVVLESTGSYHCPVVAALLENGIFVSVVNSLRMKRFCSQSIRRVKTDQIDAMQIALYGLAYWQELQPTRLPENTYRELQLLARQYYQMTSMLIKAKVDFNALCDQVLPGMQELMSDHAGRHKLSDFVLRYHHTAHILKMGETRFRKDYCKWAEKKGYRNRERMAALIFATAQNGIPVLPNAPSTQIVITEAIRVLHTVEASRDAILTQMQALAKTLPEYSLVREMPCIGDTLAPRLIAEIGDVRRFHSKRALIAYAGIDAPPYQSGKFSANNRHISKRGNRYLRKTGYEVMQSYVMHKPANDPIFTFIEKKRSEGKSGKLAMVAGLNKFLRVYYGKVTELYRSLPQ

SEQ ID NO: 104957 - protein, 416 aa, unidentified
MNAAGIDVSSRKSTVAVLRPFGEVVKLPFDVRHSAEDLTALAEQLKSIEGETRVVMEHTGRYYESVAKVLHEAGLYVSAVNPLLIKEYGNNSLRKVKTDKADALKIAKYALDNWTELRDYTPMDTIRYELKTLNRQFQLASKQKTATVNNLIALQEQSFPGIRKLFDSPVRSDGTQKWVDFTHDFWHVDCVRSGSQNAFTERYRKWCKRNRYQFSTEKAAEIYTLAKSAVVLAQKTSVTKTLIQEAANQLTAISRSVETYRSEMNKLASQLPEYPVVMEMYGVGESLGPQLMAEIGDVRRFERKQSLVAFAGIDPAPSESGDYCSRSNRTTKRGSPYLRKTLFNIMTVHLQRAPADEPVFQFLDKKRAEGKPYYVYMTAAGNKFLRRYYGKVMAYFATLEGLPPVDMDSTGLHHAE

SEQ ID NO: 104958 - protein, 378 aa, unidentified
MLTVGLDNHAATSTVRVLDDGGRTIESRTLRGSPAMMVRHLHALKESSGQPMQVCFEASCNYGWLHDQLAPFCSRVAVAHPGQLRLIFRGKRKSDRVDAEKLAKLLLLDEVPPVHVPSIDVRSWRALIEHRGTIVDKRTRAKNGLRAVLRSQAVTLPEGKRTAWLWTKAGREWLKDLPLAMPSDAVRRDMLLEEVEHHDRQIDRVTEELDRLGKGHPGVTLLRTIPGIGPRTAEAFCAYVDDPARFRRIKCVGSYFGLVPSQDSSAGVNRLGRITRQGPGTVRKLLVEAAWRGISKSPSLRALFERITRGEADRRKRALIAVAHHLARVMLSMLRSGAAWQERMGRTQDPEMNDAEQTPAEKAKARFEERTAPPAAAA

SEQ ID NO: 104959 - protein, 363 aa, unidentified
MSDGICFAGLDVHARKTAAAAVQLGSGEVFKAQLPGSAAAAIEWLQSLPGPVRAVYEAGPTGFGLARAARGAGVEVMVCSPGAIPRQPGDRIKTDTRDALKLARLHAAGQLRPVVVPAPELEALRDLVRAREDLRGDLMGARHRISKLLLRRGLVFDGPGQTWSARHLTWLSKVRFEQPLVELVFGEYLAHHEVLLARRDRLDGLLGEQSLQGSWAPLVARLRCLRGIDTLTAVGLVAEIGDVTAFKHPKQLASYLGLVPSEQSSGERRRQGSITKAGSSHARRLLVEAAWHYRRPPRVSLTLKRRQAGQPAAAIDAAWRAQIRLHRRWAHLDAARAKKRTTVAVAVARELACFVWEVAQQPD

SEQ ID NO: 104960 - protein, 343 aa, unidentified
MYYIGLDVHKKTISYCVKDAAGQVHREGKIGSTRRELDAWIEILPQPRMMAMEATIFTGWIYDYLLPHAEKVKVAHPLMLRAIAAAKKKNDRIDARKIADLLRCDLLPECHMASTEIRDRRRTLRYRGLVLRQTVQMKNRVSGLLMESGVSYDKQRLHKMGYFSELFSTNQEICDSIRPLLRLGREHILRGQRLDRALTSSLERDPLLSERLRRLRTIPGVGPITALTWALEIGDYTRFPSVKEAISYCGLCSAEKRSADKVMRTPISKQRNKHIQHVLVEAAKLAPRYSHELALVRDKEMQRGNKNRATLAVARKMVAYMLAVDRRQQDFVPAEEMMGQAVA

SEQ ID NO: 104961 - protein, 338 aa, unidentified
MIVIGLDVHKQSVTAVAVDEAGRPLDEAVIQVGSDALLGWASALSSERLWAVEDCRQLTRWLEQQLLSVGEDLVRVPPKLTVPERRAGRTRGKSDPIDALAIARAALREPDLSRPRADEGVYWEIKLLVDHRDDVVDQRRRTQQRLRWHLHQLDPTFDVPLRMLGRSSHLERVSRWLARREQELQVKLARELVSTIRSLNRAVAALDQELEQRVTEAAPKLLELPGCAAVTAAKLLAEIGPIDRFKSDAQLARHSGVAPLEASSGRTQRHRLDRGGNRQLNSALYRIAITQARYHPAARDYLERKRAEGKTRREAIHCLKRLLVRIVFQTLKASPTLT

SEQ ID NO: 104962 - protein, 383 aa, unidentified
MENSSSDYCPKTSVIVSIELSKRNWLVASLSPGAAKPSLRTFPAGNSAALISHLRNLECKAADRISEPAAIRLCFEIGYDGFWLARLLRSNDIDTYVLDPASFLVSRRGRRAKTDRIDAEAMIGILKAYLAGDKSVCRVVAVPSPEEEDARRVMRERGDLVHERTRIISRIRGLLALQGIRTVKAIKGGDWSKQLDEMRTGDGRPLPPNLRRQIERCFERLALLNDQIKDIERDRAEVVLQEESTFPCREKAVRLEQLKGIGPNSAAMLVAEVFCRKFESRRHVAAFLGLAPAPFASGDVSRDQGISKAGNRSTRVQMVELAWCWLKYQPSSELTVWYRNRFKGNGARAAKVGIVALARKLLIALWRFVETGLVPQGAELRAA

SEQ ID NO: 104963 - protein, 315 aa, unidentified
MDREKLTVGIDVSKEQLEVAFDETHQTQCIENSTTQIAELTQKLLPLQPKLIVVGATGGLERLLVLHLAEAQLPVVVVNPRQVRHFAKAVGILAKTDSIDARLLVRFGISVNPPVRIIKAEEQQQLADQVSRRRQIVTMITQEKNRSKRATGQVLRDIQEHLAYLEKRLSRLDDQIQEALEASPIYKATAALLISVPGVGQGTASVLISHLPELGHISGKQASALVGAAPFNRDSGGRRGPRLVWGGRKMVRCQLYMATVAATRCNPVIRSFYRRLIESGKKPKVAMTACMRKLVVILNAMLRDNRSWDAQLLKT

SEQ ID NO: 104964 - protein, 358 aa, unidentified
MAGKVTETAVVGGVDTHKDLHVAAVVDQNNKVLGTQFFSTIRQGYRQMLAWMTSFGALKRISVECTGTYGSGLLRYLQNAGLDVLEVTAPDRMERRKRGKSDTIDAECAAHAAFSRIRTVTPKTRNGMIESLRVLKTCRKTAISARRVALQIIHSNIISAPDELREQLRNMTRMQLIRTLGSWRPDASEYRNVTNVYRISLKSLARRYLELHDEIADLDVMIAAIVDELAPELIKRNAIGYESASQLLITAGDNPQRLRSESGFAALCGVSPVPVSSGKTNRYRLNRGGDRAANSALHIIAIGRLRTDDKTKEYVARRVAEGHTKMEAIRCLKRYISREVYTLLRNQNRQLNSIPITA

SEQ ID NO: 104965 - protein, 467 aa, unidentified
MNNAKKKKRKNNGKQHNSLSQLEQINFGAAGIDIGAEEHYVAVPKGRDPEGEDVRHFGAFTVDLLSLADWLKKCNIDTVAMESTGVYWIPLFEILDSQDFDVKLVNPRFIKNAPGRKTDVLDCQWIQQLHTYGLLQGAFRPDDQICELRSYLRQRSMLISYASHHIQHMQKALEQMNIKLNHVITDITGTTGMGIIRAIIAGQRNLEKLAQMRDPRCKNSKSTIAKSLQGNWRSEHIFALQQAVELYDFYKSQITACESRIQQHLETFDDRSDGNPLPKPPFKSGGSRNKFHFDARAYLYQMTGVDVTRIEGIDTPTALNIIGETGIDMSKWPTHKHFSSWLGLSPGSKISGGKVLSSKTKPCANRAAHAFRLAAHSLHRSKSALGAFLRRKKSHLGSPKAITATAHKIARIFYNMLKNGTEYADLGQDYYERCYRDRVIANLKRKAKQFGYDLVNVKEHELLTTHL

SEQ ID NO: 104966 - protein, 352 aa, unidentified
MNISHYIGFDVHKKSISYCVKTADGKIVEESKVRATHDSLRAWARKRSEAWHGAMEATLFSGWIYDALKPFAAELQMGNPSMMKAIGAAKKKSDKLDARTIADLVRCNLLPACYVAPPEMRDLRRLLRYRNLVVGQAVQMKNRMSGILMEVGAEYNKRRLHGKQYFNELLDQLEEVPESVKDLLRLSRGALETFAATQRQILDRLQTDPLLAKRVKLLKSISGVGEVTALTWALEICDPRRFPSIADAVSYCGLCSALVSSADKAKRGPLSKQRNAHLQTVLIEASKLAPRWNQQLAEVHNRELKRGGDRNQATLAVARKLVAYLLAVDKSGQGFEVRTPSARPQEEAAKVA

SEQ ID NO: 104967 - protein, 392 aa, unidentified
MYIVGIDIGKNHHEASIVSPEGKQIGHSLRFATTHKGADSLMSFIFNNIGNSSCIFGMEATGHYWYPIYSFLKARGYTIYVINPIQSDSLRKMYIRQTKNDSIDSFLIAEVIRFGQFTTTSMADENILAMRQLCRYRDSVISSRTEIKLRISTIMEQIFPEYEKQFSSLWLSTSMGILEKYLTPENIENAPIDELFEIIKDKSHNKLTMKKAISIREAAADTFGIKIAQDAFSFQLKQLIDRMNFLDKQIEALDCQILEYYEKFDCYLHIIPGIGMIAAATILAEIGDINRFKSSSALVAFAGIDPTVRQSGEFSNTHNHMSKRGSPYLRHAIFLAATTCSFHNSPLNAYYKKKREQGKHHLTATGAVARKLTTVIYAVLRDGKPYEPKSFC

SEQ ID NO: 104968 - protein, 418 aa, unidentified
MPTGEQGRLWGFVDWATQTHTACVVDASGSAVKEFSVENSPEGLAGLAVQLTGLCQGQLERMAMGIEVPHGTVVDALLETGFAVFSLNPKQIDRFRDRYSPAGAKDDRRDAFVGANALRTDPLAFHRIEADHPAVVELREWSRMDQDLGQDLLAQANRLRAQVLRVAPHWLKLCSAADEPWFWTLLELAPTPAAAADLTPRRVQSALRRHRIRRLSPQQVLATWQSACLGTPAGVVTAVSAHVAVLIAQLRLLHQQRRSAAAQLKRCLAACQTVFTGPSGRPGAVEVALSQPGVGLRVAACFFGEASRCLAGRNLHAFRALTGTGPVTKSSGKTRRVHMRRACDSRLRDSCFHWARIAVQRDPRSKAHYAALKRKGCSHARALRGVGDRLAARMFVMIERGTLYDPDHRRVPPGHEKA

SEQ ID NO: 104969 - protein, 359 aa, unidentified
MREQRKEISFIGQKIYVGIDVHLKSWSITVLSETSVLKKFSQNPDPEALHGFLTRSYPGAEYHSVYEAGFCGFWIHERLTALGINNIVVNPADVPTTSNEKLRKTDAVDSGKLARSLRANELKGIYTPDSVSLEMRSLIRLKNSITKDTTRQKNRLKSQLRYLGIEIPQEFLTPFSNWSKRFFAWLKEIETLTPSGRQALDIHIRHLEELRRQKLEMTRALRTLAKTDRFREPLRLIMSVPGFGQATGMAFLSEICDITRFRNAEQLAAYIGMIPMCHSSGEKDGTGDITIRKHAVMRCNLIEAAWVAVRQDPAMNLFYTEQCKRMPKSKAIVKVARKLVNRLFFVLKHQTEYVNSIVS

SEQ ID NO: 104970 - protein, 366 aa, unidentified
MRKVMAGMDLHGNNVMVGIVDDQGARLQHRRLACELPEIIEFLAPYKAELESIAVESTFNWYWLVDGLRAAGFTVVLANPAKIDQYSGIKHADDKNDAYFLAELQRLKILPTGYVYDPELRPVRDLLRRRMSLMRQRTTLFLSAKSLHQRTTGRGLELRRLKAMEPEEAAALYTHPANQLIAQIQKEHIDSLDQSIRQIEKAVLKVALQQPYYQRLQTIPGVGIILGLTISMEVGNIDRFAGPGQFASYCRTVDAKRISNGKTKGDNNQKCGNKYLAWAFVEAAHGARRFDATCRRWYDRKAGKKCTTVATKALACKLAKAAWYVMAKGTEYQAGKIFPGLTEPKAEEISGEQASASKGVGPNPED

SEQ ID NO: 104971 - protein, 348 aa, unidentified
MSQSKQYVGLDVSLKETSICVIDDADKIVWRGHVDSTPEAIASAVKQHAPHAVRIGLESGQLSNWLFHELKEAGLPVICVDARHAKAALSLKVNKTDANDALGLAQIMRVGWYREVTVKGLDCQAERALLVARAQIVSQITTLKNCVRGILKSFGRVLPKGLRSQFSARVRTAIDGHPVLGAIIEPTLQVLEAARAQLLVYDKAVIQRARSDDTARLLMSAPGVGVVVALAYVTGVEDPARFKRSSSVAAYFGMTPRRYQSGEVDYAGRISKCGDGMVRGLLFEAAKVLLSRSTRPSALKTWGEALSKRIGAKKATMAVARKLAVILHRMWTTGTTFQWNAEAASPAT

SEQ ID NO: 104972 - protein, 303 aa, unidentified
MSEITTYIGIDAHKKDLFVAMLVGSHTTPVTWTVANEPHAIRRLVRKLEREAPGAVRACYEAGACGYALQRQMTTARVSCQVIAPALVPRKPGERVKTNRRDACKLVELLRAGLLTQVQPPTPDEEAVRDLCRARDDARVDRQRCQHRLDKLLLRRGLHYQGKNWTRAHRQWLTTLTWSHPAERAVVDDYVVAIDHTEARLRELDARLAEIAASEPYREHVGWLRCFRGIDTLTAMLILAELHDFRRFASAPALMAYLGLVPGEHSSGETHRRGAASRAPATRWCAACLWKRRGITSIALGSA

SEQ ID NO: 104973 - protein, 414 aa, unidentified
MRIIYDNVAGLDVHKKTVVAASSIKQADGTWLQEHRTYGTMTVDLLALSDWLLARGITHVAMESTGEYWKPVFNILEDNFEVVLVNAQHLSRVPGRKTDQSDAEWICELMQYGLLKASFIPPKGQRELRELVRYRTSFVRERATLVNRVQKVLEGANIKLASVATDVMGISGRAMLAAMIGGNLNAEEMAELAKGRLRDKRDELAKALEGRIQAHHRFVLTELLCQIDSLEESIARFDREIIEVCRPFEGAVVLLDTIPGVARQTAEIIVGEIGIDMTRFPSADHLAAWAGVAPGNNESAGKRHSGKTRKGNQHLMTALIQAANAASRTKDSYLRAQYQRLAGRRGRKRAIVAVAHSILVIAYYLISRNEPYRELGGDYFDKRRPEATANRLIKRLERLGFQVLVQETPAPAVS

SEQ ID NO: 104974 - protein, 312 aa, unidentified
MPENTEPDYVGIDIAAERLDYCVSETDEGNCRNDAAGRAELIAKLKQLPHPRVICEASGGYEKLIVAELLAAGIEVCVVQPARVRAFAYAEGLLAKTDRIDARLLRRYAQKVHLRLAVPVAAALATLRELLEHRRALTTQLCEVEGRLPLAGMTLAKLLGRQRTFLKKQIEQIEKMISQHIDTDPDLRGKSERLQQIKGVGPVLASTLLAYVPELGKIESAQLSALIGVAPHPRDSGKNRAPRHVRGGRSQVRNVLYMAAVCAARCNPILAAFYQRLKAHGKPPMVCLIAVMRKMVCLMNRLIQDPNFALAQ

SEQ ID NO: 104975 - protein, 355 aa, unidentified
MSGEKYIGLDVHQATISVAVMDSQGKVIMESILETKASTLLEFFAGLRGSLFVTFEEGTWAAWLYDLLKPHVTELLVCNPRKIPLHKQGNKSDKIDARKLAERLRLHDLKPVYHGETGIRMLRELARSYLTVVKDLSRVMNRLKALYRSWAIPCVGRDVYYRRHRREWLDKIPEAGTRRRAEQLYEQLDLLRHLRQQARRELLAESRKHAITAKLRKIPSLGPIRSALAVALIQTPHRFRTKRQLWTYSGLGLETRDSGEYHFVKGQPRRRKKQATIRGLNKDHNHDLKGLFKAAATRASVQPGPFQDFYQRSLAKGIKPTMARLTLARKIAAITLTLWKKGEDFDINKLNSQAA

SEQ ID NO: 104976 - protein, 403 aa, unidentified
MNNVAGIDVSKGKSMVSVLRPFGEVVAKPFSIGHTGSELKELADYLKSLDGETRVVMEHTGRYYEPVARFLHEEGVFVSAVNPKLIKDYGNNTLRKVKTDKADARKIARYGLDNWAELRQHTPMDTIRMQLKTLNRQQSLYAKTKTMMKNNLIALLDQTYPGVNALFDSPVREDGSQKWVDFATAFWHVDCVRNMSLTAFAERYRKWCKRHGYNFSQSKAVEVHTGAQDLIAMLPKDALTKTMVRQAIDALNAVSASLERLKAEMQALAAQLPEYPVVMAMHGVGDSLGPQLMAELGDVARFTHRNAITAFAGVDPGADQSGTHEAKSTRVSKSGAPELRRALFLVMDCLLKTQPQDDPVYRFMDKKRAEGKPYLVYMTAGANKFLRIYYGRVKEYLASLEEN

SEQ ID NO: 104977 - protein, 354 aa, unidentified
MTSTKYIGMDVHKESISIAVMNAAGKIVMECVIETKANMILQCIDGLRGDLHVTFEEGTSAAWLYDLLKPHVTELIVCDPRKNASMREDDQNDKIDARRLAELLRIDHLSPVYHGEHGLRTLKELVRSYLTVTKDLVRVKTRVKAIYRSWAIPCNGKEVYAACHRAEWLEKIKELGVRRRAEFYYQQLDALRVLRQEVRRELLAESKKQKAWKRLCQIPAIGPIRAAVLLGILQTPHRFRTKRPLWKYSGLAIETCSSADHRSIHGQLQRSKKNSVRGLNQNCNHDLKNLFKGAAVIASSKSGPFQKFYAALLAKGMRPEMARLTLARKIATIVLIVWKKGVCFDAQHLKPQTA

SEQ ID NO: 104978 - protein, 425 aa, unidentified
MKSKAYRAVDVNRVEPAVWLQERDEAVVHAGLDVGKESIYCTLRWGADDFDRPWRVRNPCDVARLAELLSAVEQGRRLIVALEPTGTYGDPLRQALEHAGLPVHRVSPKQASDFAEVFDGVPSQHDGKDAAVVAELASQGRSWPWPLPAPTEAEQELAYQVAWMDAQRRQMMQWCGRVEALLSRHWPEATRVLPLGSGTLLRVLATYGGPHGLAAAPDALKRVQSWGRHFLSAEKAQALVDSARQTMGVTMGRWEEESLRRYACQIQQHQGEMRAARRRMRELTRDHTAIRAMGAVVGVPTACVLWVELGDPSAYHCGSAYRKAMGLNLAERSSGKWQGKLKLSKRGSSQVRRWLYLAALRWVRKEPVRSWYLRQKAQRRGEGKAAVIGVMRKLALALYQVGGRGELFEPNQLYASLTKQSAQSV

SEQ ID NO: 104979 - protein, 428 aa, unidentified
MFSPRSAAATILGGGSCYGRRPRAVLWADVHKKSVVACVLVSESDGLINRQVRTFGTMTADLLALSDWLSSLNVTQVALESTGVYWRPVYNVLEDDERTLLLVNPQHMRAVPGKKTDVKDAEWIADLLRHGLLRGSFIPPVPIRVIRELTRYRKTLVQARADEVNRLQKTLEGANLKLASVATDVLGVSGRAMFAALLDGERDPDVLADLARGRLRAKLPQLRQALVGRVKPHHLVLISQILAHIDFLEQAIAEMQVEIDRCLPPFEKALELLQTIPGIREVAAAAILAEIGTDMSRFPSAGHLASWAGLCPTNKESAGKRMKGPRNRGNVWLRAIMGEVAWASIRTKASYFYAQYHRLARRRGKEKAAVAVAHSLLVVIYHVLSTGRPYQELGVDHFDRLNTAHIQRHHVRRLEQLGYTVTLTPIAA

SEQ ID NO: 104980 - protein, 328 aa, unidentified
MDDTGKIIREVKVTSEPEALLAVLKGPAYCFKRIGLEAGPLSQWLFSALAEAGLPVICVETRRMQAVLKAQINKTDRNDARGIAQMMRVGLYRPVHVKTLRSQKLRMLLTHRKLLQSKAIAIENDVRATLRNFGLKVGMAGKVKFEMRIKELVQNQPDLGVLVEPLLIVRRVLREQTVILHRRLLAIVRGDDVCQLLMTIPGVGPVVALTYRATVDVPARFRKSKAVGAVFGLTCSKYQSGEIDRTGRISRCGDEMMRTMLYEAAQSMLLRSTKWSWLKAWAMQIARRRGMKKAIVALARRLAVIMHRIWVDGTEFRWTREQAAATAA

SEQ ID NO: 104981 - protein, 346 aa, unidentified
MDQQQHYVGLDVSLETTAVCVIDDQGVVLWRGKCASTPDSIAAAVQGHAPAAVRVGLETGQLSNWLTLSLRRRHVPVVCLDARHAKAALSLQINKTDANDAFGLAQIVRTGWYREVAVKSMDAHTLKMLLVARSQLVSQRQKTANTIRGLLKTFGLVIARGSKGPFPVRVREQIAGNDVLAAIVEPLLVVWHALREQIAVLDSQVLARARADVAARRLMTIPGVGVVVALTYTAVIDDPARFRRSASVGAYIGLTPRRYQSGEVDRAGHISKCGDSLLRAYLFEAATVLLSRHPRPSTLKLRGLALAKRIGMRRAKVAVARKLAVVMHRVWSDRSEYRWGNNAVAA

SEQ ID NO: 104982 - protein, 343 aa, unidentified
MTLKASFKWVNPQDINVLGLDVAKAKIDICFLSSNHSWFYQIANNSQAISQFSQELKALGLNATIPFVLESTEGFHLLLATLLKNDGWNVKEINPIITHQYIKHTVRGTKTDTTDAQLLAKIGLIEGDNLKSFDRDLNIIKLRMLISFLAHLETLTQQSKASFNALEKGLATLRLWESQELEKMKEVIKVLEQRAKGLEREILDIQLSPEAQEQVNYFDSIVGISPFTAKVAYALFAHNTFSSKRAMLAYVGLDPRLRQSGTKTWALRMSKRGHPYMRKRLFQSAFCSLQHSSYFKSIYDKHIQRWKHHFIAVLAVAKKMVYIMRALLKNNTQFDHNYYKLTS

SEQ ID NO: 104983 - protein, 371 aa, unidentified
MKEFSKYVGMDVHKETIAVAVAEAGGGEVRYLGEVANSSDAIQKLVKQLRKGDAELSFCYEAGPCGYGIHRHLTELGWDCQVVAPSLIPKKSGDRVKTDRRDSLSLARLHRAGELTAVWVPDDAQEAMRDLTRAREDMKHLQRQAKQRSLAFLLRHGKSYDGKGNWTQAHYRWLEGVKFSQPVQQIVFQEYVDTVKLLSQRVAALDQQMADAATKSVWWPVIEALMALRGVSLLTATTIVAEIGDLKRFASAPQLMAYLGLVPSEHSSGGSKSRGGITKTGNGHVRRVLVEAAWTYRHPARKTACLQRRAERTPEAVQDIAWKAQKRLCGRYRLMEARGKLKVQACTAVARELAGFIWAIGQALPQPAALA

SEQ ID NO: 104984 - protein, 379 aa, unidentified
MKTYIGFNSSGEYYSISPGWGNMVESKTEAKSSEVGVTNPYRRTEHCGKIHRYRCDKEVGVIGIDVSKDHLITSRGRVRKYKNNKEGYEEILEMKPCAIVLEPTGVYAIRPCQYFKEKGIKVLQVSPNVLSREKEFRGKKTDFYDAEKLENMVNKAKEYEYNPLRELVTLYLFLKDIEVKYKNRLKRALFLVSDNDRISKDRLERLAKGDFTQEELYNLEYTPIVLEEIKVLAKTLLETQEKLEEVRRMIEEQVPQDHVLLTIPGVGRLAAGVIIGIVGDIKRFPKPESFVAYCGLDPVVERSGKVVVSKGISKRGNKYLRSLFYFLAEMNYSKNPTLLKFYESHRDRLQGKKLFTALARKLARIVWSVWYNNKPYEPK

SEQ ID NO: 104985 - protein, 414 aa, unidentified
MLRIVYPICCGLDVHKDFVYACIATTENGVTTYKSRRFSTFTKGLRELLSWLLSHNCKDVCMESTGKYWIPFYNILESDCKIVLAHPKYVKAIRGKKTDKKDAKWIADIFKHDLVSGSFIPPADIRQLRDLVRYYKKLTGFTVGEKNRAQNCLTVSNLKLDGVFSDVFGKASSNIIGHILANPSEKIFDVSAFKTKNLKATDDEILDAVDGIMCNEQADKLRIIREHMSNLNLCMANLQSVILSTAEKYTNQINLICTIPGFDTLSAISVIGEIGVDMSVFPDSKHLCSWAGLTPINDQSAGKKKTTRISRAGVYIKPLLVQCALAAIKSKTKHPEIFARYSAIKKRRGHKKAIIAIARMLLTAIYNMLLKNEPYNSELYAHSYDTLPEHRTVSVEEAIFILQRQGFVVTPHAD

SEQ ID NO: 104986 - protein, 409 aa, unidentified
METMHERCAGLDVHKDTVVACVRIAAGRSAQREVKTFATTTSALLDLHDWLHGCAVTHVAMEATGVYWKPVWHLLEDSFELVLANASHIKAVPGRKTDMNDATWIADLLAHGLIRASFVPPTPIQELRDVTRARKQLVQERTRYVQRIQKVLEDANLKIDSFITDLLGKSGRAILNALVEGYTNPEVLVSLTSGRLKASRAELLEALRGRVTKHHRFMLKLHLRQIDQLDRSIQELEAQAREATAPFRHRVGQLTAIPGISETAASVLLAEIGTDMSVFPSAGHLLSWAGMCPRSDESAGKRRSTRLRHGAPWLKATLVQIAWPATRRKDSYFRALFHRLKSRRGPKKAIVAVAASILTTVYHLLRDGTVYQDLGMSHFDSMNRDRAAKSLVRRLQALGFEVDVRPAAA

SEQ ID NO: 104987 - protein, 311 aa, unidentified
MAQHDPFVGIDVSKARLDACLWPQGEACAFANDRDGLRELIRWLRRVSPLAVGFEASGGYERPLLAALCQAGLPARRVNPTRVRQFARAAGVLAKNDRIDAATIAHFCAALPQREVVHDPAIAMLGELVTARRQLCEERTRCANQAGQTANALLKRIATQRIKRLSAEIALVEAEIARLIADRPELAERNAIMRSVPGVGSVTAATLLAFLPELGAISARQAASLVGVAPFDCESGAFKGKRRIAGGRKHPRDALYMAALVASRRNAVLTATYQNLRNAGKPAKVAIVALMRKLVTVLNAMIRNRQNWANA

SEQ ID NO: 104988 - protein, 384 aa, unidentified
MRTEQAYTGSGDVLVLAVSLELAAAKWKVALHDGRRDKPAVHTVAEPQAAARLQEVLDLIEAHKEKWSLPADVRIAVSYEAGQEAFWICRALQARHIECYVVDPASIPVERHQRRAKTDRLDVIKLVINLRAWLRGERDRMHVVHAPSPQDEASRQLMRERGQLQKEVLQHLDPMRKLLATLGCWDAVNHRAFAGRLQRDEVCCHDGAPLPRQLRERLLRECERLALVEQQLAALEKTRQTEVPALARQRCDALERLHGIGEVGASRLALELFWREFNNRREVGACVGLVPQPYDSGDSQADQGISKQGNRRVRALLIEIAWNWLRYQPNSALTKWFNQRTQGTGPNRRARRIAIVAVARRLTIALWRYLRDGEIPKGAQLKSI

SEQ ID NO: 104989 - protein, 308 aa, unidentified
MTLWIGIDVAKDTLAVCVLPQRQHLNFANSPQGHAQLLELLQGPSVGNVLLEATGGYERALMGALANAQVPVTRINPRRARAFATALGRTAKTDPIDAYLLARMAEQVQAPAPAPQPERERLREWVLRREQLVRQHDDERRRLAQASFAEVQRDLKQHIAQLRERIARIDREIAQAQRQLDDTRARRLLAVPGIGPVTTASLLAYLPELGQLDRRQIAALVGLAPYNHDSGQRRGPRRIQGGRATIRRVLYMACWSVIRGQPDFRDRYQRLRLAGKRPKVALVACMRILLVRLNAMFRDGVEWKMAGG

SEQ ID NO: 104990 - protein, 351 aa, unidentified
MPRKSSVCTVTAIGIDMGKTTLHMVGLDSYGAIVLREKVSRGRIASRFANLPPCLIGIEAGMATHYVARELAALGHEVKQVPPAYAKPFRQGHKNDFRDALAVAEAVQRPTTRFVPPKSNEQLDLQALHRVRSRLVSQRTAVINQIRGFLLERGIIVRQGLRFLRQLLPDILAKRTDVLSPRMVRILSDLAGDWRQLDDRIETVTDEIETLAKADDSCRRVMTVPGIGPIISSAMVAAIGNGSAFSRGRDYSAWLGLVPKQMSTGDRTILGRISKRGNSYLRMLFIQAARVILLRPANWPKHGFGAWLVRAIQRLHPNVLAAALANKLARIAWTVLAQERSYEARVTKAEA

SEQ ID NO: 104991 - protein, 350 aa, unidentified
MSEYTYVGIDDHEKSIAVKRAKGKENPEGRIFPTTEEGRDRFRSWVEDWEPGNKIIAACEAGPKGPCFARMLQSWGWQCFVLAPHALDRSPKHRQQKSDLKDAERALDALRGHYLAGKKLHACWLPDEELFDHRELVRGRLDLGEKIGKVKNQILTLCRRHEIQQPAHMKTAWTKKHIAWLAEYSSRDESATASQLASLVRQLCFLQEEEIQIDQLIQELSGHTRYTQAVRSLTRMRGVGVLSAMVYTLEIGKADRFKNRRQVGAYFGLVPSQKDSGETERKGRITRAGQPRVRKILNQVAWSIVRYKPLGIYNWYYQVKQRRGSKKAIVALMRRLAVIMWHRVLEAQAA

SEQ ID NO: 104992 - protein, 317 aa, unidentified
MVSEIGSFVGIDVSKAILDVGIGVAGEHFRVDNDEVGLKKLIERLKAVQPSLIVVESTGGLEKLVVAELFANTLPVALVNPGRVREFAKSTGRLAKTDKLDARLLAHFGEAIRPALVTLPTEEEQYLSALMTRRRQVIDLLTSEKNHLLSTPVKLRHLVEESITALQKQLDELNQTIDQFVNHNDAFRKKDEILRSVPGVGKITSAILLSDLPEIGLLDRKKIAALVGVAPFNDDSGHRSGKRRVKGGRESVRHVLYMATLAASRSNPVIKRFYQRMLQLGKPFKVALIACMHKLLTILNSMIRNLHTWQPNPTLDI

SEQ ID NO: 104993 - protein, 321 aa, unidentified
MQITTIGLDLAKNVFQVHGVDAEGGSEVRRKLRRGELLRFFEKLPPCLVGMEACAGAHHWARQIAAFGHEVKLMPPAYVKPYVGRQKNDMADAAAICEAVSRPSMRYVPVKSAAQQAALLAHRGRSLLIRQRTSLINAIRAHCTEFGLVAAKGPANIACLIAAIRDGQNPLLPQEARPALSILVDQLQFLNDRVRRLMTIPGIGIITATAIAATVPDAGAFKSGREFAAWIGLVPRQQSSGGKERLGGISKMGDAYLRRLLISGAHAVISHAKRRKDIGETWLGGLLARKPSMVAAVALANKTARIAWAIMARGETYRATA

SEQ ID NO: 104994 - protein, 371 aa, unidentified
MNSIVYVGMDVHKEQYTLCCYSYETDKVEYKQTIPSDYKLVLKYMEQVRSRYDGEVTFVCGYEAGCLGYSLYHQLRDHAVDCKILAPSTMAVTNTHHVKTDKRDAANIARCLAFHTYSEVYVPDNDDNDVKEYIRMRDDQKLYLKKVKQQILAFVLRQGKRFEGGKTYWTIAHLKWLKNIELSALQRETLDEYLLTYEYLTEKINRFDERIEELASAERYEEKVKHMSCLLGIKTHTALSMIVEVGDFERFEKAQKFASFLGLVPSEDSSDTRVLRYSITKAGNSHLRRLLVEAAQSYTRGNIGHKSVALKQRQQGNPPEIIAYADKANERLRRRFYKMTLNKGVNRNVATTAIARELACFIWGMMTEHVG

SEQ ID NO: 104995 - protein, 408 aa, unidentified
MNPLFVGIDVSSKNNVAYLMKPDGSKHSSFSVQNNLGGAKLLSERIVSALGSMQLERVVIRLEDTSIYGDSLVYALREDGRLGRFQRKIHVLNPKQVRKFKEAYSDLPKNDWVDAFVIADHLRFGRINREVYMDDYRYKALQTLTRARFDVIQNLTREKQRFANYLFLKCSGMAQDKDIQNTSATTIALMEHFETVDDLANADLEELTAFITETGRGKFADPDATAKAVRAAAKGSYRLPKTVNDTVNQAMAVSIASMRALKGQVKVLDKAIEQQFEIIPNTLTSIPGIGKVYSAGIIAEIGDIHRFDSQASVAKYAGLVWNRSQSGDFEAEHSRMIKSGNRYLRYYLLEAANSVRRCDSEFRRYYDLKFKEVNKYQHKRALALTARKLVRLVFRLLKDNRLYIPPEG

SEQ ID NO: 104996 - protein, 344 aa, unidentified
MSRMVGIDLHGNNVMLGMIDQHGRRLLHKRVPCELKRVLGVLEPHRVDIHTIAVESTFNWYWLVDGLQEANYNVVLANPAKIDQYDGLKHLDDKSEAYFLAELLRLNILPTGYIYNKDTRPVRDMLRRRMGLVRQRTALILSFKGLYTRNTGQRLKLSEVKTMKPAQTAQHFTHPADQLIAKEQMGLIGELAQSITRIEAAVLEAVGPMPYYRRLLTIPGIGKILALTLTLETGQISRFASAGDYASYCRCVQSRRTSNDKNKGRNNGKCGNKYLAWAFVEAANFAHRYSPQCRQFIDRKSSRTNGILARKAMACKLSKAAWHVMSEDTNFDMKRVFPSMKESS

SEQ ID NO: 104997 - protein, 382 aa, unidentified
MRMAVGMDLHSKMTTMYAVYADGYDVPSRHQKFLNDFNREFCEFPSTPKWFKKMADYVSKHECHVLVENSTKTHDVYWMLTNLGILVTVAQAQDLYRITKSVKKTDKHDCRELAAYMRRRLNGEDEFSVCYMPTPEWMTRREVCRGLSHEKDYLADTKRRIRAFLLLRGITLKREYSDITCDRALKELSQIDDPYLMMQIRFAQDCRKRVDFFERVVLNMFHDLEMYQLINSIPGFGVLSSAYFTSLIIDIDRFPDSKKFTSSFGVVPKIRSSSDSNPNCSTTHRGDDLARYLLMFCVLGHVKHQKDSVVTRMYRRLVERGKPKREAMVAVGRKLLTVVYSVLKNRRPYVSDPETLLLSHEDEESEREDFGLKDVSEEKLID

SEQ ID NO: 104998 - protein, 370 aa, unidentified
MSWIRSITVQTPNTMKVQCVGVDIAKNDFKVAFATKGEDNKLSCTTAKKFDNAKTGFNQLVRWATSEMDKNAPLVFLMEATGVYHEKLAHHLHRAGKQVHVVLPNKFKHFAASLNSKSKTDAIDAKLLARFGVEREHRPWNPAELVIKRMRDFSRYRVQLQEQKTAITNILHSKDYAHGVPADIKKSSKKVIAVLEKEIAILSKEMEKVVKSDPEIEAKVNKLRTIPGCGITTVAAIVAETNGFKEFKSAKQLTSYAGYDIVHNESGTSVLSKTRISKKGNRYMRHHMHMPALSASKHIPEFKALKERIKAKTGIPMKAQVAVQRKLLILMYTLWKNDLVYEKDYHQKKVARNNAQATQDSALQQLPLEV

SEQ ID NO: 104999 - protein, 363 aa, unidentified
MEEEKRRYVGIDLGKRAYQLAIVDRKGKVKMSNGKTTSEGRQLLYKKLTPHDKVAIEAGNLAFTMAKELETIVGCETRILNPSHLALIYGTMKKTDKEDALKLAHILEDYKNERLPLVPLPSEQEMKRRKLLGSYRREQRTRNQTINRLHGLYLAQGITDVVKSDLATGEARVETIERLNGLEREEAEHLLMSLELYEKRIKVLENQMEKESEGDEEITRLQNVPGVGPKVSFAFVSHVAHERFENSSQVSNYLGLVPRVYISGDTVRHGHITKRGNSYLRALLVQASWALIRSKKGGCLKERYKYMTEVKAISKKKAIVAIARRLAELLYTLMKNGTEYEVRKFRPEKRAEVKQLVQLAISA

SEQ ID NO: 105000 - protein, 275 aa, unidentified
MKKARAEIFVGIDVSKSWLDVAVHEREEEGLRTSNDESGIASLGKRLKKLKPTLIVLEPTGGFEMLVVAELTHAGLPVVTINAKRVRDFARATGRLAKTDKLDAKVLAHFAAAIRPPVRSLRNEEEEQLTALLTRRKQVLDMITIEKNRLVTVRAKMRLDLEAHLHWLSNSLKKLDQEIEEFVETSPVWKEKDALLQSVPGVGPVTSATMLGRMPELGQLNRQAIAALVGVAPVNKDSGTKHGKRKVFGGRADARSVLYMAALAAKKFNPVLRKF

SEQ ID NO: 105001 - protein, 492 aa, unidentified
MKLLYRRCAGLDVHKKSISVCVRIRRSGSKQAEVHEAEFRTFTQDLERLRDWLKQHKVKQVAMESTGVYWIPVWNTLEPVSWGFELLLVNPQTVRALRGCKTDRIDARRIAEFLQYGLLHGSFVPPRPIRQLRDLTRMRVQVQHDRNRVINRIGRLLETVNIKLGSVASNIVGKSGRAMLKAIAKGETRPENLAELALGQLQNKKAELALALQGRYSDHFRWLLRGLVAELEWLDGKLAELDTHLAAQMEPHAELVKRLCSIPGVDRVTAWVLIAELGLEMSQFPDAKHAASWAGLCPGNAESAGKRFSGRTRKGDRYLRRILVQNAWAVAHMKDCFLTAVFYRIAHHRGMKKAAVSVAHRILVIAYHIIRDGTEYWEQGGDYFDRLDPDRTVARLTRRLMRIGYDVTLTPHAPVPLTSNDPAQRPKRGRPCLCAVRGIACPHPYPAPPKPSLHPQPDLQCSKCAKWGIPCIHLRPRKPSGHFSTSPPESTT

SEQ ID NO: 105002 - protein, 407 aa, unidentified
MDGSKEHPHMTAGLDLGDKYSYLCFIDQHSGEVIEEGRLRTTPEAFLRRFASEQPMRIAIEAGTHSPWVSRVLEECGHEVLVANSRKLRLIYANKRKTDEIDAENLARLARVDPKLLYPLKHRGEESQAHMALIRSREALVGCRTQLVNHVRGAVKSFGARLPKCPASSFHKNAVEHIPEALWPALGPILEQISSLTERIRQYDRKLQTISKESYPETNLLRQVEGIGPLTALTFVLTLEDPYRFERSRSVGAYLGLVPASDRSGERDPQKRISKEGDQMLRKLLVGSAHYILGPFGSDSDLRRHGEKIASRGGKNAKKRAAVAVARKLSVLLHHLWITGEVYRPALQHASTPRAGGGGSLTKEAMEQRPTTEEVRTTATAATTTLKRGELKWRMCHGVLPECASDL

SEQ ID NO: 105003 - protein, 536 aa, unidentified
MADKKRNTQRKHIRSEGAYSLDEIRSLTMDDGTRVITSADGDIKRPVCAGIDVHKEILMAAVCKTDPKTLNAVFYVRQFKSTNSDIRTMGAWFQSHGVQDVCMESTGKYWIPVFNILEQCGQRPVLTHPKYVKQAKGQKTDFRDAVHIASMFRMDLVVASFIPPADIRDLRELCRYRLKLTYMRTSEKNRFQNSMTVSKVRLDCVFSDPFGKSASSIMEYLIMTEPEDVSDKQILSMVDRRVKASGEDILDSIHGYEFIGIQRDKLKVINLHLGQINECIRLIDEKLDYFRQKYSRIIRHLATMVGVTEESALYILGEIGTDMSVWRDDASLASWAGLSPANNASAGKKKSTRTGDGGHYLKPLLVQCALAAAKSTKKDPYFHYKYETLKKRRGHKKAIIAIARKMLVAIYHMIRDDADFLPVDHEEVLHSTKKQKGLNLDNVIAFLKEQGADDDTLRLVERQCGAQEMDAAEEMESVSSAEKKQSVSGSAATSQPIQESVNGSPVLISGSKQGRALNHHLKDPAVATATAQNELL

SEQ ID NO: 105004 - protein, 344 aa, unidentified
MDHFGGLDVSVKETSICIVDDTGRIVKEVKVASEPAALLKVLGNPTYRFKRIGLEAGPLSQWLFSALAEAELPVICVETRHMQAVLKAQINKTDRNDARGIAQMMRVGLYRPVHVKTIRSQKLRMLLTHRKLLQSKAIAIENDLRGTLRNFGLKVGMVGKVKFEARIKELVENLPDLAALVEPMLIVRRTLREQIVILHRRLLAIVRDDEVCRRLMTTPGVGPVVALTYRATVDVPARFRKSKAVGAVFGLTCAKYQSGEVDRNGRISRCGDEMMRVMLYEAAQSMLRSKKWSWLKAWAMQIARRRGMKKAIVALARRLAVIMHRIWVDGTEFRWTRERATAAA

SEQ ID NO: 105005 - protein, 428 aa, unidentified
MLKHNTEPDPAQEFAAFLALDWADQEHAFRLQVVGQSKIETGTLEQKPAVLGPWVAKLRERFGGRPIAVGLEQSRGALIHALMAYDFLVLYPIHPTTVAKYREAFKSSGAKSDPLDAGQILEILTKHQDRLHRFNPDTVETRLLGRLVEDRRKAVDLRTSHLQALGANLKEYYPQALELTSGNLSSRLACDLLLKWPTFEQFQQAKPSTLKRFYYGHNVRSPEVIERVLALAEKSQALTTDSAIVESGSRLSQMYVGLIQALNPVIADYEQRIQRVFDAHPEVKLFTGLPGAGPALAPRLLAFFGTDRSRYAAALNVQSFTGIAPVTKSSGKSRVVYARAACPKFDRQTFHEFSRLSVTHCQWARNYVQYYTDKGKKYHTIIRALAYKWIRILFKCWKERTPYNEDKYMETLKKRGSIFATLHLQTNS

SEQ ID NO: 105006 - protein, 465 aa, unidentified
MTPRQGKQFRQSEGVADLTVTHRHAAGIDVHAAVHFVAVPVGDVPTGFINPDAKLPAGVRKFGTNTEDLEAIAAWLKACGVTTVAMESTGVYWIPLYELLASRGFDVILVDPRQTKHAPGRPKSDVLDCQWIRRLHSYGLLTASFRPADDIVVWRGYQRQREMLIRYAAQHVQHMQKALEEMNVKLTEVVSDIVGQTGMKIIKDIVAGARDPRQLAKHRHERCKATEADIARALYGNWRKEHLFALKQALKMYEFYQRQLRECDKEIEACLRGFADKSGGAALPAKAGQQKPRRHEPRFGARALLFRMAGVDLTVIEGISETTALVIVSEIGTDLSRFPMEKNFVSWLGLCPQHRGSAGKIFSRRVRRGANRAARALRMAAQGCHHAKNALGAFYRRIQARCGGAKAVVATARKIAERVYRLLKYGQEYVRQAEQMYEEAYRLRTVKCLARKAESLGYKLVPATE

SEQ ID NO: 105007 - protein, 340 aa, unidentified
MKFVGIDLHKKSITLCVLDHDRATLTTRTFACCEVEKITTFFAGLGPFQAVVEATAGYEWLLQLLDPLAQRLVLAHPGKLRIIAQSTRKSDKFDARVLAEFLALDMIPESYRPTPRQREHRALVRHRQFLMKERTQLRNKIRRILADYNADRRDLFSRAGLEALPSIPLNPIHRFIVGQMLDQLQALETQRQELQKQLRGFAKQGGEREAQDRELLQSLPGVGEVTSEVVLAEIGDVQRFRSAKQVVAYAGLAPGRRESAGKARDLGITKAGSGLLRWVLVEASWRAVRGSMHWRGIYERLKLRRGGRRAIVAVARRLREVMVALLRSRQVYQEGLSAAV

SEQ ID NO: 105008 - protein, 351 aa, unidentified
MVIIGCDFHPGFQQIAIVDTEGGAVRELRLAHKAEAEQFYASLRGQEVLVGIEASGYSQWFEQMLERIGYRFQIGDAAAIRASYVRRQKTDRRDAGHILRLLVEGRFPALWVPSAAERDARQLIVHRHKRVQMRTRVKNQLHALAMNQGLRLRWQLWTAKGLEQLRALPLLPYAAARRADLLRQLEEMDAEIARLDEAVRKEAEARPAAVRLMSHPGVGPVTALGFVLTIGDVRRFKKARQVASYLGLIPSERSSGGKQRLGHISKQGSSLLRFLLVEAGHTAVRKDAELRRCYQRLQHRHSTGVAKVAVARKLALRLYWMLRNEIDYAQLRGPYAGQPVSFCGRKTRPAA

SEQ ID NO: 105009 - protein, 352 aa, unidentified
MGKNNKLDFGGQHIYVGMDVHKKSWSVSIHTEQFEHKTFTQPPEVEKLTYYLERTFPGATYHTVYEAGFSGFWLHDKLREKGIDCMVVNPADVPTKDKERAGKTDRVDCRKLARGLRNGEIKGIYVPPRVKVEDRTLMRTRQSMVRKQTRCKNQITSILFFYGIVIPEDGRWSRRFINWIESIRMERASGDFALKAHLEELKHLRQIIANLNKAILSLSRAEEYRADVLLLKSVPGISSLTAMILLTELADLSRFASLDKLASYAGLVPDIRSSGETEYSAGITFRRNAALRALLIESSWIAVRKDPALIMAFNKLSVRMKKTKAIVHIARKLLNRIRFVLKNRQEYVPAVV

SEQ ID NO: 105010 - protein, 371 aa, unidentified
MPVALYHTQQVEPTFRLFHFRKRILSNRIRHAARFKGQKLGIFQGVDVGKDSLDICYPNGDKEHIRNTKRCRATLIKKARTLGAVISFEATGPYDEALESECVASGVPAVRLDAWKTRKYAESQGMLEKTDSIDSEMIRDYAASLRPDQLHFVRERSAGYRKLKRAVSVRRNLLKAKALIASQLEGDLDAEIKSAIARAVASIDRQVERMDAVCVAAIRSDERMGAIAARFGQVVGIGPVLISTALASCPDIGSFTSKGIAKFAGVAPLENRSCTITKKPRPRRGRRDLRCALYMAAVSACRSNHRLRRTYEGLVARGIPKRAALIALARHIIILMNYIAKYPDFNPEVDPKKAAQMALPKRRPGRPRKNP

SEQ ID NO: 105011 - protein, 413 aa, unidentified
MEVIYQRCAGLDVGKDEVVACTRVPAGASGGGRRQEVRTYKTFSSGLAALADWLQDQGVTQVVMEATGQYWKPIWYVLEERGVELLLVNARHVKILPGRKTDVGDAAWLCELLEHGLLRGSFVPPPAIRELRDLTRYRKRLIQAHTAEAQRIHKTLEDASIRLGSVASDVLGASGRALLRALLAGERDPRVLAELARGRLRSKLPELREALAGRFDAHHALLVRLALDHVEQLERSITTLDQEVDRVIAPFARARDRLDTITGVGKRAAECIIAEIGIEMQVFPTAAHLAWWAAICPGNNVTGGKRRSGKTRKGNVWLGEILVECAWAAARSRDTYLAAQFWRLARRIGKKKAAVAVGHSILVIAWHLLDGDCDYAELGGDFFVRRDADRARQRAIAQLQALGYHVTLQPTAA

SEQ ID NO: 105012 - protein, 410 aa, unidentified
MEVLYQRCCGLDVHKETVVACLRVVSGGEVVREVRTFETTTASLMALSEWLAENGCTHVAMEATGVYWKPVWHILDDGDFQLILANAAHVKNVPGRKTDVNDATWLADLLAHGLIRASFVPDTQTQELRTLLRTRKQLVREKSSHILRVQKTLEDANIKLDSVITDIIGMSGRAMIEALIAGESNPAKLARLANYRLRASQEKLREALRGRVTKHHRFLLRLHLNQIDALDASIATIDQQVEAGIAPFRVAVELVTSIPGVSDLGAQVIVSEIGTDMSRFPSEGQLISWAGMCPRNDESAGKRRSNRMRKGAPWLKTTLVQCAWAAVRKKDSYLKAQFLRIKARRGPKKAIMAVAASILTAIYHMLKDGTLYQDLGSNHFQSRSKGQQTKRLVKRLADLGYDVALTPLAS

SEQ ID NO: 105013 - protein, 365 aa, unidentified
MDLGFTFCSLEPKLGGEDKVFGCMQSEADVKNVLKYIEGLKKELGDDVEFLCGYEAGCLGFSLYQQLKKQGVECVILAPSTMMASKGKRIKTDARDAKRIAQCLAYGTYRSVHIPSSDDDAVKEYIRMRDDHKIALKKLKQQINALCLRNGRQYTRTKWTLAHLRWLRETDWQEAVLKETLQEYLMTFEQMTNKLEALDRRIEELAQGEKYKEKVKKLVCLLGVKMRTALASIVEVGDFCRFEKGSTYAAYLGLTPGESSSGDTVRRGGLSKAGNAHLRTLYIEAAQGICKGRIGHKSKELKARQAGSSQEVIAYADQANERLRRKYCRLTHREKKRNVAVAAIARELACFIWGLMTNHTERRVA

SEQ ID NO: 105014 - protein, 403 aa, unidentified
MKGPIVSIDVSKGKSDYQAFKDLNVKYTGSRSIKHNKEGFDEIVNLVREMEKKLETEVCVVYEATGVYHRVLKKVLEDNNIKQFIINPLLSAKTKNDSLRSPKTDKLDPKSIAKTYYSHSLHNSHKQETIYHELRELSRYYEDILVHIRKDKVAFRAQLDIVFPGYDTLYDDLYGPVALAIIEKYPHPEMLQKKKINTVSKVIQNKTCHRQAVSDTMADKAIEYSKTIYSGCDKDDIEVLILQRFIKKLNEDMAEAERTIGEMIKLAQELPDFNIIKSIPGIGDNLAARIIAELGDMTRFKKKNELVAFAGLDPRISESGQNDGDHMHITKKGNKRLRCLLYLAVTCSIRLKRDDNSIKDFYIKKKQQSNPMCSKAAKTACASKLVRIIYSMCKTGELYQYNK

SEQ ID NO: 105015 - protein, 330 aa, unidentified
MNPQGGVANRDQRPNAGVDVSKQHLDACWLAEDQRLVNDATGWDELIAKFKQADVDLVVIEATGGYERGLVWALQGAGIAVARVNPRQARDFAKSMGVLAKTDRVDARALRDFADVLARHKDRAKYITPIVEAERVELAALMMRRRQLVDMRVAEGNRLEQASKLTYRSIKRVIRLLDQQIAEIDKQADDHIDRHFKDQRKLLDSVKGVGPVTILTVASALPELGRLQRRQISKLVGVAPLADDSGRRKGPRRIWGGRSEVRAVIYMATLSAITHNPVIKVFHSRLIAAGKPKKVAIVACMRKLLTILNAMLRDQAVWDVSKHAQTPKTA

SEQ ID NO: 105016 - protein, 371 aa, unidentified
MKSILSVGMDVHKNSFSLCAYDGYTGEIVSESTFASDVKLVIKFIEALKSRYENDVEIKCGYEAGCLGYSLYKSLTARGVDCVILAPTTMQVSAKNKMVKNDRMDALNIAKNLASGSYKAVYVPDEEAVEIKEYIRMIHDFKKELKRVKQEICAFVLRHGYQYDGKSKWTIRYMNWIRELEMSEIQRETLNEYIAEMENLNDKIDRFMNRINEIYQSERYHEKVSKLRCFKGIDTFAAMTIQVETADFERFPNAKAYASYTGLTTGEHSSGDKNNRIGITKQGNTVIRKTLVECAQSLVKGNVYAKKSQGLKSRQKGMDVNIIEYADKATERLKKKYQKLIERNVPRNKAIVAVARELACFIWGMETGNIH

SEQ ID NO: 105017 - protein, 493 aa, unidentified
MIHCLLVGYIPLRRMRIIAPLRLRAIVLLFASKEKALSKRTKKSKFQKFTVQSLPEHLRHINLNAAGIDIGSERHMVAVPEGRDEVSVREFGAFTADLQALADWLQQCGVTTVAMESTGVYWIPLFELLERRGFEVKLVDARHVKNVSGRKSDVLDCQWIQQLHTYGLLAGAFRPTDELCVLRSYLRQREMLTQSSSMHIQHMQKALQQMNLLLHNVVSDITGVTGMKIIKAILAGERDPRMLARNRDRRCQNSSATIAKSLVGNYREEHLFALKQAVDLYETYQAKIADCDQAIIKQVEKQPDITDDTLPPSEKLIQARERIRSGVDVRELLFKKSGVDLFATPGLAADTLLTLSSEVGFDMSPWKTIKHFTSWLGVCPGTKISGGKVLNKKTKRNPNRATQAFRMAAATQARSKTALGAFYRRIKSRSGGKQAITATAHKIARIYYTLLTKGTAYVELGQQAYEDKYKERRIHHLMDQAKSLGLQLVPCAT

SEQ ID NO: 105018 - protein, 341 aa, unidentified
MSEVSTIGLDLAKHVFQAHGADASGKVVFRKRLRREKVLEFFAGKPACVVAMEACSSAHHWARELTRLGHSVRLIPPAYVKPFVKRQKNDAADAEAICEAAQRPTMRFVAIKSETAQANAVVFRARDLLVRQRTQAINALRGHLGEYGLVVAKGPGHVIKLVEHIEDPASNVPEAARLVLRTLVEALRFLSKRIDLLDREIARRAREDDDVRRLTSIPGVGPITATALAALAPPAGAFRKGRDFAAWVGLTPSQHSTGGKQKLGTTSKMGERTLRRLLIIGASSVVRKALRQGIAAESWLGRMLARKPRMLVIVALANKTARIAWAVQAKEEVYRAPAVGA

SEQ ID NO: 105019 - protein, 424 aa, unidentified
MKVTFQICCGVDVHKSFLVATIIKTTGGIEPSYQKRRFSTFNNSILEFKKWLLENECLYVCMESTGKYWIPVFNLLEDEINVTIANPKWVKAVKGNKDDTKDSKWIGDLFRLGLVRGSYIPCKKIRILRKFTRYRYKLVSCRSSEKNRYQNALTVCNVALDSVVSDVFGKSSTSIIDYLLEQSGTSIDHEMIASKLLKRLKAKEDAVIESIEGYQMTDSQKYRMHLVRAHMDYITAEINDVDREIEKLISSDPDFENAIQFLMTIPGVKRDSAITIISEIGTDMSQFSSSKRLCCWAGLTPGSNESAGKKKSVRITRAGVYLKPALVQCAHAAVKSDKSPYYKKKYESLVKRRGKKRAIIAIARMILTAIYQMLSTGEQWNPSDLYKIDMPVALVEKQKAKAIKQAKKLLQREGLLPPDEPLAS

SEQ ID NO: 105020 - protein, 436 aa, unidentified
MASHCQFYNYKFQEVILLSFKILKFKCCGLDVHKTWIYACIGITDSNNRTEYKQARFSSFTKGLNELCDWLAKYNCTDVCMESTGKYWIPVFNILEQHNLWVTLSHPKYTKPMKGNKTDRKDAKWICDLYMCGMVKPSFIPPADIRELRDLVRYRYKLTCMITGEKNRAQNCLTVSNLKLDDVFSDVFGKSSRSITEQILQHPGEKFDVAPFVHGRCKTPIEEIQAAVDGAISKEQAVKLRQCLDHIDELNKHISELEQEILRLSDKYEAALNLIRTVPGFDKNPMTAVQILSEIGGDMSVFPTAKHLVSWAGCCPRNDQSNQKIKSTRISRAGSYFKPVLVQVANALIKSKKHLEFTNRYKRIKARRGHKKAIIAICRMILTAIWHILTDLKPYTPEGFLESHPVKEGKVLSSSQALNFFKQRGYIIKDEPLSVS

SEQ ID NO: 105021 - protein, 420 aa, unidentified
MSDDRCRLGSDDVVIGLDLASAEHQAVVLTAAGQRLTRFRIPHTRAGLEELLRRTTPAALGRAGGARVFAFEATGHLWEAVAYVLRARGERYVVVNPLATFRVREARQLSREKTDLTDAEQIAQLCRTGLVTRTQLEARPYLALRRAWGEYARLREERARLRVLVAHQLYGLFPEFLRVWADLLQPGALAVLRTGLTPAAMAALSLTEFVAQVRAHCAGHRIWHYKLAQVHREAAQTIACPDGLDVLAREVQRAVARMDMLTAHMTAVAAEIDVVLAELEEVPYLRTIPGLGWASVAGLLAHVGAITKYHHGRQLIKLAGTNPSRRDSGQTVGRGQRMSHRGRAGLREVLYLATLSCLQHNPRIRAHYDRLIQRADRPLPKMQALGACMNKLLLYAFAVMHRREAFQLDHDWQRTMARVA

SEQ ID NO: 105022 - protein, 326 aa, unidentified
MATIGIDVSKKKLDLCWLRDAQAGKVKTRVFPNAHDHYPALLSWLLKQIDASPGELQVYLEATGIYHEPLAYWLHQSGVTVYVLNPARVSYYARSLGDQGKSDKKDSKRIVHFAQANPELTPWQPEPEEVRTLKQLAKRLETVQKDIQREQNRLEKAQFNRDTQAEHSITHVLALLRREAKRLIKEVDDHIDRHDGLKRDRRLLESIPGIGEVLSVHLLVTLRSRRFKSGRQVAAFMGLVPVEWTSGSSVRHAPRLSKNGDPALRQKLYMGAVVAMRHNPSIRRQYQRLCAAGKRKMSALGAAMRKLVHIAYGVLAHQKEYEPQPM

SEQ ID NO: 105023 - protein, 401 aa, unidentified
MHAVIGIDVSKATSQVAVAVDGKVVQNFKITHNVFGFNQLNSVIMQFNTFPDIVFEATGVYSRRLKTFLEAHNYPYTYLNPLTAKKQLDQLRPNKNDLNDAKHLAETQFILKRAKSYVQNPIYIELQDMSRFYQQLNHDIVSAKNWLHRLLQLTFPEIETLFSTTDRQQYWEIVSLIPHATMAKHSRQTLSDTIQSSVSRQIGVARLTRLVDKLVALGSLSAPAVAVASYNVTEVRYYAQRLIALSQSKANVLATMVDQAKDLPEYDIYQSIPGFSDKTVVSLIAELGDLHRFATSNKLNAFVGIDLRFNDSGDYKSSGFITKRGNTNARKVLFKAISNIASTATYGHQNHINDWYQKKKQSSMSKGTKKIAIGAMSRLLRTMHYLVLNNQLYDYDTASKR

SEQ ID NO: 105024 - protein, 409 aa, unidentified
MDVIVERQGALDGHKEQVTACVRVPDEQGERVSHVAEFKTTVRGLLVLRDWLKAHRVTQVTMEATGVYWKPVWHLLEDEFELVLVNARHVKQVPGRKTDVSDAMWLCQLAEAGLLRASFVPPKPIRALRQLTRYRKAQISERQRETNRLHKALEDTGIKLDCVATDILGRSGRAMLDALVAGTTDPAILADLAKGRMRAKIPALREALEGRFEPLHALLIDAILAHIDFLEQQIQRISNAIEEQLAPFAAAIELLRTSPGIQRRTAENIVAEIGLDMSVFPTAGHLASWAGQCPGNDQSASKRRSGRTRKGSKWLDDALKDAALAAIRTDGSYLQALYRRKKPQLGHGRAIGAVKHSIICACWHMLTTGEIYNDLGGDYFSRRDPERQTRRLIAQLERLGHHVTLQTAA

SEQ ID NO: 105025 - protein, 461 aa, unidentified
MKAFLGTDVSKGYADFVLLNHKGQKLEDTIQLDDTHAGHNLLLGWINELCHQHGIEELYCGLESTGGLENNWLATLKSKPANVPINVARLNPSVVVNASKAELRSNVTDSESAYNIASYLYRFTNKVDFNQQDNLYAGFRSLHNQILMQLKQKTQLSNELKQLIYSAFPELQRYCNKGMPGWVLKLLSIYPTAANLAKAKVDRLVKIKSITKEKATKLIDSAKNSVASRSGETEGYLIKTLVEEIQFKEVKIQQLKAYLEEHCQGEETKLLTTIKGIGAYSAAALMAQIEEVHRFESPQKLASYFGLHPVIRQSGDHKGVSRMSKRGRPGVRTILYMCACSAVMHDMHMKSIYHRHRENGKTHRQAIGVIMHKLIRVVWGVLTKKQPYNPETDKQNQQKRKETKEQKDRKSTERVRRLQSFDQNAPISRLASKKRKVHSLSQSGMAEKVRDPEIEPIKTNI

SEQ ID NO: 105026 - protein, 360 aa, unidentified
MSQDSVVAKIKTVGLDLGDRFSQVCGLLEDGTIGVEDKVASRKEALRLYFRRFTGLRVVCEVGTHSPWVKPLLESLGHAVLVANPRKLRALYASGPKSDVLDARMLARVGRMDPELLGAIHHRSLQTQADLAVLRARDVLVRARSKLVNHVRGAVKSMGGRLPKCSTPRVHQLPMSEIPEPLRPALAPIFGSLAAITAQIRECNRKIAALCADRYVETTLPMQVHGVGPVTSLCFLLTLETPERFKKSRMVGAYVGLTPRQHSSGERDPDLPITKSGDRMLRTLLIQCAHYILGPFGQDSDLRRFGQALLARGGKTAKKKAVTAVARKLAVLLHRLWYTGEEYQPLRVTKQRERVLKACA

SEQ ID NO: 105027 - protein, 391 aa, unidentified
MIYIGIDVAKDKHDCFITNSDSKVLFKAFTIFNNLDGFNDLYQKIESVMDDVTKVKVGLEATGHYSYNLLGYLIDKGLPTYVINPLHTNLYRKSLSLRQTKTDKVDARTIASMLMSDVNLKSYSDTSYHNKELKSLTRYRFDKVKERAKLKTSVSRLVCILFPELEKLVPTLHMASVYALLSEFPSAKHVATAHLTRLTNLLSKSSKGRYGKDTAITFRDSARASIGSNMPAKSLELKHTIKLIQELDSEIDEIENEIKIIMDEINSPILSIPGINYRMGAMIIAEIGDFNRFDSPDKILAYAGFSPSTYQSGQLDGAYAHMEKRGSRYLRYALYNATKYVCHWDPTFAAYLAKKRAEGKHYNVAISHAVKKLVQVIYHLEKTKQQYIKAA

SEQ ID NO: 105028 - protein, 337 aa, unidentified
METSYWIGIDISKRQLDWQVNKVQNQPLLIGKVQNSPGGITELLETWSHHGICLDEMIICFEHTGPYGLLLAAMLEEAGICYVMVAAAQVQRSLGIRRGKTDAIDAKRLAEYVWRFRDQLAPSRLPSKALLELRSWLLWREKLVKMRTSLTNALKANTLTSRVVNLDEINSQIQDQRDQLTHQLKQVDRKIRLLLRRYNDTEGQYELLISIPGIGPIIAGWLLVYTEGFTRFANARQLACFAGSAPFPNQSGTWKNPDRVSRWRCVRLKTLLLNGVHSAIQYDPELRAYYQRKCGEGKHPKSVKNAVVCKLLYRVFAVINRGTPYVKLYEHEATKIS

SEQ ID NO: 105029 - protein, 346 aa, unidentified
MIPVASDVHKGRCWMAMIPPGEDVKMLEPIECTREAWRQRWAELPPDAEIALEVSTSGYFVMSVLEEAGWRERAHWVHTAGIDSLRKQKSDRLDTRRLVKKLAVHDVDPLPEAWFPPPAIRALRLLARQRCGIARLRAQTKNRVQSLLEMHGLRPQRCVFTAKGRAWIQQQALSSAAQLCFERMFRLYDFLSAERASSEAELLAAAAAFPQVALLRTIPGLGHVLAAVVWSEIGDLTRFDSADALLNYTGLVPSSYDSGEVSIHGPITRQGPAWLRWALITAANALTRSKSPLGQRYWHLRRCHKHPNVAKTAVAGSVARCIYGVLKHGAPFQAERWGRRAGKLGQ

SEQ ID NO: 105030 - protein, 429 aa, unidentified
MSYRIAGIDVHKKMLAVVVSDVEIDGEFRFERRMFGSNPEQLRTLAAWLLEQEVEEVVMESTAQYWKPVWETLERYWKPIREKREGARRKSGTLHLALAQSNRGRRGRKRDFPDAERLVKRLVARELTLSFVPDAEQRLWRTVTRRKYQLTRDRVRLQNQLESLLEEAHIKLSSLVSDMLGASAQRMLKALADGETNPAALAALADRKLRATPEQLCDALGACTDLKPVYRRLLKMALEQLQFLEQQIGQLDQEMASLLSPHQDAVERLAEVPGLGVDSAQQIIAEVGPTAATFPSEKCLSSWVGACPGDDESAGVNYSHRSPKGNRHMRRVLNQCANAAARTKGSIFEIVYRRSVPRLGHNQAIGAIAHRQCRLIWLILHQGVRYEERGPAVTKQSKQNRTARMIRQLRSLGYRIEQTNPQPSQVQAQ

SEQ ID NO: 105031 - protein, 348 aa, unidentified
MRFAEGIATYGIDLGKSKFHVVGVDDKGHALVRRTFRRASLLEYFANVPAALVGMEACPGSHWLARKLTTCGHTVRIIPAQFVKPFVKSNKNDVIDAAAIAEAVTRPSMRFVAVKRCDQFDLQALHRVRDRLVSSRTRLISQMRAFLLEYGIALQNGAGMFRQQLPTVVADEVNELTPAMRALLGELWNEFKTLDERIVAVSHQIEALAARDDVARRLTSIPGIGALTATALLAAVGDGKQFRRGRDLAAWLGLVPKQYSTGGKPTLLGISKRGNPYVRRLLIHGARACVLHLDRRRDRLGAWLDRLCGRMHSNKVVVALANKLARIAWAVLTRPGSSYERMDPRFAT

SEQ ID NO: 105032 - protein, 364 aa, unidentified
MSDGICFAGLDVHARATAAAAVKLGSGEVFRARLSGGPAATIDWLRSLPGPVRAVYEAGPTGFGLARAARAAGLEVIVCAPGAIPRQPGDRVKTDARDALKLARLHAAGQLRAVVVPAPELEALRDLVRAREDLRGDLMAARHRISKLLLRRGLVWAGPGTTWNDGHLRWLGRISLGDPLADVVLGEYLACHEVLLARRDRLDALIAEQATHRPWAQTVARLRCLRGVDTLTAVGLIAEIGDITAFAHPKQLASYLGLVPSEQSSGERRRQGAITKAGSTHARRLLIEAAWHYRRRPAISLTLRRRQAGQPPAAIDAAWRAQLRLHRRWAHLDAARAKKRTTVAVAVARELACFVWEIARQPEG

SEQ ID NO: 105033 - protein, 387 aa, unidentified
MAQVNDLSRSLTAFDLISTLVVVVEMSKASWLVSGAVPGVERQPLKKLEPDATALLRLIERWRNEAVRAGRPISRIALAYEAGRDGFWLARWLIARGIEAHVIHSASVAVSRERKRAKTDRLDAAMLMRVFLGWLRGERGHCGMVAIPTMEEEDARRPSRERESLINERSRVTNRMKSALARLGVRGFKPHLRKAPERLAGLRTAEGTGLPANIIEEFRRDMARLALVREQINSIEKTRAERLKRAPDTGPHAMVRLLARVIGIGIETADMLVREILSRKLRDRRAVARYAGLTGSPDESGLKRREKGLPKAGNARVRRGLIQLAWRFLTFQKDSALARWYRTRTEGPSGARKTTMIVALARKLLIALWRLVTTGEVPDGVELRPAG

SEQ ID NO: 105034 - protein, 321 aa, unidentified
MSHLNSGIAAIGIDIGKNSFHLVGQDQRGAIVLRQKWSRGQVEARLANLPPCLIGMEACVGAHHLSRKLRALGHDARLMPAKYVRPYSKGQKNDFRDAEAITEAVQRPTMKFVATKTAEQLDLQALHRVRERLVGQRTGIINQIRAFLLERGIAVRQGLRFLRAELPTILATRSDALSPRMLRLIEDLAGDWRRLDERIEGISDEIEALARQDQACERLMTVPGIGPIISSAMVAAIGTGDAFSKGRDFGAWLGLVPKQISTGDRTILGSISKRGNRYLRALFVQAAIALANKLARIAWAVLHRGRAFECVKMDEIAPRSA

SEQ ID NO: 105035 - protein, 456 aa, unidentified
MHTFYMGIDASKGYADFVILNSHKKAVVEGFQLDDTFEGHCHLYELLMNFFTTQPKSIIYAAVESTGGYENNWYNALSSFQGSLNLRIARLNPLGVYHNHKADMKRNVTDKISAHSVAEYLIAHPEKVSYQTEDYLASLRKQWGFIKMLTKQSTQLLNQLESLLYSANPEILPYCKDGVRTWVLNLLVKYPTAANLARATAPSVARIPYVSPARADSLILNAKRSVASATDKIAQQLIVATVKQIMHLKKTIKSQTKIMAESCSVPEIALLKTFIGIGDFSAIGLMLDIQSVTRFKNVKKLAAFFGLHPALKISGDGIRTVRMSKKGRTEPRQILFMVAMTAITKNPLISEVYQDHVQKGMNRMAAVGLCMHKILRIIYGMLKNNTSFDPEIDRRNREWSVKKRPAEDRSKVRRYQGYDRNAPISRRQQKKRMEQRQSQSANNAECGIEAPAPFSS

SEQ ID NO: 105036 - protein, 330 aa, unidentified
MNVAGIDVAHKTLGVVLSVDEKAGKAQEFANTASGHQALVKALKAARVERVCLEATGSYHLDLALALDAAGLALMVVNPKAAKRFTEALMTRTKTDAVDAAVLAQFAQRMPFEPWQRPDNQALALRACARRLDALNRAKTEAKNQLHALTQTQTTPEVVLADVRLTITQCEAQIKDLHTWAAGQIQAQAHLKEVFDLLISVKGIATASAIQLMGELLVLPADMRAKQWVALAGLDPRQSISGTRVHKKPRLSKAGNRYLRLALFMPALSAARHDRHVNGYYRHLIEDRGLKKIQAVCAVMRKLLHAIHGMLKSRQPFDGSRFYTLAETPT

SEQ ID NO: 105037 - protein, 415 aa, unidentified
MALKIVYKICCGIDVHKTFVVACIASTNKQGVTTYKSHRFSTYTKGLKELLQWLLDYNCMDVCMESTGKYWIPVYNVLEKSCSIVLAHPKYVKAIRGKKTDKKDAKWIADLFKDDLVAGSFMPPADIRQLRDLMRYRYKLTCFMSSEKNRLQNCLTVSNIQLASVVSDTLGKSSKRILDKILKNPLDTSFDLEPLIHGSMKNKISELELAIDGYITPEQAGKLKIIKRHFEDLESRKAELEKLILALASPYQQELDLILTAPSFSNPFSAITVISEIGVNMEAFPSAKHLCSWAGLTPTNNESAGKKKSVRVSKAGCYIKPFLVQCANSVVKSEKHPEIRNRYLRLRKRRGHKKAIIAIARMLLTALYNMLKNNEPYNAELYRKSDVLPVDREITVEQAILMAKFQGYKIKSATE

SEQ ID NO: 105038 - protein, 351 aa, unidentified
MPHKLNSGIAVIGVDIGKNSFHVVGHDKRGAIVLRQKWSRGQVEARLANLRPCLIGMEACVGAHHLSRKLQMLGHDPRLMPAKYVRPYSKGQKNDFRDAEAIAEAVQRPTMKFVATKTAEQLDLQALHRVRERLVSQRTGIINQIRAFLLERGIAVRQGLRFLRAELPRILAASCDALSPRMLRVIEDLAGDWRLLDQRIEGLSSEIEALARKDKDCERLMTVPGIGPIISSAMVAAVGTGDAFSKGRDFGAWLGLVPKQISTGDRTILGSISKRGNRYLRTLFVQAAWVVLVRIGPKHWDRYGLKSWIEAAKKRLHHNVLAIALANKLARIAWSVLAHGRAFEATKIQAA

SEQ ID NO: 105039 - protein, 397 aa, unidentified
MIAIGIDVSKSKSTIAILNGDGTIRVKPFDVHHVADELQALVDYIKRISEPPTILMEPTSHYHYPLLKAFQEADLPVCLINPYQMKKYGDTELRKAKTDKRDSLRIAQYALEKSYSLVPYTPADQKYDDLRFLSRQYGQRISTLTVAKVQLLSLLDETMPGITTILPLKSRDPDNCVLLRFIKRFKSFDVIRKMGKTRFLDSYQVLVKKTNDRFAGAKGLAIYELAFNSITPRGENPLSAMTQDQCVDLVSTSQKAADEINLQMRIIAETIPEYKVLRSMAGVGDRLGPIILGEIGDIRRFHSGKALNAYAGNDAPPYQSGQFESRNRHISKRGNPALRKACFEVMQALKLTKPQDDPVYLFMLKKEQEGKPYNVAKMAAVNKFLRIYYARAMELYK

SEQ ID NO: 105040 - protein, 355 aa, unidentified
MGSAKYVGLDVHKDTISIAVMNSAGKLIMESIIETKAITILQFFQGLHGDVYVTLEEGTWAAWLYDLLKPHVTQVVVCNPRKNALLLKQGSKSDQIDARKLAELLRLGALSAVYHGEHGLRMLKELSRSYLTISKDLGRVMNRLKALYRSWAIPCAGAQVYAPRHRAEWLAKITEAGVRRRAELYYEQLDALRSLHKQAKKELLSEGRKHSATKLLRQIPGIGPLRATQLVALMQTPHRFRTKRQLWNYSGLGLETHDSAQYCMVEGQLQRSKKPQQLRGLNDNHNHDLKNIFKGAAMRASTAAGPMRDFYEALLAKGRRPTMVRLTLARKIAAITLIVWKKGASFDAKHLKQAA

SEQ ID NO: 105041 - protein, 415 aa, unidentified
MEALHQRVAGIDVHRMKHVVTILIGREDGSVSSETREFGGFKRDLRALVAWLQTHRIQQVVMESTGIYWKSVFGHLEAAGIPALVVNAFHVKNVPGRKTDVGDSEWLAQLARFGLLRGSFIPPKDLRELRIVSRYRRKLTGMLAGEKNRLHKLLDDAGIKLGGVVADIDGVCAAKMVKGLIAGANPAELAALGCGKVRATTDILEAAMDGDLSARHRLVLHMAYDHLRYLEGKLAELDRYLLAAMQPYAWAWRLLQTIPGIDAISAAMILIEIGDDPHRFGSAARLASWSALCPGNNESAGKRKSGKTRHGNPIVRYLLCEAANAARRTKTVFRAKYESLVIRRGHKKTIIALAHKLVRTIYFVLVRRKPYRDSTVDYEAASVAKNAPRWIRALKKYGYWPQVAAPNPPTAATAS

SEQ ID NO: 105042 - protein, 368 aa, unidentified
MNTVKFIGMDVHKKTITVAIADEGRQKQPRVYGTITNDLEALDKFCRNMVSTANQLHFVYEAGPCGYGIYRYLTKKGFDCMVAAPSLIPKKSGDRIKNDRRDAKMLARLHRADELTAVFVPDAQDEAMRDLNRAREDAVIVAKKAKQRLKAFLLRNGVAFAGSSQWSEAYFKWLADIAMPHPAQQVALQEYIDAVHESLNRVKRLTDQIRQMVPDWRLAPIVSALQAARGVSLIVAVTVLAELGDLSRFAKPSQLMAHLGLVPSEHSSGESIKRRGITKTGNSHVRKALVEAAWSYRMQARVSRLLLKRQQGLPDQVCKIAWKAQLRLCARYKRLVAKGKTKQKVVTAIARELSAFLWAIAKQVQPLA

SEQ ID NO: 105043 - protein, 418 aa, unidentified
MENRPPFSYQATVGIDWADRKHDVFVRFANGSSYRRKIGSRPEAIQEWLFELRSACAEGKIAIALEQRRGALFYQLCTHLSWIDLYPINPHSLSSFRLTFFSSRAKDDPKDGQLLEELLRTHCDRLRPYQPALTTERQLDLYCRQRRSLLGLATKTELKLISTLKQYFPVAVDLFEAVGMKSDIALNFLSRWQTMHELRRAKTHTVRSFFYAHNSRSQSLIEKRLQQIGAALEVTDDPALIEPMVLMTKCLVGQLRQFNQTINEFDRKIKGVFKSHPDHFLFEALPGAGEKLAPRLLSLFGSDRSRWPDAADIQKYSGIAPVIERSGKSLWVHRRLSRPIFICQSFHEFAQQSTRFSSWANEFYKRQREKGKSHHSAIRSLAFKWIRIIFACWKANKAYDESFYLNALAKRNASSSPT

SEQ ID NO: 105044 - protein, 347 aa, unidentified
MLIIGCDFHPGFQQVAIFDNTTGEIQERRLGHRAEAEQFYRALAGQQVRVGMEACGHYPWFERLLAELGFELWLGDASRIRAQAVRQQKTDRRDAEHLLQLLLENRFPRIWVPSLEERDVRQLLVHRHKQVQTRTQVKNQLHALALSQGVQRKRKLWTQAGRAELGQLELLPYAAERRKQLLQSLDRLEQEIAALNQRVEAEVGQRAAARKLQTHPGVGPVTALAMVLTLGPAARFASAKQVGSYFGLIPSEHSSGGRQKLGRISKQGSSFLRFLLVEAGQSAVRQDAELGRFYRRLAVRKHRALAKVAVARKLATRLYLMLREDWTYAQLCRAMVSASPSHSVVER

SEQ ID NO: 105045 - protein, 428 aa, unidentified
MHSTQNERINQINSSTLIVGVDIAKFKHVARAQDYRGVEFGKPITFENNREGFELFVCWFRRIAREQGSHSVIVGMEPTGHYWLNLAHYLSSNQILCGVVNPLHVKKSKELDDNSPTKNDIKDAKVIAQLVKDGRYAVPNLPQGIYAELREAMKIRDHLSTDMRVVQGRVHNWLDRYFLEFLTVFKDWECKSARQMLSLCLLPHELVNQSDEVLLKHLREAAKRGLGLGRVKSLKAAASRSVGIKEGVELAKIELKLLLAQYELLQSKFEELDSKLDELLGQISYVEQLLAIKGVGRDTIAGFLAEVGDVGQYRHPKQIIKLAGLNLKENTSGKHKGQTKITKRGRKRLRALLFRVMMPLVAKNRAFKALHQYYTKRPSNPLKKMQSLIALCSKLIRILFGVIKKGHAFSEEKMMQDIPRFAELSLAA

SEQ ID NO: 105046 - protein, 315 aa, unidentified
MFLGIDISKRDFHVALLIADKFKTKVFPNQAQGFADLARWLTKLNAVRVHACIEATGVYGEALAEYLFDAGHTVSVVNPARIRGFAQSLLTRAKTDKVDARIIAQFCQAMNPASFTPLPKEVRLLQSWLRRLDALLVMHTQEHNRLDVAPVSVQASISEHLAFLDREIAAVRQAISDHIDHFPDLKQQADLLESIPGIGEATAAWLLGELDLKRFDSARQSAAQCGLTPKPRQSGTLNAPAHLAKTGSARMRKALYMPALAAIRFNPVIRAFALRLEKRGKHKMVIIAAVMRKLIHIAYGVLKSGQPFNPRLVKA

SEQ ID NO: 105047 - protein, 340 aa, unidentified
MRQLYVASDLHGNNNLVGIIDGEGKRIFKKKLPNDPLLINNILKPFKEEIVGIVVESTYNWYWLVDALMEEGYKVRLANPAAIQQYSGLKHTDDKHDAFWLAEMLRLGILPEGYIYPKEERPLRDLLRKRGHLVKLRTSLILSLENIISRNFGRKLPVNDVKRLRKDCVTPLFEGKEDLALAGRVSKETIDFLTHQILQIEGVVEKRIQLKEAYRYLLTIHGVGKILGLTIMLETGPIGRFETVGDYTSYCRKVPSQWISNGKRKGSGNRKNGNKYLSWAYAEASDFARRLHPESRAYYNRKMQQSNPAVAHSALSHKLARAAYYIMRDQVAFRPEKLFG

SEQ ID NO: 105048 - protein, 366 aa, unidentified
MLQTQLIREKERAMTDIATHNNRIATIGMDLGKRSFHLIGMDARGKVIMRQQLSRGRFERHMANLQPCLVGVEACAGAHHIGRRLSAFGHNVRLIPAQYVKPFRKGQKNDYRDAEAIAEAVQRPTMRFVPIKSAEQLDLQALHRIRSRLVGHRTAVINQLRGFLLECGVIVPQGPARLREILPSVLAQRTDVLSPRMIRLVEELIEDWRRLDDRVDAVTSEVQALARQDECCRRLMSVPGIGALTASAVVATIGNGAAFTKGRDFGAWLGLVPKQLSTGDRTILGRLSKRGNKYVRTLFIIGARAVLAKPGSWAKFGLEGWLGAAAKRLHYNVLAAALANKLARIAWSVLYHGRSFARDVEPQSVS

SEQ ID NO: 105049 - protein, 339 aa, unidentified
MTVRTVGLDLAKNVFQVHGISETGRKIFNRKIKRAKLLAFFESLPPCMVGMEACGSAHHWGRELRKLGHDVRLMPATYVKPYVKRGKTDAVDAEAICEAVRRPTMRFVEIKTEDQQALLAVHRTRELVVRQRTQVANMIRGLLREFGRILPTGVEAVTAFSKRHLEGDQPDMPELASGVLGTLCYQFLGLNARIDGFTRLIECHAQRDADARRLMQVPGIGPITASAIVATIGDAKQFRTGRDLAAWLGLTPLNKSSGGKERLGRITKKGDHYIRKLLIVGMTSRALMAKLHPEKVDIWTARMLAGKPFRLATVAMANKSARVIWALLTRQENYRQPVA

SEQ ID NO: 105050 - protein, 456 aa, unidentified
MKKKALNPTHDFVNMPMVHTHAASIDVGDTLHSVAIPEGIFSERVKTFGSMTCDLEAIAAWLSSASITSVALESTGVYWKPLFSMLNKKGFEVYLVNARQTKNISGRKTDEGDAVWIQKLHSCGLLKSSYLPDDEQEALRTLVRYRHTLVQDCSRFKNRMQKSLELMNIKFHTLFSEISGKTSTSFIEAIINGERNPQNFLPLVDIHIKATKEQILKSVEGNWRSEHLFTLSQSYEMSKIFQQKIIVCDVAIESTLQCYGAFINDGEYEAPIENKQIVKPVAKKKKYRGAPTFNVRSYLQKIYHVDVLSIYGLSEMSGLEVLAETGADLTKWPTANHFKSWLNLCPNNKMSGGKLISSKLLKKKPNAASQAFRIAANTVQRSNHWLGDYFRRMKGKGGNKFAVVATANKIATIFYKMVTEQKEFTPVDLEAYQQKYKNAKIAFYEKKLQQLKAVAA

SEQ ID NO: 105051 - protein, 387 aa, unidentified
MTKVNDLSRSLAALDQDTTLIAVVELSSKSWLVAAAVPGIERHPLKKLDPDASALLKLIERWRGEAERRGRTIKRVVLAYEAGRDGFWLARWLKERGIEAYVIHPASVAVSRERKRAKTDRLDAAMLLRVLLGWLRGERGHCSMVAIPSMDEEDARRPSRERETLVGERARITNRIKGALARFGIRSFNPLLRKAPQSLEKLQTAEGGPLPVNTLEEIKRDLARMAVVREQIAAIEKARVDRLKQAPKTGSNAMVQLLARVIGIGIETADMLVREVLSRTLRDRRAVGRYAGLTGSPDESGSRRREKGLTRAGNARVRRGLIQLAWRFLMFQKQSALTQWYRARTAGATPTQRKSLIVALARKLLIALWRLVTTGEVPHGVVLRPTI

SEQ ID NO: 105052 - protein, 368 aa, unidentified
MLMQSHYKVGCDAHKHYSFFSVFDGQGRAVQRTRVDHQRGAIRDFLSRFPAGTPVALETVGNWYWIVDEIEAAQCTPLLAHALLAKKRMGYVHKTDKLDADGLATLLHMGTLPAVWIPPGDLRDERELPRTRMAFSKVRTMLKNRIHSTLAKYALSLDTDSDIFTAKWRPQLLAVLQQLPAETRRCVDQELELLELLQAHIHRLEERILKRVEITPTIRRVMSIPGPAEILSIVIDRELGSIDRFPSPKHLASYCGLVPRVSASGGKVHYGRMVQQCNHYLKWAFIEAANVVVRQRHHSNWSGKYVVRLFERTRQRKGHAVAVGATARYLTEATFWVLKKGEPYREPVPRRPVGSLLRTSPKQGQARA

SEQ ID NO: 105053 - protein, 329 aa, unidentified
MRAIKSEKKLYCGIDVSGDTLDVCYQSSAGSLEWCKCTNNAEGFKEIWQHTGKLYHFIMESTGVYQLPYCFFLEGKKARYSVVNALQIKRYIQMKLERNKTDKKDAFHICMYGVDHNPDCYQMPSHLYFECRAINNAIETITTEITSFKNKLHSLSKLDIDSKVIVTGYKKILRDLQAELKKFEAELYKKLEAWQPELVKQVRSVVGIGKRATAILIVTTQGFKHTQTYQQLISYAGLSPKEYSSGSSIRGKVRICKQGGSLLRHTLYMCALNAKETNGACKELFDRLVAKGKNKKLAVIAVANKLLKQVFGVIKNECLFDRNYYKKIA

SEQ ID NO: 105054 - protein, 470 aa, unidentified
MGKKKEKSQKSITPKKVVVKMKEGLAVEHPFAAGIDIGDTEIAVAIRGKDGYEVSTFGTFSEDLDSIVSYLKKNDITTAAMESTGVYYVPLYIKLQEAAIEPYLVNARHAKNVTGRKQDDTDAIWLQKLHTCGLLQKSFQPDAEGRVFRDYIRHRKNLVTISSDSVRRMQKALELMNVKIHTVISDILGKTGIAMIEAILNGQHDPVELSKFKDPRIKASDEIIIKSLKGIWREEHLFALRQAYETYQFHQKQIEVCDERIRLQLDKQTAIINDGEIYCENNECLSLEKSKDEKKKKSKKKAKKNQYKFDVKSYLVKLLGVDLCAIPGISEITVMELIAETGINMREWKSAKQFCSWLNVCPNTKVSGGKVLSSKTMKKKNHAGQCLRMAAVTVAKTKTPLGDYYRRMRAKQGGKGAALATANKLARIIYTMIKEKKEYDLSLYEKAQENFKAKQIKFYQKKILELSRVA

SEQ ID NO: 105055 - protein, 353 aa, unidentified
MNKQDARKTPQDGPWIGADVCKKTFDAALVRAGQKYPATPLANVPVQSFARTPSGVNDFLQWMDALVGSDDAAPRVVMEATGRYSQELAVWMLEQRPTLAPAIAAPHQTAAFITSLGLRNKTDKMEARALAFYGMERQPAPYVPLTPHEAELQDLCRCRDFLVRQRVALANRAAETHASKTVQALERKRLRLLEADIERLEQAMRRVLDEAPELQRDVEALSTIYGVGFITATTVRAELGDLRRFSKARQLTAFAGLNPSLRQSGSSIHGRPRMSKKGNPRVRQCLYLAAMVAIQGHNDLQCCYLRLREEGLSGMAALGAVMRKLLVLMRAILISGKPYDPLWKTRTHRSQSA

SEQ ID NO: 105056 - protein, 353 aa, unidentified
MTDTKYIGMDVHKESISMAVRNDTGKLVMECVIETKANVILDFIHGLRGELQVTFEEGTWATWLYDLLKPHVRKLVVCDPRKNSRQGNKNDRVDARELADRLYMNKLSSVYHGGAGVRTLKELARSYLTISKDLGRVMSRVKAIYRSWGIACAGKQVYAPRHRAEWLAKITEAGVLRRAEFYYQQLDALRVLRQAVRRDLLAESQKHKASKLLRQIPSIGPIRAALLIALIQTPHRFRSKRPFWKYSGFAIEMHSSADYRSVQGELQKSKKQISVRGLNRDCNHDLKNLFKSAATIASVKPGPFQEFYAALLAKGMRPEMARLTLARKIATIVLIVWKRGVSFDAQYLKSQTA

SEQ ID NO: 105057 - protein, 438 aa, unidentified
MSDAVQAVAPEPEFAALVGLDWGDTKHCWKLREVGSQQSQEGELPNTPEALQTWAAELAVRYQGRPIAVCLEQSRGAVVYQLSQNAHLVVYPVHPTMAARFRAAFYPSGAKSDPTDAAVLLDLLWHHREHLRRLDPDTPETRLLQILVEQRRGWVDERTRYSNRLTAWLKIYFPQVLEWIDDIDSPMGCDLLERWPTLEELQRAHPGTLHKFFVEHNSRSEERIQNRIQAIYGATTALRDSAMMEAGPTIVKEMIGVIRALSANIAELDKRIAELTEMHPETPLFAGLPGVGPVLLPRLIVAFGTKRERYASADQLEAYSGIAPVTEQSGQNCWVHFRWACPKFLRQTFHEFAAHSIAKSVWARAYYDTQIAKGKGHHAAVRALAFKWIRVLHACWRNATPYDEAVYLRALERHHSPLAQALATPVEWKTVAGFQKLS

SEQ ID NO: 105058 - protein, 392 aa, unidentified
MYIVGIDIGKNHHEASIVSPEGKQIGRSLRFATTHKGADSLMSFIFKNIGNSPCVFGMEATGHYWYPIYSFLKAKGYTIYVINPIQSDSLRKMYIRQTKNDSIDSFLIAEVIRFGQFGTTSMADENILAMRQLCRYRDSVISSRTEIKLRISTIMEQIFPEYEKQFSSLWVSTSMGILEKYLTPENIENAPIDELFEIIKDKSHNRLTRAKAISIKEAAADTFGIKIAQDAFSFQLKQLIDRMNFLDKQIEALDCQILEYYEKFDCYLHTIPGIGMIAAATILAEIGDINRFKSSSALVAFAGIDPTVRQSGEFSSTHNHMSKRGSPYLRHAIFLAATTCSFHNSPLNAYYKKKRDQGKHHLTATGAVARKLTTVIYAVLRDSKPYEPKKFC

SEQ ID NO: 105059 - protein, 344 aa, unidentified
MESTTIAVDLAKNVFEIAVSRFPGKVAERYRLSRKKFLRFFAQRAASRVLLEACGSAHFWARELSKLGHEVVLLPPHLVCAYRSRHKKTDRTDAKALLEADRNEEIEPVPVKTVEQQGVTALHRLRSAWMATRTARLNAVRGLLREHGHFIAQGAKNVVPRVHELIEDASNDLPDPMRLALAEACEEIRDLERRCAAVTQQLEALARTIPAVEHLLSVPGIGPLTATAMVAFVGEIHRFPSARHFASYLGLTPRVHATAKSRRLGHISKQGDEYLRWLLIHGARSCLLAAKRSQKRKPLYTWALQVQKRRGHNKAAVALANKIARIAWRVWRQDRDFWLERQAA

SEQ ID NO: 105060 - protein, 489 aa, unidentified
MNDKRRLVGIDLGIASAHTVRVLDGEGNTVAKRKAWPTVESLTDVENAALAGCGAGTRLEVIVEPTGPAWMPIAVFFSARGHVVHRVSSAKAHDLRRFLSRHTKTNGIDADTLARLPLFDPAGLQPLVLPGVERAALDRRVRATDRLTQAGAEHKRRIKDLVRQVLPMTPLTGDLGVADLAVLERFADPNTLVRLGLKRLTALIAKSSKGHLGVERARQWLDAAESSLELYAGHPAVAFVDLAAEVATEVRLLRAVQTELAAHATERERCYRWVDPTGLARSLPGVADIGGPALVAAIGDPARFKRGKQFRSFTGLVPKASETGDTDRKGQPMSKAGSSLLRTTLVRAADTARKQDPQLARVYYVQMVERGKDHLGALCVVAAHLAERFWAVMHRAMPYVICDTDGRPVEPDEAIAIIAEHWTVPAEARARRRSKKVGKAPQNVLAGQSKPHAPSAGTRGDLPQQASSPPRNGPVKHHRPDAGADDAVA

SEQ ID NO: 105061 - protein, 315 aa, unidentified
MTKQLLPVNAGVDVSKDKLDLYLLERDLALSVPNDEQSIASLLKRLARYHLERIVVEATGRLEHAFVSAAIAKGLPVVVVPPLKVRRFAEAAGQLAKTDAIDARLIARFAAALKPTTRPVTDANSKLIKDLVVRRRQLTSLRTTEKNRRGVMPEALKPSIDRIIASLDREIASLEQLIQDAVEQHAAWRHKRDLLTSMPGIGPSVASTLIGDLPELGSLSRRQIAALTGVAPFNRDSGTFRGKRRIRGGRAHSRTALFLSAMVAIRYNPDIKRFYERLLQTGKHKKVALTACIRKIVTALNAMLRDDKPWHSSFA

SEQ ID NO: 105062 - protein, 356 aa, unidentified
MSNYITIGMDLGNRKHAVCAIDAAAKVLWRRDVANTAEALEPFFKENAGATIAMETGLCCRWISALAKSCGCDVLVGNARKLAAIWQSKQKNDENDALMLAKLARADRELFSPVELRDDERHDMVQIIELREVAVSQRTQAVNSVRGLCKAQGVFIPKCDASCFHKVAAAAMPRDAAWKFKPMLRHIKETVAAIKRYDAMLEQYARRHFNDEVELLRTIPGVGAVTACAFVAHVANPRRFGKARDAGAYFGLTPAQDQSGDRDAPKRITKTGSSLVRHLLVLAANYILRESSADTALKRHGERICARGGKVARRKAKTAVARKLAVTMLAMLKSGKAYEDGLAAESPAAWSAKLVA

SEQ ID NO: 105063 - protein, 457 aa, unidentified
MNANNARFQSASKIRISLLLIVLQCPMKGGDFMKNNFLSTLFVGIDVSSKTNVLCALDFQGNKLLNLKALNNQPGAESILESILDCLNSNSLKFVVIALESTSFYSTHIANFLSSKEVLLAYSPMVYCLNPKTIANYRKSFVDMDKTDPLDAYIIADFARCGRIKSQPWRGAQFLALQRLTRHRLHLVEAIAREKTYMVSNIYLKFSQLAVLEKADRPFSNTYGATSEAVLTEFLSLEDIAYSSIEDLVDFIKDKGKNRFSNPVGTAALLQKAARDSYRLDKVLYEPLNIAIASSFNVIKALQIEIKEIDKAIDKNIKGINTTEYQSLISIPGIGPVFASGILAEIGSITSFSSNDALAKYAGLTWRIKESGDYSADDTNMTKTGNKYLRYYLIEAANSVRNNIPEFNVYYRKKFYEVPKHQHKRALALTSRKLVRLIFGLLTKNQIYSNSKVGEIQ

SEQ ID NO: 105064 - protein, 407 aa, unidentified
MEVIYPRCAGLDVHKQTVVACVRLANQGAPTQEVHTFTTTTSGLLSLVDWLDERGVEHVAMEATGVYWKPVWHVLEGHFQLILANAAHVKNVPGRKTDVNDATWLADLLAHGLIRASFVPPAAVQQLRTLTRTRKQFVRERASHVQRIEKILEDANLKLGVELSDLLGHSGRAVLQAIIDGHTDPEFLLTRISHRVKASRAELREALRGHITAHHRFMLKLHLDHIDALDRAIATIEQEVGAGLEPFRQAARLVSTMPGMSEVASEGVIAEIGIDMTRFATPAHLLSWACICPRNDESAGKRRSTRVRRGGKWLKTTLVQCAWAAVRVKGSYLQAQFHRLRARRGAKKAIIAVAASMLTAIWHMLRNGTQWRELGATYFDRADAKKTAARLIRRLQQIGYAVQVTPV

SEQ ID NO: 105065 - protein, 428 aa, unidentified
MDYTTQNKKIELITEDTIVIGVDIGSEMNFARAFDWRGREISKKVFKFSNTLGGFNFFDGWMTDMLQRAAKMQIIVGCEPTGHYWFPLAGHLKDRGILLVTVNPYHVKQTKELDDNSPTKTDLKDPKTIAKLVIGGNYGIPYIPEGIYADLREAVSSRDRINKELNASANRIQRWLKIYFPEYLDVYKNFDSTSGLMVLEQAPLPEDVIALGIEGVVKIWRAAKMRAVGKKRATTLVESAHNSIGIKGGNCARLELQMLLEDYKTKKRQMEMIEEVLTKETMKVPNVEKLLAIKGIGIITVAGFIAEVGDIRRFDSPKQIQKLAGFELKRNSSGKHKGQTTISKRGRRRLRRILYQVVLPMLKSNPEFREVYEYYTNRVKNPLKGKQAVIAVSCKLIRVFYTLLSNGVEYDAARLRADIIRPIMLKAA

SEQ ID NO: 105066 - protein, 359 aa, unidentified
MSLVIGVDPHKQTHTAVAVRSGSGELVDERTAAARPAGYRELLAWAQTAGESRLWALEDVRSVSRGLERFLLSRGERVVRVPPKLMAGARKNARGFGKSDPIDALAIARAALSHSDLSVAVQDDDARDLRLLLDHREILVRQRSEAQDRLRWLLHAIDPDLQIPAGALDRKVWLERVARRLARTDQVAQVRIARDLVRRCRALTRDANDLEREIALLVASYAPQLLELKGCGALIAAKIIGETAGIARFASDAQFACLAGGAPIEASSGQQRRHRLSRHGNRQLNSALHKIAIVQGRWDPRARAYLERRQKEGKSRREALRALKRHLARVVFRLLRAGPGDLPQQVKVRAGKVRVPVLA

SEQ ID NO: 105067 - protein, 400 aa, unidentified
MLSIGIDVSKGKSTVCGMKPGGEIVYTPFEVQHTREGMSELVSLLHNSGEEVRAVLESTGSYHCPVVAALLENGIFVSVINSLRMKRFCSQSIRKVKTDRIDAMQIALYGLAYWQELQPTRLPEDTYRELQRLARQYYQMTSMLIKAKVDFNALCDQVLPGMQELMSDHAGRHKLSDFVLRYHHTTHILEMGETRFRKDYCKWAEKKGYRNCERMAAHIFATAQNGIPVLPNAPSTQIVITEAIRVLHTVEASRDAILTQMQALAKTLPEYSLVREMPCIGDTLAPRLIAEIGDVRRFHSKRALIAYAGIDAPPYQSGKFRANNRHISKRGNRYLRKTGYEVMQSYVMHKPANDPIFTFIEKKRGEGKSGKLAMVAGLNKFLRVYYGKVTELYRSLPAIE

SEQ ID NO: 105068 - protein, 341 aa, unidentified
MERYFAGLDVSKDETAICIRDQDGRSVLTTKKATDAEAIAGALSASGLPIVTVVMETGRMANWLYHELARRGVPIVCVDARQAHAVLSQMHNKTDANDAAMLADLARTGFYRKVIVKSQDAQERRALLRAREVAIKTRMNVENTIRGLLASFGVVLPRHLRTFEQRTTDAVARAPMLTDIVLPLLRIRTEALRQVAQLSKAMLRHTREDEACRRLMSIPGVGAVSAVTFVATIDNPARFRRSRSVGAYAGLTSRRFQSGEMDYGGRISRRGDQMLRTVLYEAANSLLCRAKAVSGQGLKDWATALKKRTSHKKAVVALARKLAVIMHAIWRDGTTFKLQEA

SEQ ID NO: 105069 - protein, 396 aa, unidentified
MYYLGIDIAKTNHVASLIDNEGNICVRAIKFTNSKEGFSKLLENVSSITTDLSEIAVSMEATGSYWLSLYSALLDKEFNVSVFNPYQIKSYRGAYNNRKQKNDIIDSIIIADYLRVFGCSTTTLPKEDLLSLKQLTRFRVNIVDNVASLKTQVIGILDKVFPEYSKAFTDVFCNTSKQILLNCPTPDDILKISSTKLLNLISKHSKGRLNSSKVTTLKSLAKGSFGVKFTNDACSFEIKQIINQIIFLEKQIEELDFKIKSIYEKLDSHLLSIPGIGNRLAPVILAEIGDINTFDKPSKLTAFAGIDPSENQSGNKRSSNEKTSKRGSPYLRHAIYTASLVAMSNDKTLRAYYDKKISEGKHHFVAMAGISRKLLHIVFYVLKENRDYVSYDEKRS

SEQ ID NO: 105070 - protein, 427 aa, unidentified
MSYRIAGIDVHKRMIVVVVADVDVAGDYEFERRQYGSSPAQLRLLAAWLVEQGVEEVVMESTAQYWKPVWASLERYWKPICEKWEGTSPMSGSLHLAQAQSNRGARGRKNDFADAERLVRRLVAEELTLSFVPDAEQRLWRTVMRTRYQLRCNQVQLQNRLEALLEEAHLKLSSLVSDLLGLSGRRMLQAVAEGETDPAVVAARADCRLRATQEQLCDALGAYQELHPVYRRLLKTALEEWERIEAQIAQLGQEMASLIGPQQEQVQRLAEVPGLGVDSGQQILAEVGASAATFPSGRALASWVGACPGEEETAGVNRNRRSPKGNRHLRRILNQAAHAAVKLKGSIFALLYRRYVVRFGHNQTIAVIAHRLCRLIWKILHEGVRYEERGPAVSQRAKQRRTARMIRQLRSLGYSVELLHAAAGVPA

SEQ ID NO: 105071 - protein, 429 aa, unidentified
MATAVGCCTGDGRAELDVIVERCAGLDVHKKTVMACVRKPKDGKRVSVRREFSTFTHGLHQLRDWLASEGVTQVAMEATGIYWRPVWYVLEEMAGVELLLANAQHVKNLPGRKTDAKDAEWLAQLLECGLLRGSFIPTPVMQRLRDLTRYRNKLTQDRAREVQRIQKVLEDAGIKLDSVISDVLGKSSRQMLEALIAGERDPEVLAELSKARMRAKIPDLRLALVGRFGEHHALMARMHLDHIDHLDEMIDRLDQEVAREMAPFAEAAGRVVSVPGLGQHTTQAILAEIGIDMSRFPTAAHLASWAGMCPGNHESAGKSRSGRPRKGNAALRAVLCEAAWAASHTKDTYLAAQYQRFLRRFGKKGQKKAIFALAHTILVIVWNILSDGGTYEELGYDYFERRIDTEEKKRRLIRQLESLGVHVTVEPAA

SEQ ID NO: 105072 - protein, 411 aa, unidentified
MEDAMDVIVERCCGLDVHKASVSACFVRGRESEIRTFSTTTKALLELSDWLSEGGCTDVAMEATGVYWKPIYNILEDQFKVLLVNAQHIKTVPGRKTDVKDCQWIAKLLQHGLLKPSYVPSAQFRDLRDLTRSRTKLVQMRTGVANRISKQLEDANIKLGSVASNILGKSCRAMLESIVFGNTDAEQLAEMSLKRMRNKIPELIDALEGRVTDHHRFMLERLLNEVDYLDSEIELFSRRIDERMTPFRDELERMDTANGVDKRVAEIVLAEIGVDMNQFPDERHLCSWAAICPGNNQSGGKNKSGKTRKGNNWLKSALVQAAWAATRKRGTYLSAMYHRIARRRGKKWAIIAVAHEILVSIYHILKDGCTYNELGADHYDKINPDMIKRQMVRRLTSMGYSVTLEPIESAA

SEQ ID NO: 105073 - protein, 318 aa, unidentified
MAGTQGVYAGIDVCQERLDLGVWPGEAAESFSYDAAGMEALRRRLAQERVELVVMEATGGLEVRVAAELAGAGLAVAVVNPRQVRDFARSLGKLAKNDRIDALVLARFGAGTRPVPRTLPDEHQRLLGDLVMRRRQLVEMRTAELNRLSRATARALLRSHREVLKALERERGDVDRQMGDHIKQSPLWRARDELYRSVPGVGEGTSRMLVAELPELGMLSRTQVAALVGVAPFDDDSGQRRGKRSIRGGRSEVRAVLYMATLSASRFNPAIRAMYQRLRERGKCFKVAMVACMRKLLIILNTIAARGTPWHDAPPKTA

SEQ ID NO: 105074 - protein, 331 aa, unidentified
MEFKIYVGIDVSKLTLDVFIREKLSHKKFKNDKNGFESLLRWLEKQTATAFESILICFEHTGLYSLPLAVYLEENDIPYSMISALAIKRSLGITRGKNDYIDSRRIADFSYRYKDKISLTRLPAQDIAKLQSLLTLRGRLSVTLGRFTVSKNEAAKFMGRDGTEELFLVYDNMISTIKEQIKNLERSIKEVIGNNEKLKLSYELVTSVKGVGLIVACYLISYTHNFTRFSTWRKFACYSGIAPFDHQSGTSVKGRTQVSSIANKEMKRILHLAAICAIHTDAEMTEYYSRRQNEGKHKMTIINIVRNKIVSRVFAIVKRGTPFVDLKKYAS

SEQ ID NO: 105075 - protein, 415 aa, unidentified
MNRIYDKCCGIDVHKKLLVACLLCGRKQTIREFGTTTSEILDLAEWLSQSACEIVAMESTASYWKPLFNILESSNLKAIVVNAKHMKAVPGRKTDVKDAEWIADLLAHGLLQPSFIPDRDQRELRELVSYRKSLTQDKNRELNRLQKMLEGANIKLSNVIADMSSNSARYLLKEIMADKKITCAHVDRLKDENIIHHRIKATSEEIAEACRGYLSPVQKRMLSELLAHIDELDAHIRNLDDDIDRHMKDDEHKAVDAIKDVTGLGENSAKIIVSVIGTDMERFPTDSHLASWAGLCPGNNESAKKRRSGKTTKGNKLLRSTLIVCAHSAAKVKNSYFYAQFKRISTRRGSKRAYVAVAHSMLIAVYHILKDGVAFKDLGADYYNQFNREKKIASYLKKLNVLGWEIPEATAVIPA

SEQ ID NO: 105076 - protein, 348 aa, unidentified
MLADELDYVVGVDPHRDSHALALVHVVSGAVVFEAIVAADGHGYADALKLVDQHAAGRRAFAVEGSGSFGAGLTRYLTARGERVHEVGRLRRERRSGGKTDALDAIRAARSVLAQDRPATPRASGEREALRALAAAREGAVNAKRAGLCQLQDLLVTTPEPLRSELRPLRRARLLRRLAATRPERRDDPELRGTLLALRSVARRVLQLTAEERELAGEIESITRKLAPHLLEQPGVGPLAAAQLVLSWSHPGRISSEAAFARLAGCAPIPASSGHTIRYRLDRSGDRRLNRALHMILVTRRRTHAPTIAYIERRIQEGKSRREATRCLKRYLARNLFRLLEHGAPLAA

SEQ ID NO: 105077 - protein, 354 aa, unidentified
MHRFIGMDTHSQTCTLRALTSTGKEVTRQVVETNGAALVQAVRSIPGTKHLCIEEGTQSAWIYELLKNEVDELVVTMPSRRAGQKDDARDALQLAQVLRTGAITQRVYKASGPYSELRAAVRSYRILREDVTRAKNRLKALYRSRGIAAPGDKPFQLDKHLQCEKLLPLPQQQSAALLYSQVESLTALWGSAQKRLLMASKPHKVVKILATAPAIGPIRAAQIVATVVTPHRFRTSRQFWAYCGLAIAMRSSSDWVRDRQGQWVRSHKYQTLGLNRNRQPTLKEVFKGAAHQVATQMTSHPLHADYQRLLDAGTKPNLAQLTIARRIAAAVLAMWKKEEVYDPDKHRSRTTAPA

SEQ ID NO: 105078 - protein, 451 aa, unidentified
MKDLSMRIINARSAGIDVGSRFHVVAVDQRSENVRQFGVYSEDQQAMIKWLKLHQIQTIAMESTGNYWQTLFDALQRAGFEVQLVNGNQTKNVKGKKTDVLDCLWIQKLHSLGLLNGSFLPAAEIQSLRTYHRHRIHLIEQCSRYINKMQKAMRLMNIRLDVVLNDVMGQSGRLIIEAILAGERDSDKLASLANYRVKKSRGEIAKALIGNWRNDLLFELRRCLTLHDVYCQEIKECDHQLETAIKNLLPHSTTTTDFKYAKATKQRNKYMPEFDIERFSWQYYGVNLMEIQGVGNGTILSFLTQIGDRINQFPSSKHFCSWLRLAPNNKITGGKVISSRTPKGKNPLSLALRQAANAIGNQKEGELVNFFKRVAYRKDRASAITATARKLAVIIYNMVTKRENYKPSSPVPLSDKVKNKIIKNIRTRVEALELTKEQLNFLFQATSFSTA

SEQ ID NO: 105079 - protein, 318 aa, unidentified
MDKEFVGVDVSKDTLDVATYSSGQKWHFLNSEAGINQVIQAFNGLIPALVVMEATGGYETPVAYALHRAGIPCAIVNPREVRDFAKATKKLAKTDTIDARVLAHFASAIKPEPRPLSDEQTQELEAILTRRRQVIKMITAERNRLHMARKPVMEAIKAHIDYLEKELNRIDTDLRGRIEESPVQREKYELLQSAPGVGPNLSATLLIELPELGNLNRRQIAALAGVAPLNHDSGTMRGKRSPWGGRPQVRAALYMAALVAARFNPVISQFYTRLCAMGKAKKVALVACMRKLLTILNSMLKHHVPWHFSQPILVLSGH

SEQ ID NO: 105080 - protein, 317 aa, unidentified
MSPNTTNTMTETNSVVHAGLDIAKAQLQLHLENQQHVLPTGHQRLIRLLRVVAGVHVVCEATGGYERKVVSALHSVNLRVSVVNPAQVRHFALAQGQRAKNDPIDAALLTAYGHALRPNATPVPQPVLAELRELVQWRDHLKEQLVRARQPAEHATLAFVRRQQSKEATHLETQMAAVEKELAAALARHPRWREQVQRLAELDGVGTLTAVSVLSQMPELGHLNRGQAAALAGLAPWTRQSGPWEGQRHIGGGRAVVRRALYMSAVALARQTGSTLGKFYARLRAAGKPAKVALTAVMRKLLLQMNQVLKYHVPDPA

SEQ ID NO: 105081 - protein, 397 aa, unidentified
MMGHERSVTSLGCNRAQTSINARLGEPQMFYLGIDQHAKQLTISLRDESGSVRQARQVSTEPVRIANFLHELLLTCGTNGYYAIVEVCGFNDWLLELLPKHGCSRVFLIQPEKKRKIKTDRRDAKSLSELLWVNQERLRRGHPLNGVKQIVFPSAIDVENQRITLIRQRIGRQNTRTINQIKHILRRHNLQWEIPTKTFPSKSAITWLKHLTLPSWDRKELNWLLEELKSINGRLAELECEIATRCASDPRVQLLKTIPGVASFSALAFACRIGDVTRFTSGRGLANYWGLTPLVNDSGESTGRRGRITKAGSTVARWLLGQVVLHVLRKDTKMKAWYKTIRVRRGSKIARVAVMRRLSVVIRNMLANNQDYWTCRTQMLERRAKQIQKKNTSKPAA

SEQ ID NO: 105082 - protein, 346 aa, unidentified
MQYTAFDVHKHYTWARVEQADGKVVREKRILHEPGAFRRFLTGVEPGSSIAMETVGNWYWIADEIEAAGCQPQLVHAYRAKLMAGRVNKSDRLDAQGLVQLQRAGTLPTVWIPPRDIRDMRELPRTRMVLVAQRTRLKNRIHATFSKYGIPLPEVSDLFGKRGRTELRARLGSLPPHTEFVTARLLAQIEQLTQEIVAVEQRMADLFEVDEAIRLLMTLPGVGFILASVLRTEIGDISRFDRGEHLASYAGTVPRIHASGSHRYYGPLRADVNQYLKWALVEAANGAARQRRTHPRRHTSRLYERVAKRKGHKTAIGAVARHLAEATYWMLTKGEPYRDPGSSRGA

SEQ ID NO: 105083 - protein, 320 aa, unidentified
MNSFLGIDVGKSDFHATLLVDERTWSKSFPNAKAGLTQLASWLKNRKVERVHACLESTGGFEEALALDLHERGHVVSVVNPSRIKAFAQSELLRTKTDAVDAALIARFCRAHRPEAWVPPAPEIRALQALVRRHTGLQDMLFTENNRLGAARVDSAVERSLREHIAYLESELQRVVDEINDLINRHPPLREQRNLITTIPGIADLTAARILGEMPNISEYRSARAVAAFAGLSPREHQSGTLRGRTRLAKTGNSRLRKMLYFPAMSATRFNPILKALYERLVAAGKPKRVALAAVMRKLLILAYGVLKSNQPFNPAYAHA

SEQ ID NO: 105084 - protein, 321 aa, unidentified
MAMSATPIEAGVDTAKDELVIQSAPSTKPFAIPNTPKAIKTWLKTLPKGSALAIEATSTYHMEMAEQAHAAGFAVYVIDGLRLSKYRESVAVRAKTDAHDAALLARFLSNERGSLKAWVPPPAGHREIQMLLRRRAKLVAVRGMLRMSLSGDTMFASALKSLEETVKRVELLLEKQLRRVIKTAGLSDQLRRVQKLPGVGFLTAAGLVMSFMRGEFKNSDAFVAYLGMDVTVAQSGKWAGRGRLSKRGDSEVRRLLYNASMSGSRTKTWSQFYAHHQARGKKTTQALVILARRLARLAFGLMRHQADWKPEIYTGGAKPAS

SEQ ID NO: 105085 - protein, 404 aa, unidentified
MHHDQIDVTGGVDTHADEHVAAVVDAVGRILGTASFPATAAGHRRLLGWLCRHGRLVRVGIEGTGSYGAGLTRFLAGERVEVVEVNRPNRQTRRRRGKSDTVDAEAAARAALNGEATAAPKAGDGPVEAVRMLRLARRSALKARTQAANQIRDLIVNAPDGLRSRLRDLDTTHRVAVCARFRCGSVTDTSAATKTALRSLARRHLELTAEIETLDNHLRQLCIAVNPALLGAHGVGPEVAATLLVTAGDNPHRMRSEAAFAALCGASPVQASSGKTTRHRLNQGGDRQANNALWRIVMVRLTCCERTKTYATQRRAEGKTRREIIRCLKRYVAREIYQLLTHPPTVPVGADLRARRTTAKRSLADVAEALGSWPIVISRLERGLDHDTALATRYHHWLTTRPAA

SEQ ID NO: 105086 - protein, 347 aa, unidentified
MNFYNSTHRHYCGIDLHARSLYVCILDQQGDTLLHKEIPAKPEPLLHLIEPYLDDLVIGAECMHCWYWIADFCEDQGIAFILGHALYMKAIHGGKTKNDRVDSYKIAALIRGGNFPLAYVYPRSMRATRDLLRRRTGLVRHGADLKAHVVNTTSQYNLPPNKVNLKNVSAREQLGRTFDDPLVQRNIDLDMAVLECYHRELSQVEWLLEKQAKKHQPTYYHLLTTIPGVGRILALTILYEVGDIRRFESVQKFASYSRLIKYKAESAGKTYGTQGNKIGNAHLKWAFSEAAVLYLRGNPGAQKLLQHFQKRMSKAKALSALAHKLGRAVYFMLKNEKVFDEQRFLTS

SEQ ID NO: 105087 - protein, 412 aa, unidentified
MQDILTCVMGLDVHRDIIVACLAKGELGTDPEIEIRSFSTLIPEMQKLRDWVLEADCHHVAMESTGIYWQPIYEMLELCFDGQINILVVNARHMKNVPGRKTDMRDAQWIATLLRAGLLKGSFIPDKTFRELRHLTRYRKSIVHDITAQKNRIDKFLQSSGFRFAAFLSDTFGASGRNIIRHLMEYGSISREALDKCLKTQTRKRIDEILIALNGSLSEHQRGFLRMIFEHLEALEQHRHSVENAIAEEITKHEKALSLLCSIPGIDVTAAAAIIAEIGTDMSAFPDSQHICSWAGLSPGNNESAGKRKSAHINKGNPYLKSMLCEVGWVISGKRTLYLSGWYWRIKQRKGAKRATIALARKLLALIYTMLKVGTPYNEECFETCRKQSEHKRASRMVNELQKLGYFVVAPD

SEQ ID NO: 105088 - protein, 400 aa, unidentified
MSGSRSPFQGFVGIDVSKDKFDACGIGEDGTKLFQFSAAMDRNGFEKLKSHLSSVPMGSVLIGMESTASYHVNLFSYLISEGYAAVVLNPLLISNYVKMQLRKTKTDKKDAWVIAQFLLANRISLIRRATSPLISDLRELARQRESLVDQMTSLKNDIKRILNITFPELEHMAGIFTKSILKLLQRYPSAYALQEADPDHLTRMLIKDSYGRKRGAFAEALLKAARSSIGTPSPMKDVILKQKVSLHFHLEEALQEITEMLLQTSRGMMGDDMDILNSIKGIGEKSAASFLIEMGGDIQQFDDPNKIIAMAGIDPAVRQSGKHEGSSRITKRGNRHLRRIIWLMTTQVIHFCDVFRVYYRKRRKEGLPYKKAVLATSHKLIRVIYAMLTQRTVFCQAVNS

SEQ ID NO: 105089 - protein, 352 aa, unidentified
MEKSNKLDFGGQHIYVGMDIHKKNWSVSIHTEQFEHKTFTQPPEVEKLTYYLQRTFPGATYHTVYEAGFSGFWLHDKLREKGIDCLVVNPADVPTKDKERAGKTDRVDCRKLARGLRNGEIKGIYVPPRVKVEDRTLVRTRQSMVRKQTRCKNQITSILFFYGIVIPEDGRWSRRFINWIESIRMERTSGDFALKAHLEELKHLRQIIANLNRAILSLSRTEEYRSDVLLLKSVPGISTLTAMILLTELADLSRFSSLDKLASYAGLVPDIRSSGETEYSTGITFRRNAALRALLIESSWIAVRKDPALTMAFNKLSTRMKKTKAVVHIARKLLNRIRFVLKNRQEYVPAIV

SEQ ID NO: 105090 - protein, 429 aa, unidentified
MNNVDNIRLEQYRQIKKEIRGSKEYLIAGIDVAKSKHYAFWGDAMGKTILKRLIFENNLEGFNKLRAYEDSLKTRYGFQKMVYGLEATGNYHKPLGEHLIKCARNVVLVPGIAVKNNRKAMYGRWDKNDTKDAAVIADLVSQGKFAFYEYATMPLRDLRNLLSLKKRLKKQEHSHKVRIRNSLLAQYFPELDKYYGTWGKEGLAIVRWCLDPSIIIGLEYDEFVRRVAPNGRSGIAQQKRLKAIWKTAVESIGCSVGESIDVEAKLMVEGLQYTRESIKYVEEKIKEICLEMPEYEYLLSIPGFGPDISSKVVAAIGHPFRFNNGRQVLKMAGMDLSASRSGDNSDDATPKLSKSGKAALRYALYQAAMIASTKDVHFMRYYTEKLRGREKEKGIKTKMRVKLAAKMLIIAWTLMKKHEYFNPGYLRVE

SEQ ID NO: 105091 - protein, 363 aa, unidentified
MLKTPDRVVIAVDPHKASWTAAAVNASLQPLDIIRVPVSRDGYRALRRFARRWPDPTWAIEGASGLGAPLTARLRADGADVVDVPAKLAARVRMLSTGHGRKNDDADAVSVGIAALSARTLNTAAVHATVTALRAVVEHRDDLVKTRTQTINRLHVLLTHLVPAGARRELTADQAAELLRGVRPHDAAGKALRRLAADLVAEIRQLDRYIAKAAANIQTAVSASGTTLTELSGIGTLTAGKILGRVGTIKRFRSAAAFATYTGTAPIDVSSGDVIRHRLSRAGDRQLNLCLHVMALTQIRQDTPGRAYYQRKRAAGKSHKEAMRCLKRRLSDVVYRQLVRDETRLEAGPGGHSGAALLSSAAS

SEQ ID NO: 105092 - protein, 342 aa, unidentified
MDDEVSIIGLDLAKNVFQVHGAGQDGRMILRKKLNRSRLLEFFAKLPRCVVAMEACASAHYWGREIGKFGHEVRLIHPSYVKPFVKRQKNDAADAEAIAEAASRPTMRFVGVKSAEKQASSMAFKVRDLLVRQRTQAINALRGHLAEYGLIVAQGVRHIPRLHELLTIYPDLPDLARGLCQNLLKHVESLSEQIAELEKGLRVRARQDEVASRLMTIPGIGAICATAIEALAPSAETFSKGRDFAAWIGLTPKQNSSGGKDRLGKISRMGRRDLRRLLVLGATAVVRWARRYGPPAGSWLARMLLKKPPKLIAVALANKLARIAWALMVRGGAYQAPASGAA

SEQ ID NO: 105093 - protein, 347 aa, unidentified
MDVHKETISIAVMNSAGKVLMESIIETKASTILQFFSGLEGDLRVTFEEGTWAAWLYDLLKPHIRHIVVCNPRKNALLKEGNKSDRIDARKLADLLRLNYLKPVYHGENGIRMLKELSRTYLTINRDLVRVMNRLKALYRGWGIPCGGKSVYSPRNREDWLNKIKETGVRRRAEHYYQQLDALQQLRREVRRDLLQESRKHSAAKILRGIPAIGPIRSALLVALIQTPNRFRTKRQLWAYSGLALETHDSAQYRCLDGQIIHSQKPQQVRGLNHNHNHDLKSIFKGAAQNATAGSGPFRDFYERSLQKGTKPSMARLTLARKIAAITLTLWKKGARFDPEQLKSQAA

SEQ ID NO: 105094 - protein, 328 aa, unidentified
MRDQYIGIDLHKAFFQACAVTPSGDRLWEGRFPRTGAGMEALTARCTTRTALAVEASTPTWHFADALVGAVGDLRIVDPLKTKLKAGYAAKTDRLDARRLADALRRDSVVGIYYPPLAIREVRELCRARHALVQVRTALINRLRAVLLRQGVADARRLAKTRDDSWLAALSLPPQAAASVARLRQVLAVVRTEAAQAEAEVRRASDGDPIAITLQQLRGIGPVLALTIRAEIADIRRFPTAGHLASYAGLVPRVDASAGRIRYGRITRRGSPWLRWALIEAAMHGTTRSDRIGRWGRGLAVRKGALKARVALARVLCEEIHRLWSAVI

SEQ ID NO: 105095 - protein, 397 aa, unidentified
MSKKLFVGIDVSKDSFSATGLDVNGDVRFSMSAPMDKRGFSELMKAITSHCKDLSAVMAGMESTGCYHINLFSFLSDKGINTIVINPLLISNFAKLSLRKTKTDKKDALTIARFIFIHRDSIEQFSISQDTKDIRAIAREREYISNLIASTKNEIKRILQITFPELESLCNIFTETMLQFLKEFPSARFIRTTNSKVVAEALERCGRGRKVSISADEIIRAARSSIASNSLAHELILPQKISMLLHLMEQLDKLSSILSDICKSITIEEMEIITSIDGIGETTASAFLGEIGNVNNFPSHKSLIAYAGIDPTIFQSGKFEGTSRISKRGNRHLRRIIYLMTIGVIRCNAFFKDYFLKRKQDGLPFRKAVLATAHKLVRTIFAMLSHKSFFCVKENSL

SEQ ID NO: 105096 - protein, 353 aa, unidentified
MKVTTIGIDLAKNVIQVHGIDERGKVVLRRQLRRGQVMDFFALRTSCLVGMEACGSAHAWARRLMKLGYTVKLMAPQFVKPYVKTNKNDAADAEAICEAVTRPNMRFVPVKSEEQQAVLSLHRARQGFVRQRTAQANQIRGLLAEFGIVIPQGIRHIARHLPEILEDAENTLPGAFRQLLRQLGEHLKTLDELVRAMEVQIQQWHGTNEASQRVSAVAGVGALTASAMVASVGDARNFSSGRQLAAWLGLVPRQHSTGGKSKLLGISKRGDCYLRTLLIHGARSVIAAAGRRRQSTVGQPAVQQRADRWLEALIARRNRNIAAVALANKNARVIWALLAHGDHYQAFHPLVAA

SEQ ID NO: 105097 - protein, 316 aa, unidentified
MENPQPFVGIDLSSQRLDVDMVPVSQSFSEPNNEDGIASLVGRLKPLNPQIVLLEATGGYEIAVAYALYEAGLPVVISNPKAVRYFAKALGRLAKTDKLDAQVLALYAQKVNPPVQPLRDQEQLELANLMTRRRQLQGMIVMEENRRRTCTPRVRSNIDLSLAHLRQLLKDLDRDIHDAIRRTPLWHENSEILQSFTGVGPKVSASLIANLPELGLLPGNKASALAGLAPMNQDSGKHRGKRMIKGGRPAVRQALYMAALVASRYNPVIKEFYQRLRLAGKPPKVALTACMRKLLVILNAMLKNRTYWNPQLTLAA

SEQ ID NO: 105098 - protein, 422 aa, unidentified
MNYKQNEKINQVKESTLVVGIDIGSTTQYARAFDWRGIELGKVFTFSNSREGFEAFKAWMQHLQDKYRKSDVIVGIEPTGHYWFDLGAYLEDEGILLVMVNPYAVKQTKELDDNSQSKNDRKDPKVIAKLVTEGRYSAPYTPDGVYADLRIMVANRKRLIREMTQIKNRFARWFAIYFPEYTDVFGDYEAQSSMLLLKKVCTPEAIVELGAEKINQIWRDAKLRAVGMKRATTLCETAKRSIGLKKGSSAARYEMKLLLEDYEYKKAQLDAVMEEIEKLCRKIPESEQMLAIKGIGVITVAGFLAEVGDVRRFESPRQIQKLAGLSLRENSSGKHKGQTTISKRGRSKLRAVLFNAAIPLIAKSPEFKSLHEYYTTRANNPLKKKQSVIAISCKLIRVFYAILANGVTYDAQKMLSDIHRQP

SEQ ID NO: 105099 - protein, 348 aa, unidentified
MAMVGGLDLHRQQITFDVVDVETRDVWRGRLWQPDRHRFRRWLREELTPRAGTGMVKLAVEGCTGWRYVVEEICAAGFDAYLAEPADTQAARGRKRHAKTDRSDARLLRELLVASELPESWIPPTPVLEWRERVRLYKSLVDQRTQWVQRIHAELYQHGVAVPEGAIRSDKTRELLAGDTVELSSAGRQRINAGYRMIEATDAEAQPLKHELQRFGQRQPACRALIDAHYGIGGLIAVAVWSELGDCRRFSRSLQVVRHTGLDVTVDASDRRRAHGFLSRQGPETLRWALYEAAKNASHQRSPDHHYYATVKQRHDGKLAAISMARKLARRCYHTLRNLDPEHVYAMP

SEQ ID NO: 105100 - protein, 337 aa, unidentified
MNYSGIDLHSNNSVIVVSDETDRVLCKRRVANDLRVVLSTLEPYRQELAAVAVESTFNWYWLVDGLQAAGYTVRLANTAAMKRYEGLKYSDDDTDAAYLAHLLRLGILPTGYICPIEERGVRDLARKRLQLSRSRTQHILAVESNVARQTGARIASRVVKQLTEQTVQELGLSEEVRWALAANVAVIQTLNAQIKKLEEHLGTRVRPRAEFKLLTTVPGIGEILATTIMLETASIERFARVGNFASYARCVDSKRLSNGKKKGRGNVKNGNQYLAWAFVEAAHFARRYCPEAKRFYERKQSRTNPIVARMALAHKLARACYHMLKENQPFDVKRCFA

SEQ ID NO: 105101 - protein, 338 aa, unidentified
MKSWSVAILSEYSALKRFSQSPEPEALHKYLVSNYPGANYFSVYEAGFCGFWIHEKLTGLGITNIVVHPADVPTMSKEKLRKTDAVDCNKLARELRSGSLEGIYVPKADVLEIRSLIRTRNMIVKDSTRTKNRIKSLLRFHGVDIPEEFTRSSIGRWSKRFLAWLHSIELSTEYGKKTLELHLEQFVRLRNMLLQETRAIREISRKAPFEKPMRLLTSVPGIGVTTAATLMVELDDIVRFKNADHLASFIGLVPMCHSSGESNGTGDITVRRHFMLRCLLVEAAWIAIRKDPAMTVAYTEYRRRMNPQKSIIKIARRLVNRIYYVLKHEKEYIPCVVE

SEQ ID NO: 105102 - protein, 327 aa, unidentified
MDNPTYIGLDIGKYAVSCAVPGRRVRDFNNDRPGIRCLLQWCGLTSPPAKLFFVMEATGGYCLFTASTLLDLADTRVAIVPPVCIASFIKAGIKRTKTDRADAEAIRRFGEVHHPAPWFPRLKQQQRLRDLLLVFDAAKRTVVRLKCLKEKLATALQPDPFTLASLQRQLDSALAEQRLVAAEMDAVVSADEVLSTDSANMLSIPGVGPGVRNVLLALIGEQLHALSQRKLLAYCGLSPQENQSGKFKGRTMLNKAGDPRIRQILYMAALRAVSPRGILHDYFQRLKRGGKHGKSALVHVMRKLLYLIQALVKSGKPFDRAMYLNPA

SEQ ID NO: 105103 - protein, 355 aa, unidentified
MNSEKYIGLDVHQATIVVAVTDSTGKLVMESIVETEAATILQFFAGLRGNLSVTFEEGTWSAWLYDLLNPHVEKLVVCNPRKNALLKDGNKNDRIDARKLAELLRGNQLKPVYHGENGVRMLRELSRSYLTIVKDLSRVMNRLKAVYRSWAIPCVGRDVYYRRHRAQWLDKIREAGVRRRAERLYEQLDMLQHLRQQARRELLAESRKHAITARLRQIPYLGPIRSALAVALIQTPYRFRSKRQLWAYSGLALETRISAEYRMVEGQVRRSKKLLCVRGLNKDHNHDLKGLFKGAATMASVRPGPFQDFYQAALAKGIKPTMARLTLARKIAAITLTLWKKGESFDAEKLKSQAA

SEQ ID NO: 105104 - protein, 441 aa, unidentified
MHFRDAEEPVAEPDWAAFIAVDWADQKHDWAMEVPGGNIRERGQVAHAPEALDAWVTQLRQRFGDRPIAVALEQSRGALLFTLSKYANLVLYPLHPRTTSCFREAMYPSGSKSDPLDADIQLDLLVKHRDRLQVWKPDTEETRLLQFLVEDRRRRVDQKTGLLNQLTGRLKLYFPQILRWFPSADSALAWRFLERWPDLQSAQKVSRQKLKAFLTRDARSCPADVDQFINRIREAMPATQDRAVVSSSTVFVQGLVCELQLLRATIQKYEKQIEAIVQQHPDFPIVSSFPGIGKALAPRLIAALGTQRERFPDAGSIQSYSGIAPVREASGKREWVHVRWACPKFVKQTFQEWAQHSMTRCAWARRHYDAQRARGKGHQTAVRSLAFKWIRVLFRCWKDRTPYDENRYTKSLGRRSATPNTDVRIMWKNVGGFSKPAAFSD

SEQ ID NO: 105105 - protein, 360 aa, unidentified
MIVQGTSVGLDVHALSVVAHAVDEETGEIARARLCPDHGEILYWLSQLRAPLRVVYEAGPTGFGLARALDDAGVECVVAAPSKLHRPSGDRVKTDARDAAHLARLLRLGEITAVRVPDREVEAVRDLVRAREDARADLMRVRHRLSKLLLRQGIVYFGGTSWTFAHEQWLRRQRFDNIHLKAAFDHGFDAVLAATAARDRLDEQILEVAASPRFADPVNRLGCLRGISALTGLALTVEIGDWSRFSGSSIGAYVGLVPSEYSSGNSRAQGSITKAGNTHVRRLLIESAWHHRKSYSTSGPTLRARWAKVDPALRARGHAANRRLNKRWRSFTERGKNPLVANVAIARELAGWCWSLATMQ

SEQ ID NO: 105106 - protein, 403 aa, unidentified
MNSVGIDISKGRSTVAVMRPFGEVVISPFEVRHTDSELSELARQLKSLDGETRVVMEATGNYHAPVAKLLHDAGLYVSVVNAKLVHVYGNNDLRRVKTDRKDAVKLANYGLDRWLTLPRYVPEEDTRLLLKNCYRQYRQYSKVQTVLKNNLISLLDTVFPNVNRLFSSPIRGDGSEKWVDFVAEFWHCRCVSEKSQKAFTSKYQRWCRKHGYNFSEEKAHTIHAEASGYIGVMPKSETTKLLVEQAVAQLRATSAALTALKHEMLALAAQLPEYPVVMGMFGVGPTLGPQLIAEIGDVRRFYSKKALVAYAGLDAPPNDSGDVTGKHKSMSKIGASSLRRTLFLVMSVYLQNAPLDEPIFRFMDKKRAEGKPYRVYMMASANKFLRIYYATVKAYLESLEHTA

SEQ ID NO: 105107 - protein, 390 aa, unidentified
MTSSHPIDTPAAGEKDATLYVAFELSKSKWLIGLVVSGESKMSRHEVVGGDTASVWQLISKKRVHAEKQGRRVRVVSCYEAGYDGFWFDRWLAGQGVANRVLDPSSIEMPRRARQAKTDRLDLERLMRVLIRHEGGEPRVCSVVHPPTPEQEDARRVSRERDRLIGERTAHVNRIKGLLHGQGIRDVHPRRKGFLEQLAELRTGDGRAVPANLAAEIRREHARLVQVGEQIAEVESQMKAERAAAAPDSRASQVNQLIGLRSVGPVGGETLVNEVFWRDFRNRRQVGGYFGLAGTPFDSGQSSREQGISKAGNARARTLAIELSWLWLRYQPASTLSQWFTSRVGDQKGRVRRVAIVALARKLMVALWRFLTQGLVPEGARLRAAAPAGR

SEQ ID NO: 105108 - protein, 388 aa, unidentified
MFFLGIDIGKNTHVASLLDEKAKIIFKAYSFANTLDAAEALLVKLEPYKDSLEIGMEATGHYWLSLYSFLAEHKFIVHVLNPIQTDGWRKGIEIRKRKTDVIDSVLIADLIRYGDFLETSLADEDILSLRNLSRFRVYLVNSVSDLKRKAIAVLDQIFPEYASVFSNVFGQTSKELLKSLSLPSDYENLSATKIEEVLSNITQKKKASKTISTLSDKASRSFGISFCKDSFAFQLKLIIEQICFIEEQIASVELKIEQLMSKLGTNIKTIPGVGNVIGAVILGEIGDIERFDNPSKLVAYAGLDASVSQSGEYEASSSKLSKRGSPYLRKALYMAAQRAEFCDPVFHAYYEKKRNEGKHHLVATNAVARKLCHTIYAILKKDTPYEVQ

SEQ ID NO: 105109 - protein, 353 aa, unidentified
MGDRSEQGEVVLGVDTHLDTHVGAVISIAGKLLGTLAVSTDTTGYFKLLTWATTFGRLGRAGVEGTGTYGAGLARLLRDHDIDVLEVNRPDRAKRRLQGKSDPTDAESAARAVLAGSATAILKAQSGAAEAMRTISVARRSAVKAKTQAINQLRALLVSAPQDVRERLWKTNPTQCVNACARLRSLGVTPLLHTLTATLRLLAKRWLMLAEELSELDAALDRLTSQHAKRLRGQFGVGPQTAAVLMAVAGDNPERLRNEAALAALCGVSPLQASSGKTTRHRLNRGGDRSANNALWTVAMVRMRSDPRTRAYVARRTAEGMTSKEIHRCLKRYIVRALYPLILADLGDSAHLS

SEQ ID NO: 105110 - protein, 335 aa, unidentified
MNIFLKFDVESNFRNMKAKQVKFPQIVNVGCGLDVHQSVIVATVRKSDNDYETRSFEAYTSSLKELREWCQKHGVTQIAMESTGIYWKPVYNILEEYFEVILVNARHVKNIPGHKTDKKDSAWLSKLLLGGLLKGSFIPPKEIRDLRDIVRYKKKQVQQVSSERNRIYKILEDANIKLSTVMKADSVSGQKVIDALINGETKVENLLRFIHGKTKASRQEILKALEGNLTDHHRFMLKIIRQSIRDKELLIADLDKQIDQMADKYSVEIELLSTIDGVGRESAIAIISETGTDMSRFPNEHHLSSLGGMSPGNNESAGKKKVQKPSKGTNISGQH

SEQ ID NO: 105111 - protein, 296 aa, unidentified
MADKLIVGIDVSKDWLDLCASNGAGVERIANTREAVAAWLERVAPGLIACEPTGGYERTLIAAARERGIAYLRVHPNDVIAFRKSRGIKAKTDAIDARLILAFVCDRLARAELRTSLIGDERLQALAARRRQLVDALQAERCRLDAAALPAVRASLEAVIAVLRQSLETLEAELAEAIAAHPQTAELAKLLQTIFGIGPVAAITLIADLPELGLLSAKQIAALVGLAPHTKRSGKTRYRETTGHGRPGVRRVLFNAARAAVRHPSLFKDFYDRLVTDSRRPGKSLPQRKRGSPSPP

SEQ ID NO: 105112 - protein, 338 aa, unidentified
MAIVMGLDQHRAQITAEWIDTDTGEVSRARVAPALRPDVRRFVKRFAGQRLEVALEATTGWRFVVEELRAIGADVHLAEPAETAARRGNKKRAKTDRADARHLRELLMIGRLPESWIPPEHLLDLRARVRLRHTLGDQRGEWQQRIQAALYHHGFPQRNGLLTAENRTWLEGLPLPESAQQQVAVALVMIDALDAQSAPITRQLRLYARRQPGCRALMKHYGIGELTAVTILAELGDARRFSSSRHAVRYAGLDITVHQSDQRRAAGHLSRQGPPALPWALFEAAQAARRPGSPDRPYYDQAAERLGGNRACLALARNLLKRSFHTLRELGDEAMQPA

SEQ ID NO: 105113 - protein, 421 aa, unidentified
MSQAPPPFAAFIGIDWADKKHDVCLHVPGQKKRERSVLEHRPTAIREWAQKLRERFGGAPIAVALELAQGPIVSALLEHDIFVLFPVQPTMLAKYRETFTPSRAKDDPTDAEFALELLLRYPERLPRLQPESADMRRLRRMVELRRALVDDRVAITNRLTSALKGYFPQILGWFRDKDTPVFAAFLERWPTLDAAKRARHETLITFFRGHNVRSQSTIARRLDAIQSEEPLTTDSAVIGPLLLLVETTIPQLRAVNIAVERFDAEIAALCPKLPDYELFDSLPGAGPALAPRLLVAFGERRERFPDAASLQRYVGVAPVTERSGNKSWVHWRFACPTFQRQTFIEWVGQTVPRSFWAKAFYQSYRERGGSHQAALRALAFKWIRVLHRCWVDRKPYDEARYLMALQKRHAPLLAFAAKAAT

SEQ ID NO: 105114 - protein, 336 aa, unidentified
MDTETGEFQEKRLAHREEAETFYRAVGGQKVRVGMEASGHARWFERLLAELQFELWIGDAAEIQSKRVRKQKTDRQDAQLILRLMLKDDFPRIWVPSWENRDVRQLLWHRHRMVEMRTRIMNQLQALALNEGLRCRKRLWREHGRQQLESFRLAPWASRRRRDLLELLDRLNPTIAELSQAIEQEAEKYPQAQRLMTHPGVGPLTALAFVLIIGKAERFQCGKQIASYLGLVPLEKSSGNRRRLGHITKQGSSMVRFLLVEAAQVTVRSLPEWRKKYAHLMMRRGRKIAKVAMAGRLAVALYWMWRKGWNYEPSKSSVRTRASSEQAMVCSKTPSN

SEQ ID NO: 105115 - protein, 412 aa, unidentified
MELLVERAAALDVGKDEVVACVRVPGPGGRGRRQEIRTYPTFTATLETLADWLASEGVTQVVMEATGQYWKPCWYVLEQRGFALLLVNAHHVKILPGRKTDVGDAAWLCELLECGLLRGSFVPPPAIRQLRDLTRYRKRLIQAHSAECQRIQKTLEDAGIKLDSVAADILGVSGRAMLKALVAGERDPGVLAELARGRLRAKLPQLRQALKGRFSDHHGLLVGLALDHLEYLEATIATLDGRVDEVIAPFAVARDRLDTIVGVGKRAAECIIAEVGVDMGVFPTAGHLASWAGRCPGNNVTGGKRRSGRPTKGNRWLGEVLVECAWAAAHSRDTYLAAQFWRLARRIGKKKAAGAVGHSILVIAWHLLAYDCDYHDLGGDFFVRRDSDRARQRAVAQLQALGYQVTLQPTAA

SEQ ID NO: 105116 - protein, 316 aa, unidentified
MKNYIGIDISKATLDVYDGDKSYKFENTTQGFKKIVALCKNISETVFIFEPTGIYSYALTSFCSENHIGVVMVGPKESRDFARSLKVRSKTDKIDAKVLYKYQSHVEDKMIKVPTVNHQAIKVQEMLNAYESIQSSKQRFKNQVESTSKSHKDLLRTLTRLIKSLELEAQKIFNKIELLLLKERETKENYDAISTIPSIGQKSALYLCAFFLKYPTANAKEMTALLGLDPVMRDSGTFRGKQRISKHGGQQLRNLLYLPTLCAIQHNDRIKEFYIGLTSRAKTKKLAVIAAMRKLILMAFSIFKSKEKYQPLLAKI

SEQ ID NO: 105117 - protein, 322 aa, unidentified
MAMLSFGGIDVSKDRLDITVLPDEQCSSVSNDAAGWAELIEQLRGSSITAIGVEASGGYERGVVRALLAAGMSVRQINPFKLRQFAKASGILAKNDRLDARMIASFVAVMPTRPTQQQAPMIEQLAAMLTIRRQLSDHKVAAENVSRLLEGVMLQRFSRRRIAGLTADIDLLDQRLVEIVTADPALAHRFRLLTSMPGVGAVLACTLIALLPELGQMSRKQVAALVGLAPYDFDSGKLKGRRCIWGGRARVRHVLYMAAMSASNWNPGLKAFHDRLKAAGKKPKVTIVAVMRKMITTLNAMVRDDVVWADRLSSRHSVPTAR

SEQ ID NO: 105118 - protein, 367 aa, unidentified
MTKPKLNNSKARVEQVTSSKVPTIKLGLDVHADSLMVVRVVDHSGPQPAQKFTPAKFREWVKTQLPLAEQVHSCYEAGPFGYGLHRYLVALGIQNLVVQPVCLDERHTGVNHDKSDAKELALRLDRYVAGNPHALATVRVPTPAEEQKRVASRQREQLKREVLRLAAQGRSLLLTQGYRAKRGWWGARRWAELEVQLPAWLEERLTVFRRLLAALTIELDAATAALEAAAPTERPKGLGGLTYEVMEREVGDWGRFANRRQVASYTGLCGGVSASGQSHHLLPITKHGNVRLRTALVELAWRLVVWQRDCKLVKKWWPVLGQAKATRGARKKAIVAIARQLAVDCWRWRTGRVTPHDLGWVMVGPPA

SEQ ID NO: 105119 - protein, 374 aa, unidentified
MNIIYIGVDFHARQQTICYLKTETGELVTCELQHQDKQAVRAFYAQFPGPVVIGLEASGYSPWFEALLEDLGCEVWLGDATEIRRRARWRQKNDRRDAELILDLMVHKEFPRLHRPAIESREVLRMLRYRQKLIKIRTMSKNSLQALALQSGLAKGSRLFTKAGQQELNSAVMSPVMQWQCEHWLQLLQPLNQQLLETMVWLKLQSKGDVQITRLRTHPGIGLLTSLCLVHTLQPISRFRNQRKVAAYAGFDPVERSSAERKCFLGISKAGSRILRYLLVEAAQTAVRKDEDLKRFYKRLAERRGRPKAKVAAARKLLIRAYIMLRDEIDYAEFRRRAVAARLARRGQGPNVPAVLIGQPASADHRDDLPSASQ

SEQ ID NO: 105120 - protein, 343 aa, unidentified
MELNAIGIDLGKTLFHLVGLDASGNVVVRKKCSRTQLLKYTANLRVQRIGMEACSGSHFLGRALREQGHDARLMPAQYVKPYVKTNKSDYIDAEAIAEAVQRPTMRFVPIKTEEQLDLQAVHRLRERWVMRRTAVVNQIRGLLLERGVTLPKGRSHVDEALPEILQDADLKLSGSFRLLLAELQLELEQLAEHIQQMDSAIQHTVKENEACQRLTTIPGVGPVIATALIAAIGNGSGFRKGRDLAAWVGMVPREYSTGGKQKLLGISKRGNNYLRTLFVQGARAVMRYRAKQAPGLNHWLTQLLARTHQNVVIVALANKLIRMAWAVLCKNEVYRAPALVASD

SEQ ID NO: 105121 - protein, 414 aa, unidentified
MEQETITWFAAVDWGSEKHQGCILDSQGGIAGERVFSHSGAGLAELCDWVLSIAGSASVVAIAVEMPHGPVVDALLDRGFAVHAINPKQLDRLRDRFSVAGAKDDRRDAYVSADGLRTDRHLYRRVQLADPRLVELRDWSRLAKELQEERVRLGNRVHHQLWRYYPQMLELTDDIAANWFLDLWTMAPIPSKAKRLRKATIEQLLKRYRIRRIDAATALRILRQPAIKVADGVAEAAGIRIRSLVTRLRVVNSELRDAARKLDELCAALAERPPATAQSDGRRDVAILKSMPGLGRINLATLLAEASGPLSRRDYQALRTLSGVAPVTKRSGKSHIVVRRYAAHVRMRDAVYHWARVAIQHDTKSRSRYVALRQRGHSHGRAIRGVADRLLAVACTLLERQTLFDPELGKTVTA

SEQ ID NO: 105122 - protein, 346 aa, unidentified
MSYSTTVGVDLAKNVIQISVVNGRGKETLNRSLSRTKFAEFLGKQKPSLIAFETCATAHHWARAAERHGHEARIIPAKAVAPFRQGHKTDSNDALAVAEAACRPNIKEAPIKTVEQQGLQAILRARDRLIAESIAQSNHMRGILLEFGIAIPLGFAALLRTLPEVLEDGDNELPDFYRPTLHRMYHRMLELREDIDAMTREVGELVKNHPVCSRLTDIEGIGPIGAMSLYATLGSGAAFSKGREASAYVGLTPRQHSSGGKANIVGLSKYVGNRKLRSVVIQGALAYVYRMKEPRTSKDRWLKDLIERAGPRRAAVALANKNVRTAWALIAQGTEYQRRPQLEMAA

SEQ ID NO: 105123 - protein, 357 aa, unidentified
MEEYIAFDSHKHYTWVEHQEANTGELRQYRLEHEPGAIQRALGHCTPGTAVAVEATANWYWITDEIERAGCVPRLVHPRKAKLMMGQINKTDKLDTHGLNILQRNGTLPTVWIPPGKLRELRELTRTRVVLVAQRTRWKNRITATLAKWGLPASEYSDPYGKKAREELEQRLARLPEQTRWATRQMLVQLDGLSAQIKEFEKRLEELVEVTPAMQWLETLPGVGVILSATIALEVGDIGRFLSAERLASYSGTVPRVHSSGDRTRYGRTRPDVNRYLKWAFAEAANSIAVNYRRCPDRHVSQLYARLRARKGHNKAVGAVARHLAEAAFHVLSRQQAYRDPTNTSGSDQRGVNAIRS

SEQ ID NO: 105124 - protein, 399 aa, unidentified
MKTYILRATQTVEPQKSNPHLPPPLLAGRVLFIGLDVHNDSIAVSLAPSDSTEVRRYGIIGGEHDDVLKLVKKLQAAHPGTVLKFCYEAGPRGFALCRCLRSHGLECILVCPSKVPRKPGERVKTDRRDADQLARLYRAGELTGLYVPEPVDEAMRDLIRARYQVGKAQHRARQQLKMYLLRHNIRYAGNSSWTPAHLRYLAQIKMPFAVQQIVFQEMLEVISEATGRLERYDQEIERALPGWRWEPVVRSLMSLRGLALLHAATLVAELGDFHRFEHPGQLMGYLGLVPSEHTTGTDRQQGGITKMGNGPARRALVEAAWQYRAPARLSPHLKKRQEGLPKAITDIAWEAQRRLHHRYQHLTRVGKKKSQVAVTAVARELSGFVWAIARQVKPHDSKP

SEQ ID NO: 105125 - protein, 347 aa, unidentified
MGKIAYIALDLHCRSCTLGAMDAAGRFLGNRQFQTSEKQLVNALEMVTAKHKHLVIEEGPLTRWAAQVASAHVERVVTCDSRENALIYKSSSKRDTLDTVKLCRLLRLGELKHVYQPESDHRAIFKAAARHYIDLRHQLIAIKQKIKAVFRYWGVINCFGTRLYGAKGRQGYLQQIPHGVVQHQLLRLYELMDSHVQAKESAKAELKELSRRYPEIREFKKISGIGALNASLFDAFIQTPHRFVTKRQLHRYCRLGVTERSSDGKPLGYQRLDRSGIGELKAISHRSFVASMRGDNEVKRFYQQSLARTHNKVHARLNTQRKVLSVMYGLWKKGGTYRADLFLDPSA

SEQ ID NO: 105126 - protein, 394 aa, unidentified
MILAGIDIGKDSHFFSLVRKEDGEVLAQPRKFTNTSEGFKTLTDSFIPYDKESILIGMEDTGHYHFALLRYLLSRKFNVALINPTATDFTRKANGSISKNDRLDTLTICDVLSSNKPKKPYRISKFSSFDLYEQRGLTRHHHNLKEEINVYTNRLQKCIDIVFPEYNSLFPSKYGRVYISVLKTYGSAANIAKADIRSLRKCFEYKARGKRISLTAEKLKEAAKASIGIDSACEVIQIRHLIEQIELLNKQIKEIDKKIEEYSLANDSPILSIPGISHFSGTSILAELTDINNYDKAAQIIKRAGVAPLVYESSKYQAKHTAITKSGSKYLRKTLYQIILPVIRYNPVFQKYYDLKISQGKSHRCACGHCVRKLLRIIFHLLKTNQKFDPALLR

SEQ ID NO: 105127 - protein, 409 aa, unidentified
MERLFDRVAGLDVHKQTVAVCVRTPGPRGAREQQIRVFGTTTVEVLALRDWLQAHGVTHVAMESTGVCWKPIFYLLEEVVSCLLVNPVHVKRVPGRKTAVQDCIWLAELLEHGLLRGSFVPPAPIRELRDLTRFRKSLIQERTRAANRLHKVLEDAGIKLATVATDILGASGRAMLNALVQGTTNADVLADLARGRLRAKLPALRQALVGRFRPHHAFLVTQVLAHLDYLDEAIAGLSEQLGTLLTASEDTLARLDTIPGVNRRTAEVLIAELGMDMTIFPSAAHCVSWAGLCPGNNESAGKHKSGKTRHGDPWLRAALVEAALGALHTRGCALAARYRRIMRHRGHKKAVVAVAHAILVIAYHVLKHQITYRELGADYYDKRRAQRLARHAVETLERQGYRVTLERAA

SEQ ID NO: 105128 - protein, 459 aa, unidentified
MNKVKQPKTDRFEKMPVVNSAAAGIDVGSSSHFVGIGQNKEDVKEFGVYTEDLHAICRHLVAAGRTTVALESTGSYWQPLFVLLQQYNLSPILVNGKFTKNVKGRKTDVKDCQWIQKLHTMGMLEGSFVPDLFTEKVRQYYRHRQTLVNNAASYINKMQKALRLINIRLDSVLRDVMGRSGKDIIEAILKGERDAKMLASLAQPTVKTSKEEIASALTGDWRDEYIFELRQCYEIYKYYHKMIDECDEVIKHLLKTETDRKQKEENLAKVEGVKIKKKKARKNEANINLQRLAVDLTGGIDISSVEGVGLGLVLCIIAETGLDLNAFPTSKHFSSWLSVAPDVRKTGGKVISSHTRKGKGRLARAFMQAANAIGNMKTGGYLVQFFKRIQRRSERSAAIIATANKLSKIIWNMLVKKEAYNPVLPAEYLDKIRKKEVKNIQRKIRQLNIKENEILFATA

SEQ ID NO: 105129 - protein, 387 aa, unidentified
MTVRTVNNVPDATHGETVRCLFAIELSTMSWVIAFNTPLSEKISRRTLTGCKWKGLLELIEEVRARVSRETGRAVEVVSCYEAGYDGFWLHRQLEAHGIRNYVIDPASLQVDRRARRVKTDRIDTERLLRSLMAYLRGEPKVWSVVRVPSVAEEDARRLHRERDRLVSERVQHVNRIKGLCALQGIYDYHPLRPQAMARLEQLRTTRGDALPPRLKSEIKRELQRLEIVVEMIATLETERDAIVEDEASTHLNAKKIQALHKLKAIGPEFAAVLVGEIFHRDFNNRRQLASYVGFAPSPFQSGSVAHDQGISKAGNSKARTTGIELAWLWLRYQPDSDLSVWFRARVGATKGRIRRIAIVAVARKLLVALWRYLETGLVPRGAVLKG

SEQ ID NO: 105130 - protein, 376 aa, unidentified
MEHDSTVYVGLDVHKESITVAYAVGMGDVELLGRIGTANGDIDRLCKRLRSKGRQVHVVYEAGPCGYGLYRQLVEEGFECMVCAPSLIPRKPGERVKTDRRDSVKLARALRAGDLSAVHVPGIEDEAFRDLARAWVSAKDDLKQARQRLKSFLLLHGVRYPGKADWGSSYRRWVSQHSFSNEWQQLAFEEHRRTLGDRMAQCERLEAALRDSVVNWRFYPAVLGLQAMRGVQFTTAVGMLAEVGDLSRFEHPRQLMAWLGVTPSEHSSGDKRRQGGITKTGNSYARKLLIEAAWSYRHQARVSENIGRRHPGLPKPIIDRAWDAQLRLCRRYRKLAARGKNANTAVVAVARELAGFIWDITRLSMSLAIPRTGLSA

SEQ ID NO: 105131 - protein, 406 aa, unidentified
MADIIALDVSMGKSNVAWYHQKNCRGEFVFRHTQSGFNQLLSTVQAADHPIIFFEATGIYSSPVEHFCISHQLKYCRLNPLELHLKSENLRRVKTDRQDARKIALTVQGNLFRLTVPKSPRFARLHELSRFYNQLNNDWDHRLVQLHIALEQTFPELKQLFKNKTSKLALNIVELFPHPDFVKLLSRTKLKNRLIKSTDKKLSNMKGFKYADQLLKLAQDAYSAASQDSVQVDEVRYYCRLLIELTKQKEKIVKQMITTAQEDETFQYYVSFLGIGPQTAAQLMAELGDISRFDNANQLNAYVGIDIQRYQSGQGGHQDHINKRGNPIARKLLYFAIGNMIRQQHAAPNHIVDYYYHLKQKRPYPKLNKVAMVACMNKTLKCLLSMIKHHTKYRYRYTDSRSLVKN

SEQ ID NO: 105132 - protein, 375 aa, unidentified
MKEKVRFLGLDVHAETITVAVAEPDGEVRSLGTIANRAESIRKLVRKLGPAEQLRACYEAGPTGYVIYWQLAELGVKCEVIAPTLMPMKAGDRVKTDRRDAERLARSYRSGDLTAVWVPDEASEALRDLVRAREAAKQDQLRARHRLSKFLLRMGRRPAPGMRVWTTLYLAWVRQLRFQQSAQQATLVDYLHEVDHMTERVKRLEQAIAEAVKLASPAVQEVVKGLQALRGIAEISAVTIVAELGCMTRFEGARQLMAYSGTVPSENSSGQRTRRGGITKTGNAHLRRIVVEAAWSYRHRPAIGHRLRKRLETVPEPVKEIAWKAQVRLHRRYMKLAAAGKEPSKIVTAVARELLGFVWAIGVKAERSVVQQIAA

SEQ ID NO: 105133 - protein, 340 aa, unidentified
MKITTIGLDISKTIFHMFAVNQAGKLVKKRAIKRADLLSVFARLDPMLIVMEACGGANHWAREFIKLGHQVKLIAPQYVVPYRRKNKNDFNDAEAIAEAAQRPNMTFVPIKSVEQEDIQMVLRMRKRHVKTMVAINNQVRGFLAEYGLCAAKGKTALATRLPEFIDDESNELSAFARESFRELYADFVAAQEKVEFYTKKVTAYTRENPICKRVQSVIGIGPMTAAEMYAAIGDGKMFHNGRHFAAWCGLTQRQNSSGGKTMLSGITKKGNPHLRSSLVHGARAVLQYVDGKDDKLSRWAYELKCRKHSNVACVALANKLARIAWSVIAKEEDYRLEYAA

SEQ ID NO: 105134 - protein, 430 aa, unidentified
MKSNTQNAKIEAITEKTLVLGIDVGSETHYARAFDYRGIEYSKKPFKFSNTEAGFVTFKEWILDLKERHEKDKVVPGMEPTGHYWFNLGKFLQDNEMKPVLVNPHHVKKSKELDDNNPTKNDRKDPKVIAGLVREGRYMIPYLPDGVYADLRTASNIRFQLQAELTRIQNRISRWFNIYFPEYKTVYGKPDAKSGMLILKAAPLPEDILTLGIDGVNQIWRDAKLRAVGKARAKTLIKAAEHSIGSKEGTMSARMEIRMLLEDYESQNMRLQEVMVLIEELVKEIPMAEKLLEIKGVGIRTVSGFLAEVGDISRFNNPKELQKLAGLALVENSSGKHKGKTTISRRGRKRLRYLLFEVAMSLVAKNPEFRELHNYYTTRRLNPLKKMQSLMAIAAKLIRVFYAMLTKGVDYDPKKMISDIKRPTVYLQAA

SEQ ID NO: 105135 - protein, 354 aa, unidentified
MRIIRKSESMSVVGKKVCIGIDVHKESWQVTVRSEGEEIFNGRIPGQYQSLKKLLERYQGSLMKVAYEAGPFGFWLSDKLLEDNIEVMVVPPSLIPIESGNRVKTDKRDSRKLARLLESNMLKQVYVLTPEEREHRDLLRTRRQIVDHRKDVARQIKSKLLFYGIVSPFSATPYWSIKYIEWLRALRVDTDYLKECFHLLIDLYEYLTRQIARINRKVALLCRDKKYRDRIKLLCTAPGIGRLTAIEILVELQDISRFESAEEIASYIGLTPSEYSTGEKTRQGRITRCGNTRVRTYLVESTWMLITKDPVLRLKYLKLKNARGGKRATIEIARKFIIIIRRMLLDNVPYRMAA

SEQ ID NO: 105136 - protein, 325 aa, unidentified
MDNGITWVGMDVHKESIVVTAVSHDSDRAAARFEIPNTDTGVHRLVKRLREMGDVRCAYEAGPCGYELRRFLASQEIPCDVVAPSLIPKKPGDRVKTDRRDAEKLARLHRMGELTPIRVPTPAQEALRDLVRTREDAKEDALRRRHRLQKFLLRHGRRYEGKSWTQVHWNWIRSQKFADDNAQAVLTEYLVALEQELERIQRLNVKIEEESRRPEIAPAVARLRTLRGVDTVTAMTLVSELVDFSRFSRAHELMAFAGLVPSEYSSGGRECRGRITKTGNAHVRRVLVEAAWHYRHTPTGTGISLRKRREGQPVFDNLILSRRDT

SEQ ID NO: 105137 - protein, 368 aa, unidentified
MTTNTLKAAPAASAKELKNEKPAKAKRMLVGVDTHLRGYQAARKIDSGVIGVVENFRSEEELELYVAKQTTRAEQVVVVYEAGPLGYTLYRKLSARGVLCYVCAPDSGEQRKKRRKNNKIDARSLTSKLFNYLNGDQNALQLARVPTEAQEQLRMTSRQHDQLVEERKRLGATGNAMLLSQGFGSWSNWWRPKAWAVLSSKLPPWLLERLEVWVDVLKVLDEKIAQAKAAFVRSCKGPRPKGVGALSQMQLQSEVLDWSLYSNRRKIACLAGMVPSEWSTGDKEWRGSITKVGVPALRRIIVEMVWRIIFFQPQYKPVQKWLEVLRGPNPGRKKKAVIAIGRQLIVDLWRLQTGRVTAQELNLIMVTD

SEQ ID NO: 105138 - protein, 341 aa, unidentified
MRRTLFCGVDLHSNNAMYVVADGRDKQLLAKRLPNQLPTILETLEPFRSRLKVVAVESTYNWYWLVDGLMEHRYPVVLANPSEMEQYHGIKEAGDLTDAAFLAKLARLEVLPTGYIYPRQDRPVRDLLRRRMLLVQQRTGIVLNVQNLAMRQSGRSLAWRDLRRLGETERADLLGDHDCLTFVADQQIDLIEQLNEKIKRFEKKVLEHAQLQPAYERLQTMPGVGVILALTIMLETGDIGRFETVGDYTSYCRCVRAVHRSNGKKKADNNSRNGNAYLAWAFVEAVHHAIRVCPKAKSFYDKKRAKRNGALATKALAAKWSKAAYYILKRQEPFDLARVFG

SEQ ID NO: 105139 - protein, 483 aa, unidentified
MKPKQKEKNKGATNHSTQHHWYEMNRKQRREMMRKMQSEDLSLEVIHPDAAGIDIGNESHYVAVPPGRDSQSVRRFGCTTAELKAMAAWLKQCRIRTIAMQSTGVYWVAVYDILEQAGLEVYLVNARDTKNLPGRKSDVQESQWLMKLHTYGLLRNSFRPSQEIRVMRTYWRQRNDLVQSASRHILRMQKALTQMNLQLANVLTDISGATGQAIIKAILAGERDPHKLAEFRDPRVKASEEQIAQSLEGNWQGDLLFVLKQEHEGYEFCQKQMAECDRQLQQYLQQRDDRSHGAPLPEENRKGRRKKKRANRPQFDLREGLFRMTGTDLTRIDGIDVMTATTVISEAGYDMTKWETENHFVSWLRLCPDNRISGNKVIGKGRLPTNNPITIALKMAASTLRETKTYLGAQFRRLRTRLGAPVAIKAMAAKLARLVYRMLRYGMKYVDQGAAFYELRHRELQIKRLKSKAEKLGYRITPIPAAA

SEQ ID NO: 105140 - protein, 405 aa, unidentified
MPYILALDVSMGHSYSVLYKDDTCLFEDEIEHTQRGFHALLEEIQHLPERPLIVFEATGIYSRPVEKFFQDHHFSYCLLNPLEAKKQMEESTLRSWKTDKSDAHRLAQTHLKNQRQPKEVQSNFYLEMRDLARFYQEIEKKITRLRMDLHNCLQLTFPELEQFFSNRLTPYALTLIRLFPHPDFVLASTRTKIKNKLINETRKKISANRAEQKADQIIHYAQCAYPAVEKDSIHCQKTIYYAELLQDLLEQKEALATQMIKKAEGSPCFSLYQTFPGIGALTAALLIGELGDITRFKTHKQLNAFVGIDIRRYHSGKYTGQDRINKRGNPKARKIIFFTIRNMIRQQRAAPNHIVDYYYKLKKQPIPKKDKVATVACMNKLLKCMHAMVRAHTEYDYAYAVSVDH

SEQ ID NO: 105141 - protein, 364 aa, unidentified
MEREYYIGMDVHKDSVQMAVFAETGEEPVYERRLGNDTALLVKEAARFSQKGQTETAYEAGNCGYVIHRAMEAAGIPCYVLPANKVAKKRTDRIKTDKRDARLIGRELRSKSIRPISVPDETDEAARDLLRCREDVSEDLRRVKQRLLKFMVRHGYVYTGGGNNWTRMHRRWMDNRQFKQEHERVVYEEYRSQIRSLEERLVRLEQQVVETAESPRYRAAVSRLRAFKGIDYIIALAVICEIGDFRRFGNAKAFMSYLGFVPSEYSSGGKRNRGSITKAGNGHLRKLLVEGAWHYTKNAHPGKRLERRRQTSPVSAVDAADRALHRLHKKYIRLVLSGKHKNVAVTAVARELAGFIWAVQVSAA

SEQ ID NO: 105142 - protein, 382 aa, unidentified
MTQTASMAKYSDEVATLYVAFELGWRSWKLAFTVGLGKRVREASVGARDQRQLRDAIERVRRQFGLPPGCRIVSCYEAGRDGFWLDRLLTSWGIENRVVDSSSIEVNRRARRAKTDRLDAGRLLSMLVRYELGERKVWSVVGVPSAEQEDARHAHRELRTLKKEQTRLTNRIKGLLASQGASIGAGKKSLLERLETMCIWDGSALPSGLKARLQREIERYEFVHRQILDLETELTNRLRHGSEAAVAGIRRLMGLRGVGRTTATIFVREFGWRGFRNRRQIGALAGLTPTPFQSGESSREGGISRAGNRHVRGIAIDLAWGWLRLQPGSELSRWYRRRFASGSARIRKIGIVALARRLLIELWRYLTVGHRPAGALLKSAAI

SEQ ID NO: 105143 - protein, 413 aa, unidentified
MLKICYNTCCGIDVHKKMLVATIATTNERKVTTYQTKQFFTFTNDIKKLKQWLIDNNCKDVCMESTGKYWIPIFNILEDSCNVTITHPKYVKAIQRQKTDTKDSVWITDIFKHGLVEGSFMPPLDIRQLRDLMRYRFKLVNCKSSEKNRFQNSLTVSNIMISNIVTDTFGKTSKSILELILSKEDNVTLEEITPLLRKNIKSTPEQILESVQGNLTHEQNSKMKVCLNHYDTLLECIDQIEKAVLPLLLPYQNQINLILTVPGIKDISAITIFSEIGPDMSVFKDSEHLCSWDGLTPQCNESAGKKKSVHISRAGVYIKPLLVQCANNAIRDKSCPYFKLRYDAIKKRRGHKRAIIAIARMLLTCIYQMLSKNEPFNHEIYEQLTQKNFKSKDKKLNINNAIKFLESQGYKVS

SEQ ID NO: 105144 - protein, 351 aa, unidentified
MDATTVGVDLAKNVFVACVADCAGRIVERREFNRAGFLTWLGTLPAGTVIGMEACGSAHHWGRTAERLGLAPRLMAAEFVRPYRKRQSVKNDRADAEAILVALLSPGMRFIPVKTEAQQQRLAWHSLRVGWVEERTALLNRIRGLLAEFGLIVDPGPKHLRALLAERERDTASPPALRGLIHSVRDQLDALDARIGECDRQITAQQANDPLAKRARDLPGVGLITADAVTASVGDASMFKNGRQFAAWLGLTPSQSGSGGKTKLGRITRRGDDYLRTLLVQGARSVLAATLRKQRRESPDQLTRLQQWIVVLNGRIGYHKTLVAIANKHARQLWAVLAKGESYNPQAWQRA

SEQ ID NO: 105145 - protein, 345 aa, unidentified
MKPMIIRQSVGIDVAKDDFTVCYGFMSINMQHHMVSEASFENSSQGMELFINWLSKNLIATSDVYLLMESTGVYHESLCYFLYDHNFKVSVMPSGRVKKYAQSLQQRSKTDLLDARMLCILGLERSVDLWEPARQVLQELKDLSRERGQLVKEQSALECKLHALEHSFGNQQRVIARLKSRLDLIRMQVREVESEMRELMLSDEELKHKTSQLTSIPGVSFISATVVIAETIGFLGIRNAKQLTSYTGYDVVHRESGLYKGKTSISKRGNSHIRAALHMPSLTAVRCNPTLKPFYQRLKEKKTKPIIGLVAVQRKLLCLMFTLWKNDSVYDPDYQQKTAEALTSA

SEQ ID NO: 105146 - protein, 370 aa, unidentified
MKQVSRAATTKQKPEITIGLDLGDRFSHYCMLNSDGDAVETGRIQTTEEALRRHFQSEPAMRIAVECGTHSPWVSRLLEQLGHQVIVANARKIRAITASESKNDKNDAEKLARFALYDPRLLSPVRHRSPERQQDLNLIHARSTLVRARTMIVNALRGLVKSAGERLPACSTQGFESRVEASIPPALATAARPLLDQIAALNANIQQMDRGIEQLGNRYPEIQLLRTTPGIGPLIAAAYILTLDRPDAIQHSRQAGAFLGLRPRQSQSGDSDPQHRISKTGNVYLRSLLVQAAHYVLGRFGPDSELRRWGLKLAASGGKRGKKRAIVAVARKLAVILHRIWQTGNPWQAFPLSNRNTANNQAASQNPCMA

SEQ ID NO: 105147 - protein, 320 aa, unidentified
MIAAKVLVGIDVSRDWLDGFLLPAGQRFRLPNSAEGHAHLIEILQNGPSAPRVGFEATGGQEWALWKALVGAGINAVQLPPAQIKAFARSHGTRAKTDRIDAKLIASFMAFRPEAGRTLPTEKLQILRTLTTRRAQLVGMRKRLVLQISSRTRQAIPAQVDSMDDDLKALLDAQILELESRIEHVITQEKTLADKAMRLRSIPGIGPVSAAMLIAEMPELGKMTSGEAAAMTGLAPVPYDSGTMRGKRMIAGGRRTLRHVLYQAALAAAYHNPVLKSVAQRLKERGKPHKLVIVAVARRLVTIANAILKNGASWRHQSPT

SEQ ID NO: 105148 - protein, 386 aa, unidentified
MVFVGIDVAKDKHELYAVDSDGVVLCDHLTFANSAVGFASLLERVSAWGKIKVGIEATGHYSSNLLSFLKAHDFEVVVFNPLSVSRLRSANSLRRTKTDKNDSRYIARLLMTGNANPYQSQSYDISVLKSLTRARFRLFQEIQPLKNRFRRLLHILFPELQGFFSNLYGNTSLNLLSALPSAKDIAECNILKLTKILSVSSHGKLKRSRAEQLKSLAKSSIAAYNYGDAFELKQTVQRILFLSSQMSEIERKIDSVMSQLNSPITSIPGIGNLLGATILSEIGDIKNFDNPDKLLAFAGCEPSTYQSGKYTATNTPMVKHGSRYLRRALYCAADMAYVNSISFRSYIDRKRAQGKHYYVAMSHGMKKLVRIIFAVLSRNIPFSEPA

SEQ ID NO: 105149 - protein, 402 aa, unidentified
MADGPTRFFGLDVHKEYFVAVGVDAQREVVFGPQRVSNYQLDEWVARVLTTQDSVVLEMTTNTYLFYDTLVPHVHSVIAVHPPNVLLVTGVKVQTDKKAALALAQLHAAGMLEGVWIPPQEVRDQRALIARREKMVRLSTMAKNRLHTVLHRNHLVLPEKPFSSEQRNWWESLSLSTTEQFLVRSDLDTLAFAQKQVEQAEECLKKTSAQDERIPLLVQLPGVAMLTAITILAAIGDIARFPNAKKLVGYAGLGTRVHDSGKTHNSGRITKTGRRDLRRAMVNAANHAIEHHPHWKAEFERLEPHLGRSKAIVAIARKLLVAVWHVLSQKDADRFADPAGVARSFFALAYQVGVKNLPEGQSALAFTREQLDRLGIGQDLQEISWGSQHHKLPASKLLTEKK

SEQ ID NO: 105150 - protein, 461 aa, unidentified
MKKNRARVGRRRAVSTESSIINIDTHPDAAGIDVGAEEFVAAVPRDRCEQAVRSFASFTSGVHALRDWLLACRIKTAAMESTGNYWITLYDVLTAAGIDVYLVNARHVKGVPGKKTDVCDAQWLQQLHAAGLLRKSFRPALDIVPLRFLMRHRGELVGDAAKQLQLMQKALTEMNLKLQHVFSDIDGFSAQAIIEAILAGERDAEVLAALRDPRCRSSKQAVLEALHGDYRPEYLFVLGQARQLYDELREAIAACDRQIGELVARVQCEVVAGEMPAAPKAQHKLSKNSPQLEVFQIAWRFYGVDLSSVPGVSAAVLCALMSEVGNREQLLAAFPTPERFASWMGLCPDNRISGGRLLKARTRKVKSRLAGALRLGAFGLQKSQTAMGAYLRRMKSRLGKAEGTTAAAHKLARIIHGMINNQKPYDEKEAFKLTPQSAARRRRALEKQAAALGLILQPMAA

SEQ ID NO: 105151 - protein, 309 aa, unidentified
MKEKIEFEQVIERGCGLDVHKENVTATITGRGIKQQTREFSTYTRSLISLRDWLLKNGITHVAMESTGVYWKPVYNVLGEHFKIILVNARHVKNVPGRKTDQLDSQWLAKLLMAGLLKASFIPGRKIRELKDMVRYKTKLTNQISSEKNRFIKIMEDANIKLSSVLTDVFCVTGRKIISEIVESDYEPDKLLHYVHGRVKKDRSEIREAITGYVTNHHRFMMQTILESIEKIEGTIAKLDAQIAEQTEEYGLEIELLETIPGVGHDGAIGIISEIGVDMSAFASEKSIAKWAGMCPGNNETGGKKKVAE

SEQ ID NO: 105152 - protein, 398 aa, unidentified
MTESSDYESVQVFIGVDVGKDTHHAVAINRSGKRLFDKALPNDENKLRSLISDLKQHGQILLVVDQPATIGALPVAVARSEGVLVGYLPGLAMRRIADLHAGEAKTDARDAAIIAEAARTLPHALRTLKLADEQIAELSMLCGFDDDLAAQTTQASNRIRGLLTQIHPALERVLGPRLDHPAVLDLLQRYPSPEKLASLGEKKLAAQLCKLAPRLGKRLAADIAQALAEQTVVVPGTNAAAVVLPRLALQLITLRKQRDEVALAVEQRVLAHPLYPVLTSMPGVGVRTAARLLTEVACRAFASVAHLAAYAGLAPVTRRSSSSIRGEHPSRRGNKALKRALFLSAFAALRDPLSRAYYTRKMSQGKRHNQALIALARRRCDVLFAMMRDGTFYTPQAS

SEQ ID NO: 105153 - protein, 392 aa, unidentified
MIYAGVDIAKYDHVIGAVTDTGKALTKPLAFKNSAEGFKRCLTYLQGLVDDADNILIGLEATGQYWLACFCFLQEKGYNCVVLNPMQTHAMRKLKGSSKVKTDSVDSIIIAETLRFGDYEPSRLADEEMFELRQLTRFQQNLKEDTSDLKRQVITALDQVFPEYETLFSNTFGESSMAFLKRCPTPDECLTLDTRTLTGLLEKASKGKLGKDKAKEIKNRAKDSCGIRFGLATFSFQIKSLINQIVFVESQIGEVDERITTLLEDIEPLILTIPGISYTLGAQIVSEIGDIHRFPDAASLVSYAGINPSVHESGTFKGTKNSISKQGSSYLRRALYLAAQNQCKTKAPLYDYYLKKREEGKPHRVALIAVARKLTHVIYAVLSKQESYNPAH

SEQ ID NO: 105154 - protein, 444 aa, unidentified
MNKINDRRAHFELIKNTVKEAQDYLLVGVDVAKEKCDACFMISSGRILNKHFKFENTKEGFDSFFDKIKHYQQAIDPKIAVVGIETTGNYMVPLMQYLEKHGVYVVMVSSLITKRNRDTLDLSWNKNDVKDAWNVTDCMRQGKIIYYAYPNDPYGDMRRLMVIFSKLSTERGLYKVRLQNNVLSLTFPEFHRVFDEVDELVPMTILDRYPLPLDIVKLSEEEFIKDIVKNTDPTIKKSKLSAIYKLAAESIGSTHESESLRWETQFILHRIIEIRKIQEEMLAKVQNLAKDCPEYELLQTIPGVGPIISAVMITAIGNIDNYRSSRQILKLAGMDLAQIQSGKYTGDIRISRRGKTSLRSAAFQAALVAARHDSNLRSKYLKLEKDKKVLKGDKRKILVAIACKILRIAFAIMKSKQPYNDDIHALNKEKSAVIETVVCEISHA

SEQ ID NO: 105155 - protein, 345 aa, unidentified
MNIIRVGVDIAKSVFHVHGVDRHDQTQWQGKYARNKWLNALSRKVPAGAEIGMEACASSHYWARELQKRGYCVRLIAAQFVKPYVKSNKNDRVDAEAICEAMSRPNMRYVAPKTVAQQDIQAAHRIREELVGQRTAKANQIRGLVGEYGVVAPVGIQQLRRALPEWLEDAENGLSDSFRVLLHGLADDLRYLDDRITVLDERITESVKQDPVARRLMTLRGVGPLTASALSGALGDGKAFRRGRDFAASLGLTPRQHSTGGRDRLLGISKRGDSYVRKLLVHGARAVLRHVNGKDDGLSHWLKGLVSRKHVNVATVALANKTARIAWALVHNGTAYDDKLAAVGT

SEQ ID NO: 105156 - protein, 359 aa, unidentified
MFTERTSVGLDVHARSVVAHGMDEVTGEVFTGRLSPGVEVRDWLGRLPGPVAVLYEAGPTGFGLARELRAAGVRCEIAAPSKLQRPAGERVKTDARDAELLCQLLRLGAFAPVTVPDAATESARDLVRCREDCRTDLMRARHRLSKLLIRRQVAYSDGRAWTGAHLAWLARQRFDDPNLQATFDEYLDQVLATNARRDRLDHRIQELAADSAWTPMVRRLGCLRGISTLTGFALAVEIGDWTRFDGHSIGSYLGLVPSEHSSGASKQRGGITRTGNSHVRRLLIEAALHHMQPYRKGRVLRACWDLASPAARARGDAGNRRLYARWQQFQARNKRHHVATVAIARELAGWCWSLAVTDD

SEQ ID NO: 105157 - protein, 349 aa, unidentified
MLHAGLDLSRRRLDYCLLDELGERVEVGAAPPDADGLDGFARRVERRYGPMVEVNAAIESMTGARFVHDTLQRCGWEVEVADAIKVKGLAPLACKTDKIDAWVLAELSRRELVPAIWLPDFTVRQERERARWRLHLVKHRSMLKHCVHAQLMSFGHACPVSDLFGVAGRELLDRLDFPDPWRGDVLAALALIDDLDREIHAIERELRRLGADHRYVRLLETVPGIAWILGYTIAAEIGDITRFPSPKKLCGYTGLCPKVRQSGNSDRRGPLAKTGPKYLRWALLEATTNAVKHPVYRDRYQHTKQRLGRQRGAKVAQIDIARRLAEAIWHMLTRNQPFAPAGAAPPLAA

SEQ ID NO: 105158 - protein, 474 aa, unidentified
MPRRVKKVMPLKEGEGKRKSGSIMGIDVHKTILAICILNETSYLHEQNYTNDTAGLRSVLKLIKKYDVQDVAMEATSSYHFKTCFILTDLAVPVTLACPKQTADTQGKKTDKLDARRIAIAHRDGRLKPSVISPKEFTHLRRTTRKIVKITQDQTKSKQRIQQLFHLYNCHITSDYSNFLKTKWSLNLLYSCIEITEEKADKNVREAILEYFPKKRLQKTSKRDLQKLEDELTNLRQQLTFNERINLLTEVAQIRFDMTLLEQLRLLYVYFAQQNPKFARDMKILLSVPGIGNDTAAAVLAEIVDVNLFSRPEKLVKWAGLAPRVKQSGHRKKITGKIYKGGNKYLRRALALSCSNIYSKGKNNNPIHEFMVKKKQEKDIYMVAICAGARKLLTVVWILLTHQKSWKPDSKAPTEVFKYLQDLTSNKIRLLTRKMAKYENIQLQLSELLSQNISDLSKSTIILKTIKSTFGPVL

SEQ ID NO: 105159 - protein, 378 aa, unidentified
MNKALLFLGLDVHAQNIAIALAEGGGGEARTYGTIANDLHALEKVCARLRKAHLGAELRVCYEAGPTGFVLARRLAQLKIPCTVVAPSLIPSRSGDRVKTDRRDALKLARLHRAGELTAVHVPDASDEAMRDLCRARTDAVQDLRRGRAQLKAFLLRNGYRYTGKSAWTEAHRRYLRELVLPHPAQRVVLEDAIAAIAAAGERIGRLEDQMHTLLESWPMKPVVEAVMGMRGFALVGAMVLVSELGGAWRFDHPRQLMAYLGLVPAENTSDERRRQGGITKTGNSHARWLLIEAAQHYRLSPKVSKELSARQQGLSQEVKACSWKAQTRLHKRMMQLLARGKQRNKVTVAIARELTGFVWHIFRLMEPRMRPASTATV

SEQ ID NO: 105160 - protein, 413 aa, unidentified
MEKVYDICCGIDVHKKLIVACLRTGRKSELREFGATTKELLKLADWLNESGCEMAAMESTGSYWKPLYNVLEASEIKAMVVNAQHMKAVPGRKTDAKDAEWIADLLQHGLLRASYIPSKEQRELRELTRYRKSLVEERSRELNRLQKMLEGANIKLSGTVSTINGLSSRNILNFIMDGGVFSEDVFKEMLRKKEISYHLKADPKQLVDDLNGVLSPIQKRMIKELLKHLDELDVHIRNLDDEIDNFMNPDEKEAVKSICEIPGIGETSAKTIISIIGTDMERFPSDRHISKWAGVCPGNNESAKKRKSGRTSKGNPVLRSTLVQCALAAAKRKDSYFSAQYARISTHRGKKRAAVAVAHSLLIAIYHVLKDKTAFRDLGSNYYNQFNKERKANSMVKKLMLLGYTVTLEQAFA

SEQ ID NO: 105161 - protein, 339 aa, unidentified
MNSVAVGVDIAKTVFQVHYIDRESGEIVNKPIRRAKFLEHFANRPACQIGMEACGGAHHWARQLTKMGHQVKLMPAEFVKAFNIRNKNDAADARAIWLAVQQPGKSVAVKTEMQQAMLALHRMREQLVKFRTMQINSLRGLLTEYGEVMGKGRAALDKAMPEVLGRVAERLPAVLIDTLREQWSGLTRLDEQVAEIERRMREWVKEDQAVKAISEIPGVGLLTATAAVAMMGDAKAFRSGREFAAWAGLVPKQTGSGGKVDLHGISKRGDSYLRVLLIHGARSVLTHAKEPGPWVEQLRKRRPFNVAVVAQANKTARMIWAILAHDRPYQKDYVSVKPA

SEQ ID NO: 105162 - protein, 309 aa, unidentified
MTAVGIDVGKTALDVAIFGELKVHRFSNTIAGIRRLIRLLQDREDVRIVVEATGGYEEAVLAACAEAGLWIARVNPRQARHFARAIGQLAKTDNLDARMLAEMVQAFHARLRPHVPLEPWQAELRGWLRRRHQITEAIQRTRQQLAMTLPAIRPLMKKTLIALQREQTLVDAAMKQLLQAHATPAMRSSKGLGPMFQASVLALLPELGQLRRQQIAKLVGVAPLNRDSGQSQGKRRIYGGRAEVRVALYMATLSAVRWEPVMKAHYQQLRARGKVAKVALVACMRKLLTIVNARRRDELRGMGLAIQNT

SEQ ID NO: 105163 - protein, 372 aa, unidentified
MPDVSSNAPADVRVWVSFDVHKLSIVAAALPPAGGQPEVVQIETTRAAIRRLVERLGGPEGLAVCYEAGPGGFDLFRVLCELGVACDVVAPSLIPVRAGDRVKTDRRDAKRLVRLYRGGQLSFVAPPSPQTEGLRDLMRCRDDLRRARTAARHRVSKQLLRHGRVYRDGKTQWTKMHRAWVARQQLDDELAQAALFQMLIHLDGLDRQLDALDRDLETIAQGERWADTVAILTRYRGIATRTALGLIAEIGDFARFRHPRELCAWLGIVPSEYSSGDQRHRGHITKTGNHHARRLLIEAAWSYQHPPRRPSRDAAPDPRAWHAQIRLHRRYHHLTVQRGKRSTVATVAVARELAGFLWAAATHQPFTTHTTA

SEQ ID NO: 105164 - protein, 400 aa, unidentified
MFVGWDWASTTHDVTVIDDAGRIVDRWAPEHTEMGLDATMARLTRHGRPEQLPVAIERPSGLVVDRLLAAGHPVIPIHPNAFHAARPRWGAAAAKSDPGDSFKLADYLRTDGHRLRRLRPLDAATRELQALSRLRDDHVAAKTAASNQLGALLDAHWPGAKQIFSRIGSQIALAFLDAYPTPESAARLGEARLAGFCRRHSYRGGRSPGELLGRLRSAPAAPVGLAPEVLAELVGAQVRLLRTLLATIAELDRALGAGLLGHAKAGLLAPLPRIGEISLAQVVAEVGPILDRASTVEHATAECGAAPVTKASGKTKAVTFRWAANTKARNALATFASNSRHSSPWAAKVYADARRRGKHHPHAVRILARAWLRVIWACWHNDTIYDPARHGAERRLAART

SEQ ID NO: 105165 - protein, 394 aa, unidentified
MSLCVGIDVSKEKFDACGIGEGGKKMFSVSCPMDRSGFDKLVVQLPTDKTSFLLGMESTACYHMPLFSYLTTHGYQVVISNPLLIAQYANRSLRKTKTDKRDALTIAQFLMQEKESLSVETCSPLIGELRDLARRREKLTDQVTALKSDMKRILSVTFPELEHLTGVFTKSTLRLLADFPSAHALRQANYSAIAAIVIPRSRGRKSHASVHALMTAAASSVGVTSPAKEMILKQEACLLLEVEEQIRETTKLLMSLRNERIRDDTEILCSMRGIGENTAVNFLVEMGGDIGIYKNDKKLIAAAGLDPSTYQSGTYAGRSKISKRGNRHLRRVIWLMTTRTITNNAIFRAYFFKRRTEGLPYKKAVLATAHKLIRVMYSMLTHRTCFVEGGINYS

SEQ ID NO: 105166 - protein, 311 aa, unidentified
MTKNSIGIDISKAHLDVHRRASGEAERFANSPAGLRALRRWIGADLPDLVVYEATGPYHAGLESAFAGRLPLVKVNPLQARRFAQAQGTRAKTDAVDARMLAAMGAALDLEPDRPADENQRALKELQVARMAMVKDRTRLKNRMKTQTLAITKRQTGARLRQIERQLAEIEGEIKTLLRQCPRRARAHDILRSIPGIGEVAAGVILIECPEIGTMARKQIASLAGLAPVTRQSGQWRGKAFIQGGRKFLRDALYMPALVAARFNPDLRQKYQAMKDAGKPAKVALTALMRKLIELANTLIKHNRTWTPKSA

SEQ ID NO: 105167 - protein, 402 aa, unidentified
MNCVGIDISKGKSMIAVMRPFGEVVVSPFEVLHTDSELSELARLLKSLDGETRVVMEATGNYHAPVAWLLHDAGLYVSVVNAMLVHDYGNNSLRRAKTDKKDAVKLANYGLDHWLTLPRYVPDEDTRLMLKTCYRQYQQYSKVQTMLKNNLISLLDTTFPDANRLFASPPRADGSEKWVDFVDAFWHCECVCGLSEKTFITRYQKWCRKHGYNFNENKALDIYASACGHFGVMPKTDTTKLLVEQAISQLRATSAALAALKQEMQSLAASLPEYPVVMGMFGVGPSLGPQLMAEIGDVRRFHSKKALVAFAGIDAPPYQSGQMDVRSRSISKRGSASLRRTLFLVMSVILQRAPMDEPVYQFMSKKHSEGKPYRVYMMASANKFLRIYYASVKAYLDSMEYD

SEQ ID NO: 105168 - protein, 337 aa, unidentified
MNSSGRTIAIDTAKRVFFLHGENEFGKVILRDKLTRERLLPYLANQPASTIAIEAGSGAHHWCRAFVRLGHEVRVIHAKFVRPFVKSNKNDWNDAAAICEAAQQPTMRFVAPKSLEQQDLLTMHRIRERIVSQRTGLCNQIRGLLAEYGIVLPQSVSRLRRALPDVLEDAENELTVRGRELIASLLEEFRAIDERIKPYDRAIEQASLDSWTCRRLRSIPGIGPVGATAVVATMGDPKAFKNGRHFAAFLGLTPQQHSTGGKSRLGSISRRGDVYVRRMLIQGAHSILKHIAHREGPRADWLSALVARRGRQVAAVALANKSARIAWRGERSIPGAA

SEQ ID NO: 105169 - protein, 338 aa, unidentified
MTIKVLGIDLGKRNFHVHGVDEHGKQVVRNKYTRKGLLKFLSNLPACTVGFEACGGAHYWARKAEEMGHTAKLMPAQFVKPYVKSNKNDYLDAEGICEAVQRPTMRFVTTRTPEQQALGAMVRLRDSLVRQRNAVINQVHGFMLEFGFEYPKGRTTVTRLPRMVSENEEHFPAMLVSTLLRLYDEFTFLTLQIQDAEKEMEGYVKQDDRGRRLLEMPGVGLITASCLLAWVGDAKQFKSGRELAAWIGLVPKQYSTGGKQTLLGIGKRGHKKLRTNLIHGARSALQWHIETPSRWNEWAKNMLPIKPKPVLIVALANKLARMIWVILARDESYVAIAA

SEQ ID NO: 105170 - protein, 370 aa, unidentified
MLNTTTFVGLDVHARSIKAVALDAMTGEVRSATFGYDAAEVAGWVSSVDPSAKCVYESGVTGFDLQKRLASMGIDCVVGAVSKMIKPPADRKRKNDRNDAEFLARMLSVGNVVEVWVPDDGCEAARDLVRALDDAREDLKRCKQRLSKFLLRHGYVFSETTPTGRRKGSWTAAHWAWIKSISFPEKADDDVLAYYVDAVRQAMEDKARLERLVEAEASKPRWKRRVDSVRCLKGIDVTSAAGLVFEAGEFSRFKSARSFAAWLGLTPSERSSGESVRQGGITKAGNKHLRRVLVESAWHYLGCSPHSKDLAKGQVPDPAARRHAAKGVRRLVERRRAMLERGVHKNKANVATARELACWCWAVGRMVENG

SEQ ID NO: 105171 - protein, 337 aa, unidentified
MSRARIYKEGTLTVQPNSSAKSWVGIDVSQDWIDVVVLVEEQAAAKLRCARSSAALAELAQTLLPYAPQGVVLEATGGLEVAVITALAAVGLPVMRMNPKRVRDFARAHGLLAKTDTLDAYVLALFGARMQPPLRAWPEAERQQLAAWVTRQQQLTLQRAAERTRLHQTTESGLKQSLQRVIAFLGKELARLDKQLARWMETSEAWKQQDTLLRTVPGVGPKTSRQLLAQLPELGQLNRREIAALAGLAPVACDSGHWRGRRRIQGGRGTIRAALYLASWTAIRLPGSLRQFYQRLVGAGKPKQVALIAVARKLLLILNEMVRTNQPWRPQNTTIPA

SEQ ID NO: 105172 - protein, 369 aa, unidentified
MAKNGTLAKSQDLQPSFQTTTEQITIGIDLGDRFSHCCVLGPDGKVLTEGRLRSTPETMARHFQDLLPARIAIEVGTHSRWESQLPGQWGHEVIVANPRNLRMIADSIRKSDQVDAHMLARLARVDPKLLSPIVHRKQESYPDIIQLKARDLLVKNRIRLMNAVRGVLKSAGLRVPSSGTSCFPSKAAVCIPDELKLSLTPLLETISHLNKQIYSLDKAIESTAQNRYPETNRLRQISGVGSITALQYVLTIGDPGRFAHSRDVPAYLGLTPRRHQSGSVEQQLRITKAGNKQLRSLLVQCAQYLLGRFGPDSDLKRWGTRMFERGGKNSKKRAIVAVARKLVVLLHRLWVTGDTYHPLYNVAMSSVTP

SEQ ID NO: 105173 - protein, 343 aa, unidentified
MSYKLYFGVDVSKLWLDIAYYNGVDVDWKHGHIRVDNDEKGFAQLGRWLDRLGVGKGTCIFCMEYTGLYSQEFRQWLERMKIVYGMVSPRKMHRFEPDLGEDERSLDRIKTDEMDSFRIAIYCKEHSMKIRRKPSHLPSDAYFKLKRLLAERRQYVKQSTLYKQQLHDIGKYDTEASRHRKEAELASLTENALQTSKEMEAIIREDADIRKNYGLLCSIKGIGLIVAAETIVLTENFTSITNPRRYACYVGIAPGRKESGVSIQGGDHVGRKGFTQAKADLSMAALHAIRFDKGIRAYWLRRKAEGKHSGVVLNAVKFKIVLRMFAVIRRQKPYVEMEEYGKK

SEQ ID NO: 105174 - protein, 318 aa, unidentified
MFVGVDVSKDQLDVALHERSERWQFKRDERGLGSLVEHLRELGEPVTLVVLEATGGLERDVAAALAAAKIATAVVNPRQVRDFARATGKLAKTDRIDASVLAHFAEAVKPSVRPIADDLALALEARLTRRNQLIQMLVAEKNRRATLLVQWTGSAKMVKSLDAHIGWLEKQIAELDDDIDSHIKNSPIWREKDDLLQSVPGVGPVTSRTLLGYLPELGTLDRKKVAALVGLAPFNHDSGQASARRAIWGGRAEIRNVLYMAVVAAIRVNPVLRAFHARLKAAGKPSLVAITATMRKLLTALNAMVRDRSPWSPAALNP

SEQ ID NO: 105175 - protein, 429 aa, unidentified
MDERDSSRILAFRQLKKEIRGSKEHLIVGIDIGKNKHHAFLGTAIGNKLRSIIVENSASGFEHLLTMVQFFSDKERLRKIVFGVEPTSVYHKPLSEFLIRNGFLVVYVTNEAIKKNRALLDGRWDKNDTKDAANVADLIGQGKCQYYDFPQMNLRDIRSLLLLRKRLVKQAHSARIRIRNNLVAQYFPELDKFWNKSEKENLAIVRWCLSPHKINKMEFENFYKMVAPKYRGETQYQRISKIWEMSPYSIGCLAGLALDLEARILVEGLNRIRCDIIEVDRAIKAMCSCFDEYKLLLTIPGFGPYISAVVLAAIGNPDRFQNMKELIRLAGYDLNANRSGKKSNSAVPVISKKGKADLRYALYQAALIASSSNRYFRAYFHMLLQGREREKGIRTKMRVKLATKLLVVAWTLMKKHESFDPKSIRLKTK

SEQ ID NO: 105176 - protein, 355 aa, unidentified
MTSTKYIGMDVHKESISIAVRNAAGKIVMECVIETKASMILQFIDGLRGDVHVTFEEGTWAAWLHDLLKPHVTKLVVCDPRRNALLQEGNQNDRVDARKLAELLHNNQLRSVYHGDHGLRTLKELVRSYLTITQDLSRVMTRVKAIYRSWAIPCTGKQVYGPNHRAEWLAKINEPGVHRRAEFYYQQLDALRCLRQQVRRDLLAESKKHPTWKQLCGIPSIGPIRAAELLGILQTPHRFRTKRQLWTYGGVGIETSSSADHHVMKGQLERKKKQVEIRGLNRNYNHDLKNLFKGAAIVAATKPGPFAEFYAELLAKGMRPEMARLTLARKIATIVLIVWKRGVCFDAQHLKPQTA

SEQ ID NO: 105177 - protein, 339 aa, unidentified
MARYVGVDLHRNRFTVCVLAENGRQYLSAYRLEQLPLFVRKLRPTDELAVEVTTNTRLFYNAVVSHVAKVVVVNPTQFKVVRESVKKTDPHDARTLAFFLSKGMLPEVRMKEKLHAQLASLTQTRDLLVKQRTALKNKVNNILSAHGINLPREKLSSDAALEEVVGMTFEPIVQAEVRVVVGQIRALNQSIAELEKTIKAEGPKLPGHRNLRSIKGIGDLGATILLSVIGDIHDFADPGKLAAYFGIVPRVRNSNEMERSGRITKRGTKLGRTTLVQCALSAQRYSPYLAKFYSQVARRRGGGKAIIALARKFLGVIYYTLKNNWVFADFPHFVLAEAS

SEQ ID NO: 105178 - protein, 520 aa, unidentified
MVSDPLSFPLSRGSSMTAPTTRRRPASAPPPGAQQAQAQAHRQAYHRRKTRAKAKCEALHQQEVARVEALPVQHPHAAGIDIGSRSHWVCVGFATEAGSCLIQEFPAHTAGLKAIAAFLREHQVTTIAMESTGVYWIPLYELLSAEGFEVLLVDPSYTHQLRGRPKTDRRDCQWIYRLHSVGLLAAAFRPDEKTCQLRAYLRQRGNVIRQASRHVQHMQKALEQMNLKLTEILSDITGVTGRSILRAILRGTRAPEKLAKYRDKQCKASEAEIAQALTGSYREEHLFELKLAYEAWQFALGQVAKVGEQIALQLGRMKCDRALPPLKSKARPKRRVNSPGFDVRTALYYVVGLDLTEIEGISELTALTVISEIGPGVSRFATVKKFCSWLGLCPNWKKTGGRVKSSRTRRGVNRAAQALRLAAQSLHHSQGALGGFLRRMKARLGAQAAVTATAHKLARIVYLALKHGLTYVRQSQEDYEAQMKEKQIKALRRKARQLGLEVVEPTSGSVPLAATTSAQG

SEQ ID NO: 105179 - protein, 405 aa, unidentified
MQVIFGIDVSKAKSNVCELVGNGKNEFEISNDRIGFKQLVKELATFKEHPQIIFEATGVYSRRLQALLEDYGYDYVVINPLKAKKEMDSGLRRNKTDKADAYRLAMIQRLYKHPVSQAQSQIYKQLGSMSHFYDQLTSDIVTDKNRLHQSLQSTFAGIEELFESAKGENYWKIVKQYYHCNLVVFDDSQSIATWLEGLRGMASRRAQKTAKKLIELAEKSYPAVDEKSIEAQQVQYYAQRLLDLDKKRGQVLSKMIKLARTLPNNDLKNLESIPGFAQTTAVRVLAELGDVRRFANPGKINAFIGIDPGRYQSGEMDASLRISKRGNAIARKLLYRAIGQIASAAKTNPCHIADYYENKKRSLQTKGFKKIAIASISRLLRTIYALIINDQTYDYDVAKRNQKRL

SEQ ID NO: 105180 - protein, 406 aa, unidentified
MKLTCGVDWAEAHYDVALVDGDGVVVARARIDTGATGFNKLLALIAEHEGSAQDTPVSIETDKNLLVVALVEAGFTVYPINPRAVARYRERYGQAGGKSDPGDAAVLAHILRTDRHLHRQMPAVSEQGRAVKALARQHQEAIWALHQTVSRLRSVLLEFYPQALQAFPNLTHKAALTVLAAAPTPASSRQLTRRRVVTLLQRSGRGNHPTLVEQILTDLHTAALRQPPQVEQALGHTVVGLVGIVVAMQRAVDDLELELAREFDQHPQTAILRSAPGLGPILAARILAEIGDDPQRFANPNSLRAFAGTAPVTIASGRSHYGKARKVRNKRLADACHWWAFTALTKSAGAREHYDKRRAAGDHHNAALRNLANKLLGRLWWCLANNQPWDDTAAWPHRLKPDSVAA

SEQ ID NO: 105181 - protein, 384 aa, unidentified
MRAVCGLDVHKDSVYLCILTGEGELIEKIFGVLTFQLQQMRDLLLAHNVDEVSMESTSVYWIPIWRVLAPHFHMRLVNPYFIKQLPGHKSDVADAQWIAECTLKNLVSGSFVPPEDIQQLRQYDRRIFDLDEEIVRKLSKLDAVMQRCNFRLSNYVSNVDCKSYKDVVRKISEGVTDPESLIGEIYGRIIKHHGRETILASLAGVISQAEIDVLRQLREELALAEEHKRECLERMLEICQEKYPDELRRLQTIPGVKERTAASLIAEIGTDMSKFETANHLSAWSGLRPRNDESNKKFKSRRITHGNVYLRKNIIQCAWAASRTKGCFFSRFSYHQTQVRKKNKMKVIVAVARKLLVAAWHVIHDKTDYVDFQKRDRQAPASNG

SEQ ID NO: 105182 - protein, 317 aa, unidentified
MNKIPKVFVGVDVSKNNLDIHINPIEKSFKIENSVSGMKRLIKELALYEVGQVVCESSGGYENLLLETLTRWSIKNWQVDPKRIKAFIASEGVLLKTDKNDAKMIALFASQKRCKYTAHRIYSREKERKLKALVIRKLNLTDMRTMEKLRLGAPTQLYCKKEISASIKFLTKQIKEVEEKINDIIDNDDEFKRKSKILESMPGVGKATASTLISTVSEMGKIENKKIASLVGVCSVNKESGKYRGKARIQGGRPEPRKALYMATLSAIKCNQPLSEFYKRLRGKGKAPKVAIVAVMRKMIVMMNAMIKSNREWAIEA

SEQ ID NO: 105183 - protein, 362 aa, unidentified
MSDVMRSFVGVDLHKCTVTLAAVDPLGEKITGLKISTKSVGKIEDWLAGLPRPVHLAVEACPFVEWFIERFRPCADRIDIADATELANRRGKRRKTDRNDALDVARRLARGECPLGFIAPPELMRLRKLGRHWRSLSRLLSRTKHSMKSMLNAANIRGPKFDGAAAQRWLLANRDLLGPIQQDAFADFIDILNLVERQRERMRRQMIFASRSGAYAPTIARLMTVPGIAEIWATTIAGEIGPFERFPNADALEFWAGLTADMKESAGRTQSGPITKAGSATLRWALGQAALTLCHCDARQEATRQRLIARLGKPRANVAMARRLLRVLYAMMRDGKAFQRGPRRDRTAAANRARLRRKKQVA

SEQ ID NO: 105184 - protein, 339 aa, unidentified
MNITTVGLDLAKSVFHAACCNQQGKIMKKKKLRRSQVLTYFAQLPPCLIGMEACGSAYYWARELRTLGHTVKLIPAQHVKAFLRGNKNDYNDALAISEAVVKPQMRFVAIKTIAQQDIQALHRLRSLCLKSRTALSNQLRGLLAEYGVAMPKGINVLRRYLAETLGQDQTHLTPFFQHLLAQGYKQLQQLDEHIDDYTKQLHGQLQDNEACRQLLTVPGFGPIVASAFYSEIGDGQAYRRGRDVSASLGLVPRQHSTGGKDHLLGISKRGNGYLRSLLVHGARSVVIQAARKEDRLSQWINHIRATRGYNKATVALANKMARMGWAVLRHRTVYQPMSA

SEQ ID NO: 105185 - protein, 402 aa, unidentified
MAYDFVIGMDVGKYFHHACVLDPQDRQVLSKRINQHEGSLRKLFGTYLADNASVLVVVDQPNNIGRLTVAVAQAMGADVRYLPGLAMRQLSRIHVGNSKTDVRDAYVIAHAGLNLPDALRSVDRVEEVFLQLKVLNGIDEDLARAYTRLINQMRSALVGTYPAFEHVLHGQMIHRKWILHLLAKYGGPTKIRRIGKARLAAFARGHRARNPEPVIDAMLAAIHSQTVSIAGAEYAELGVAMSAKDALAKLEHRKEIEAQVLELIQDIPQTEILLSMPGIGPRSAAQILMTVGDMSDFPDAAHLASYAGLSPRTNQSGTSIMSNSPNRAGNKKLKNALWQSSCASIRFHERSRQFYERKRKEGKRHNAAVVALARRRLNVLFAMMRSGELYRDISTVQEAAAA

SEQ ID NO: 105186 - protein, 337 aa, unidentified
MKGYLGVDLHRTQFVVCTRWENGEQEIRQWRISELPKFVEQLRKDDQIAVEATGTTARFYDAVVKRVARVAVVNPHQFKVISESVKKTDRYDAQALALYLEKDLLPEVRMKPKQNRELMHLAETRDLLVKQRSALKGKINNLLAMQGIELKREALSSKIALERVLALPVSGMVQLELRVLVGQIRTLSESIAELDQRLEEEGQQLPGYENLTSIKGIGSLSATVLLTVIGKINDFADENKLAAYLGLVPRIANSNESEHSGRITKQGNKLARTALVQCGLVAKRYSPYLQRFYERIKQRRGGGKAKIALARKLVKIVYDTLKNQWVFEDFPSFTLAA

SEQ ID NO: 105187 - protein, 345 aa, unidentified
MDHFAGLDVSVKETSICIVDDAGKIVREVKVASEPEALLAVLKNLAYHFKRIGLEAGPLSQWLFSALAEAGLPVICVETRHMQAVLKAQINKTDRNDARGIAQMMRAGLYRPVHVKTIRSQKLRMLLTHRKLLQSKAIAIENDLRGTLRNFGLKVGMVGKVKFEARIRELVENLLPELAVLVEPMLIVRRTLREQIVILHRRLLAIVRDDEVCRRLMTTPGVGPVVALTYRATVDVPARFRKSKAVGAVFGLTCAKYQSGEVDRNGRISRCGDEMMRVMLYEAAQSMLRSKKWSWLKAWAMQIARRRGMKKAIVALARRLAVIMHRIWVDGTEFRWTREQAIAPA

SEQ ID NO: 105188 - protein, 364 aa, unidentified
MCILYENGSKIESVFGVLTPELDKLRDLLVSHHVCEVALESTSIYWIPIWNILSVDFSLKLVNPYFIKQLPGRKSDVKDAEWIATVLQKGLIRGSYVPDRMIQCLRQYERRNHELSKNIVHAEQRMDMIHQRCNIRISNYVSCISCKGYQKVVNAIISGESNPKVLVTLIHKRTLNKHGRQVVEDSLNGFVSDTDRDILRQYRDERMQMEQHKSENKAKMQAICEAHYCEELELLQTLPGIKEESAANIIAEIGVVMKMFLTASAIVGWAGLKPRNDQSAGKIKSRKITHGNKYLRKILVEAAWSAARTKDSRFMKMYQRLLARGKSKQKALIAVARKLLVLIWNMLSKKEAFNPEYKRRIQAA

SEQ ID NO: 105189 - protein, 323 aa, unidentified
MAKHTTICAGIDTGKRKLDVALEGNREQLQVENTSEGHAVLLAWLRRHRVKRVGIEASGGYEQPVVVELRRQRFVVVVFQPAQVRAYAKFHLQRAKNDKIDAALIAACTAAVRKIHAAPDPRLLPFAEQLTMIDQINEDTARLKNRIESCRNARIKKLWNEDIARLEKREKAELKALVASIRKHPDLAKRLGLINSVHGIGLPTAVAILVRLPEIGQITREQAVALAGLAPYDDDSGEQVGVRHIGGGRKRLRRALYTASLAASFRWNQQLIQLYQRLTAAGKEHKRALVACARKMLIFANTVVARGKPWQDCPPEKAALTTG

SEQ ID NO: 105190 - protein, 440 aa, unidentified
MRLGTRMGNCRVQESAAHRISMSTEKRKVCGIDVHKAFLVATILDREGNCKTRRIQQNTESFLELRDWIQSENCDSVAFESTADYWRSLYLVLEGRVSVTVANAHHIKHVPGRKTDITDSRWIAQLELNNLIEPSRIFSGEMYDLRSLTRSRELLVQNRTELKNKIHHLLDSASIRLSSVLSDLFGKSGSIILKGLVQNKSLKEIINSLPKKMKGNAEAISAALPASISPIFLALLQSYLKLVEDLDTEIKLLEGRIRESLRGKSREIQILTSIPGIGFIGASTLIAEIGNIHDFKDADKLAKWAGLTPSVYQSANVTRTGSITKQGSRHIRWILVELAHIAIRSPGRIRTFFERLLPKKGYKKSIVAVARKMLRIVWHLLVHDEVFVDDIPRSKQVKFPKMPNKIQSLGINEIIELLSKASEVIFKDHDKEIFRLELND

SEQ ID NO: 105191 - protein, 319 aa, unidentified
MLYVGIDVAKNKHDVTALNVSGKTVLKPLTFSNNKAGFELLDLSLRQLNQDYLIALEDTGHYAFNLLNFLHEQGYKVYTYNPLLIKKFAKSLLLRKTKTDKKDAHGIALKLLSDPNREQFQHDNRQVELKILARHIHRLKKKQSDWKVQYTRCLDIIFPELDKIVGKHSEYTYQLLTCYPNPQKRLEAGFDKLIEIKRLTASKIQDILSVAPRSIGTTSPAREFEIIEIIENIKHYKRLIDKAEKCVNDLMAELNSVITTVTGIENRLGAVILAEIRNIHAFDNPAQLQAFAGLDSSIYQSGQIDLAGRMVKRGSPHLR

SEQ ID NO: 105192 - protein, 393 aa, unidentified
MICVGIDVAKDKHDCFILSSEGEVLADVFTIPNNAEGFDTLLQTIRRCARPEDKIKVGLEATGHYSYNILGFLLNEGLDTYVINPLHTNLYRKSLSLRKTKTDRVDARTIAAMLMSDVDLKSYTDTAYHNEELKSLTRYRFDKVRERAKLKQSVSRLVTILFPELENLVPTLHMASVYALLSEFPGGKQVSEAHLTHLKAVLYDASKGRYGRDMATTFRDAARCSVGSVMPAKSLELRHTIRLIHELDAEIEDIEAAIQSMMDDIQSPITTIPGMGVRMGAMILAEIGDFSRFDSPDKILAYAGMSPSTYQSGQLSLSGAYSHMEKRGSRYLRYALYNATKYVCLWNPTFAAYLAKKRAEGKHYNVALSHATKKLVRLIYALEKSKRPYSTAA

SEQ ID NO: 105193 - protein, 344 aa, unidentified
MQFSVLGIDLGKNVCSIVGLDASGAVVMRRRARRETLIALAAKLPPCVVAMEACCGAHRLGRVFAGHGHDVRLMSPEYVRPYVKAQKNDDRDAEGIAEAATRPTMRFVELKSQEQLDMQTLHRARDRLVGERAALINQLRAILLERGIIAPQGKRKLEQFLAALMDEQGGAELSPRMIMLVADTRAQWTELDRRIAAFDAEFVRWVKEDEDARRLATIPGVGPTIASALIAAIGKAERFEHGRDLAAWLGLVPRQFTTGGRPKLLGISKRGNRYLRKLLIDGARAALPSVAERATPLGRWAKALLDRAHPNVVVVAFANKLARIAWAVLRRGERFAVKGTPSAA

SEQ ID NO: 105194 - protein, 344 aa, unidentified
MYKLSRVGVDLAKNIFQLHGVDRTERSTWCRRLKRDNWIKVLLKKVEPGCEIGMEACTGAHHWARLLQAKGFHVKLIAPQFVKPYVKSNKNDANDAEAICEAMSRPGMRFVTVKTVEQQNIQAVHRIRSELIGQRTAKANQIRGLVAEYGLVAPQQINHLRAALPVWLEDAGNGLSDRFRRLLNGLWGDLKRLDERVTEMDKEIALIAQHDPVAKRLQQLRGVGPMIATALIASVGDGKQFCNGRQMAASLGLTPKQHSSGGKDRLLGISKRGDSYLRSLLIHGARSVIYAARGKEDRLSQWVISVASRRHPNVAAVALANKTARMAWAMLRYDTDYHPELAAA

SEQ ID NO: 105195 - protein, 414 aa, unidentified
MPNTLIVGIDISSQSNSIFFIDDAGNHLIKKPFYLPNDQEGANELVNKIIDCLNQFNLSSVKVGMESTSHYAWHLHLYLASSSELLPYKPTFFVLNPSTGKGFKKIYTFLPKTDNIDAIIIAEYVRFSKLNPTPLPDFKYAALQRLTRMRYYLVHNLSREKNRALNLIYLKFSSYSKNCPFSNIFGKASLAIIENFTPDDIASMPLEDLINFISDNGNNRLSDVNKIAEELKTAANRAFRLHSSLTETNDLALSMTLENIRFMQQQLKKLDKEISKLLNAFSQTLNTIPGIGDVLAAGIIAEIGDINRFKNEAALAKYAGLVWTQYQSGNFNAQETSLAKCGNQYLRYYLVEAANCVRVHTVRYKAFYSKKYSEVTKHQHKRALVLTARRLIPLIFTMLSKGQIYQERGDVYNT

SEQ ID NO: 105196 - protein, 354 aa, unidentified
MQIHTIGVDLSKTVFHLVGLNLRGEVVVRKKCSRSQLLQFTANVQVDLIGMEACAGAHFLGRALREQGHEVRIIPAQYVKPYVKTNKSDFIDAEAIAEAVGRPTMRFVPVKTDDQLDMQSLHRVRERWVIRRTAVINQIRGLLLERGITLRQGRRHLEAALPGILEDATARLSGALRMLISQLKHELEELANFIGEADGTMERTSRENESCRRLLAVPGIGPVTATALIAAIGNGAAFRKGREFSAWVGMVPRESSTGGKQKLLGISKRGNPYLRKLFIQGARAVMLRGTKQSVGLRTWIENIALRKHHNVAAVALANKMARIAWVVLARGEAYRPSLLIDSECNLNGLRMTPA

SEQ ID NO: 105197 - protein, 356 aa, unidentified
MPSKLNTAIAVAGIDIGKNSFHVIGLDKRGAIVLRQKWSRGQVEARLANTPPCLIGMEACVGAHHLSRKLQALGHDARLMPAKYVRPYSKGQKNDFRDAEAIAEAVQRPTMRFVVTKTGDQLDLQALHRVRERLVGQRTGIINQIRAFLLERGVAVRQGLRFLRIELPGILAKRTDVLSPRMLHLIEGLADDWHRLDERIEVLSSEIGALACGDPACDRLMTVPGIGPIISSATVAAIGNGAAFSKGRDFGAWLGLVPKQISTGDRTILGKISRRGNRYLRSLFVQAAWVVLVRVGPKHWDRYGLKSWIEAAKKRLHHNVLAIALANKLARIAWAVLNKERKFECIRTNKMSPRAA

SEQ ID NO: 105198 - protein, 392 aa, unidentified
MYIVGIDIGKNHHEASIVSPEGKQIGRSLRFATTHKGADSLMSFIFKNIGNSPCVFGMEATGHYWYPIYSFLKAKGYTIYVINPIQSDSLRKMYIRQTKNDSIDSFLIAEVIRFGQFGTTSMADENILAMRQLCRYRDSVISSRTEIKLRIGTIMEQIFPEYEKQFSSLWVSTSMGILEKYLTPENIENAPIDELFEIIKDKSHNRLTRAKAISIKEAAADTFGIKIAQDAFSFQLKQLIDRMNFLDKQIEALDCQILEYYEKFDCYLHTIPGIGMIAAATILAEIGDINRFKSSSALVAFAGIDPTVRQSGEFSSTHNHMSKRGSPYLRHAIFLAATTCSFHNSPLNAYYKKKRDHGKHHLTATGAVARKLTTVIYAVLRDGKPYEPKKFC

SEQ ID NO: 105199 - protein, 352 aa, unidentified
MDSKKYIGMDVHKESISIAVRNAAGKLVMECVIETKANAILDFIHGLRGELQVTFEEGTWATWLYDLLKPHVTRLVVCDPRKNSRQGNKNDQIDARELADRLYMNKLSSVYHGGAGVRTLKELARSYLTISKDLARVMSRVKAIYRSWGIPCAGKQVYALRHRAEWLAKITEVGVLRRAEFYYQQLDALRPLRHEVRRELLAESKKHPVTKLLCQIPSIGPIRAALLIALIQTPHRFRTKRPFWKYSGFAIEMHSSADYRSVKGQLERTQKQVSVRGLNRDCNHDLNLFKSAATIASVKPGPFQEFYAALVAKGMRPEMARLTLARKIATIVLIVWKKGVSFDAQHLKPQTV

SEQ ID NO: 105200 - protein, 338 aa, unidentified
MTIVLGLDQHRAQITAEWLDTATGEISRKRIAPADRAGVRAFAGRFRGRELEVALEATTGWRFVAEEFQAIGAQVHLAEPAETAARRGTKKRAKTDRADARHLRELLMVGRLPESWIPPDHVLELRARVRLRHTLVDQRREWQQRRQAVLDHHGGPPRSWLLGAASRAWLATLALPPAAREQITIALAIIDGLDAQLVPLDERLREFAKRQPGCRALMRHYGIGPLTSVTILAELGDARRFSSSREAVRYAGLDITVHQSDSRRAPGHLSRQGPPALRWALFEAAQCARRPGSPDHDYYVQTAARLGGNRACLAVARKLLKRSFHTLRELGEEAIAPA

SEQ ID NO: 105201 - protein, 429 aa, unidentified
MNGVDTTRLERFRQLRKEIRGSNEHLIVGIDVAKDNHHAFFGTARGKTLLKRLVFNNNLQGYEKLSTYVEAAKVKNNLNKVVFGLEPTANYHKPLGEHLIKCGFDVVLVAGTAVKKNRELLDGRWDKHDTKDAANVADLVSQGKCMFYEYPIMLLRELRNLLSFKRRLKKQEHGTSVRIRNHLLAQYFPELDPHFSRMSGCSLSVVKWCLEPSLIAGMEYEEFLRLVAPGKRTIRQREHVKLIWEKAFESIGCKVGETVQFEAKMMVEELQHVRESISEVEEKIEDICLNFPEYKYLLSMPGFGKDISSKVLGAIGNPFRFDNAKQVIKLSGWDLNANRSGKSSGYATAVISKKGKADLRYALYQAALVASSKNQHFVAYFTEKLRQRSREKGIKTKMRVKLAAKLLVIAWTLMKKREPFNPEYLKVTL

SEQ ID NO: 105202 - protein, 363 aa, unidentified
MTTIASDSSRDQIEIAAGVDTHQDTHTVAAVDAAGRLLGHSTFPATGAGYHALLAWLHDLGVVLVVGIEGTGAYGAGLARYLSSQGIEMVEVDRPDRRTRRSAGKSDPIDAEAAARAALAQVRTGTPKAREGKVEALRNLRVARRSAVDQRADCQRRIKTLIVTAPEELRARLRVLSDRELLTTCAALRPDTERVSDPEQATKVALRNLARRHAALVADIAELDALIEPLVAAINPDLLQLNGVGADTAGQLLVTAGENADRLRSEDAFAMLCGVAPIPASSGKIHRHRLNRGGDRQANAALYRIVLCRLRWDPRTQAYMRRRTAEGLSKKDVIRCLKRLIAREMFYVITKTATDNQTLTMAA

SEQ ID NO: 105203 - protein, 413 aa, unidentified
MDIVNERCCGLDVHKKTITACVILSSPTSPARKQIRVFDTMTCDLLTLADCLNEVGVTHAAMEATGVYWKPVWNVLEGRIAEILLVNAQHVKAVPGRKTDQKDAEWLAELLRHGLLRSSFIPPAPIRELRDLTRLRVSVVEDINRVTCRIQKVLEDANIKLASVASDTVGTSGRAMLDAIVAGQTNPEELAQMSRGKLRRRIPELRTALHGKVTDHHRFLLRQLLEWLRFLEVQLKDMDAEIADRLTQDAEQISRLCTIPGVDRITASGLVAEIGLDMTRFPSAHHLASWAGLCPGNRESAGKRLSGATRKGSPALRRCLSQAAWAVAKTKNNYLSALFHRITARRGKKRAVIAVAHAILIAAYYILKRRESYRELGGDHFDRLNVAKTQRALVRRLERLGNTVILAPASPKG

SEQ ID NO: 105204 - protein, 390 aa, unidentified
MVTTHFQTETPTAIRTDLGANFVSLELSRSTWLVTSLSPGGGERMSKHAVAGGNVSELLARFTHLQEKARSRSGRLFPIVTIQEAGLDGFWIHRVLETNGIESYVVDAASIAASRRRKRAKTDKIDGEALVRALLAFKRGEPRVCAMVKAPSPEEEDRRRICRERRVLIAEKVEHVNRIKGLLFAQGIGGYQPLRKDRRRQLEDLRTGDGRVLPPHLRAQICRVLDRLELLLDHIAVVERERDALVERVECEAKAPEPATMLCAIKGVGPEVAAVLWTEGLCRQFDNRRQVAAYAGLAPTPWQSGTIDREQGVSKAGNPRLRTTMIQLAWLWLRNQPSSALSRWFIDRVQSNGGRHKKSTIVALARKLLVALWKYVTFGIVIDGAVLKSA

SEQ ID NO: 105205 - protein, 343 aa, unidentified
MQAVKTIGLDIAKSGFQVHGVDADGQVVFRRQLKRRYVLAFFQKVPSCLVGMEACATSHHWSRELQALGHTVRLMPPADVKPSVKRQKNDATDAEAICEAVTRANMRFVATKTPEQQSGLVLHRTRHLFIRQHTAVINAIRAHLAEFGLVAAVGRHGMEQLLNVVADAGDKRLPEVARPCLMALGTQLRALKAQLLELDRLITAWHRSNETSKRLDAIPGVGHVRATALVASIADPKVFRSGRDFAAWIGLVPKQHSSGGKDRLGSISKPGDRYLRSLFTAGALAVIRYAKIYGTKHRPWLTALLARRPTKVAAIALANKLARMAWAMMTRGERYKEPVARAA

SEQ ID NO: 105206 - protein, 454 aa, unidentified
MAPRHQKTKQKIHAQLPTLHPHAAGIDIGAREIWIAVPPGSDPKPVRGFDTFTDDLLQLRDWLIQCGVQTVAMESTGVYWIALFQILEASGLEVCLVNARHCKNLPGRKTDIQDCQWLQYLHSVGLLHGSFRPPEQVCAVRSLLRHRSRLVRCAADQVRLMHKALTQMNVQLQHVISDLVGVTGEAIVQAILAGERDPVKLAALKDHRIKASHDTIARSLRGDWRPEHLFTLSQSYQTWQHYQKQITACDAQIEAQLANWGARVDVQAHPLPAPKTSHRTAQRNEPQFDARTESYRVLGVDLTALPGFQTPTALLLLAELGPDFAQKFPSAKHFASWLGLCPDNRITGGKIMSSATRDVKSRVAEALRLAAQSLWHAQNYFGELYRRWKARLGGPKAITAMAHKLARIVWHLLKHRQAFNPEVFRKQEEKMRRKKIARLQNTAAALGYRLVQSQ

SEQ ID NO: 105207 - protein, 368 aa, unidentified
MRIIGCDLHARQQTLAMLDTTTGEVVKITLKHEGDSVREFYSRLPRPVRVGIEATGSMQWFLNLMGELEIECLVGHPAEIRAAEPRKQKHDRRDADLILKLLTGNRFPAIWLPSKELQDLRSLLRHRHQWVRMRTRIQNALQSIALANGLRRGPSLWSRDGQSRIASLPLAPHTAYRRSELQAMYEKFEAEIEKLNQRVQEQACGRPGARLLMTHPGVGPVTALATDVFLGDPARFADSKALASYAGMIPREYSSGGRQRLGGLSKQGNPLLRFLWGEAGAHAVRRDPELQRFYRRKLVQKGLGKASVAVARKLGIRLWIMLRDQIEYHEFCRRGQKQQKSSGACAGMPETRYGAKSHRPVDKATRLP

SEQ ID NO: 105208 - protein, 412 aa, unidentified
MQDILTCVMGLDVHRDIIVACLAKGELGTDPEIEIRSFSTLIPEMRKLRDWVLEADCRHVAMESTGIYWQPIYEMLEPCFEGEINILVVNARHMKNVPGRKTDMRDAQWIATLLRAGLLKGSFIPDKAFRELRHLTRYRKSIVHDITAQKNRIDKFLQSSGFRFTAFLSDAFGASGRNIIRHLIQNSSIDRAALDKCLKTQTRKRIDQILVALNGSLSIHQRSFLAMAFGHLETLEAHRKAIEDAIANEILKHSEALNLLCSIPGIDVTAAAAIIAEIGTDMSAFPDSQHICSWAGLSPGSNESAGKRKSAHINKGNPYLKSMLCEIGWVISGKRTLYLSGWYWRIKQRKGAKRATIALARKLLTLIYTMLKTGVPYNEDCFEQRRKRCERKRAHRMVNELQKLGYMVVPPS

SEQ ID NO: 105209 - protein, 392 aa, unidentified
MVVSVGIDVSKDKHDCFIVSSEGEVRADVFMIPNTMDGFHFLLQRIRDCANAQDKIKVGLEATGHYSYNLLGFLMDNGLATYVLNPLRTNLYRKSLSLRKTKTDRVDARTIASMLLSDEGLKPYSDAAYHNEELKSLTRYRFDKVKERAKLKGSIARLVCILFPELEKLVPSLHIASVYALLEEFPGARQVAVAHLARLKALLETASKGRYKRDIAQEIREAARNSIASRMPAKSLELQHTIRLIRELDAEIHEIEAEIEAMMDEIQSPITTIPGIGCRMGAMILAEAGDFSRFDSPDKLLAYAGMSPSTYQSGQLKNCYPHMEKRGSRYLRYALYNATKYVCLWEPTFAAYLAKKRAEGKHYNVAISHAAKKLVRLIFAMEKSRQPYRAVA

SEQ ID NO: 105210 - protein, 372 aa, unidentified
MGHHTEAFVGIDTSKSRNAVAIADSGRGGEVRYLGEFPATEAAIRKLVAKLAAKCCHLTFCYEAGPTGYGLYRLLKSLGHDCLVVAPSLVPKKAGDRVKTNRRDALSLAKLLRAGELTAVWVPDERHEAMRDLSRARLAVKKDLQGKRQQISSLMLRLGRIYPGKTTWGRAHMRWLMEQKFEHREQRIAFEELLEGIRQESERMERLEDAIREVVPDWSLAEVVAALQAMRGIDLIAAVGVLAEIGDLSRFQNPRELMGYLGLVPTEDSTGDKVKRGGITKAGNGRARRILVEAAWSYRYPPRVSRDKQPKVEAAPRRAREIAWKAQTRLCGRFRSLERKGKRRTVIVTAIARELSAFIWAINRELLPPRQA

SEQ ID NO: 105211 - protein, 354 aa, unidentified
MFAGIDTHKDTLAVAVIDDAGQLLAAREVPNTEQGFVELVGLFDTHQVVRVGIEGSGHFGRAVAVHLLLCWQPPRSVAVVEVPTLMTSRERRGQLGKGKTDPVDALAIARITAREPQLPPVRLTVGPAADLRALLDYREDLVTERGALVNRAHAELSGLRAGYHHQVPNLTTRARVHVVLTLIADQDSVRAVLCRRRLERILAIDAETAELKRQIADLVAAASTTLTDLHGIGPLVAARFIAEVVDVRRYPNRNAFAAANGTAPLPASSGRTVRHRFNPGGNRQLNRALYTIAITQIRSDTEGRAYYERKRAAGKTKREALRCLKRRLSDIVFTTMRRDAAHASVSLRPLTLPT

SEQ ID NO: 105212 - protein, 345 aa, unidentified
MQVTTIGLDIAKNVFQVHGIDVAEKVVVRKQLRRSQVLEFFKALPPCLVGMEACATAHYWARELTKLGHQVRLMPAKDVKAYVKRNKNDAADAEAICEAVRRPTMRFVQIKSVEQQGQLMLHRTRDLLMRQRTQLINALRAHMAELGIVAAQGTAGLKELLKIIAGERDARLPVDAHASLVVLAAGLHAVQTMVGSIDKRIIVEHRSNEASKRLRSIPGIGLLGASAIVATVQDPKAFRSGRDFAAWIGLVPREDSTGGKQKLGPISKQGDRYLRRILVVGAHAVLKLARQKPEKHPWLTQLLARRPFKVAAVALANKMARVAWALLAKGGTYYRARALVAPAAA

SEQ ID NO: 105213 - protein, 367 aa, unidentified
MKTNTTPSLVSTSTPAVVSGFTLGLDLGDRQHHVCVLDTAGQMVREAALPNTRPALARLLAEFPRSIVALEAGTHSPWISRYLTDLGATVLVANPRKLHAISRSERKCDRRDAQMLARLARVDAALLHPIQHGSAQAQHDLLGLKLRDALVRTRVSLINAVRFTLKSLGHPVRNPSSESFHKHVLQDIPADCLPVVQPLLTVLAQVTEQIKAMERDLVQRSKKDYPVTQRLQQIAGVGPLTALCFVLKIGDPERFSRGRDVGAYLGLCPRRDQSGGTDKQLRISKCGDGLLRRLLVSAAHYVLGPFGPACALREHGQRLTGTGSSREKKRAVVAVARKLSVLLLSLWKHGTDYEPRSTTPKLLLIPA

SEQ ID NO: 105214 - protein, 343 aa, unidentified
MEESQRLVVGVDTHKETHSAALLDQLGGVIASTDVAANQRGHIWLLEWARCRSSRRTWVVEGTGSYGAGLASFLARSGEVVYEGDRPQRRKRGAGGKSDQLDAIKVAREALAREHHALPRQRGNREAIRVLLSTREGAVSAYRQALNQLYALVVTAPETIHERLIRLKGDQLVNACVRLRSTSGDIETSVTTKVLRQVARRIRTLQAEAADQEAQLEQLVAESVPALLAEPGVGAITAAQLLVSWSHAGRIRDENAFAAMAGVSPVPASSGQVVRHRLNRQGDRRLNRALHVVAISRSNFHAPTKSYIARRTAEGKSTREIRRCLKRYLARRFFRLLQGLDRP

SEQ ID NO: 105215 - protein, 379 aa, unidentified
MFENITYVALDDHKRMHQVAVLLPGMERKEALTWRVENTRAGIRKMVRKVLKMAPGDVRFCYEAGPNGYVLQRQINKFDSVSCVVVAPSKTPRRSGERVKTDRRDARKLVGLFRAGELQGIVPPMEEEEAVRDLCRCRRTAQKRVTASRHQLDKFLTRNGYIYWDGRNWTRRYREWLRSLKFDDWRRERTYQAYLFAIEQDEDRVKRLDLDIVRAAEEEPYRTLVGFVRCFRGLDTLSAMVLTSELYAVGRFTTAPSLMGFVGMVPSEDTTGWEPRRGPVTKAGNEHVRRILVESAKHYRHPARVSKALTQRRKDQPDWVIDVADKAQARLHQKYWRMVKGKGKHPNIAAIAVARELVGFIWAVLIQAATTGDADMCVN

SEQ ID NO: 105216 - protein, 425 aa, unidentified
MTQPYGNTGEKVLVAIDIAKKSNTVLIQFPDESRKKFIVANKLSDYQEFTAYLKSLGYPCVIGFEATGNYHRPLAYYLQQEDFYLKLISSMAAARTREAMYNSWDKNDPKDAQVILHMLKTGLTQTYHDPLLHRINDIQELSKTYYQVSLRKTRVQHSIMTHFLPLYFPEVQKYYYTSRAQWFSSLLLGFPSPSSVLKYSLEEFIEAARDVAGRKVNKSAWLTDFYETASSSIGLPVTEDSEAMTMFRLVLQEHQHLCRLRRSIEERAELYLKDNADYNRLQTIPGIGPVIALTILAEAGDLRRFSHYKKFLKYCGLNLSTLQSGNFRGMSKLSKHGNARLRYVFWLAGNSAIRMRENTFRKKYENYIKANPNNPDLKRKAYTAIAAKMARVAYSLVKSEKDYRCFYESSIPSGKIPSVGPLRHL

SEQ ID NO: 105217 - protein, 429 aa, unidentified
MKIIYPRVCGIDVHKQFIVAVICISESVEPIYLKKRFSTFHNDLIRFREWLIQNDCQNVCMESTGKYYIPVYNVLESHISNIVVANPKWVCAVKGEKDDDKDAKWIADLFKFGIVRSSFIPQKDFRILRELTRYKYKLVNMRSSEKNRYQNALTSGNCKLDMVFTDVFGKSASNIIDLILSDNPYTDEDILSKVHKNCKASPDMILNSINGTDLTPVQKSRIELVNDHIKQLSSNIQRLDKLIDLMIEPYEDYISFLCQIPGVSRNSAIIILSEIGVDMNQFTSTRRLTSWAGLTPSSNQSAGKKKSVRISRAGVYLKPCLVEVAHAAVKDTNHPYYANKFNKISKRRGKKRAYIAIARKILVAAYHMLLTGEIWNPADLSEVETPVEQRIKYVKNNLKSDIKQLLDIGLTVEELTLMIQQNANIIATQ

SEQ ID NO: 105218 - protein, 387 aa, unidentified
MPQLSDLSRSLVALEQDATLIAVIEMGQSSWLVAGIVPGIEQQPLKKLAPDQDGLLQLLYRWRKEAIQAGRTIKRIAVAYEAGRDGFWLARWLHTHGIEAHVIHPSSVPVSREHRRAKTDRLDTELLKRAFLGWLRGEPKHCSMAAIPSIEDEDARRPSRERQSLVKECTRIVNRVKASLARLGIRGFRLAFAQASKQLQTLRTPEGLAIPANTLAEIRRDIARFLFVKQQIKEVERMRVKRLEQTHGERRTAMVQLLARVVGIGVESADLLVQEVFSRELRDRKAVARYAGLTGSPDESGRKRRELGLAKAGNARVRRSMIELAWGHLLHQKDSPLAQWYRRRTADARGGTRKTMIVALARKFLITLWRLVTTGEAPAGLLLRPTP

SEQ ID NO: 105219 - protein, 342 aa, unidentified
MKKEIENQKSYIGIDVSKLTIDVCIITSEGEQDYQQFENTVKDFKSMELWLTKKPYFCYQEALFCMEHTGLYTRELVSFLLQRESKVWMESALHLKRSMGMTRGKNDKVDSYRIARYAMTNNDKAVLLKLSSGTLLKLKDLMANRERLSKNYQSLKIATQELVRVDKSIGKELMKLNDAALKGILKSKVKVEKRMLQLINEDEELKTLFSLITSVKCVGDVLATELIVYTNGFTRMNNTRQLACYCGIAPFEHSSGTSVRGRIGTSNFANMKLKSTLHMAAVSATRYVPDIKLYYERKVGEGKHKMAVINAIRNKLIQRIMAIVKRGTPYQENYSKFNLDLS

SEQ ID NO: 105220 - protein, 343 aa, unidentified
MNVSTIGLDIAKSVFQVHGIDAAGEVVIRRCLRRRQLLGFFQKLGPCLVGIEACATAHYWGREIAALGHEVRLMPAHYVKAYVKRGKNDAADAEAICEAVQRPTMRFVSLKSPEQQSVLMLHRTRELLVRQRTMLVNALRAHMAEFGIVTRVGLPQIKELLAVIADKDDHRLPPDARACLESLGRQFLSVHEEICAADRRLHAWHRSDPVSQRLATIPGVGPVTASALAASIADPSVFKSGREMAAWIGLVPRQNSTGGKQRLGKISKQGDQYLRWLLVAGAMTVIRHARRRGTANQPWLDDVMARRPTKVAAVALANKMARMAWALLRHGGAYRQPVITASL

SEQ ID NO: 105221 - protein, 424 aa, unidentified
MNLTQNDRLKQVTSDTLIVGVDVGSQTHFCRAFDWRGFELSRRVFKFSNTGMGFLAFLRWTEELMNKTEMKKVIVGCEPTGCYWLTFQKFLQDHDVQLVTVNPFTVNRSMELDDNSPEKSDLKDPKTIALLVKDGRFSTSYLPSGVYAEIREASVCRDQIMKQHVRLSNQIQGWLQKFFPEYFECYADWDSTSGLMLLRETPLPQDILKIGAGGINQIWRDAKVRAAGIKRAQTLVEAAQNSVGLEASEAARLEIWVLVNDYILKAEQLKRLDEYLEEKVKEVPNVEKLLAIKGVGMSTVIGFIAEVGDIGRFTDPKQIQKLAGLEIVKKSSGKKKGQPRISKRGRRKLRRTMYESARALMTWNPAFQDVFLYYRNRTKNPLGGMQAKIAVACKAIRIFYVVLQTGCDFDEEKFRKDIIRPEAA

SEQ ID NO: 105222 - protein, 354 aa, unidentified
MEKQYIGCDAHRRYSVFVVMDDKGQASKPVRVEHDRSELREYLRRLPAGSRVAIESTGGWYWLVDEIEAAGLKPQLANAYQAKQRMTGRNKTDKFDARGLAMELLTGTLPTVWIPPAELRDLRGLMRTRLALRSCSTQVKNRVSAALNRYGLKKPDEDGDLFTGRGRVHLNSHIQSLPEETREATLHEWILIDEIGEHIAALEKRIEQRIGQREDMRRLKTLPGVGRILGATLLLEIGDVDRFPSAPHLASYAGLVPTVHSSGGKTWHGKVPRSANLFLKWAFIEAANCIVVHQNKLKGRHVVNLYQRLKAAKGHGKAAVAVARHLAEASWWILTKQQSYREPNLRPRTGKRFT

SEQ ID NO: 105223 - protein, 346 aa, unidentified
MKYYVGLDVSLKEISVCVIDGDGKIKARGTTPADPMAVKSWFKNRSLEPETIVHESGQMSIWLQRGFLELGLPAICIDARRAHKSLSARLNKSDASDAEGLAQLARTGWFTPVFVRSVEADRLRALVGARERMMRLRKDLEGHIRGVLKTFGIRMTGVPQGKLRQKFRDQLAAAGETDPVLRIMADAFIDIHAMLCKAAADLGKALKTKAETHPVAKRLTTIPGVGPIVSLSFIALIEDPSRFTKSTDVGAYLGLTPKRYQSGEIDWSGRISKRGDKAMRSLLVESASTLIRNVKRFSALKSWAIRLAGRKGFRKAAIAVARKIAVLMLTLWKTETDFQWTKEAKS

SEQ ID NO: 105224 - protein, 314 aa, unidentified
MSDTPHVNVGIDVSQAIFDVAVVPSAERWQLSNDQIGFEQLLERLRGLHPERIVLEASGGYEVALVAVLASAGLPVVVANPRHVRDFARSTGRLAKTDTLDAQVLAHFAAAIRPALRPLPDAATRELSALLARRRQLVEMRTAELNRLTTAHERVRSSIRELVQYLDKRIKELDRELHDRLRASPIWREKENLLRSIPGVGPVLSVTLLADVPELGSLSHRQLAALIGVAPFNRDSGTWRGQRRIWGGRATVRAVLYMATSVAVRRNPVVKALYERLMQAGKHHRVALVACMRKLLRICNAVLLHHTPWRLAGV

SEQ ID NO: 105225 - protein, 367 aa, unidentified
MKQSMSSQTTPTNAMTSTIPSGLTVGLDLGDQWSQFCLLDAKGQIQQEGRVRSTRSAFQARFGALAPARIALETGTHSLWASELLTELGHEVIVAHVREVRAISGSDRKSDQVDARKLARYARVDPEILHPVRLRDSEQQRDLVLIRARAALIRARTLLINAVRGLVKPFGNRVSSCDADSFAVRSREELPSEMQISLGPVVEQIAQLTEQIQDYEVQIRTVAEKKYPDIAPLRSIFGVGPITALTFVLTLADPQRFAKSREVGCYLGLRPERSQSGEHDPQLGITKAGNRYLRWLLVECAHRLLRVDAPDSALKRWGQKLCERGGKNAQKRAIVAVARKLAILLHKLWVTQQRWEPLHGVSPASNH

SEQ ID NO: 105226 - protein, 383 aa, unidentified
MHMLADVVDAVVGIDTHRDTHHAEIALPTGAPIATISISNTHAGFALLLAWIHTHLPGPRLVAAIEGTRSYGLRLTHALTTAGVFVIEAEQPDRTTRRGRGKSDPIDAHLAVLTALRTPIDRLPIPRADGDREALRTLLVARDDLTTVLIARTNALRDLLRTSTSTSTSTSGSDSGSDRTSGSDRDAELARARLTTTVLAELTRRRLPRTATRAHAVRHAEIRRLAISVRETTRELKTNKTQLQAIVNDLAPGLTDRPGIGPITAAHAIIAFSHPGRCRNDAAFAALAGTSPLQASSGRTVRHRLNRGGDRALNRAIHTIALTRMRDCTRTRAYVERRRAEAKTDREIRRCLKRYITRELYRVLTTTMTTPATTINFEVAPTA

SEQ ID NO: 105227 - protein, 446 aa, unidentified
MDVVFTHCAGLDVHKKSITACRIVPDPTGLDAEGVAELQTFGTMTIELLALVDWLAAAGITHVAMESTGEYWQPVSNLLEGSVTVLLVNAAHVKNVPGRKTDKADARWLAKLMRYGLLQASFIPPAGQRDLRDLTRYRTKLVQERVREVNRVQGVLERANIKLASVASDIMGVSGRAMLEALIAGRADPAAMAALAKRRMRRTIPLLEQALTGLVRDHHRRLLAIQLAHIDFLDEQIDTLSAAIEANLAALSAEERATPAVSAAAGASLSTAPVSPPPLTFTRAVELLDTIPGVNRRGAELIVAEIGIDMTRFGTAPRLAAWAGVAPGNNESAGKQRSSTTRKGNQALRAGLTQLAQAAAHTKETYLSALYGRLAARRGKQRAIMAVAHSIMVSVFHMLTRQEPYRELGARYFDERRRHYTVDRLAQRIERLGYRVHLEPIATTAT

SEQ ID NO: 105228 - protein, 338 aa, unidentified
MTIVMGLDQHRAQITVEWIDTDTGEISRSRISPAHRAGVRRFCERFRGQELEVGLEATTGWRFVAEELRRVGAVVHLAEPAETAARRGNKQRAKSDRADARHVRELLMIGRLPESWIPPDHILDLRSRVRLRHTLSHQRGEWQQRIQAGLYHHGCQQRRNLMTEEGLAWLAAQPLPAGARDQVTVALKMIDALDVQLTPLDKELRAYARRQPGCKALMGQFGIGELTAVTILAELGDTNRFSSSREAVRYAGLDITVHQSDQRRAAGHLSRQGPPALRWALFEAAQSAARAGSPDREYFTQAAERLGANRACLSVARKLLKRSYHTLRELGEEALEPA

SEQ ID NO: 105229 - protein, 413 aa, unidentified
MDVLIDRCAGLDVHQKTVVACVRSPGKGRQKRVSEVATFGTFEHQLVELRDWLVACGVTAVAMEATGVYWKPVWHVLDEGEPFELLLVNPAHIKNVPGRKTDVNDATWIAQLLECGLLRGSFVPPVEIRELREVTRYRRQLTEERARETQRLQKVLEDANVKLTSVVSDVLGVSGRLILDALCAGERDPEVLAEMAKRRLRVKIGDLRQCVPGRFNAHHAAMVSEIVAHVDYLSAAIERLDARVEGMMSPFRAARDLIMTIPGVAQRTAEIIVAEIGVDMTRFATPGHLASWAGLCPGNNESAGKHRSTHTRHGDPWLQSALVEAAWSAVRTKNCYLAVRFWRIAKRRGQQRALIAIAHSILVIIWHMLSDGTVYTELGVDYLAATDNADRRRRHLVKQLERLGYAVDLSPAA

SEQ ID NO: 105230 - protein, 412 aa, unidentified
MQDILTCAMGLDVHRDVIVACLARGELGTEPEIEIRSFSTLIPVMRKLRDWVLEVECRHVAMESTGIYWQPIYEMLEPCFDGQINILVVNARHMKNVPGRKTDMRDAQWIATLLRAGLLNGSFIPDKTFRELRHLTRYRKSIVHDITAQKNRIDKFLQSSGFRFTAFLSDAFGASGRNIIRHLMEYGDISREALDKCLKTQTRKRIDEILVALNGSLSEHQRSFLRMIFEHLESLERHRHTVEDAISEEIVKHEAALSLLCSIPGIDVTAAASIIAEIGTDMSAFPDSQHICSWAGLSPGNNESAGKRKSAHINKGNPYLKSMLCEVGWVISGKRTLYLSGWYWRVKQRKGAKRATIALARKLLALIYTMLKTGTPYNEECFEIRRKQSERKRASRMVNELQKLGYFVVAPD

SEQ ID NO: 105231 - protein, 338 aa, unidentified
MKKRYNSKPDDSICMFVGLDVHKKYTEVAIVDEDGVVTEQERIENEPGLIEEFSDRLNNADMVMESSSTWYWLYEILSRRHRVVLSNPAKTKAIASAKLKTDKVDALMLANLLRGGYIAESYVPSRRVMSLRELVRYRANLVRMRGAIKNRVHAYLLMNNIKIDYGPFTKGFLEELGKVKDARVEGYLRIIERLNLEIHEASKRICNEALNDESARLLMTIPGISFYSALLLVSEIGDVSRFPDSAHLVSYAGLASSTHSSGGTTYHGRITKAGSPYLRWALNQCVQAHMRGEPEGSVAEFYNRLRRKKGHAKAVVAASAKLLKIAYWVLKEKRAYQG

SEQ ID NO: 105232 - protein, 389 aa, unidentified
MLLDHPSDGPTAIRTHIGAIFVSLELSRSNWLVTSLSPGKGEKMSKHGVTAGDVAGLLAMFAELRRKAEVRTGQSYPIITVQEAGLDGFWLHRVLQQEGIESHVVDPASIAVPRRRRRAKTDRIDGETLLRTLLAYKRGEPRVCAMVVAPSPEEEDRRRLCRERRTLIEERVTHGNRIKGLLFAQGIFDYVPLRRDRRARLEALRTGDGRELPAHLKAQIGRELDRIELLLGQIKAVEAAQEALLAAARKPTSEDAEPDAITMLLALKGMGANFAAVLWSEAFYRQFSNRRQVAAYAGLAATPWQSGGIRHEQGVSKAGNPRLRTTMIQVAWLWTRHQPKSALTRWFKERSPQGRKRAIVALARKLLVALWKYVTQGVVIEGATMKLAA

SEQ ID NO: 105233 - protein, 330 aa, unidentified
MKLNYVGIDVSAKNFTTIVDFEGERTNAFDLANDSQGHKKLIRFITRKGSHARVVLEATGVYSLDLALALHRAKRVEVMVANPRAIGQFAGAYMRRSKTDALDANIIVEFAMRMEFEPWNPPESHTFDLRTISRRIEGVIKMATQEKNRLHAVNSFDEMIDVVRNDIEVNIRHFERRIERLREQARELIAKYPDLERAFGHITSVKGIAEASAIHILAELAVLPENMDVRQWVAHAGLDPRVFQSGTSVHKAARISRQGNVHLRRGLFMPSLVAVRYEPHVKAFYEKLLGRGKTKMQANVAVMRKLLHAIYGMLKHDRDFDGEKFYVIGA

SEQ ID NO: 105234 - protein, 411 aa, unidentified
MNPLYRRIAGLDVHCMLYVLTVLIELDDGTLEKHQRSFGGFKRDRRALVAWLLELGVGLVVMESTGIYWKSIYAALEQAGIPAHVVNARHARNVPGRKTDISDAEWLAQLGRFGLVRPSFIPPQDLRELRLVARYREKLAQILAGEKNRLHKILDDAGIKLGAVVADIGGVSAQAMIEGLIAGMPVEELPGLAKGVLRNKRDILEQALDGELSPRHRFVLQHIQSHIHALETELKDLDRYLIDAMAPYADYWHLLQTLPGLDQIAAALILVEIGTDLGGFLDAAHFASWAGLCPGNHESAGKRKSGKTCQGNHAIRYLLCEAANAARRTNSALKSKYQSLVGRKGHKKAIIAVAHPMIRLIFVLFTRRVPYRDSGIDYQALVVAKNAPRWIQALKKYGFWPTPNPVPAPAQ

SEQ ID NO: 105235 - protein, 346 aa, unidentified
MSEGYDGRQYVGIDLHRRRSVLVRMTKAGETLETVRIVNDRERLAAVMARAGERPEVVLEATYGWYWAADELAELGAVVHLAHPLGVKAFSYRRVKNDERDAADLADLLRMGRLPEAWIAPPATRELRELVRHRAKLVHLRTNLRCQVHAVLAGQGIAVPVSDLFGVGGTALLDRLELTPAAGLRIASLRRLIEAFDTEIDEAGKVTAARLRADPGYRAVQTIPGVGPVLGAVFVAEIGDVTRFPGPTRLTSWAGLTPKHHESDTAVHRGRITKQGSRLVRWAAVEAVQRAGKDSRHGAHRDRVAARRGRNIGTVAAARELVELVYYALRDHTVRRLTSDEAVSAA

SEQ ID NO: 105236 - protein, 455 aa, unidentified
MASKKGSHEFSVVHPHAAGIDIGSTFHVVAVAPECDPLPVRQFQSFTTDLHRLSRWLRDVGVTSVAMESTGVYWIPVFEILESDGFEVILVNAREVKKVPGRKTDYNDDQWLQKLHQFGLLRASFRPSAHIASLRAYLRHRERLIEYAAAHIQHMQKALMQMNLQLHHVVSDITGATGMRIIRSIIEGERSATTLAVHRDIRCKESKETLVAALTGNYRDEHVFALKQAVELYDFYQERIGECDREIEKALARLNQGKSSPDAALPKPRRRIKQHHQPDFAVRDALYTLTGVDLTQITGFGPYTALRLIGECGDDMSKWPTEKHFTSWLSLSPGNKVSGGKILSSKTRRTTNRATTLLRIAAVNVGKTETALGAFYRRLAARVGKAKAVTATARKLAILFYSIMKHGKAYVETGAAYYETQYRSRVLVNLKKRAKRLGYELVASAVPETVCAEVS

SEQ ID NO: 105237 - protein, 451 aa, unidentified
MEDEAIKMEVVNPQAAGIDVGSRSHWVAVGQREEDVREYGVFNDDLFSLCEWLKECKVRTIAMESTGTYWQNLYAVLISRGFHVILCNGKFTKNIKGKKTDIKDCQWIQRLHSLGLLSSSFLPDGKTEELRTYCRHRQNLLHESASTSKKMQKYLRLLNLRLDVVVKDTCGLSGLRIIRAICNGEKNPEKLAELRHANCHTSKADIARALQSNGREDYLFALKHELDMYDYLHKKIEECDQKIEEKLNSIINDDENKKQYHIEPKPYKKVNKNTPKNIDLNLKSYQIFEGTDLLAIEGMSYSTVLALMSEIGVEGIRKFPTAKHFASWLRLAPNNKVSGGKVLSSKVPKGSNNLKISLRNAANAIGNLKDSTPLRDFFMRISFRKGRVSAISATARKLAVIIWNMVVKGVPYENPEGYLFRDQKKKLGLLKRIQKQITKFELESTDFQFAN

SEQ ID NO: 105238 - protein, 365 aa, unidentified
MQKISTMRASGKKIFKGQLTIGLDLGDRSSSYCVLDEAGEVILEQKLPTTPEAMRQTFAKMPRSRVAMETGTHSPWVSRLLKALGHEVIVAHAQNVRLIVKSRRKDDRIDARTLARLARIDPQLLSPVQHRSAQAQLHLTEIRARAGLVSARTALVNAARGLVKSHGERLRKCGTFQVSREITSDLSTELREALQPLLREVESLNERIQEYDRRIEKMAKEKYPETALLKQVKGVGDLIATTYVLTLEDAKRFRKSRDAGCFVGLQPGRRNSGESEPQMHISKEGDEYLRTLLVQGAHYILGPFGEDSDLRRWGQRLAARGGKNAKKRAVVAVARKLAVLLHRLWVSGEPYEPLRNSQKAISAAA

SEQ ID NO: 105239 - protein, 348 aa, unidentified
MLHAGLDLSRKKLDVCLLSQDAEIVEEFAAPPDADGLRALARRVIVHSLPVRGVIESMTGARFVHDQLEELGWDVLIADAAKLKGLAPLACKTDKIDARVLALLSQRDLVPEIWLPDPSVRRERELARFRLHLVKHRSMLKHRVHATMITFGHPCPVSDLFGVAGRELLDRLKIPQPWRATVDASLALMDDLDEQIQSINKQLRALSPEHRYMPLLMTVPGIGFVLSYTIAAEIGDITRFPAPNKLVGYTGLCPRVNQSGDRDRRGPLTKQGPKYLRWAMLEATMHALRHDAYRERYQRNKRRLGKQRGAKVAQIDIARRLTEAIWHMLTREQPFTPAAGGSTLRLAA

SEQ ID NO: 105240 - protein, 385 aa, unidentified
MDKSSTLFVGLDVHKDSIDIATADAPRDGEVRHVGSIKGDLGSLDKALRRLLSRGHQLHIVYEAGPCGFVVWRHLNAQGLHCEVVAPSSIARPAGDRVKTDRRDAMLLARLARSGDLSTVRVPDELDEAIRDLVRAREDAVREQRNGRHRLKALLLRNGIAYAGRANWTAAHVRWLAELKLPHAAQQIAFQEYLHMITEAGARIARLEQALREALPEWSLAPMVHALQALRGVQLIAAMTLVGELQDFLRFESPRELMAYVGLVPGERSSGPKRRQGSITKAGNSAARRMLVEVAWHYQHSARVSPIIARRHDGLPRTVTDIAWKAQTRLNTKFKRLSARRIMKTKVVVAVARELAGFVWAIGREVQTSGWRGTTPAAAEAAAAG

SEQ ID NO: 105241 - protein, 342 aa, unidentified
MTLYIGVDIHARQQTLSYLETEDGTTGQVVLDHEVDDVPGFYRQFQGEVIIGIEACGYTNWFEELVERLGHQLLVGDAAEIRRLARRRQKNDRRDADLLLDLLVHDEFPALYRYCQESREVLRQLRYRHKLVKLRTMVANTLHALALNAGLSLRAKLLTKGGRQQLSALPLSAISQQQRNELLSLADELTRRIQLVEQWLAVQAARDGRVQRLQTHPGVGLLTSLCVVHTLGEVQRFSSTRKVAAYVGFDPMEDSSAERKAYGGISKAGSRLLRYLLIEAGQTAAKDDEQLKQFYRRLLPRRGKARAKVAVGRKLLIRCFIMWRAEIDYAEFLRRGQKEETE

SEQ ID NO: 105242 - protein, 391 aa, unidentified
MIYVGIDVAKDKHDCFITNSDGEVLFKAFTITNNLDGFNELHQKIASVMDDVTKVKVGLEATGHYSYNLLGYLIDKGLPTYVINPLHTNLYRKSLSLRQTKTDKVDARTIASMLMSDVNLKSYSDISYHNEELKSLTRYRFDKVKERAKLKTSVSRLVCILFPELEKLVPTLHMASVYSMLSEFPGAKHVASAHLTRLTNLLSEASKGRYGKDTAITFRDAARASIGSNMPAKSLELKHTIKLIQELDSEIDEIEKEIKIIMDEINSPILSIPGINYRMGAMIIAEIGDFNRFDSPDKILAYAGFSPSTYQSGQLDGAYAHMEKRGSRYLRYALYNATKYVCHWDPTFAAYLAKKRAEGKHYNVAISHAAKKLVRVIYHLEKTKQQYIKAA

SEQ ID NO: 105243 - protein, 456 aa, unidentified
MPRFVGLDLARATVQVAILDEHGHQLRNQKLPLRREELERFIPATLDPTDEVAVEATGNTWAVVDLLTPHVTRVVVSNPLRTRAIASAKIKTDKVDARVLAELLRCRYLPEVWQPDATTRELRGLTHHRAALVGQRTAIKNRIHAQLAHRLLHVPTSDLFGTKGLAWLHDLSLDAAGRAMVDAELRLLTAVDAEIAREDAALAGHGWKDDQIRLLMTLPGVSLVVAIGLLAAWGDLARFPSGAKAAAYLGLVPSTHQSGNVCYHGRITKQGASRTRWLLVQAAQHLDRHPGPLGHFFRRLSRKKNRNVAVVATARKLAVIAYHMLRASEPYRWAQPLATATKLAALRVAATGARRRGGSPKGKPRPTSYGSGERTRAVPSLAGVCKAEGLPAPRTLDDLPAGEIRVIKLTHSLTHARAIQNPTTRPRPTAKHLEEKTQPTKGPSQIIDSQRHAQGT

SEQ ID NO: 105244 - protein, 438 aa, unidentified
MASNYAGVDWASEKHDVLIADETGEELLSASFAHDEAGLRSLCRALVRHDVQLVAVERPDGLLVERLLDAGLRVLALHPNQVAATRARFRAAGGKSDRFDAFVLCELARTDSHRFRVLEPDSDQTKALRALTRGREELVQARVALCNQLRAELERFWPAPIGLFSELDSRISLAFLEHYPSPLEARTLGEKRMAAFLARHRYSGRQTPAKLLGKLRSAPQGRAGTAEIEARKRLVLALIAALKPIATEIKALERQIADALDRHPDGTIFRSLFRDPKSVVTAATMLAEIGDCRARYSTGDALAADAGQAPVAVESGKRKVACFRWACNTRLRDAFCTLADSTRHWHPWAQAHYARAIADGHDHPRATRTLGRAWCRIVWRCWQDRVPYDPARHRALQRHVLVTVPTRSGPRPDTAAPQRMLGSAVTRRAAPQGRARSA

SEQ ID NO: 105245 - protein, 312 aa, unidentified
MVSGEPLKLRSKVVPNSQPGCLALIEWACRQVNCTPAELHVVMEATGVYHEAAAYALTQAGVTVSIVNPAQVHAFAKGLAVRTKTDATDRVVLARFGATNKPAAWQPPAAEVIELKALLSRLQAVEGDLRREANRLEKAELTATPQVVLDSLHKSLAFLEQEKAALQKRIDDHIEGHPQLKHDRELLESIPAIGRKTASRMLCVLHSRPFSKASSVAAYLGLVPVQYQSGSSVYKPPRLSKAGDGAMRAALYMVAVVATRYNPDIRSQYKRLVGQGKSKMSALGAAMRKLVHICFGVIKNQQPYESRSPSGA

SEQ ID NO: 105246 - protein, 387 aa, unidentified
MAQVNDLSRSLTAFDPISTLVVVVEMSKASWLVSGVVPGIERQPLKKLESDATALLRLIERWRNEAMRSGRPISRITLAYEAGRDGFWLARWLIARGIEAHVIHSASVAVSREHKRAKTDRLDAAMLMRVFLGWLRGERGHCGMVAIPTMEEEDARRPSRERESLVNERSRIVNRMKSALARLGIRGFKPHLRRAPERLACLRTAEGTGLPANIIEELRRDMARLALVREQINSIEKTRAERLERAPDTGPHAMVRLLSRVIGIGIETADMLVREILSRKLRDRRAVARYAGLTGSPDESGLKSREKGLAKAGNARVRRGLIQLAWRFLMFQKDSALARWYRTRTEGPSGARKTTMIVALARKLLIALWRLVTTGEVPDGVELRPAA

SEQ ID NO: 105247 - protein, 365 aa, unidentified
MNHLAIDLGSRESQICVRNSEGVILEEERRATTGLWKYLAGKEKCRVVVESCAEAFAIADAARKAGHEVRVVPTSLVRALGVGSRGIKNDVRDAQNLSKASCRMEDLPSVHVPGEVSRERKAMSAMREALVEVRTKLVNTARSWLRTQGVGVLAGGTLPTFPVRYRRHAEKKGKPLPSHVERVLQTIEELNPKIAEADKELEATAEQDATCKLLMTAPGVGPVTAVRYAAAIDEVRRFNDAHGVESYLGLIPGENSSGDAKKRRMKGITKAGPPRVRWALTQAAWTALRCRKHDPMVAWARQIEARRGKKVAVMALVRKLAGVLFAMWRDGKPYDPRHESMGKVERARGGEATRGTDVTATPLPS

SEQ ID NO: 105248 - protein, 317 aa, unidentified
MAEHYAGVDVAKDTVELAVGPEASVERFANEPGGHEGLVKRLLEHDVALVVLEASGGYEFAVACAAQAAGLAVALINPRQARDFAKAMGYLAKTDAIDARMLAQLAQVIATHPNRERFVKVLADAEQQHLQALVLRRSQLIGMLAAERQRLSTSHAAARKSIEKLIKAIRLQLEDIEAQLAVHIERHHADVAGLLQSVGGVGPATAAVLIAELPELGTLDRRQIAALVGVAPFNRDSGKMRGKRMIGGGRAQVRRSVYMAALVATRFNPVIARFYQRLLVAGKPKKLALVACMRKLLTILNAMVRSGKPWDESLHVC

SEQ ID NO: 105249 - protein, 398 aa, unidentified
MKTAGLDVHKDSIFCAVFDGKHYSDVEVFETFSTSIRKLGEYLRTSDVKRVAMESTSIYWIPVWNILSEMGFDLMLVNPFLIKQLPGRKSDVKDAQWIAQLLHKDMLGGSFVPGERIQELRSYTRAYGKLQQRIARMLTKMDNILVQAGIRLGSLVSDIGGKSMLSVIDALIAGETDPARLSKLVYASKKNKENGKLASALTGCMKEHHRFNLQMAKAEYDLLNKQSGEYLEKIEAICRRDFPRQSALLKTIPGVSRISSAVIIAETGADMKVFENSGKLSGWVGLRPKNDESAGKYKSTAITKGNRYLKPILVQVAWAASRCKGSYFKDKFNRLSIRKSSKKALIAIARKISVVVWNILKDLTPYNPALQVIYEPAKLDARIRYHQKEMERIAKLKP

SEQ ID NO: 105250 - protein, 483 aa, unidentified
MRKRRMSTFERLNSDRMNRKQRRVLARRVAAADPGLSIVNPNAAGIDVGNASHFAAVPPDRDPTPVREFGFWTADLHKMAEWLVSCGIDTVAMQSTGVYWIPLYDILEQHGLRVVLVNARHTQNVPGRKTDVQECQWLMKLHTYGLLRDSFRLALNMEGVRTVWRVRGRHVEEAARSVQHMQKALTKMNVQLANVISDISGLTGQAIVGAILQGERDPYKLAELSDPHIQASKEEIARSLEGTWREDVLFELQQAVDGYQFAHRQIRQCDDKLRVYLASLESRVLEKPAVPAGTPPLQPKTRKRRKQGANAPPMDLTEELVRICGADLTSIDGINIIAAMTIIAEVGPDPSKFPDEDHFTSWLGLTGSQNISGGKRVKGPQRKVKNRVADVLRMAATSLLNSDSYLGARYRQLRRNAKIPAVAVKAMARYLAVLVYRLLTKGQAWVDRGAELFEQQRRERDLMILQEKAKRHGLQLVPVAAAN

SEQ ID NO: 105251 - protein, 399 aa, unidentified
MSIVGIDIGKRNHEATIIDENGVAIGKSFRFANSHTGFNRLLDVIRRSVPDGNATFGMEATGHYWLALYTHLCQAGYTVHVINAIQSDALRSMYIRQQKNDSRDSFIIAEVIRFGRFCETAVAPPDLYALRELCRHRFYIVDSVSDIKRKVIALLDQVFPEYETLFTDTFGKASLELLAEYTTPEEILAVDTDKLAETISSASRGRLGLDKADQVQSAARNSFGILLAADSIALLIRQYIEQIRFVENQVDALDAEIATLLSSFDTQLPTITGIGSVLAAVILSEIGDITKFSTAAKLAAFAGVDPTMKQSGDFFGSRVRMSKRGSPYLRRALWLAATIASFKDPAISEFYQRKRSEGKSHMTTLGHVSRKLVNIIFAVMRDNSPYSPAISNLTLDNSL

SEQ ID NO: 105252 - protein, 385 aa, unidentified
MTKLDRTDTPATAEYATVYVAFELSKAKWKLGVIIPGSQKMSRYTIAGGDREALAARLAAARAKAERSGKPVRIVSCYEAGLDGHWLHRWLTEHGVVNHEIDPASIAVSRRARRAKTDRIDLEQMMGALLAYLRGEPRALSVVHVPSEAEEDRKRRSRERERLIKERTAHTNRIKGLLHGQGVRDALPLKAGFIAGLDELRTGNGRALERQLKAEIVREHARLVLVNEQLAEIDANSKAELRAAAPGSAAAKVMQLMDLKGLGPVGAQGLFNEAFYRSFANRRQVGSYFGLVGTPYDSGESRREQGISKSGNARARNLAIELAWLWIRHQPDSELTRWFRERVRDLKGRIRRITIVAVARKLMVALWRYLTTGVVPNGAVLQQSF

SEQ ID NO: 105253 - protein, 342 aa, unidentified
MQVTTIGLDIAKNVFQVHGIDAAEKVVVRKQLRRSQVLAFFEALPPCLIGMEACATAHYWARELTKLGHRVRLMPAKDVKAYVKRNKNDAADAEAICEAVRRPTMRFVQTKSAEQQGRLMLHRVRDLLMRQRTQVINALRAHLAELGITAAQGTAGLKELLKIIASDADERLPVDAHASFVVLAAELQAMQTLVGSLEKRIMAQHRGNEASKRLETIPGIGFIGATAIAATVTDPTAFRSGRDFAAWIGLVPRQDSTGGKQKLGPISKQGDRYLRRILVVGAHAVLRYAKQNPEKYPWLTQLLARRPFRVVAVALANKMARMAWALLAHGGTYRAPALAAAA

SEQ ID NO: 105254 - protein, 344 aa, unidentified
MEITTIGLDLAKSIFQVHGVDTTGQVVFRKSLRRAQVLPFFAKLPSCLVGMEACGTSHHWARELIKLGHEVRLMPPAYVKPYVKRGKTDAADAEAVCEAVRRPTMRFVPVKSPEQQAALSMHRTRNLLVKQRTQLVNMIRGLLAEFGIDIPKGLERALLMARRIVDGEAPDVPIEAAKIFGTLSQQVLDIHLRLRQIDRDLLVWQRGNDVARRLMTIPGIGPIGATALAASVTDPHQFRSGRQFAAWLGLTPLQKSSGGKERLGRITKMGDKYLRKLLIVGMTSLVRRAKYNPETIDPRLVNLLARKPARVATVAMANKTARTVWAIMARGETYRAGHRPALAV

SEQ ID NO: 105255 - protein, 341 aa, unidentified
MLIANIISTLGGDKSMEKLYCGIDIHKEKLAGCIMDKDGKITREHTFPSSKDAIERFLCRIPNSDITIAVETCGMWRGVSKILTEMGYEVKLANPKKTHDIAGNKKMDKIDAKTLADLLRTNYLPLVWIPDEKTLEYRDITRHKSNLTRLKVQIQGKIKGYLLRNGMKYSKQLWNEKSLSKLSEKDPNIKNLINVYWSLKNEEKETLRRIRIIASKIKETNILMSMIGVAEFSSLMIIGEIGDIKRFETPKELVSYAGLCPGIYQTGSTKRNVRNNTVNKWLKWIIYESSGRAVMLDPRFREYYYRIKQRNGENVARRACARKMLTIIWYMLTNEEPYRAS

SEQ ID NO: 105256 - protein, 388 aa, unidentified
MNYVGIDYHKRYSHATAINEEGKVIRSKRLENKPEAFQTFFKGLEGPSETVLEASRTWGVMYDLLEAIDEVESVQLAHSQKVRAIAEAKIKTDKIDAGILAQLLRADLIPAAYIPGKQTRSYKEMIRQRVFLVRMRTRLKNRIHVLLDRLHIPLPSVTDIFGKRGTDYLRKLNLPGVDGEILREDLDLLEVFNRLIKEAEREIGSLMGEDPRVKLLRTVPGLGPILAAVVALEIDRIERFSLPPKLASYAGLVPSTYASGGRIFHGRLVPMTNKWLRWALVEAAWGSLRTSPYCRSYFESHKRHKGPHTAAIALARRLIEIIWHVLMENRNYEERLPYPQRIKKPAAVHSLSEGKSPSGDGTGGPQRGIAQCERKPNTNVSPAALTAT

SEQ ID NO: 105257 - protein, 342 aa, unidentified
MQETIYVGLDLGSSVCQQTVLGADGGRRFSRVIATSERSLRSAFDKLEGDVRVHMEAGELASWVQSILSRQVAEVVVSHPRSLAWIGKDAVKDDKVDAGKLAELLRIGRVHEVYCEQDDKRRTFRQLVTHHEQMSREQARQKSKIKARLRTLGVIRKDAGLFTSSGQKALLEAIAEPEIKRMIVQLFAVLNRMIECEREARRAMIEYSRKFAEVRRLQTAPGVGVITACRFVGYLQTPHRFSNKRKLWRYCRLGITRRESNGKRLSHPRLDNAGVGSLKDVSRKVFEAARRCKGDNSFKRVYEQSLENTKNAVHARLATQRKILACLRAMWIHNQPYRDNLG

SEQ ID NO: 105258 - protein, 395 aa, unidentified
MFIIGIDIAKRNHEAVIITEDGQIVRKPFSFRNNCTGYNQLLEQARKQTRVKSQIIFAMESTAHYWLALYARLIKDGYTVMVLNPIQSHSLRELYIRKAKTDARDSLVIADLVRFGRCQASNVPQDKILALRELCRSRAYLIDVAADLKRKLIALLDRTFPEYESLFESLFGKASVAVLRKYPTPQKVKNAHLEKLTELLWNSSGGRFGEWKARQLKEAACNSFGIEDTCGVYSSLLCVFLEQILSLTEQAAAIEKQIASLLKEFDAQLTSIPGVGVVLAATILSEIGDISRFSSADKLLAYAGLDPTVRQSGEFKSSQNRMSKRGSPYLRRAIWMASTTAVQFDPMFRAYYEKKRSEGLHYMNVIGHVSRKMTAVIFAVLRDSQPYRLVMPKAG

SEQ ID NO: 105259 - protein, 394 aa, unidentified
MKLVGIDVGKNSHHFCVMDKETGEFNVAPSSFSNNKEGFDFLINSLKPYSKKSILIGMEDTGHYHVALLKFLLSNGYTVALINPKTTDLTRKMEGGITKNDKLDTITICDVLETPERKKQYRITKVDRFDLYEQRQLTRHHHNLKEELNVYCNRLQKSIDLVFPEFNTLFSSKYSIVYMNLLKTFGSAEAIASTDIRTIRKCFEIKGRGNRISLTPEKLKECAKNSIGISSEVETIQIKHLVSQITLIKEQIAEIDKKIEEFSITNNSPILSIPGISHFSGTSILAELGDIGNYSKPSQIIKFAGVAPYHYESSQYNAQHTGITKKGSKYLRKTLYQIILTVINNNPVFKKYYLLKISQGKGHRCAQGHCIRKLLRIIYHLLETGQSFDPALLR

SEQ ID NO: 105260 - protein, 337 aa, unidentified
MKRYLGVDLHRTQFVVCTRLENGKQEVRQWRIAELPKFVEQLQPEDQIAVEAMGTTARFHEAVVGRVGRVVVVNPHQFKVISESVKKTDRKDAEALALYLAKDLLPEVRMKPKPNRELMHLAETRDLLVKQRSALKNKINNLLAMQGIELKREALSSKIALERVLASPVRGMVQLELGILVEQIRSLSDSIAELDERLEEEGQQLPGYENLTSIKGIGSLSATVLLTVIGKISDFADENKLAAYLGLVPKIANSNEKESSGGITKQGNKLARTALVQCGLVAKRYSPYLKRFYERIKQRRGGGKAKIALARKLVKIVFDTLKNQWVFEDFPSFTLAA

SEQ ID NO: 105261 - protein, 416 aa, unidentified
MTDQKQWYAGVDWASESHHVFLTDADGRNIAERAFKHGGDGLGEMVAWLIATSGAVVASQIQVAIEVPHGPVVETLIERDFAVHAINPKQMDRFRDRFTLAGAKDDSRDAQVMASALRTDPRCFRLLAVADPVVTKLREWSRIVEDLGAERNRLTNRMREQLWRYFPAMLELEDDLGAEWLLDLWQVVPTPDKSTRIRETSVVKLLKRHRIRRFDAAYVLDVLRRPPVQVAPGTAEAANAHIATLIARIRLVNRQIKDAHQRIDLLISRLMLTEDDAPGQNKQRDVEILASLPGVGRIVLATLLAEAFDALQRRDYAALRSLTAVAPVTKRSGKSCIVIRRQASHHRLANAMYHWARVAVQHDPRSRAKYAALRSRGHSHGRALRSVADRLLNVACAMLKTGTTFSSSPTAQKTSC

SEQ ID NO: 105262 - protein, 343 aa, unidentified
MEELKVIGLDLAKNIFQVHGINSRGRKLCGCKLKRGEVLAYFANLPPVLVGMEACGGAHDWARRIGALGHTIKLMAPQHVKPFVQGHKTDARDAAAIAEAAQRESVPSVTVRSLDSQQMQALHRVRELWMKQRIALGNQIRGLLGEFGEAMPLGLKGLKQAVAQWQAQAGNELAVLKQLIEQLMTALREQESRLSEIEGRIREQHRHNAASRLLETIPGIGLLGSTAVVASFGQCETFSSSRKFANCLGLTPREHSSGGKQVLLGISKRGNGYVRKLLIHGARAVLKCRLNRPEHADDWEVKLAKRRGYNIAAVALAAKNARRAWAMLRSGEVFRQDQAPASA

SEQ ID NO: 105263 - protein, 343 aa, unidentified
MTHYIGLDVSQKLTAICIVDSTGRRLWRGQCTSDPEQIERVVRRHAEKDARIGVETGAMTPWLVHELRGRGLEVTCLDARHARAALKMQINKTDPNDAEGLAQIMRTGWYRSVHVKSFGSHRARALLGARVRLVGMTTRLSNHIRGVLKTFGLLPGSMRGVPFDRRVEAMLADRDDIAPIIRPMLIAWRQLRQQIATFDKAVRILVRSSPACRHLIGVPGIGVLSVLAYVSMIEDPARFGRSRSVGAHLGLTPKRYQSGEIDRSGRISKCGDTLARTLMYEAAVVLMTRVKRACGLKEWAQAIARRSGAGKARVALARKLSVIMHSIWRSGEPFRWSEQPVAA

SEQ ID NO: 105264 - protein, 366 aa, unidentified
MLIHVPPDVRVLAMDVHKNTISIGLLEPRSESPLMDKCSTDDESVRRLLARFAEPARVWACYEAGPTGYELARMLRNAGMRCEVIAPSLIPTRPGDRVKTDKRDARRLALLFRAGQLSAVRVPTVAEEAARDLCRARADMVIDRTRARHRLGKFLLRHGRVWRGGDNWTLKHQAWIRQQRFDERALNETLAHYQATLTARDAAVEAIEADLLPWCARAPFTDAVHRMAAYRGVTELGALTLASEVCDWRRFPTAGMFMGFTGLVPSESSSGEHTSRGGITHAGNTHLRTQLVEAAWAYKSKAQVGATLKKRQDGLDPAVVARAWTAQLRLCGKFRRLDARKTNRKVVVTAIARELAGFVWAEMTAN

SEQ ID NO: 105265 - protein, 317 aa, unidentified
MFVGIDVSKCWLDIAVFTPEDGTVESFKINNEADVVRDFIKALPGKGRKALYCLESTGRYGETFLEVSAVLKLDTWVEHPLQLKNSMGMTRGKSDRVDAQRIADYAYRHRDRAKLWVPESESLAKLRKLQSQRTMFVKVQTQLGQCMEGVKKPDPNVNRLLKAAAASIAAVDAEIEKVIKSDLRLKRQFELVQTVPGVGKVTAVALLLTTGGFTRMTDVRKLACYAGIAPFPYSSGSSIKRRTKVSKMGNMRLKVLFNLSAWNSIRSVPSLKAYYERKVAEGKHKMSAINAVRNKLLAIILAVIRRDEPFAVEYSVK

SEQ ID NO: 105266 - protein, 415 aa, unidentified
METQRNRVCGADIHKKFLVATILSRDGTKKTKRFGMTLDDLLDFKSWVMENQCEQVAVESTGVYWIPIHSVLENAVDLIVANAYKIKHIPGRKSDLIDSEWIAELCLNGMIEPSRIFPKDDRELRRLTRAREGYVNDMTREKNKIHHALESCGIKLSSVLADVFGKSGRYLLNCLLKGIELEEMIEGIPVKSVKLKADQIKEAVKGSLETTQIILIRGGLELIGSIQRRIDELEREIKNRIASRRVDLKIAMSIPGIGFISASTILAEVGDFNDFDKAEQLAAWAGLVPTVYQSADKLITGSITKHGSRHIRRILVEVAQAISRSNKGKLKRFFRRVQAKKGYNVATVALARKVLCILYHLMINREMYQEDDITRTKTVDVNSSSLPTKLGFEEMIQILAKAGYEIRKTTSGTGG

SEQ ID NO: 105267 - protein, 458 aa, unidentified
MQTCPPGTVAGFASVSGSSAHELVERRDEVPTRPAVRQGPGCQGAPLVPHNTSTSASEVFAGIDWGGSFHQVCLINAHGEVIVQQRVQHDLAGLAELDRLLLVHRNAASRLRVAIERADGLLVEHLHTIEVEVFCVSPKISARARERYRLAATKSDAFDAFVLADTLRHEHRHWRALSPASPALAELRAISRDRDRVVIAQQATENRLRAVLEAYHPAPLHLFSSLDRDITLDFVTDYPTPEQAARVGEARMQQFCRRHGYSGRTDPTVLVERLRPHLLSAAEGTEAGKAFSATMFTEELRLLNAHLRAYDKRLVELLDQHPDAPIFTSFPGIGPVVAAALISEMGEDRGRFPAPEALLAEAGLSPVTRASGRTRQVRFRYAANRRMRHMIDWWAFVAAREDAWSRRIYDDARARRQGKYRALRGLGSRWTRILWRCWTDHTTYDPAIHHKHQEPAQA

SEQ ID NO: 105268 - protein, 347 aa, unidentified
MDHIGIDVHKRESQICILAEGGELIERRIRTEPERFAAVLGGRPQARIVIEASTDSEWVARCVEALGHEVIVADPNFAPMYATRTRKVKTDRRDARALADACVLGAYRRAHRLSDVQRHVRGRLLVRDALVRTRTRYISAIRALLRQQGYRVSSGSAEAFPARVRALALPGPLLSLIAPLLAVMRHLNRQLAYSDETIERVAAYDERVQRLRSVPSVGPVTAAAFVATIDDVQRFQHAHHLEAYLGLVPRECSSGDTQRRGPITKAGSGRTRWLLIQAAVSILRRRPPEAEALRTWTLRIAARRGKHVAVVALARRLAGILYALLRDGTVFTPRQISPPLASAALAV

SEQ ID NO: 105269 - protein, 343 aa, unidentified
MDHFAGLDVSVKETSVCIVDDTGRIVREVKVPSEPEALLAVLKNPAYHFKRIGLEAGPLSQWLYSALAEAGLPVICVETRHMQAVLKAQINKTDRNDARGIAQMMRVGLYRPVHVKTLRSQKLRMLLTHRKLLQSKAIAIDNDLRATLRNFGLKVGMVGTVKFEARIKELVENLPDLAVLVEPLLIVRRVLREQTGVLHRRLLAVVRDDDVCRRLMTVPGVGPVVALTYRATVDVPARFRNSKAVGAVFGLTPAKYQSGEIDRSGRISRCGDEMMRMMLYEAAHTMLVCSAKWSWLKAWAMQIARHRGMKKAIVALARRLAVIMHRIWVDGTEFRWTREVVAA

SEQ ID NO: 105270 - protein, 489 aa, unidentified
MSTARKQPRGKKDPMLNAQLLKRKARGRHCHQGKGHQRRSKLTITNPDAAGIDIGAQVHYAAVPEDRAEVSVRSFGAYTAQLDELVQWFKDCGIKTVAMESTGVYWIPLYQKLEEAGFEVLLVDARQAKHVPGRKSDVQDCRWLQQLHSYGLLRAAFRPEDSICRLRTLQRHRKELVEYAAMWIEHMQKALNEMNLHLHHVLSDISGQSGLAILDAILAGERDPRKLASLAHYRVQKSQAQIEAALTGDYRPELLFVLSQSLENYRQIQQQIAQCDLSIEKQLAKMADWTNPNQKSDSTQQSQDSASGKPSKKKPQDALESTLAGHLRRILGVDLTTIPGLNVLAILTLVSEIGTNMAKWRNDKAFVSWLGLNPNNKVSGQRVLSSRTRKVVNRAATTLRLAAMVLGKTNTPLGSFYRRKRAQLGAPKAITATARKLACLIYRLIKNGQGYEEPDLHIYELKYKDQILNSLRRRANSFGFDLVEVPKAA

SEQ ID NO: 105271 - protein, 343 aa, unidentified
MEHYAGIDVSLERSSVCVVDASGRIVREAKVMSEPEPLVCFFRELGLPLARVGLEAGPLSQWLHAGLTAAGFETVLLETRQVKAALSAMIVKTDRKDARGIAQLLRMGWFRPVHCKSPPAQEVRALLVGRKLLQGKLLDVEMSIRGILRGFGLKLGEVSKGRFAARVRELVAGQPMLERVIGPMLRARDALRTEYQVLHRAVLATVREDAVCRRLMTVPGVGALVAVTFTSAVDDPARFRHSRDVGAHFGLTPKKYQSGETDVTGGISKAGDATVRAALYEAANVMLTRAGKFSTLKRWGLEVAKRRGMKRAKVALARKLATVLHRLWADSSEFRFGKEAAAA

SEQ ID NO: 105272 - protein, 319 aa, unidentified
MMKTEPIYAGIDISKDNLDLAVHPRQQIRRFHNTATGINKMVEYIRDIGSVLVVMEATGGYEIAVVAALGEAGIPTAVVNPRQVRDYARSTGKLAKTDAIDAQILADFAAVVQPQPRPLADTQTQELKDILARRRQLSEMITAEKNRLHRARGALVDHIRAHIIWMEKELLEMDSELKRFVEESPMWREKDNLLRSVPGIGPVLSSTLVAELPELGTLNRKQIAALVGVAPINRDSGKMRGKRSVWGGRGSVRSALYMGTLVATRFNPVIRRFYERLIASGKAKKAAITACMRKLITILNAMIKHHVTWRYTPDLAVIS

SEQ ID NO: 105273 - protein, 394 aa, unidentified
MSLCVGIDVSKEKFDACGIGEGGKKMFSVSCPMDRSGFDKLVVQLPTDKTSFLLGMESTACYHMPLFSYLTTHGYQVVISNPLLIAQYANRSLRKTKTDKRDALTIAQFLMQEKESLSVETCSPLIGELRDLARRREKLTDQVTALKSDMKRILSVTFPELEHLTGVFTKSTLRLLADFPSAHALRQANYSAIAAIVIPRSRGRKSHASVHALMTAAASSVGVTSPAKEMILKQEACLLLEVEEQIRETTKLLMSLRNERIRDDTEILCSMRGIGENTAVNFLVEMGGDIGIYKNDKKLIAAAGLDPSTYQSGKYAGRSKISKRGNRHLRRVIWLMTTRTITNNAIFRAYFFKRRTEGLPYKKAVLATAHKLIRVMYSMLTHRTCFVEGGINYS

SEQ ID NO: 105274 - protein, 340 aa, unidentified
MKLYGAIDLHSTNNVTVLIDEEDKIVYEKRLPNDLTLILKELSVYQWRVEGTVVESTYNWYWLVDGLMAEGYQVHLANTAAIQQYEGLKYTDDHSDARWLAHLLRLGVLPEGYIYPRADRPVRDLLRKRSQMVRQRTINLLSIQNLLTRNTGGSLSANRVKGLDVQQIDELLPNGDLALAVKANLSVMCSADEQREILERTITERVQLRPQFSFLKTVPGIGQILALTIMLETGDIGRFASVGNFASYCRCVGSQKISNGKKKGQGNTKNGNKYLAWAFVEAAHFAIRFNSKIKSFYQRKKDKTKVVVAIKAVAHKLCRACYYIMRDRVAFDVTRAFGQN

SEQ ID NO: 105275 - protein, 434 aa, unidentified
MEEAGDEPLFCERAAGIDIGKKTVMVTVRVPSESRRGGRQQETREYGTTRRQLLEMTDWLRCWGVQRAGMEATSDYWKPVFFLLEQQGLECVLYPASQVKALPGRPKTDKLDSAWLAKVTERGALAGSFVPPEPIRRLRTHTRYRRRLVQARTAEKERCEKLLEDAHLKLSSVISDIHGVSGRAMLRAIINGERNPAALAELAQGRMRGKLSRLAEALDCSFFTPEHAFILSMMLRNIDHLTGQIGLLDVRIAALCEPWERQMAQLDAIPGFGVTTAQDLIAEIGVDMTVFPTAAHLCSWARVAPRVKESAGRRKGNSTTGHGNSYACGAIGEAAVNVGRTQSFLGAKYRRLCRRMPKKKAQGAIMRTQLVIAHALLSDPEADYRDLGTDYYEQRADIERHTRAHVHGLERLGYKVTIQPIDPDTGELIARTAS

SEQ ID NO: 105276 - protein, 355 aa, unidentified
MAIRKQCIGIDISKSTFTACLCQQAEDGKLTFSKVVDFSNDNKGFNQLLRWAKGLIVSDSELVFLMEATGVYYENLAHHLHKIRKKVHVVLPNTSKHYFSSLNVKTKTDAVDARILSQFGVERVHKLWSPPPGALLQLRNLTRYYVQLQEQKTALGNIKHSKDCSYDIQIFITKSNKKLINEIDKEIEKCLKEIKKTILDDKVLKERIRKVLTIKGVGLITAATIIAETMGFEQFHSSKQLVSYSGYDVVQRESGTSIKGKTRISKKGNRYIRNALYFPAMVACRHNETLKETYIRINRNNKASKMIGQVAIQRKLLVLIYTLWKNDTEFIENYQRGSLDPKTETTQDSSVAELP

SEQ ID NO: 105277 - protein, 400 aa, unidentified
MMTPDDIDVWVGLDVGKSAHHAHALDHDGNTLYDKPLKQDEKAIRTMLGKLSKHGRVLLVVDQPNTIGSLPLTVARNMGIAVAYLPGTAMRRTAQLLPGDAKTDRRDAHVIAWAALKLPETLRDAGPDDETLAALKLLAGHDEDLAHESTRHVNRLRSLLLQTHPAFERALKGERITRDATLALLERYGGPMGVKRAGIEDVKDWAKSNGLRAGRIIDDMFKAIGEQTVTVPGTLMAETIIPSIARDIKAIKDRRREIGTQVEALLEDRPLLTVLTSMPGIGVRTASNILLGIGGDIANFKSSAHLAAYAGISPVTGQSGTSIKGERPSRRGNKRLKNALWQTAFVASTKHPPSVAYYKRKREQGKHHNAAIICLARRRCDVIYSMLKNGTLYQEPALVA

SEQ ID NO: 105278 - protein, 408 aa, unidentified
METVTWVGMDVHARSTHAAAVIAAAGELRRARFGGGAEAVVAWLGGLPAPVRACYEAGSTGYGLARAAQSAGVAVGVIAPSKTPRAPGERIKTDRRDAELLVRLLMAGQLHPVAVPTPRVEALRDLTRARDRIRGDLLRARHRVSKLLLRYGRVWPSDRGTWTQEHHHWLRRQRFDDPNLELAYLDALAAVDALMRRRDLLDQRLLVAAQDADVAAAVARLRAFRGINTLTALALHAEIHDWHRFGRPGRLAAWIGLVPSLYQSGESAQSGAITKSGSRHARRLLVEAAWHYRRRPGRGVTLKRRQEGVDQHTIDIAWRCQHRLYRVHTRLRDRGKPANVATVAAARELACFLWDAMREYQPPTTTAARASAEPSRLAGTPAATMRRRLRPRAFLDPRRPATKQGHLG

SEQ ID NO: 105279 - protein, 379 aa, unidentified
MVENITHVALDDHKKRHQVAVLLPGIDREEAVTWRIENTRAGIRKMVRKVLKMAPGDVRFCYEAGPNGYALLRQISEFDRVSCVVVAPSKTPRRSGDRIKTDRRDAKKLVGLFRAGELKSIVPPLKEEEAVRDLCRCRKAAQKRVTASRHQVDKFLMRNGYVYRDGKNWTRRYREWLRSLKFDDWRRERTFQAYLFGVEQDEDRVKRLDVEIVRAAEEEPYRTLVGFVRCFRGLDTLSAMILTSELYAIGRFTTAPSLMGFVGMVPSEDTTGWDPHRGPITKAGNEHVRRILVEAAKHYRHPARVSKALTQRRKGQPDWVIAIADKAQTRLHQKYWRLVMGKGKHPNVAAIAVARELVGFIWAVLIQAATTANIEELVA

SEQ ID NO: 105280 - protein, 360 aa, unidentified
MFCERTSVGLDVHARSVVAAAIDGRSGEVFRARLTPSHAEVIEWVGKLPGPCAVVYEAGPTGFGLARALSAVGLRCQVAASSKLLRPAGDRVKTDARDALNLARLLRLDEVVPVRIPSAAEEAARDLVRIREAARADLMRARHRLSKLLLRHGIVYYDGKAWTERHDRWLHHQRFDAAPTQSAFEDAYEAVVLATARRARLDEKITALAADSEFSPLTRRLACLRGISTLTGFALAVEIGDWDRFTGASIGAYLGLVPSEYSSGTSRTQGAITKTGNSHVRRLLVEAAWHHRSTYRPGAVLRHRWDQAPAAARARAHAGNQRLHARWVGLNLRRKAAVIANVAVARELAGWCWSLAVLPD

SEQ ID NO: 105281 - protein, 398 aa, unidentified
MTESSDYESVLVFIGVDVGKDTHHAVAINRSGKRLFDKALPNDENKLRSLISDLKQHGQILLVVDQPATIGALPVAVARSEGVLVGYLPGLAMRRIADLHAGEAKTDARNAAIIAEAARTLPHALRTLKLADEQIAELSMLCGFDDDLAAQTTQASNRIRGLLTQIHPAPERVLGPRLEHPAVLDLLQRYPSPEKLASLGEKKLAAQLCKLAPRLGKRLAADIAQALAEQTVVVPGTNAAAVVLPRLALQLITLRKQRDEVALEVEQRVLAHPLYPVLTSMPGVGVRTAARLLTEVACRAFASAAHLAAYAGLAPVTRRSGSSIRGEHPSRRGNKALKRALFLSAFAALRDPLSRAYYTRKMSQGKRHNQALIALARRRCDVLFAMMRDGTFYTPQGS

SEQ ID NO: 105282 - protein, 435 aa, unidentified
MSTLGVDLAVRAAHVATLANDRGEVIWSRRRFTSHPGDLAALSAAVGPASELTVVMEPTRSAWVVVAAHFRATGAKVVMIAPEQSADLRSYYKKHTKNDRLDSLVLSRVPLLHPEGLTEVTGLGPAEPLRRAVRRRVDLVGLRSACHQRIDAMLDLLGPAYHQALGSRGTKTSAVVLERYGNPKTLRRLGLSRLTDLVEKTSGGHLGAEYAARLLQAAVEATTLWKGGGLDFDELAWDLAQEVRLIGQFDAELGRLDARIAELYRAADPKGIVRSAPGIGPVLSAGIAGRLGDPTRFANLAAVRSFSGIVPGVKQSGLTQTRPGITKQGDPGLRRDLFLAADLARHQDPQLAAKYHRLIVERRLHHHSAICHLATTLITRIAACMRSGQLYEVRDVDGTPVSLDEARAIIAERYAIPPEARRRSRIPDAVSEPTR

SEQ ID NO: 105283 - protein, 455 aa, unidentified
MRLWCGIDWAEHHHDVSVVDETGRQRARLRIEDTAAGFGQLMGLLAEQNAVSEAPITVAIETSKGLLPAALRAAGVPLIAINPLAVSRYRDRHSPSRGKSDAGDAFVLANILRTDPHSHRPLPVDSALAQSIQVLARAHQDAVWDRMQIANKLRAVLREYYPTFLAAFTDLASKEARATLHIAPSPVQGQRIRAGTLTTALRRAGRTRGIPAAVAQIHAALHEDQLRQAPQIEAAMAEHATALLHALDTAVNNVARLEQSLTDAFEQHPDAPIITSFPGMGTVLGARILGEIGDDRTRFATARGLKAFAGTAPITRASGMKTVVTRRIVRNKRLGQAAYLWALPMIAHSPAAHAHFTGRRDRGDSYNAAARNLTNRGLGMLHHCLQTRQHYDETKAFRAPRPEPVTSRKPPAHQAHPETEAPSAHPTRTSNRTRSVTSIAPPADQARPKTEAHTA

SEQ ID NO: 105284 - protein, 343 aa, unidentified
MAIVTGYDVHRNQITFDALDTESGEVSRGRIDATPEAVRAWVGRFLGQEVHVAVEACTGWLFVCDALAEAGAVAHLAEPAETAARRGTKRRAKTDRADARHLRELLALGRLPEAWIPPAHVREWRTRTRLRKTLVDERNHWLQRIQATLFHHGVPAAALPARLLTPAGRDVLDHIALPAAARERVTVALALIDAIDTQLAPLKREIRQLARRQTGCKALMRIFGIGELTAPTILCALGDVSRLSASRKAVRMVGLDIGVHRSDRRSRPGKLTRQGPPEARWALYEAAQSACRASSPDHAAYLELRARGLSHTRASLTIARKLTRRCFHTLQELGPAALEPLID

SEQ ID NO: 105285 - protein, 430 aa, unidentified
MHNKNYISVGIDVGSAFSFMTILAPDETVILKPFKITHNNKDSLERAVSEIKKAEELYSLESRTFLESTGIYHFPLFCYLVDCGFNASIINPIITHSTKNGNIRKVKNDKIDSKGIAKLGLSKDIPVSQFPAKLVLELRSLTRKYYDLTDERSAHINKLKGDLHTVFPQYLDVFCDVTGKTSTMILRQYGTPDKILRGHKKTMIEKISKASRKGLAKASERYEKLCAAANAAKTFGCQIDSIYFNIFLTLDLVEKLDSALDSILNRIRQLITFNKNEKFIQQIKLLNTIPGVGFLTAVTIMCEIGDFSAFRNPKQLFAYFGLDPEVNESGKFVGTQLHMSKRGSRIARRAIFAVALSSIRTKRNGEGINPYLRKYYELKSGQKPKMVAIGAVMHKVCNIVFAVLRDEKAFELRSPEEHCKQYQRPALAAA

SEQ ID NO: 105286 - protein, 363 aa, unidentified
MLIIGCDYHPSGQQVFGIDTESGEVIADRWIAHTGTELEEFYGGLPAGTVVGVECSGNMLWFERRLAQYGHRLRLRDAAKIRSKETRKQKHDRRDAELIARLLREDQFPDLPWVPPLAERDQRQLLMHRHKLVRMRTQVKNQLQHIALNQGQQKKRQLWTKAGRELLESLRLEPWTARRRDDLLRWLDVLNRDCETLEREVERAAEARTDARLLMTHPGIGPVISLAFVLTIGSIERFQRSRELVSYLGLNPTEDSSGEWRRLGGISKQGSSFMRLLLIQGAQTAVRGDEDLRRQYRRLASKKHRGAVAKVMVAGKLAVRMFWMLKTQRTHAELVRMRGSSSHPGVGKTEALSERPASPRIQP

SEQ ID NO: 105287 - protein, 338 aa, unidentified
MKVYAGIDLHSSNNYLGILDDHDKRLYGKRMPNELNQVLMALEPFRDRLEGVVVESTYNWYWLVDGLMEHGYHLHLANPSAIKQYEGLKHTDDKWDSFWLAHMLRLNILPEGYIYPKAHRPVRDLLRRRLLFVQHRTAHILSLQSMITRNLGFKMSGNAIKKLKEKDVENLFDSPNLVLMAKNSLSAIDFLKQIIRGIEKEVISQVKLRKEFKMLLTIPGIGPILTLTIMLEVGTINRFEAVGDYSSYSRCVKSERLTNGKKKGENNKKNGNKYLAWAYVEAANFAIRHSVAAQRFYQRKKAQRNGIVAIKALSNKICRASYYIMRDQVAFDEGMLFK

SEQ ID NO: 105288 - protein, 419 aa, unidentified
MNKIVHYIGLDVHKDSIAVAIAPQNSTEVRRYGIIGGTLDAMDKLLKRLSQPNIELRLVYEAGPCGFVLGRHLRSKGIHCDLVCPSLIPKKASDRVKTDRRDADQLARLYRAGELSPIHVPDQEDEAIRDLIRARTAAVGDQRQARNRLKGFLLRLGFRYTGKTSWNDAHKRYLSGLLMPRPAQQIVFQECIHAIDDASERVARLTQAAEDALAGWKWEPVVRALMSLRGLQALSAMTVIAEAGDLSRFENPRSLMHFFGLTPSEHTSGDKRVLGGITKCGNAHCRRVLTESAWHYRLKPLVSEAMQKRQEHQNKEVRLIAWKAQQRLHKRFKQLAVRKRASSPSRPLRASWWASFGPLPARSNRRSSLPHPKSSAPAAARFTGSTRKRRCQKPGTLRKESGCKSQSTTAPLLVRQSNR

SEQ ID NO: 105289 - protein, 467 aa, unidentified
MKNYDYNLFVGIDVSKGKADAAVLAVPELRSVKPRFLRKKLSFKFIKSDVVEFLNTVRKYSSDQHCLHTYFALEVTGIYSTNVYSFIKENCNSDEEIHQLNTDFVNKWRESHNISKSDPLDAQTISTIIGTDDDVRYVSDSVFENKNGYQDLKALVHRHYQIKKLHSQETNRLIALCDCYFPELQYVFEPKSAAFLAVLSQYPTSHDIINASKNEVFYLVYEATKHRCSLDKIDKLFNYAQDTLVPHVSDHIRCVISNTVESIVNIRTQLKLIEKDIRKLASTFNVYSLLMTITGCGPLTAAVIIAETGDIFRFKNADHYVSYSGSSPRNKRSGKSVEIMGKISKKGSRYLRHALYMIAEFARRHNPVLKHLFERVKNGNKKRHKLAVIAVANRIARYIYSIMKNESSFVIMHENIMRLPEETRNTFFNSISLDFPKNTRKQIYQYSDVNGEIHRFVYKNETTESIA

SEQ ID NO: 105290 - protein, 503 aa, unidentified
MSAVPKKRFRLNDTSSSDCDEVLQFGVGMDVHKHQIAVCVSGKLPSGDIVTVKNHVFRASPRGLDELIRFLQKFEPVNAYLMECTGVYHLPVYHALQNAFPNKKNKIIAMNPLMLNRRVGDLGQHADRTDARGMAYFAHYSKLIRPSYVGGIGYYRQRQMLRHYHRIKTQTTRIRNRLTQVFDAENFKFLLDLKTEWGLQLLDHFIQRKWTFGEAYNDLVSTLESQKKGTGMLVKRRKEMEEYAQITFHENSRFILQMLLVSLLYEEANAAAFLVQVEHLALKDPELTEGYRHLLQISGFGSISALTVLLELGDYNRFANWKALAKYCGLVPTIHQSGSIDIRGHINRHTNMYLRKALTQVAGILINKGYQDTDLARYAHKQFQIKKLPYKKAIVKIGNKIARTVYNMLVLKIPYDANHEFALKKGKNLESNLAKRGTLLDTRQTRALRRDVSKFLVTNYEFLNSTSKYHLKAGFTRAIRKAKWMDSKKEADKKERMKGERKK

SEQ ID NO: 105291 - protein, 302 aa, unidentified
MLDTTTFVGLDVHARSIKAVSLDVMTGEVRCATFGYDAGAVAGWVRSVDPKARCVYESGVTGFDLQKRLSGLGVDCVVGAVSKMIKPSADRRRKNDRNDAEFLARMLSVGNVVEVWVPDDECEAARDLTRALEDARDDLSRAKQRLSKFLLRHGLAFDERTPTGRRKGNWTRAHWSWIESIRFAEGADNDVLAYYVDAVRRAAEEKARLEGLVEAEARKPRWRRRVDSLRCLKGVDTATAADLVFEAGEFSRFRNARSFAAWVGLTPSEHSSGESDRRGAITKAGNKHLRKALVGSGLIRSR

SEQ ID NO: 105292 - protein, 318 aa, unidentified
MEHTRFVGLDIHKERISITVAESGRSGAVEYLGEIANDPGAISKLCDRLERPGKPLTFCYEAGPCGYGVHRQLTSLGHRCDVVAPSLIPKRSGDRVKTNRRDATMLARLHRAGELTPVWVPDADHEAMRDLIRLRSAVRQIVTRARQHLQGFLLRHGRKHGLGTAWRMAYRRWLSTLTFEHPAQQIAFQDYVDAVTDGERRLQRVEEQISSLLPEWTLRPVVDALQSMRGISLINAVVLVAEVGDFTRFSNPRQLMAYFGLVPGEQSSGETARRGGITKTGNSHVRRALIERRLGLPHEGANRPSQGRSDRSTVKNRS

SEQ ID NO: 105293 - protein, 353 aa, unidentified
MNKDITKFVGIDLGDRTSMAHVLDRAGEFVKETRLPTTAEALEREFGGKPRMRIAIEVGGHSRWVSRQLREYGHEVIVADARKLRLIYQNPRKSDRVDATYLAKLVRLDVSLLAPIRHRGETAQQHLSLLRSRESLVKARTQLVNHTRGMVKSFGVRLPKCSTESFARKVQAELPASLRPALGPVLDSIQDLSKRIRSYDQEIERLGEEQYPETGKMRQIKGVGALTALAFVLTLEEPGRFSKSREVGPCLGLVPKRDQSGDHDPERHITKTGDPYLRRLLIGCAHYILGPFGQDSHLRRWGLRLAERGGKNAKKRAAVAVARKLAILLHKLWSTGEDYLPFYPTVPSQEVSA

SEQ ID NO: 105294 - protein, 352 aa, unidentified
MFYVGLDIHDKRIAICVLGETGQIVRRAQVRTIDEMMRILEALPDRFEVCYEASCGYGHYHDLLSPIAARVTVAHPGRLRLIFRSKDKNDRKDAQRLAKLLYLGEAPAVHVPSGEVRTWRELITGRGRVIAQRTRAKNSLRSLLRCAGVVPPGRPALWTKKGREWLRRLELPTASQRLRRDLLLEEIEALTNQVRRIEHELNLQAGRSPAVARLRSIPGVGVRTAEAVAAFIDDPHRFRDAKAVGRSFGLVPSQDQSGDRNRLGPITREGPAVVRQLLAEASWQAVRRSPTVRAYFERVRHDDPQRKKIALVATAHYLVRVMSALLKRGTDWEEGLDPADEPKGSARAVAVI

SEQ ID NO: 105295 - protein, 395 aa, unidentified
MFIVGIDIAKRSHEAIIIAEDGQVVRKAFSFRNNCTGYNLLLEQVRKLTLVKSQIVFAMESTAHYWLALYARLLKDGYTVMVLNPIQSHSLRELYIRKAKTDARDSLIIADLVRFGRCKASNVPQDKILALRELCRSRAYLVDMAADLKRKLIALLDRIFPEYESLFESVFSKASIAVLSKYSTPQKVKNANLRKLTDLLMESSNGHFGEWKAHQLKEAACSSFGIDDSGGVYSTLLGMFLEQILSLTAQADSLEKQISVFFQEFNNPLTSIPGVGTVLAATILSEIGDITRFSSADKLLAYAGLDPSVKQSGEFKSNQNRMSKRGSPYLRRAIWLASTVAVHRDPMFQTYYEKKISEGLHYMNVIGHVSRKMTAVIFAVLRDGQPYQPILQSAG

SEQ ID NO: 105296 - protein, 342 aa, unidentified
MEHYAGIDVSLECSSVCVVEATGKILREARVASEPEVLIAWFRSSGFDLERIGLEAGPLSQWLFAAMREAGLAVELLETRHVRKAFEAMPVKSDRNDARGIAQLMRLGWFRPVHCKSMSAQETRTLLTARKLVQSKLRDVENSLRGILRGFGLKVGKTTELRFAGRIEELVVGHPHLQAIAKALLAVRAVLRKELAAFEKQARKMARSDARARLLMSTPAVGPIVSLTYVSAIDDPGRFKSSKQAGAHFGLTPKKHQSGETDYTGRISKIGDSSVRTALYEAAHVMLTKPLKGCSQLKSWAMRIARRAGMSKAKVALARRLAVIMHRMLADGTPFNTAAPTA

SEQ ID NO: 105297 - protein, 462 aa, unidentified
MAEKEDVEKQESSRRQIQGLPVVRGNVAGIDLGSKEHWICAPTVDGSGREVASFGATTPELIRMAEWLKARQVESVAMESTGVYWIAPHEVLEAQGLQVLLVDTRQLARVPGRDKKTDPTDCEWIQRLHSCGLLRGSFRPEEAICMLRTLVRDKGNLVAERGDWVRRMQKSLDQMNVRVHRAVSDIDGVTGMAILRAIAGGERDAQKLAQLRDRRCNKTEEEIAEQLSGHWREDHLFSLQQALKMYDAVQERIAAYEKEILRKLRDMEREDQRGQTPPPAQNPSKAKTIRQRGLEPKREALYRVSGVDITQIDAIGVETVEVVLSEYGPDLSCFPTEKQFVSHITLAPHVAKSGGKPIKKKKRNSASTRVAAALRMAALSLRHSQTALGAYYRKIARRIGGDVAVFATARKLAILIYRLLRWGQPYVDEGAATYENRYREERIRSLMAKAKELGYQVAPLTS

SEQ ID NO: 105298 - protein, 425 aa, unidentified
MRLVYPICCGVDVHKTFLVATIITTTNSIFPNYRQKRFSTYYSGLLDFKQWLLDNNCKDVCMESTGKYWVPVWNVLEAASINVVIANPKWVSAVKGNKDDKKDSKWIGDLFRMGLVPPSYIPIKNIRILREFTRYRSKLVSMRSSEKNRFQNAFTVCNLTLDAVVRDMFGVSATAIENYLLDTDAVDPNYCVHLLRGSLKKKASDVVEAVKGFNMTAEQKERVRIIQGHFDDIDKRIAQIDNVIARLVADYEGQIALLCTIPGIDRLLAITIISEIGTDMSEFGSSKRLCRWAGLTPGNNESAGKKKSVRISRAGVYLKPALVEAAHAAVRATQKSSYFRTKYERIMKRRGKKRAIIAIARMMLTAIFAMLQSGELFNPCDLHKFDMPDELRRKQTLSSAKDAVNLLISLGLVPEGSISLEPLAG

SEQ ID NO: 105299 - protein, 344 aa, unidentified
MSEVTTIGLDIAKHVFHAHGADERGRAMFSRRISRGKLLDFFAGRPACMVALEACGGAHHWARELAALGHEVRLIPPAYVKPFVKRHKNDALDAEAICEAAQRPNMRFVAVKSEEQQAAGLVFRTRDLLVRQRTQLINAIRGHLTEYGWVAPKGPSHVAMLADLLEEEEMASSLPDAARVMFRLMLDLLGELDGKVAELDKEIARRAREDEVARRLMTIPGIGPIGATAIAALAPPAETFAKGRDFAAWLGLTPLQKSTGGKHKLGATSKMGERTLRRLLIIGSSAVVLQASKRGAPKGSWLEQMLARKPRMLVTVALANKMARIVWALLTKREDYKAPVAATA

SEQ ID NO: 105300 - protein, 345 aa, unidentified
MDRFIGLDAHLSSCTFAVMGPTGRKLRTDVVDTSAKALKDFVLGVKGSRYLCLEEGTMSEWLYEVLSPHVQELVVMVPVKRRGPKSDAKDAFDLANKLRLNDIETSVFKGYGQFQRLRELSRVYDKIVGDVIRAQNRIKSMYRSRGVASPGRGVYSTEGRDAWLKRLPPACRFACRSLYAEYDALLPIKEETQAELVKESRRHPISRKLETTPGLGPVRVAQSMAAVVTPHRFRTKRPFWSYCGLGIVMRSSSDYVKQDGRWLRVPVQTTRGLNPYCNRRLKRIFKGAATTVISLMPRSPLALHYQRLVSGDTKPNLAKLTLARKIAATFLAMWKHEEVYDPSRH

SEQ ID NO: 105301 - protein, 407 aa, unidentified
MEVLYPCCCGLDVPKKSVTACVSAEAKGKMRKEKRRFGTFTQDLLKLADWLQACGVTHVAMESTGVYWKPVWNILDGQFEEVLLINAQHIKAVPGRKADQKDSEWIADLLQHGLLKGSFVPPQATRELRDLTRYRVSLTQECNRIANRIQKVLEDANIKLASVATDALGASGRAMLDAIIAGQQDAEQLAEMSKGLLRNKIPDLKLALQGRVTEHHRFLLKEMLDDLRHVENKMTTLEKEIEQRLRPFQDEVLRLCTIPGVDRVTAWGLLSEIGLNRDQYLASWAGMCPGNFESAGKRLSGKMRKGSAFLRRRLCQAGWAVSTKRDSYLSALFRRLAARRGNKRATMAVGHAILVFAYCLLKRKENYFELGLDYFDKKNADALRRSLVRRLERLGNRVILEPAVQGA

SEQ ID NO: 105302 - protein, 388 aa, unidentified
MLPVINALEVQKGKPAMKQNTTELENPRRRVVRKNKQRELTIGVDLGDKTSRYCVLDREGNVLFERSTATTKKGLAQAFASMGASRIAMEVGTHSPWVKRLLESWNHEVIVANAHRVRLLTESTRKDDRLDARKLTRLARVDPELLSPIRHRSEGAQAHLVMIRARAVLVEARTKLVNSARGVTKSFGERLASCDPDQMRVKCLVGLPSSLQSALQPLVTAVESLTRQIHEYDNKVAQIARSEYPETARLRQVTGVGELIALTYVLTLEDPQRFRRSRDVGGYLGLRPKRRDSGASRPQLRITKEGDVYLRMLLVQGAQYILGWHGVDTDLRRWGLKLAARGGKNAKKRAVIAVARKLAVLLHRLWVTGERYEPLRHSQIASSLQVAV

SEQ ID NO: 105303 - protein, 323 aa, unidentified
MTRTICGVDISSTSLEARIGQEGAFGSFPNNGEGISALASFCQAHQVDLVAMEATGGYEQRAFADLSSQGLPVAVLNPRSVRQFAQSMGRLEKTDTIDAGMIAWFAEVKKSPPLCLAPASQQHLRALVTRLRQLTEIRTAQLNQQRLVTDQAVQASFDQLLGLIAGQIRTLEQSIAGLIDADPLWSELNLAFRTIKGVADRTVARIMAEMPEIGLLSNKTISKLAGVAPLARDSGKFQGKRTVRGGRAAVREILFIVASVVGRHEPDFIAFQQRLSAAGKPRKVIRIALAHKLLVRLNAKARDVRQQLAALQPDRMALPAGSL

SEQ ID NO: 105304 - protein, 352 aa, unidentified
MGKNNKLDFGGQHIYVGMDVHKKSWSVSIHTEQFEHKTFTQPPEVEKLTYYLERTFPGATYHTVYEAGFSGFWLHDKLREKGIDCMVVNPADVPTKDKERAGKTDRVDCRKLARGLRNGEIKGIYVPPRVKVEDRTLMRTRQSMVRKQTRCKNQITSILFFYGIVIPEDGRWSRRFINWIESIRMERASGDFALKAHLEELKHLRQIIANLNKAILSLSRAEEYRADVLLLKSVPGISTLTAMILLTELADLSRFASLDKLASYAGLVPDIRSSGETEYSAGITFRRNASLRALLIESSWIAVRKDPALTMAFNKLSTRMKKTKAVVHIARKLLNRIRFVLKNRQEYVPAVV

SEQ ID NO: 105305 - protein, 430 aa, unidentified
MKSTQNKKIEQVKKTSMIVGIDVGSEKHYFRAFNWRGIELTRKPIPFSNSMAGFDMFHSAVIELMENNHLEEALVGFEPTGHYWFNLGQFLSGKNIKFVMVNPHHVHKTKELDDNSPSKNDRKDPHIIANLVKDGRYFYTYMPTGVYAELRNASNRRFVLVEEHTRAKNRLQKWIAVYFPEYKGVYTHIDAKGGLMVLKKAATPDDIVKLGVDGIQQIWKDAKLRGSGFKKAMQIVTAATNSIGLKEGLEEAKMELLDLIEDYELQTKRIERVNDLIKNLCSQIRYVDKLLEIKGIGITTVAGFIAEVGDITRFGNAKELQKLAGLELVSADSGKHNGRTKISKRGRKRLRYLLVQAAVSVIGKNDEFKEIHQYYTTRDNNPLKKMQSLIAIACKLIRVFHVILTKGVDYDASKMLGDIRHPGVADRKAA

SEQ ID NO: 105306 - protein, 337 aa, unidentified
MKIYGGIDLHSTNSYIVLLDEAGKILYNKRLPNDIQLILHELKPFNEIASLVVESTYNWYWLVDKLMDEGYSVKLANPNAIQQYNGIKRTDDKSDARWLAELNRLDILNTGYIYPKATRSVRDLLRKRGQLVRHRTTHLLSLQAMIERHTSTRLSGNKVKQLTQESLHEYFKNEDNLLAAQSNLTIMQCLGDQLKMIEKAVKAKARLNPAYKRLLMIDGIGEILALTIMLETGEISRFAQVGNYASYCRCVDSERSSNGKKKGVNNKKNGNKYLCRAYIEAANFAIRFNKETKRYYQRKASKKNHIVAIKTIAHKLARACYYVIRDGVEFDVNKLFT

SEQ ID NO: 105307 - protein, 430 aa, unidentified
MKSNTQNAKIEAITEKTLVLGIDVGSEMHYARAFDYRGIEYSKKPFKFSNTEAGFVTFKEWILDLKERHEKDKVVPGMEPTGHYWFNLGKFLQDNEMKPVLVNPHHVKKSKELDDNNPTKNDRKDPKVIAGLVREGRYMIPYLPDGVYADLRTASNIRFQLQAELTRIQNRISRWFNIYFPEYKTVYGKPDAKSGMLILKAAPLPEDILTLGIDGVNQIWRDAKLRAVGKARAKTLIEAAEHSVGSKEGAVAARMEIRMLLEDYESRNTRLQEVMVLIEELIRKIPMAEKLLEIKGVGIRTVSGFLAEVGDISRFNNPKELQKLAGLALVENSSGKHKGETTISRRGRKRLRYLLFEVAMSLVAKNPEFRELHNYYTTRRLNPLKKMQSLMAIAAKLIRVFYAILTKGVDYDPKKMVSDIKRPAVYLQAA

SEQ ID NO: 105308 - protein, 354 aa, unidentified
MIAMKYYTSTTEFNCGIDLHAHQMYVCVMDRTGKKLVHTNIKHNDFDFFLKLVAPYKRDLTVCAECMFGWYWLADACDAAGLNFVLAHALYLKAIHGGKNKNDRIDSEKLAQLLRSNLIPPAYVYPAAKRPLRALLRQRLNFIWQRSQLLARVQAQQLAYNLPTLVTANRDRWEEQLLAHETDPVRQLALQNNLALIRHFDAQITAVESQLQKLTKAHAWRDYARLQTVAGIGEQLGLTILYEIGDIARFPTVKDFLSYCRLVKGTVASAGKIKGLRGAKLGNPYLRWAFGEAAISAKRDPVVIGPLYQRLEARMNGNKFKANAVLAIKLARSVYFMLKRHTVFDRERLVAALT

SEQ ID NO: 105309 - protein, 329 aa, unidentified
MNKKRILKVDNSYLGIDISKDKIDICLLLEEKSYHKKYKNNEQGYKELSKYLSTKKVVPHVCMEATGKYHLGIATHLYNEEYTVSVVNPFKIKSFRNTRLLRNKTDSYDAYAIAEYCKLYNPREWQPDSEEKAELKDLYRTLESYKEDLVRQNNKLEGFIGSYKLLKVKKETVKHIESQIEKVETLIEEFVSENKSTSEKRAMLKTIPGIGNTTAIALLAELPELSNFKTARELAAHIGVTPMHNVSGKSIYKRTSISKIGNGVLRKILYFPSLTAKRHNEYLSDFATKLKNKGKAKMSVVVAVMRKLVHIIYGVLKSGKEYDKDYCNV

SEQ ID NO: 105310 - protein, 456 aa, unidentified
MPKKTTGDRPELNPVNVGAAAVDIGSKMHMAAVNPACTDTPVRAFGTFTQDLHDLADWFKACGVTSVAMESTGVYWIPAYEILEQRGFEVILVNARYAKNVPGRKTDVSDAAWLRQLHSYGLLRGSFRPDAEIATLRAYLRQRERLVEYAAAHIQHMQKALMEMNLQLHHVVSDITGATGMRIIRAIVAGERNPDVLATYRDVRCHSSIETIRAALVGNDRDEHVFALTQSLELYDAYQAKMLDCDRKLESLIAALAEKGAKPIGKLPRPRVKTKQVNTPSFDVRTALYGVLGVDLTEIHGLGPSLALKLIGECGTDLRAWPSAKHFTSWLCLAPGNKISGGKVLSSRTRRSSSRAAALLRLAATTIGRSDTALGAFYRRLSSRAGKAKAVTATARKIAVLFYNTLRHGMTYRDPGADHYEEQYRSRVLANLKRRAKSLGFVLQAVPCGAEVVAVS

SEQ ID NO: 105311 - protein, 313 aa, unidentified
MSLPCYVGIDVAKATLDVAILPTDRPAWQVPNDATGIAALLDQLRPLGPTLIVLEATGGYETAVVTALALAGLPVAVVNPRHVRDFARALGILAKTDGIDAGVLATFAERIRPTPRPLPSDAHADLLALVARRRQLVEMRTAELNRVAIARQALRAGLREHITWLDRRIKDTDREITRLIEASPLWRTRDQLLQSTPGVGPQTSARLLVSLPELGQLSGRQIAALVGIAPLNRDSGARHGPRTTWGGRAPVRATLYMATLVATRHNPVIRAFYHRLRAAGKPPKVALVAAMRKLLTILNAMLKYETPWTPASA

SEQ ID NO: 105312 - protein, 338 aa, unidentified
MRTYAGIDLHSSNNYIGIMDQDYKRLFGRRQPNDLNSVLKVLEPFKADLEGVIVESTYNWYWLVDGLQEHGYMVHLANPSAIKRYEGIKHTDDKWDSFWLAHMKHLNILPEGYIYPKEQRSVRDLLRRRLFFVRHRTANILSLQSTITRNLGIKISNNAIKKLKLDDANNLFDSSNLVFMAQNNISAIKHLGKIIKGIEKQVKSQVQLRKEFVMLTTIPGIGTILGLTIMLEVGDIGRFSKVGNYSSYCRCVSSKRLSNGKKKGENNKKNGNKYLAWAYVEAAHFATRYIPGAQRFYQQKMAKTNGAVATKALANKLARASYFIMRDQVPFDEDMLFK

SEQ ID NO: 105313 - protein, 375 aa, unidentified
MSEHSEAFVGFDTSKMRNAVAIADGGREGEVRFFGEIDNTAEATAKLVRKLAGKYERLTFCYEAGPTGYGLYRQIRSLGHACSVAAPSLIPKKPGDRVKTNRRDAVSLAKLLRAGELTAVWVADEGHEAMRDLTRARETAVIDLRAKRQQVSAFLLRLGRHYPHKRTTWTKAHINWLASQKFEYPQQRLVFEEMLLAVRQAQERLLRLEEAIRGAVPEWSLAAVVTALMAMRGIDVIAAATLLAEIGDLSRFRTPHELMAYLGLVPSEDSTGDTVRRGSITKAGNTRARRMLVECSWSYQHPPRVGAHKQHKVDAAPPAVREIAWKAQCRLYKRYRALIRRGKLKTVAITAVARELAGFIWAINREITTACGVAR

SEQ ID NO: 105314 - protein, 392 aa, unidentified
MIYVGIDVASQKHDCFLLRDTGEVFSKNSFTIKNNFEGYKKLHNSIQSFVESTKDSNVRIGLESTGHYSKNILLYLIKQGYQTTLINPILTNMDRKASTVRKTKTDKIDAEAICKFLDKNRFEFKPYTLLSYHIDALKSLTRQRFSLVKQMTQQKLIFQRLVNVIFPEFLSHFSNDYGESVLNILYSYPTPKKLAKAHKESITKLLHGRCKITSSEILELAKNSIGQSEDYLGFELKHTIDMIRFYQSQVEIYNKQIETELNETEYGKIITSIPGVGIITGAMIISEIGDINNFSNSDQLLAYAGLDPSVYESGQFESIHNKPSKRGSKYLRWALHQASSIIWQHDNTFNEYYQKKIREGKHHYVAIGHIDKKLVRVIFSLLKNKSLFIPQK

SEQ ID NO: 105315 - protein, 362 aa, unidentified
MPKSTTIIAFDQHAATTVAAVLLPGQRTPALHSLSSDSPTLLRFVERLRRSGVVQCCYEAGPCGFELHRALTAHEIPCDVIAPALIPRRPGDRIKTDRRDAAQLAILYRANALTAIHIPTEQEEAARDLLRCREDICVDLLRARHRLSKFLLRHGRRFTLTKKAWTKRHAAWLQAQRWPLPALEHTHRAYVRAVDEAVARLLAVDTELRDLLTIEPLRARVERLRCFRGIDDLTALTIAAELGDARRFPSASRVMAFTGLVPSEHSSGTKHARGAITKTGNAHLRRVLVESAWHYRHHPFLGRSLRLRQRGAPADVIDRAWHAQWRLHRRYRRLAARGKPKQHIVTAIARELSGFLWAALTQ

SEQ ID NO: 105316 - protein, 357 aa, unidentified
MAACSYVGVDLHDASLRVSVRNCNGDEIVNKNIPTKCVGKVSEFFCSCPRPVHCAVESVGMYEWLWDLLEPLQFERLMLADAVELSFRRGRRNAETDRTSARFISQLVFRDEIPQAFVPDKTTREFRRLVRHWHNTTDQLSSLKIRLRWICKQHNLPGPAAVTGASAQKWFLTHGHKLSPMASVTFHQLLCSIEHIEQQRVELRRFLIFFGEKDLFRGDIQIVQTVPGIDLVISSVVIAEVADFRRFHSAEAVRCYSGLTERTKESAGRVAPGHISKAGSPTLRWALGEAVNCLIRHDAHAKKIYARVYRKTSDKSKAKVALARMLIGWLWKMVTSGQPYQSGGPAMKPGEPASQLS

SEQ ID NO: 105317 - protein, 326 aa, unidentified
MKFKLGVDVSKAKFDVALLLDGKKYRSKVFSNEPAGFRALLQWIESNVPGGRDQVHVCMEATGVYHENLALFLHDEGIALSVVNPMLAKRFVESEGVRSKTDSADAKALARYADRTQPELWQAPSPAVRKLQALVARLETLKGMRQAEENRLGVAHEAVRPSVVEIISQLEASIKEVRTQIRQTIDDDPDLKSRRGLLETVPGLGDKTIPQLLAYIGRPERFKTVKALIAYAGLAPLIQQSGTSLNKKKGTHPMGNEALRHALYYPAMVAGKHNPPIARFWQRLKAQNKPGKVIVVACMHKLLAIAYGVLRSGKPFDPEHSLVGAT

SEQ ID NO: 105318 - protein, 367 aa, unidentified
MKKVSTAAMKQRRNISRQTLTIGLDLGDRNSWYCVLDETGQIQLEQRVRTTAKALQEVFGAMPRSRIALEIGTHSPWISRLLNELGHEVIVANARKVRLIGESRKKDDRLDAQTLARLARIDPELLYPVKHRSAQAQADLMTIRARAGLVRARTGLVNTARGLAKSYGERLRGCNVRNMDPEKAEGLSPELQRALEPLLATIEELSERIVEYNDRIEALAQTSYPQVELLKQIKGVGTLIALTFLLTLEDPHRFRKSRDVGGYLGLQPGRRKSGESEPQLHISKEGDPYLRTLLVQGAQHILGPFGIDCDLRRWGLKLAERGGRNGKKRAIVATARKLAVLLHHLWVSGEVYEPLHNSSRVKLAAAA

SEQ ID NO: 105319 - protein, 422 aa, unidentified
MDVLYPHCAGLDVHKKTVVACVITPDATASWHKEIRSFGTMTADLLALSDWLQVSAVTHVAMESTGEYWRPIFNILEGNFDVLLVNAQHIKAVPGRKTDVKDAEWIADLLQHGLLRGSFIPPVAQRDLRDLTRTRSSFVRERVNLVNRVQKTLEGANIKLASVASDVMGVSGRAMLAALIDGHSDPATMAELSKGRLRQKRTELAKALEGRVKPHHRFILAELLAQIDSLDETLEHFDHEIAEYVSPFDAAVILLDTIPGVGRETAELRVSEIGTDMSRFPTADHLAAWAGLAPGQNESAGKRRSGRTRPGNQHLRAGLTQAAHAATSHRNNYLAAQYHRLVARRGKKKAIIAVAHSILIIAYHLIERNESYQELGGDYFDKRKPEATAKRLVKRLERLGYAVTVQVPVGATVQAPAFAATT

SEQ ID NO: 105320 - protein, 339 aa, unidentified
MQCTTIGIDIAKSVFQLSVANQSGKIIQRNRFTRGQFERYLYKQSQSKLVMEACGTAHHWARAAVDAGHDVVLLHPAYVKPYVRRNKTDAADADALVQASRDPELKPVPTKSVDQQAMQSVHRIRQQLIDTRKQRINLARSLFAEFGVPLPTGTKDIIARLRAHEDRLPQMLIHALDPIIDEIAVLKTRINALDEQLKVYAKSNSVIERLMTIPGIGVTTATALFGSVSDIHQFKRARQFSSWLGLTPREFSSGNTRTLGRISKRGDKYLRMLLIHGARAALLGAHRKRNNGKEVTRLQQWATDIQQQKHHNIATVALANKMARIIWAMWTKGDEYRAS

SEQ ID NO: 105321 - protein, 370 aa, unidentified
MEERIKFFVGLDVHKDSIVVAVAETGRAPARLVGSITHDVAKLLKVLARYGEPSAVQIVYEAGPTGYGLQRALAQRGYCCQVIAPSLIPKRAGERIKTDRRDGLRLAELARAGELRAVWIPDPADEAIRDLARAREDAVNARTVMRQQLKGFLLRHDVRYACKTSWSRSFYRWLSTLSFERSEAQTAFTEYWQAVTSADARVARLTAALADSIAGWRFESVVQALQALRGIDQISAIGLVAEIGDIGRFAHPRQLMAYLGLVPSEHSSGERVARGSITKTGNAHARRLLTEAAWNYRFQPRLGYRAQRRAEELPQAIRDIAWKAQLRLSARFARLKARGVHINKVCVAVARELSGFIWAIASARAKLSQN

SEQ ID NO: 105322 - protein, 351 aa, unidentified
MSEYIAFDSHKRYTWVDREDHSTRKNSGHRLEHAPGAVRDYLSGCEPGTAVAVEATGNWYWIIDEIEQAGLQPRLVHPRKAKLMMGLTNKTDKLDAQGLNRLQRNGTLPTVWIPPGPLRDLRELTRTRLVLVAQRTRLKNRLSATLAKYGAPASEASDPYGKRGRAEVENYLERLPEQARWVSGQLLAQLDFVSAQVRQLEQRLNELVEVTPEMQWLLTMPGVGVILAATIALEIGEVQRFPSAMHLASYAGTTPRVHASGGKVRYGPLRADVNRYLKWAFAEAANSVAVNHGRCPERHVSQLYRRLRQRKGHPKAIGAVARHLAEAAFHVLRQKQMYKDPSLGRGRTSQA

SEQ ID NO: 105323 - protein, 451 aa, unidentified
MRSSHQVPPRAVSLPCVNPHAAGLDIGSEEIWACVPADRDPQPVRSFGTFTPDLYALADWLAACHIETVAMESTGVYWIPVYEILEARGFKAHLVNARHLKHVPGRKSDVKDCQWIQHLHTCGLLTGSFRPEAERCALRAYLRHRATLLDYRAAHIQHMQKALQQMNVQLTQVLSDITGTTGLAMLRAIVAGERDPGKLARFRDRRCARSPAEIIKALTGHYQPEHVFALKQALALYDFYTDQLRECDAEIARQFQALKPQWPDELPPLDQDDKRDSHSKNAPPYEARTLLYELTGVDLVAIPGLNAGTVQTIVSEVGTDMTKWPREKEFCAWLTLAPYHEISGGKVLRRGTRKTRNRAGQAFRLAAQSVSRSHSSLGAYYRRMRARLGPKAAIVATAHKIARIVYHMLKHRTPYRDLSPEDYARRARERDIANLRKKAAKLGFALVDVPA

SEQ ID NO: 105324 - protein, 361 aa, unidentified
MIAIGVDVHKRQCAVAIQREDGELKNFGPMENTREGWKELLDRMPPEAEVALEVSTSGYFAMSVLEEAGWRDRAHWVHTAGIDSLRKQKYDRLDAERLARKLSVAKQDPLPEAWFPPAEIRQLRLRARQRCWLAVLRTQVKNRLQSLLQMHGLRPTVSDVFGVQGRAWLAAQVLLLPAATRESVEQLLRVLDFLLQELEKAEAHLRAVDAQFPELARLRTIPGIGEILSPVIWSEIGKLDRFGSARALVNYTGLVPSLYESGEVSIRGGITHQGSAWLRWAFVQAANSVLLGVNPFSRKYRRLRRRKISNVAKTAIARSLARCVYGVLKSGRNYEAAHWGRRPAWMVRSSGAGKPEVAIGH

SEQ ID NO: 105325 - protein, 347 aa, unidentified
MLHAGLDLSRRKVDVCLLSEAGEHLDQLTAAPDADALRGLARRIAEAYREPVCAVVESMTGARLVHDTLEQEGWNVEIADAQRVKGLAPLACKTDKIDSQVLAVLSHRDLVPAIWLPDPRVREERELARFRLHLVKHKSALKNRIHSTLINFGKPCPVTDLFGVAGRRLLERLQVPEPWRGNVTASVELIDDLERQIDEINTRLKDGHADHPYIPLLMSAPGIGWVLAFTIAAEIGEIERFPSPEKLTGYTGLCPRVNQSGDKDRRGPLTKHGPTYLRWAMLEATMHALKHPAYSERYQRNKRRLGKQRGAKVAQIDIARRLTHAIWHMLSRKQKFAPRGAAFRLAA

SEQ ID NO: 105326 - protein, 347 aa, unidentified
MSNHIENGQVRVLGIDLGKSVFQLHGVDARGKSVLKKRLKRDELLEYMAQLPPCLVGMEASSGAHHWARKFQGYGHAVRLMAPQYVKPYVKRHKNDSVDAEAICEAVQRPNMRFVGIKSVAQQEILALHRVRSLAVKNRTALVNQIRGLLAEYGIVFPKSIKQARRAIVLILSDESSEMSANFRVILEDERDELAHLDERIGKYEREIEALAKAEPQCRLLMTIPGVGPITATALLASVGDVRAFKNGRELSAWIGLVPNQHSTGGKAWLTGISKRGNGYLRTLLIHGARAALRVCENKPDRRSQWAVSVSERRGANRAVVALANRMARSAWAMLVKQEAYGASAAV

SEQ ID NO: 105327 - protein, 346 aa, unidentified
MNYIGMDTHISTLDFAVVNEAGRLTKAKSIATSVKGFMEFVKQVPAPRTIYMEEGTLAAWALETCVQYGEKLVITDPKENHWIGSSGQKDDPLDSFKLAQLARGGYIKEIHHPVGQRRRFRELMEAYHDTVRMTTRLKNKIKAKFRQNGIPCTGDTVYSETYREEWKGKLPRDATLLLILEGLWRQLEQSKQNEKEILAAARAQAKYYPEIKHFEAIPGIGFISAATISAILETPHRFANKRKIWMYAGLGLMKKSSGGKIYSEKLTIDYNRLLKCTIKQAAEATIQAKDNPFRHKYLDMTLLHGIAPNLAKLTIARNMLATMWAMWKKGEKYNPEIREKESHKQG

SEQ ID NO: 105328 - protein, 447 aa, unidentified
MWKLNSYKQEVSMCYVDDIRLEQFRQLKKEIRGSEEYLIIGIDVAKEKHRAFFGTAQGKTLLKNVVFDNTIEGFEKLDAYVDRIKVQYSLRKVVFGIEPTADYHKPLAEHLLKCGLMVVFVGGMAVKNNRQLLNGRWDKNDDKDSANIADLIAQGKCMFYEYPLMTLQNVRVLNAVKRRLKKREHGISAYIRNHILAQYFPELDKYYGSSETLAVVRECLDPSAIAGMEYDDFCRTVAPGKMTLARERRVGAIWRTAVNSVGCTMGEAAFHEAQIAVDSLNQVRQEIKAIEDKLENACLEFPEYTYLLSIPGFGPDVSAKVLGAIGDPHRFTSGKQVLRLAGLDLCAKRSGKTSNRATPIISKQGKADLRCALYQAAFIASIKSTDFIPYFTNKLVGRAKEKGIGTKMRVKLAAKLLIIAWTLMKKKECFDSKYLKLEKRVERKAAA

SEQ ID NO: 105329 - protein, 423 aa, unidentified
MKNSAANKLRQVPKGYLIAGIDPHQKKHAVVAMTQDFTTRCKFKFDNSQEGYNMALDRLREEMMKTGCQGVMFAIEAGGHYWRNLAYFLDNKGLPFRFINPFSLKRRREGKDLNRRKNDYRDSEVAAQLLCTGEFTESKLKQGVYAELQATHNAYRRMVKEKTRINNLIKGLLDGLFPEFNRVFKNPCCLNALSVLATCSIPSLIVSITEDEFVNLIRVNHQGLLKKKKLRALYHVAGTSVGIEEGAKSVSNEISFLVEKLRLIKHQIQSLEETLIHLVDQTEEGQYLLSIRGLNYISVAGLLAELGCFRLYHSAKQMIKMAGSNPTEKESAGKRGSRTPMSKKGRPALRHCAWTAVVPMLRFNTDFRAWAKQRRERPAHANPLCGKEILGAALNRLLRLGFALVKKRAYYQVSMPELAPVVA

SEQ ID NO: 105330 - protein, 447 aa, unidentified
MKKTKKEVVEMAMLNPNAAGIDIGSTEHWVAVPKDRDAERVRRFTAFTCDLHQIARWLKKCGITTIAMESTGIYWLNLFLLLEDYGFEVFLVNARNVKNVSGRKTDMSDAEWIQKLHSCGLLSNSFQPDNYTRELRTYTRHRQNLIRQASRYLQHMQKSMEQMNIKLHKVIRDLAGKTGMSITSAILDGERDTEVLAELRDRCIRASKETIMKSLEGTWREEYLFTLQQAYNSYHFVHAQIRQCDEKIEKALKKRETIEVLDEEKNPIKKRRKTKNKNTPKFDVDSYLKTQLGVNITQIDGIDSLSGLNILGEMGSDFSKWPTRKQFLSWLNLVPNNKQSGGKLISSHLMNKKNTAGHIFRKCGSCLWKSKGPLGDYYRIQRAKNGGKAAAIATGNKLASIVYTMVTQQVEYDESILVKMKRHSQQKRLDNLQKKVAHIQKELEEAA

SEQ ID NO: 105331 - protein, 415 aa, unidentified
MEVVYSRCAGLDVHKKTVVACAITPKSSGGCHKEIQTFGTMTNDLLQLSDWLTARECTHVAMESTGEYWRPVFNILEANFQVLLVNAHHIKNVPGRKTDTKDAQWIGELLMHGLLRASLIPPIEQRDLRDLIRHRTNFIRERATLVNRVQKVLEGANIKLAAVVSDVMGVSARMILDAIVKGETNAQLMAELASKRLKDKREQLIQALDGKVRPHQRFILAELLCNIDAIDETLERFNQQIKEYCSPFEQAIELLDTIPGVARPTAELIVGEIGTDMSRFPTAEHLAAWAGVAPGNCESAGKRLSSKIRKGNNNLRVGLVQAAHAATRTKGYLAAQYRRIAARRGKKRAIIAVAHSILKIAYYLILRQETYQDLGGDYFDQQKPEATRKRLVKRLQKLGYEVSLTQLDPALPTLA

SEQ ID NO: 105332 - protein, 364 aa, unidentified
MTSIARPDLTHLGMDVHKDSISIATLRPDESVDVEKIFHDETSVRRFLGRFPDLATLRTCYEAGPTGYELHRLIVGMGIPCDVVAPSLVPKAPGDRVKTDRRDARKLARLQRAGELTPIRVPTPLEESVRDLCRARADMIIDLDRARRRLGAFLLRHGQVWRAGSRWTLKHVAWISSLSFDRPALQSTLEHYRAVVDIRTAEVEAIERDLLGYCDREPFADCVRRLCAYRGVAHIGALTLASEVCDWGRFPRASAFMGFAGLGVSEYSTGGRTRRGHITKAGNTHLRTQLVEAAWSYQHGPSVGPSLRRRQEGCTPETVARSWAAQRRLCARFRALAARKNVKSVVATAVARELGGFLWGEMTA

SEQ ID NO: 105333 - protein, 436 aa, unidentified
MRGCRCSMIMGFTKPIEHFNLQRKKVITMNTLYVGIDVSSKSNVVYLMLPNGDKHSNFSVANSHEGSTLLVKKIYSALTSHSLDTVLIGLEATSVYGDNLVYFLREDATLAPFNRKIHVLNPKQVKKFHDAYNDLPKNDYVDSFVIADCLRFGRINKEVYMGDYRYKALQNLTRARFFAVQNLVKEKQRFMNVLFKKYSTMTQEKVFSDAFSTTALAVYDEFESAEALANMDLHELTDFIIEKGKNRFPDPDAVAKAIQKAARSSYRLPKTVNDSVNQVLSISITSMKALESQIKEFDKAIKAQMELLPNVLISIPGIGPVYSAGIMAEIGDINRFNSQAALAKYAGLAWKQHQSGGFESEVTRLIPSGNRFLKYYLCEAAFSLVRCDKEYSDFYHLKYKEVNRCQHKRALALTARKFVRLVFRLLKDNRLYCPAK

SEQ ID NO: 105334 - protein, 420 aa, unidentified
MKSLSKTEFVAFIGIDWADQKHDICLQPAHSQQREFDQLRHRPDAIDAWVRSLKQRFHGPIAISLEIAHGPLVYALQKYDGLILFPINPTTLGKSRQAFTPSNAKDDPSDAELALEILLRYRDKLKALQPESVAMRTLQRLVEERRGLVNDRVRITNQLTYALKQYFPQALDWFNDKDTFVFCDFLSRWPTLKQAQHARKTTLETFFREHNVRYPAIIAKRLMAIKTATPLTNDVSVIRPHQLLVQALVEELRVLLMAIERFDAEIAALAPTLPDYALFQALPGAGPTYAPRLLAVFGEQRARYQNAEAVQKYAGIAPVTERSGKKHWTHWRWQCPKFLRQTFVEWAAETITRSFWAGAFYHQQRDKGCSHQAALRALAFKWIRILYLCWQNQTPYDEAAYLNALKRRGSSLLNSLAQTS

SEQ ID NO: 105335 - protein, 413 aa, unidentified
MPVLFARCAGLDVHKKTVVACLMLTLLSGEVRKQVRTFATTTQGVLAVADWLTSQQVSHVAMESTGLYWRPVFTILEGAFTVILVNAQHIKAVPGRKTDVKDSQWLAELLRHGLLKASFIPPQPIRDLRDLVRYRESLIEERSREINRVQKGLATANIQLSSVVSDVMGASGRAMFQALITGEQSPEVLAELAQGSVHKKIPQLREALLGRVDAHHQILLSPLLAHISFLDQTIFQLFFQIQQYLTPYEEAVELLVSIPGVAAETAACILGEIGVDMRCFPTAAHLASWAGVCPGNRESAGKRLSGQTTKGNKRLKAALAEVVWVLSHMKDNYLSAQYHRLARRLGKPKAVMAVAHSLLVIIYHLLRDKQPYRDLGATFFEAREKERVVKGALRRLENLGYTVTLQSPEEVSA

SEQ ID NO: 105336 - protein, 412 aa, unidentified
MEEVFTCCAGLDVHKESIEACVRRIEPNGRLHQETRHWGTMTGDLLAMAEWMTAQGVTQVAMESTGVFWKPIFNILENRFSVLLVNARHIKQVPGRKSDIRDCQWIAQLLQHGLLKGSFIPPRSQRDLRDLTRYRTQLANEKVRTANRIHKVLEDTNIKLSSVATDILGISGRAMLEALIRGEENPVKLADLAQRRLRGKIPQLERALQGHLTEHHRFMLQLLWKQLADQEKLIDELDDKIKKQARPLAAELDRLDAIPGVDRRVAEVVLAEVGANMQPFPSHENLASWAGMSPGNEESAGKRQRRRITPGNRWLKRTLAQAAWAASHVKNSYLASQYRRLASRRGKKRALIAVGHSMLVIVYHMLKAGTTYADLRGDFFDHLEPKRLTHYYITRLERLGYKVTLESYAPAA

SEQ ID NO: 105337 - protein, 421 aa, unidentified
MKGLRAKNANAIKEGILIVAVDIGMVSNHGCCTTADGRSTKTFTFDNTREGLDKLWSMVLASKSRFQCNEVIVGYESTGPYGEPLMYYLKQKPVNIVQLNPLHTKRMSEINDNSPLKTDRKDPRVIADVIRIGHALSVVVPEGDAAYLRRINNARERHIKERTALINQLRQFVFLIFPEFTRIIKTIYCKTALHILKKYTTPAKIGRAQEEKLGEEIRRQSMGQLGTERATALINFAKTTIGIQEGVEGLVMDIQHVLIQLEMLERLIAELEHEMEITLQRIPYSGKLLSIKGLGIVTVAGLIGEIGDFTKFTTQSEIAKLAGLDLYEVSSGKRQGQRRISKRGRSLLRKILYYAAIQTIRKNGIMHDYYLRLIGRGMKRIMALVAISRKLLRIIFAMVRDGNEFILNYEFQNKEEIRKAA

SEQ ID NO: 105338 - protein, 315 aa, unidentified
MYLGIDVSKGKLDVGSTAWEGVEKYANNVKGIGKLLKRLSVEKPELVVLESTGGYERLVSKTLFDNGIRVSVMNPWQTHNFAKSLGNRAKTDAIDASMLARFAEVLKPAPTKVLNDGEYELKQLVMRRIQLVQQKTQELNRLEHTSGIVAQSIRKMVRSLRAEIKNITDKIGAMVGKREGLSKRAEQLKSAKGVGLITAHSLCVLLPELGTLNRKQIAALVGVAPYNRDSGSTVGQRSIYGGRAEVRSALYMATLTAIRSNRKIKEFYKKLVSKGKKKKVALVACMRKFLVCLNAMLKSNKSWSDNPEPVRVSGS

SEQ ID NO: 105339 - protein, 388 aa, unidentified
MIYVGIDIAKLNHFASAIDSDGALLIEPFEFLNGNDGFYSLLSKLNLFEKDSIIIGLESTAHYGNNLVFFLVSKGFHVCIINPIQTSSLRKNRLRKTKTDKVDTLVIAKAVALMENPRFVTLYDIALMQLKNLGRFRLKLVKQRTRTKIQLTSYVDQTFPELQYFFKSGLHQKAVYAILKEAPSASQIASMHLTHLKYLLTSNSHGRFKKEYALELRALAQKSVGNSDKSLSVQITQSIALIELLDRQINTVETEIRDIVESLDSVIMTIPGIGPINGGMILGEIGDISRFSKPRKLLAFAGLDPSVYQSGNFYAKKTRMSKRGSSALRYALMNAAHNVVKYNATFKEYYDSKRAEGRSHYNALGHCAGKLVRVIYKMLTDDVKFNLD

SEQ ID NO: 105340 - protein, 344 aa, unidentified
MNYYAGLDVSLRTVNICVINDQGEFIAETKVDSEVTDVVAYFDGLDLDILSVGLEAGTMTQFLTYGLQSAGFEVVCMEARQVKAALSAMRNKTDKNDARGIAQLLRSGWYSPVHIKSMDSHRIRLLLSSRKAVLSKCIDLENEIRGLFKVFGIKLPPKLGHGSFDPAVRDIIETDVTLSESLLPLLDARLVLYHCFRELDNRTRHMAHADVVCQRLMSAPGVGFVTALTYKAGVDDPTRFKHSRTVAAHFGLTPRRFQSGEIDIEGHISRCGDRDVRSTLYTAANAMMTRSSKWSSLKAWGMQIAKTRGHRRAVIAVARKLAVILHRMWIDDTQFQWGSEGARS

SEQ ID NO: 105341 - protein, 448 aa, unidentified
MKKAKIQNNSASQNTVVGQSGPTVAHPIRIWIGADWADQKHCLVVQPLEGPAQTHFLEQKPELLDQFFLRLRQQHPQGLIGICLEQSRGALLYALMKYDFLVIYPVNPRSLADFRRAFCVSGAKSDPSDAQLLCEMGLKHQPRLRPLQVEDPATRKRRLLVEGRRGFVDQHTAFLNQQRAVLKCYYPLLIELFEENLESDMAREFLRRWPNLAALQRAKPAVLRAFFYRHNSRSEEKIRQRLQAIQSAVPLTEDEAIIQPLQLQALGLAEQLAGLSTLIKQYDEQIHGVFQNHSEAWLFSELPGAGPVLAPRLAALFGTARENWPSALDLLCRTGVAPVKKQSGKQLIVLFRWARPKFIHQTLVEFAKCSLKHCAWAKLLFEDQRAKGKSPFGALRIVAFKWVRILWRCWQDRVAYDEFRYLRGLQKRNVKLYASLYQSLTPENVNNP

SEQ ID NO: 105342 - protein, 355 aa, unidentified
MTGTKYIGMDVHKESISIAVRNSVGKLVMECVIETKASMILQFFDGLRGDLHVTFEEGTWAAWLYDLLKPHVTKLVVCDPRRNALLQDGNQNDRVDARKLSDLLYLNKLSAVYHGDHGLRTLKELGRSYLTITRDQSRVMTRVKAMYRSWAIPCSGKQVYGSRHRAEWLAKIHEPGVRRRAELYYQQLDALRTLRQEVRRDLLAESKKHKVWKRLCEIPSIGPIRAAELLGILQTPHRFRTKRQLWTYCGLGVVTSSSADHEMSKGQLRRKKKHVQIRGLNENYNHDLKDLFKGAAVVASIKPGPLAEFYETLVSKGMRPEMARLTLARKIATIVLIVWKRGVCFDANHLKPQTA

SEQ ID NO: 105343 - protein, 371 aa, unidentified
MVKQENAKTGVRWVGIDMGKSSYVLRLIDENGKITGWDGKTNKEGRKELYRRLRSTDKIAIESCSLAFTMNKEFKELTGTDFYILNPNKLFQIYMTDKKTDKEDALKLAKEIRDKQEEDLPRVNAPTEKMKEMRNVMSEYREIVKFRTMKINRLHSVYEHAGITDLKRSDLKTKTNREKNLKLLNGYEKEEAQRLMHLIDLLESQKMELENKIKEEENTNEQMQIVEQIPGIGKTTAFCFVGVIGDPNRFTNMTRVSSYLGFIPKIDCSSKTNHYGHITKKGNAYLRGLLVQAAWVIVRSNNGGSLKEKYNDLIIHGMSKKKAVVAIARKLAELMYTLLKNHSSYEPRPYTPRTTYVENLADQALSYAAAS

SEQ ID NO: 105344 - protein, 454 aa, unidentified
MENKTHSVFGEMRRYVAGIDLAWRADHYVCGPRNEDGSHDIASFGTTTPELYKMLKWLQERKVESVAVESTSVYWIPTADLLESKGIEVILVDPREVRTVPGRKSDLKDCQWLQKLHSSGLLHGAFRPSESIVAIRSILREKETMTAMRTQSIQQMQKSLDQMNIRVHHAVSDIDGKTGTAIIKAIIDGERDPVKLAKLRDKRCKQSERQIADHLTGTWRPEHLFNLEQAFKTMQFLDERIAEYDRRVLEMFSALSATIEESDEQKPSEPMPSRKQTHKEKKDVVGKEIIRKIMKFNMPSIPGVGLESSFTLASELGNNFDRFPTEHHFVSYIGLAPSLGKSAGKNIRQRHKCKNTSRAGRTLRMCAATLYRSNTALGAYFRSVAGKTDRKTAVKATARRMAQIIYRGVKYGQSYIDSGQVAYEAYLHDKTVKTISKLIKRHNISKLEIENALT

SEQ ID NO: 105345 - protein, 397 aa, unidentified
MIAVGIDISKAKSTVAVIDSDGTVLASPFTMAHTQPEMEAFVTYLKGLGEPTTILMEYTGHYHYPVLKKLQDEGFPVCIVNPYQMKKYGDVEIHKAKTDKKDALRIAAYALEKSYKLVPYSSMEQKYEDLKFLSRQYSQRITYVAKLKVQLIALLDQTMPGITRILPLNSRNPEKCALLLFIKRFKSFDEIHRIGKARFLASYDVLAKKASERSASSKGLSIYELAVDSITTRGEDPYIWLSQNQCVDLLSATQNAADEIISQMRNIAETIPEYKVLRAMRGVGDRLGPIILAEIGDIRRFHSGKALNSYAGNDAPPYQSGQFESRNRHISKRGSSALRKACYEVMQALKLTKPQDDPVYLFMLKKEQEGKPFNVAKMAGVNKFLRIYYARAMELYK

SEQ ID NO: 105346 - protein, 328 aa, unidentified
MCEFTGIDVGKEKFDVGWLRDVKTGKKKTKVFKNTAAGHQQTADWLLNNLKVPAESIVVTLEPTGVYHEALLYFLHGCGFQMMLVNPGKARKYAESINQVHKTDKLDAVTLACYGHAQHHQLPLWQPEAPEVRELKVMIRRLDALEKDLQREQNRQEASLVSLSSERVTQSIKEMIETLTAEIQRLQQDIDDHIDRFPELKCNRELLESVKGIGPVMSRELVYLFASKRFKSARQAAAYLGLIPRLNESGKRKGRTTLSKMGSARIRAKLYMAAVSAATHNPDIKAQKVRLLKAGKAKMQAIGAAMRKLIQICFGVIKHQSEYQPQLG

SEQ ID NO: 105347 - protein, 355 aa, unidentified
MPIAGGLDIHRKQVTFGYLDTGTGQVRRGQISPAGRVHLRAWLARFADGGDVAFAVEACTGWRYIAGELAAAGVGVHRAGPADTALARGRKRHAKTDKTGARHLRMLLAGGRLPGCWIPPARILEARALLELYHDLRAGHTAWVQRIHAVLFHHGAPALGEGTLRTAQGVAALRAAAAEHLSRAGQLQVATALEVTEALEARMHAVRHQLLDAARHLAGAKVLAARLSGVGPVTGLAMTCWLAGAGRFSSSRKAVRFAGLDVTVWSSDRKGPPGRLVPAGTAGAALGPLRGRQGPRPVLGPRPPLLHHGQGPRGRQAGRAVRGPQDPPPGLPHPGRARRRRARPRLRPLALVTST

SEQ ID NO: 105348 - protein, 346 aa, unidentified
MEHYAGIDVSLECSSVCVVDGSGKIVRESKVASEPAALIAWFSSLGLEVTRIGLEAGPLSQWLYAAMKQAGLAVELLETRHVHDAFKAMPVKSDRNDARGIAQLMRLGWFRPVHCKSINAQEVRAVLTARKLVQSKLLDVENSLRGILRGFGLKVGKTTGTDFAGRINELVKGHPNLEVIAEALLKVRTVLLSEFKAFEKRAGKMSQMDAKARLLMSTPAVGPIISLTYAAAIDDPARFTSSKKAGPHFGLTPKKHQSGETDRSGRISKIGDASVREALYQAAHIMLTKPVKGCSQLKSWAMRIAKRAGMSKAKVALARKLAVIMHRMLKDGVPFNPLAKANAATA

SEQ ID NO: 105349 - protein, 352 aa, unidentified
MVVTIGIDVHKQTHCAVAVDEAGRQLGRPATVRATDAGHRQLLRWARREFAEDGATFAVEDCRHVSTRLERALLDAGQSVMRVPPKLMALTRASARTRGKSDPIDALAIARAAVREPDLPRAEHTHASRELKQLVDHREDLVGMRTGLQNRLRWRLHELDPEFDVPARGLDLIRHLDRAQARLEALPPSTTRRIALDELTDIRQFTGRINALEKEIAALVTAQAPQLLALPGCGPLTAAKLLGETANPTRFRSEAAFAMHAGAAPIPASSGKTDRHRLARGGNRQLNAALHRIAVTQIRLDGLGRAYYLRRRASGDTTMKALRALKRRLARVVFHLLRPTDQPAPAALPQAA

SEQ ID NO: 105350 - protein, 383 aa, unidentified
MTKIIRIGIDTSKSVFQVHGVDAAEQPVLRRQLRRRQVLEFFAKLEPTKVGLEACGASHYWARELIALGHQAVLLPPQYVKAYVKRNKNDAADAEAICEAMSRPTMRFVPVKTAQQQADLMLVGIREALIRRRTQLTNTIRGYAAEFGLIAAKGLDKIGPLLARIATEERLPVSARELFAGLGDEYDRLKSQLRAIESKLMAWHRCNELSRRLAEVPSIGPIGATLAVMKVPDPRAFRRGRDFAAWLGVTPKDHSTAGKTRLGVITRAGDETLRSILISGAMAEIKQVGRPGSKPRSPWLVELVRRKEPKLAAVALANKNARVLWKLMVSGERYNAARYRSPPRPATATTREGRGAALRKAPRRAPRSHHGKSQQTATMTRNP

SEQ ID NO: 105351 - protein, 310 aa, unidentified
MNIFAGIDVGKSTLDLGLHPSGRCERFPNTSQGHRALLHALGALKVEHIALEATGGYERGILDALVRAGYCVTRLASHRATAYARALGFFAKSDAMDAQVLARMAATVPRRPYETPSPERAELAELLRCRLQLVSQRDDNRRRLKQTQLPPARRALQAMIDAAKDQIVDLDRRIAASATHVDPTSRLREIPGVGPVTEATLLAYLPELGQLSRQQIAALVGVAPYVDQSGRRDGPRRVRAGRWIVRRALYMATCAAIRVKDGAIAERYRALRARGKLAKVAIVACMRHLITAMNAMVRDRVGWRCDVAAS

SEQ ID NO: 105352 - protein, 389 aa, unidentified
MKIFVGIDIAKLNHFAAAISSDGEILIEPFKFTNDADGFQLLVSKLESFDKNSIIIGLESTAHYGDNLVRYLVAEFYQVCVLNPIKTCQMRKNNVRKTKTDKVDTFVIAKTLMMQDDLRFITFFDLDMMDLKALGRFRQKTIKQRTRLKIQLTTYVDQVFPEIQYFFKSGLHQNAVYALLKEAPSPKEIASMHMTHLANLLKVNSHGHFTKEQAKELRVLAQKSVGANDSAISIQITQTIQQIELLDSQLQKIEAEITDIMKFNDSVIMTIPGIGYINGGMILGEIGDIHRFSNPNKLLAFAGLDPSVYQSGNFQAKTTRMSKRGSRVLRYALVNAAWNVVRNNATFKAYYDAKRAEGRSHYNALGHCAGKLVRVIWKMLTDEVEFNLK

SEQ ID NO: 105353 - protein, 424 aa, unidentified
MKVTYKTCCGVDVHKSFLVATIITTTGGIEPSYQKKRYSTFNNSILEFKQWLLDNDCHELCMESTGKYWIPVFNLLEDEINVTIANPKWVKAVKGNKDDTKDSKWIGDLFRLGLVKGSYIPCKKIRILREFTRYRYKIVSCRSSEKNRYQNALTVCDVALDSVVSDIFGKSSTSIIDYLLEQSGNSINHKEIASKLLKSLKSKEDAVIESIEGYQMTDSQKYRMHLVRAHMDYITAEINDVDREIEKLISSDPDFENAIQFLMTIPGVKRDSAITVISEIGIDMTQFSSSKRLCCWAGLTPGSNESGGKKKSVRVTRAGVYLKPALVQCAHAAVKSEKSPYYKKKYESLMKRRGKKRAIVAIARMILTAIYQMLSTGESWNPSDLYKIDIPEALLEKQKAKAIKQAMKLLQREGLYPPPEPIAS

SEQ ID NO: 105354 - protein, 416 aa, unidentified
MKIVRPICCGMDVHKNIIVATIGITNKKTRITEYIQETFSTLNPDLLNLKQWLINHKCFDACMESTGKYWIPIFNILEDEINIYLTHPKYVKAIKGKKTDKKDSKWICDLFKYDLIKFSFIPPKEIRALREISRYRYKLVGMRSSERNRYQNCMTVSNIGIGSVFSDPFGKSAQAIMKEVLESDIIEDEKILKCIHRSCKNKDKILDSIKHCNIETDQRFKMNESMTHMEELQVHINNCEIEMMKRAAPMFDQFMHITQLPGISTLSAILIISEIGVDMKQFESDKQLTCWAGLAPANNESANKKKSVRISKAGQYLKPLLVQCALGAIKDKEGYFGIKYSRIKKRRGHKKAIIAIARMMLVSIYHMILTGETFNPSDYESFRNPNPPIKQQDLTEESAIEFLKKSGFDVSKLSKP

SEQ ID NO: 105355 - protein, 370 aa, unidentified
MRKDTSRNKQQIRSKKERETREGFEFYIGIDLGDKNSDVCVLDQSGEVSKEFRLRMKEADFRTYFASIPRSRVAIEAGGQSRWVAEVIEKCGHEVYVSNTRKVPYIHQSDDKDDPGDACKLAELLYFKPRLLHPVQHRSREAQVDLSWIRAREVLVKSRTQLINAVRGISKAFAERLEKCAAESVTAKLAGQIPEVIRGAVAPLLETIDHLNEQIRYYDEMEEHIARERYPKYRLLEQVSGVGVHTALSFMLTIGDPERFQKSRMVGSFLGMRPKKQESGESKPQLGITKAGDMYLRKTLVNCAHHILGPNRKDSDLRRFGQRICARGGKNAKKRAVIAVARKLAVLLHRLWITGEVYEPLRNSKQSMAA

SEQ ID NO: 105356 - protein, 337 aa, unidentified
MIGVDLAKNVFQLHAASMRGEPRFCKKLSRERFRSFMADQPPAVVVMEACGSAHYWSRELIRLGHEVKLIAAQYVKPFVKRQKNDAADAEAIVVAAQRPEMRFVEPKSAEQQSRAILFRARDRLVHQRTELINALRACLYEYGHAVPQGAHQIKRIAEILDAPNSDLPDLMREECRELLDQIGEQTTRIIARTAKIKTLAAEADTARRLQTIPGIGPLTALAVEAFAPPMEHFKCGRDFAAWLGLVPRQFSSGGKERLGRISKAGQADIRRLLIIGAMSRLNWLGRKSIPETSWLARMVARKPRMLVAIALANKMARTIWALLTKNEDYRVPAQAAA

SEQ ID NO: 105357 - protein, 346 aa, unidentified
MAYYVGLDVSVKETSICIMDDNGVVAARADVSTDPDLIARFISKHASEVERVVHESGILAIWLTRELEKRGVPVICIDARLAHKALSGRINKSDQGDAEGLAQLARTGWFTQVHIRSEASERVRVLIGARERLIRMRKDLEGHVRGVLKVFGICMKSVGTGKLRRDFRDQLAAAADTDPAIAMMSETFIPLHKTLCIARDALDDQVRMMARESDLARRLMTVPGVGPIVALAYIATLDDEKRFRKSVDVGAFLGLTPKRHQSGEMDWSGKISKCGDCDLRRLLYSAASTLISCTRKPSRLKEWATKLAERKGHKKAAVATSRKIAVILHCLWRNETEFEPRMEGTR

SEQ ID NO: 105358 - protein, 320 aa, unidentified
MMAQIDLVVVGIDVAKDKVDACIRSLSLRQTFPSSPQGQRKLVGWLRKNQVNKAVMEASGGYERAWAKVVREAGIEVRIVDPKRVRSFALSAGRLAKNDTIDAEMIAWFAETFSDAPGQKHDAAHEELQTLVKARLSLIDLRMRLVSQSEHAAPGLVQKAHAHILKSLASEIAKLEAAICAKIKSMPDFAERAEIIESVPGFAETSSANLVAGMPELGQVSDEIAAALIGVAPYDDDSGKRRGERHIKGGRRWVRNAIYMPCVGAATLNNPVLKAYYRRLIAKGKKPKVAIIACMRKLIVILNTMIARRQKWDPSRYALR

SEQ ID NO: 105359 - protein, 353 aa, unidentified
MTVYFGVDFHARQQTISYCDSADGEVHQHELQHQGGQVREFYAQFKGEVIVGLEASGYSSWFEELLESMKHTVWLGNPAEIRRKAPRRQKNDRRDADLILGLMLKGDFPKLHRFSAESRLVLRQLRYRHKLVKVRTIAKNSLHAISLSAGLTEKRGLLSQRGQQRLRALELPPVVGQQREEWLALVTQLDERIASIAAILEKVAASDEQLKLLRTHPGIGLLTGLGVRHTITPVARFSTTRKVVAYVGLDPVEDSSGERRRVGSISKEGSRLLRFLLNEAGQTACRTDPDLKRFYQRLIHRRNRQKAKVAVARKLLVRSFIMLRDQIDYAEFVRRGVAARSARKAHRPDVPVL

SEQ ID NO: 105360 - protein, 421 aa, unidentified
MKSLTDPEFTAFVGLDWADKKHDICLQAAGCEEREFDRFAHQVTAIEKWALSLQQRFGGRIAVALELSKGPIVYALQKYEFLVLFPINPSMLAKYRDAFTPSGAKDDPTDAELALDLLLRHRERFTPLQPQSEQMRTLAYLVEQRRRLVNDKVRFTNRMGDALKQYYPQALDWFANRDTVLFCDFIARWPTLMQVKRARKTSLVAFFRAHNMRFPKLIEKRICAIKAAAPLTQDGAVITAHKLQAQVLVEQLRVTLKAIDRFDQEIAATAAKLPDYALLFKPLPGAGPVLAPRLLVAFGEQRDRFAGADEFQQHTAIAPVTERSGNKTWVHWRWQCSTFLHQTMVEWAGQTINQSFWAGAYYRQQREKGSSHNAAVRTLAFKWIRIVYRCWQTRTPYDESRYLEALRLRGSPLLKLLGETM

SEQ ID NO: 105361 - protein, 331 aa, unidentified
MSSLTVFVGLDYHQAFVQVCVMNRAGKVLTNRRCDNSAEAIVRCVETHGEEVAAAIEACCGAAALADELIACGWEVSLAHAGYVSKVKQSPDKTDWSDARLLADLLRIGYLPRVWLPPAELRQLRHLVRHRQQLAQSKRAAKLRVTAVLRTHRVGFAVSRWTKHWIAAVRNCEAIGTQGQWVVGQLLEEIEHLQKLLVEVEARLTDLTSNDAFVQKLLEYPGIGLVTAVTLKAELGTVRRFRSGKQLSRFCALSPRNTSSGLKQADAGLINAGNPQLRTVLIEAAHRLQRCDLRWAELGMKLRRQGKPGSVVAAAVANRWVRWLYHQLLAV

SEQ ID NO: 105362 - protein, 362 aa, unidentified
MDNLTHVALDVHKEQTAVAVLRPGDHEPDQRVIASTPEAYRKLVSRVGTDGVVVCYEAGPCGYDPHRVFTALGVRCEVIAPSLIPRRSGDRVKTDRLDARNLARLHRAGELTTIRVPSEVEEAVRDLVRVREDIREDRRVAIVRTKAFLLRRGIHASKGWNIHHTEWARGLRFTQPAAQEAFDALVGALQTRDVQLRSLDEKIGEWSLREPLAQPVARLRALRGIDTLSAATLAAEVCDFRAFGSAPSFMAFTGLVPSEHSSGARTRRGAITKSGNAHIRRILVEAAWSYRHHPAVGVQLRRRQQDQPQVVITHSWVAQHRLHSKYHRVAACHGPNVATVAVARELAGFIWALMTEHYATEG

SEQ ID NO: 105363 - protein, 459 aa, unidentified
MSKLSQPNANLNEARPFASMSRVNPHAAGVDIGAHENMVCVPGDETTQLVRSFGNYTADLHAIAAWLKEHQIETVAMESTGVYWIPLFETLEAAGFQCNLVSARSLRRIPGRKSDVLDCQWIQTLHSYGLLESSFRPEADLVALRALLRHRAQLLEHRAPHILHMQKALLQMNIQLSQVLSDVTGTTGQAIIRAIVAGERDPHKLAALRNYRCHKDQDEIAKALTGTWRQEHLFVLKQSLEMYDFYTHQLEAYDAEIERLYAAARPSKDDSDDDAPPPVPEHKRNSHSKNAPKGGAIRRHLKRICGVDVTAIHGLGEVLAQEAVMETGTDMSKFPSVKHFCSWLGLAPKNEISGGKVLRSATLKTRNRAGQAFRKAAASVMRSDCVFGVFYRRMKARIGPAQAAVATAHLIARVYYRMLKDKIEYQPLSVEEYEAKYRQQQIKSLQKKAAKLGLQLSPA

SEQ ID NO: 105364 - protein, 443 aa, unidentified
MKPPPEQPAPDWLVHRAFGGLDWASQKHNVIVVDPHGKVVEDFEIEHSALGWKKFRERLAPYGAIPFAIETSQGTAVEQLLEAGMKVYPINAKSAKSYRERKAPSGVKDDRLDAWSFADACRIDGQGWRALRPEDPLVKELRLLCRDEVSLIEQRSSFICQLRHALAEYYPTALEAFEDWGSVSAWMFVQRFPTPQLLQVAGKRAWEKFLHARHLWRTESGPRRIELFSHATELSGTVPMANAKSQLALSLISMLFALEKQLGIYRKRIDELFGRHPDHDLFGSLPGTGPKLAPRLLSEIGDDRERFEDGPQALQCLAGSAPVTRRTGKCKVRANPDRWPCHQRWACDKHLRHAMHLFSEHTLRQCVWAQIYYQHHRQKGSSHADALRRLTQRWLKIIYRCGWTERPTIRCSTTITSLNMVLGYSNSKQLIANNLHEKTLADR

SEQ ID NO: 105365 - protein, 403 aa, unidentified
MNSVGIDISKGRSTIAVMRPFGEVVISPFEVRHTDSELSKLARQLKSLDGETRVVLEATGNYHAPVAKLLHDAGLYVSVVNAKLVHGYGNNDLRRVKTDKKDAVKLANYGLDRWLTLPRYVPEEDIRLLLKNCYRQYRQYSKVQTVLKNNLISLLDTVFPNVNRLFSSPARADGSEKWVDFVAEFWHCRCVSEKSERTFTNKYQRWCRKHGYNFSEAMAHTIHAEASGHIGVMPKSETTKLLVEQAVSQLRATSAALVALKQEMQSLASTLPEYPVVMDMFGVGPTLGPQLIAEIGDVRRFYSKKALVAYAGLDAPPNDSGDVTGRHKSMSKVGASSLRRTLFLVMSVYLQNAPLNEPVYQFMDKKRAEGKPYRVYMMASANKFLRIYYATVKAYLESLEHTV

SEQ ID NO: 105366 - protein, 345 aa, unidentified
MQKIMTIGLDLAKSVFQVHAASADSSMVLNRKLRRSELLAFFAKLQPCLVGMEACGSAHHWAREIRTLGHDVRLMPPAYVKPFVKRGKTDAADAEAIAEAVTRKAMRFVPVKSTEQQAMAVLVKSRALLVRQRTQAINALRAHLAEFGIIAGTGMTKVAELIAIARDESDQRLPAVARQALREIAQQVESLAGQIKRLDRQIVLLSRQDSDTRRLTTLPGVGAIIAASVKAFVPDPAGFKSGRHFAAWLGLTPRPHSSGGKKGRGASPRWAIPCCAPCWWSARHQCCAMPGTIRTHRNGSRRSWRAGPTGWSPLHWPTRWHASSGRCWSRAASIALLPPRRPDRE

SEQ ID NO: 105367 - protein, 342 aa, unidentified
MNHYAGIDVSLECSSVCVVDANGKILREAKVASEPEALIAWFRSSGFDLERIGLEAGPLSQWLFAGMKAAGLAVELLETRHVRKAFEAMPVKSDRNDARGIAQLMRLGWFRPVHCKSMSAQETRSLLTARKLVQSKLRDVENSLRGILRGFGLKVGKTTELGFAGRIEQLVAGHLHLETIAKALLAVRAVLRKEFAAFEKQTRKMVRSDMRARLLTSVPAVGPIVALTYASAIDDPGRFKSSKRTGAHFGLTPKKHQSGETDYTGRISKIGDGSVRTALYEAAHIMLTKPVKGCSQLKSWAMRIARRAGMSKAKVALARRLAVIMHRMLADGTPFNAAAAAT

SEQ ID NO: 105368 - protein, 413 aa, unidentified
MTDESLSWFAAVDWGSEKHQACILDAKGDVAGEREFPHSGTGLTELCDWLLSVACDTSAVAVAIETPHGPVVDALLDRGFAVYAINPKQLDRLRDRFCVSGAKDDRRDARVSADGLRADRHLYRLVQVSDPAVIELREWSRLLEELQQERVRLCNRVRHQLWRYYPHLLDLTDDVGADWFLELWALAPTADKAGRLRETTIARLLKQHRIRRLNAETTCRILRQPAIKVAAGVTEAAVLHLRSLFARLRVVNRERHQAERKLDELCTELSERASEGQSGEPCDVAILKSLPGIGRVTLAALLAEASGPLSRRDYPALRTLSGVAPVTKRSGKSNIVVMRYAAHARLRNTVFHWARAAVQNDPKSSCRYAALRKRGHSHGRALRGVADRLLQVACVLLQRQTMFDPDRCQPAAA

SEQ ID NO: 105369 - protein, 397 aa, unidentified
MYIVGIDIAKRKHEAAVIDGEGAVIIKPFSFTNNCSGYNRLLAMLAKAKLPLDEVSFAMEATGHYWLALFTRLQKEGFRVQVINPVQTNSIRSFYIRQAKTDPRDALLIAEVIRFGHFSESTLHPENIYELRELCRGRHAIVSMQADVKRKVVALLDQVFPEYETAFTNLFGDTSMAILQTCPTPKELSEMPLEELCHLIEVSSHKRFRMAKAQELQELARNSFGFAMAGDVFSTMIRLYAKHLDFLKQQVREMDRKIAEIMETLDTSITTITGIGPTLGAYILSEIGDISRFSSAAKLAAYAGIDPTMRQSGEYNGVRNRMSKRGSPYLRHAIWLAASSAVLHDPALKLYFQKKRDEGKPYMASVGHACRKMVSIIYAVMRDNKAYTPCIPNEISA

SEQ ID NO: 105370 - protein, 346 aa, unidentified
MTIVEDTRAVTGGVDTHADMHVAAALDPVGGLLGVEEFPATTTGYARLLGWLGGFGTVCLVGIEGTGSYGAGLARHVTAAGIRVVEVDRSDRQDRRRQGKSDPLDAVSAARAAQSGRARGAPKGRDGAVEAIRTLMVAKRSARSGRTQTINQARALVLTGPDDLRARFARHTAAGLVAGLASLRPRPGDVVGYATRIALRELGRRAEFLDGQLARLDELIVPLVTARAPGLLALHGVGPDTGALLLIAAGDHPHRLRSEAAWAHLCAAAPIPASSGKRTRHRLNPGGNREANHALWRIVITRMSSHAPTRAYVERRTAEGLSKKEIIRCLKRYVAREVYRHLRPAG

SEQ ID NO: 105371 - protein, 481 aa, unidentified
MGRDPVREIIHITLWPDLQPTGEGMDQQLGKSNGLSLERIEPNAAGIDVGATEIFVAVPPDRDRQPVRSFKTFTDDLRQMAAWLVQCGITTVAMESTGVYWIPPHEVLEEAGIRVCLVNSKHVKHVPGRKSDVSDCQWLQYLHSVGLLRASFRPESEIRAIRALSRHRSSLIEIASVHVQHMHKALTQMNLQIHHVLSDITGLSGMAIIEAIVAGERSPVRLAALCNQRVRSDQDTVIKSLVGNYRSEHLFTLKQSLTAYKHYQELIADCDREIERLMRLLNGKIDPPPSSPATPPDPRFQKRSKNQFRFDMGSELNRVFGVDLTTIPGISALTAHILLAEIGPDLRHFANVAAFASWLALCPANTKSGGKVLSSKTRQTNNRASHALRIAAQTLARSKSHLGNFYRRMRARLGGPQAITATAHKLARIIYHLLTTGQHYDETVFVKEDKKQAQRQEKRLRKQAKTLGFQLVLITATVSCS

SEQ ID NO: 105372 - protein, 362 aa, unidentified
MQSTTIVAFDQHAATTVAAVLPPGQRTPVLHPLTSESPTLVRFVERLRRSGATVQCCYEAGPCGFELQRALQARGLPCEVIAPALIPRRAGDRVKTDRRDASHLAVLYRAGALTAIHIPTEEEEAARDLLRCREDIRADLLRARHRLSKFLLRHGRRFTGTKKAWSKAHGIWLRTQTWPLPTLTQTHDAYVRAVDEAEARLRSVEGDLQTLVTLASLRPRVERLRCFRGIDDLTALTIAAELGDVRRFATAPQLMAFVGLVPSEHSSGAKRARGAITKTGNAHVRRVLVEAAWHYRHRPFVGAALRRRQHGAPPQVVAQAWSAQDRLYRRYHRLAGRGKPHQHVITAVARELTGFVWAALRP

SEQ ID NO: 105373 - protein, 390 aa, unidentified
MGNDLRYPSRTEEVVLAVSLELGVSKWKVALHDGRRERPAVHTVAQPQAAPRLQAVLTLIDAHRDRWSLPADVRVVVCYEAGPDAFWIWRALQARGIECYVLDPASIPVERHKRRAKTDRLDAIRLVISLRAWLRGERDRMHVVHVPSAQDEASRHLVRDRGQLQKEVLQHLDRMRKLLATLGCWDEVDHRDFAGRLARDEVRCHDGTPLPLELRERLLRECERLALATQQLATLEKTRQASVPAPARARSDALARLKGIGEVSASRLALELYWRDFHNRRQVGACVGLVPQPYDSGESQTDQGISKQGNGRVRGLLVEMAWTWLRYQPGSALTQWFDQRTQGTGPNRRARRIAIVAVARRLAIALWRYLKDGVIPEGAQLKPQPVGCAK

SEQ ID NO: 105374 - protein, 322 aa, unidentified
MRYIGIDVSKATFVVAYSSDKGGEIRTFNNTTAGIRQFIGTLPKDGSIHCVMEATGNYSALLLYMLNVAGITVSMENPLKVKNFAKAMLSTVKTDKSDARLITLYGEKMNPRPFKVQGEAILRLRQKRTVIRQLTKQITAMSNLRGSLVCLPVPDKGATHTVDETIKFLEKRRDRLQSELTELVEVEFSRQLALLTTIKGIGITLATALIITTGGFTYFQNAKQVSRYLGICPTYEQSGTSVNIRGHINRNGDAYTRGLIYVAAWNASRFNAKCGETYTRLRQNGKPGKLAMIAVANKLVRQAFAVVAHDKEYVDGFVSNRH

SEQ ID NO: 105375 - protein, 435 aa, unidentified
MSQSKEIRVCIDVGSVNHYVAIGLSTGERIEEFHLSHNQEGIDQFFYRLEKLQNKYQLPISVAMESYNGYARPIDSMVLDKGYKLLNVNNLKLARFKEIFPGPAKSDPIDAWMMFDLFNMGDRLPMAKNILQEVGEIPEVNKKLKFLTRRRDVLVIEKASIANRLQGDLLAIAPGILSITKSISNRWFLNFLTAKEDIRQLSRMQRKTILKVKGVGKNYADSVQKWQKSAIFSPDVSWMIGTIYLDARRLLELIEETERLEKIIDELIPESKIASLIKTIGGFGTICSAVLAGEIGTQDRFKSEASLALYIGMAVLDNKSGKYNGTRNPRNINKRAKRAMMIGVDRHRKTSEESKKYFEKKRINDGKKHNQAIRALGRFMVRVIWSMLKQNRSYQLRGNQEPTIIDNSKEDSVKISKEAFETINQKVFEENKIVA

SEQ ID NO: 105376 - protein, 397 aa, unidentified
MIAVGIDISKAKSTVAVIDSDGTVLASPFTMAHTQPEMEAFVSYLKGLGEPTTILMEYTGHYHYPVLKKLQDEGFPVCIVNPYQMKKYGDVEIHKAKTDKKDALRIAAYALEKSYKLVPYSSMEQKYEDLKFLSRQYSQRITYVAKLKVQLIALLDQTMPGITRILPLNSRNPEKCALLLFIKRFKSFDEIQRIGKARFLASYDVLAKKASERSASSKGLSIYELAVDSITTRGEDPYIWLSQNQCVDLLSATQNAADEIISQMRNIAETIPEYKVLRAMHGVGDRLGPIILAEIGDVHRFHSGKALNSYAGNDAPPYQSGQFESRNRHISKRGSSALRKACYEVMQALKLTKPQDDPVYLFMLKKEQEGKPFNVAKMAGVNKFLRIYYARAMELYK

SEQ ID NO: 105377 - protein, 325 aa, unidentified
MPRIAEQELLVTGGVDTHADTHMAAAVDQVGRVLGTEQFPATAAGYRAALAWLRGHGELAKVGVEGTGSYGAGLACYLAGQGAEVVEVIRPNRQARRRRGKSDAADAVAAALAALNGEASGQPKSHDGAAESIRMLRVARCGAVKARTKAGNQLRDLVVTAPETLRQQLAGLPRERQVELAARFRPGDLAGPAEGAKAAMASIARRYQELTAEIARLDAALGELLTRAAPKEFMAKKGVATQVAATLLATVGDNPGRVRKEASFAALCGASPVDASSGKQERHRLNRGGDRQERDHPLPQALRRPRDLQGPVPTRAAGQAASGIS

SEQ ID NO: 105378 - protein, 358 aa, unidentified
MQRNKISFKGQKIFIGIDVHAKNWEVAIAPEVGIVRRHSQKPSAKELFDFLKKNYPDGEYRAVYESGFSGYSTYYALKEVGIECMVIHAADVPTTQYEEVMKTDRVDAEKLARSLKADLLNGNYILEKQCIDDRSVVRIRRTIQKQLGAYKSRVKHMLHCHGVEYPERFSKKQTHWSRAFITWLMKDVHLMSDTRVSLDLLIRQVEVIRGTLLEATRLLRKMSRAERFKRRHDLLRTIPGIGLITAMCILTEICDVKRFHNENQFAAYLGLIPTSHSSGEKTVHGEKTFRGNKQLGPMIIEAAWIAISRDAGLGAQYFQYKKRMEPQEAIVRIARKLSNIIFSVLKNEKEYVPYQTGN

SEQ ID NO: 105379 - protein, 342 aa, unidentified
MEQFVGLDVSQAETAICVVDAAGAVQWQGKCASTPEAISATLKQKAPQAVRIALETGPLSAWHWRALSKLGLPVVCIDARHAKAALAMQVNKTDANDAFGLAQIVRTGWYREVRIKSEQSHRTRGLLAARSKLVDMRKDVSNQLRGLLKVFGHVIKPAGGQSFETQARTLAEGDPVLSTTSEVLLATRHSLAEQIARLDKLLLTQARQDPTCRRLMSVPGVGAITAVAFTATIDDPTRFRHSSSVGAYLGLTPRRYQSGTIDVAGHISKTGDCLLRSYLFEAATTLLTRVQRWSTLKAWGMRLAKRIGQKKARVALARKLAVVLHRMWADGTEFRWTAEAAV

SEQ ID NO: 105380 - protein, 315 aa, unidentified
MITVPETTVTVYAGLDIAKATLQLHLQNHQFSLANTVAGHAELVQQLRALPKTHVICEATGGYERGVVAALQAAELLVSIINPAQVRHFALAQGGRAKNDPLDAAVLTAYGQALTPTATPIPDAVLTELRALVQWRLQLKEVLTRTRQYGEQTTLPVIRRQQTKLIKALEKQIDTVEAELAKALARAPRCQAQVRELATLDGVGTLTAVSVLCQMPELGQINRQQAAALAGLAPWTRQSGPWEGQRHIGGGRAVIRHALYMSAVVLARQTESTLGKFYARLRAAGKPAKVALTAVMRKLLLQMNQTLKNHALKSA

SEQ ID NO: 105381 - protein, 349 aa, unidentified
MEVLIGVDPHKATNVVAAIDEQGEVLGQESFPANRKGMRDLECWANGFPERRWAVEGASGIGRPLAQKLLAGGEQVVDVPPKLSAKVRVLSTGNARKNDRLDATFTALAALRNDRLASVQPEDGPEGHAEILRLLTERREDLVAERTRSLNRLHVLLRDLLSDPVGKQLSADAAARLLRRARPRHPAGRVRRQLASELVRDVRALDRRIAELDERIGIAVEASGTTLTEVFGVGPILAAKIVGIVGNVGRFPSKAHFASYAGVAPIEASSGEVVRHRLSLAGNRRLNKVMHMIAVCQARSDPRGGAYHRKKLAEGKSRREAMRCLKRRVSDAVFGALVADSARASLAPT

SEQ ID NO: 105382 - protein, 343 aa, unidentified
MSAHYFIGLDIHKKMIAYCVKTVDGRLVDQGMVDADRKSLHEWAANLPGPWVGAMEATIFTSWVYDFLLPYAVNLKVAHPEMLKAITAAKKKNDRADAERITDLLRVNLLPECTMLPPEIRELRRVLRYRNHLVRTAVKMQNKMCGLLMEVGASYNKRRLRGKRYFHELLEKVSEIPPSVKDLLVLSRAGFEMFQESQKRLIQSLRTDALIRERVCRLMTIAGVGEVTALTWTLEIGDPLRFGSIRQAISYCGLCSAQRESAGKEHRSPISKKRNKHLQTILVEAAKIAPLWNPQLAAVHEKELKKGNRNRATLAVARRLVAYMMSVDKNQKDFAMRGEQKAA

SEQ ID NO: 105383 - protein, 348 aa, unidentified
MRFYTKNHKHYCGIDLHTKMMYVCIVDQNANILIHKNIPTNTKAFLKLIEPYKDDIVVGVECMFSWYWLADLCEREDIEFILGHALYMRCIHGGKAKNDKIDSEKIAHIILGKNFPLAYAYPAELRPVRDLMRRRSHLVRIKSEIQSHISITNYQYNLKAFEKNIVHKANRAEIADHFQNPSVRLNVETDIAVMDGLHDQIRRLENHIIKHAKHYDGRMLYRLKSVPGIGDVLALTIMYEVLSVERFPTVQKFCSYSRLVKCASESAGKRSGFSGSKIGNAHLKWAFSEAAILFIRGNDQAKRYVAKLTKKFGKGKALSILAHKLGRAVYFMMKRNDVFDMKYFFRTN

SEQ ID NO: 105384 - protein, 391 aa, unidentified
MSMRFAGIDVGSQTHVVAVLDEAGQVLVKPTPFGEDAAGYERLFRILGTPEELLIAMEATGHYGRNLFRALAQRGFAMTVLNPLRTRRFAEEDLTRAKTDSIDALGIARFAAQKKPPATPPTDTATDELRELVRLHDRLDQDFCDRVRQLHRLVDLCFPEFTRHVRTLDSRLARAVLREYPTAEAFSESCLGRLAKLRYDGRHMVGKDLARELVDAARLSVGRHQGLVYRSQVRYVCSDLEALSEKIRELGSDIESRARDHPIASLITSIDGLGLLTAARIVAAVGDPARFRHAGAFAAYVGVVPGTSRSGLHRPGQAPLCPLGNARLRKALYMPVLGAVRRNPWLRPYYERLRERGKRPKVALIAAMRKLLTAIYSVCKHQRPFTISSST

SEQ ID NO: 105385 - protein, 315 aa, unidentified
MVEQVVVGIDVSKAKLDVALLPDGEQFTVSNDRHGIGELLRRVSPLAPSRVVLEATGKLEQLAVSELAAAGLPVVVINPAQVRHYAKARGKWAKTDPIDARLIAEFARDLEPELRPLPDAETQALAALCQRRNQLLEMEQMEKSRLQRAPRANQKSIKAMLRFVRRQVEQVEQQIEHSIRHSPLWQAKRELLESMPAIGKVNSSTLLARLPELGQFTRQKICALVGVAPYNDDSGQWHGRRHIAGGRAGVRQVLYMATLSAVRCNPALRDYYQRLLGRGVEPKAALIAVLRKMLTILNAMVRDNTPWRPPCPTPA

SEQ ID NO: 105386 - protein, 481 aa, unidentified
MKSKPQEKNKKATDHPTQHHWHEMNRKQRRETMRKIQSEDLSLEVIHPDAAGIDIGNESHYVAVPPRRDSQPVREFKCTTAELKAMADWLKQCGIRTIAMQSTGVFWVAVYDILEQAGLEVYLVNARETKNLPGRKSDVQESQWLMKLHTYGLLRNSFRPPQEIRTMRTYWRQRNDLVRSAARHIQRIQKTLTQMNMQLANVLSDVSGVTGQAIIKAILAGERDPQRLAAFRDPRVKASEKDIARSLEGNWQEDLLFVLKQEQAAFEFCRKQMAECDHQLELYLQKMEDRSQGATLPEEKRKDRQQKKGNQPQFDLQQQLFRMTGTDLTQIDGIDVMTAATILSEAGWDMIKWKDEDHFVSWLRLAPDNRISGDRIVGKGRLPTSNRVTVALKLAANNLRTSQSYLGAQFRRLRARLDTPVAIKAMAAKLARLIYRMLRYGTKYLDHGSPYYELQQRTRDIRRLKLKAATLGFQLIPSTAA

SEQ ID NO: 105387 - protein, 401 aa, unidentified
MIDKEAPILAFDASKGSSHCQGYLSFGKPSSKPIKVAHSRSGMAAAEEISETLERKTGRKPKVVMESTGVYSKPVIRWAELNGLEVYLISPLESAKVRKSRVRPTKTDALDCGVIAEVAYTRGVRKLTAASSLYSQLYSLSRRRAAIVDRLVASKNQYRKSLDCVWPLLDEACDPFSGYAMWAVGRYGHPERLAKAKEGSIVSGLERAKVRTGAISKSAVASKLSAYAKDAISGCPAGGGEVDSLLSALDDVIRDMRALDEITGRLLGLAKELPHFALIASIDGIGDALAALLCAEIGEPSRFNSRNGIVAYAGLDPTILQSGRNDGLHYSITRKGNALLRKCLYLAVENMIITKADNAITRFYSKKKSSGLCHKAAATAACRKLLVTIWGMLRSGSFFER

SEQ ID NO: 105388 - protein, 416 aa, unidentified
MTFKIVRFICGGMDVHKNLIVATIGTTDKQTLNTEYIQQSFSTFYSDLIRLKEWFISHDCYDVCMESTGKYWIPIYNVLETELNICLTHPKYVKAIKGKKTDKRDSKWICDLYKCDLVKHSFIPEKEIREMREVARYRCKLVYMRSSERNRYQNCLTVSNIGLASAVSDPFGKTATNIMKELMQSEVIEDDKILKLIHKNCKDKDKILDSLQGYRIESDQRFKMDTVMNHIEYLDKQIQACEAELIKRAYPLRDYFQHITHIKGISALSAILIVSEIGTDMNQFESDKQLINWAGLSPANNESANKKKSVRISKAGLYLKPLLVQCALSSIKDKNSYFGIKYCRIKKRRGHKKAIIAIARMMLVCIYHMILTGEEFNPCDYESLTNPKPKKEPIMTVESALQFLKDSNFDFSSIQL

SEQ ID NO: 105389 - protein, 416 aa, unidentified
MDVIVERCAGLDVHKKTVMACVRQPGEGGERVSLRREFSTFTGELRKLRDWLASEGVTQVAMEATGIYWRPVWYVLEEMKGVELLLANAQHVKNVPGRKTDAKDAEWLAQLLECGLLRGSFIPTPVMQRLRDLTRYRNKLVEDRAREVQRVQKVLEDAGIKIDSVISDVMGKSSRQMIEALIAGERNPVVLAEMSKARMRAKIPDLQLALVGRFGQHHALMARAHLDHIDHLDELIARLDQEVDKEMVPFAEAAVRMITVPGVGKISAEGILAEIGIDMSRFPTAAHLASWAGMCPGNHESAGKSRSGRHRKGNEALQSILCEVAWAASHTKDTYLAAQYQMFRRRFGKKGANKAIFALGHTILVIIWNILSKEGAVYEELGYDYFERRKDNRAEKLRLIRKLEAMGLHVSVEPAA

SEQ ID NO: 105390 - protein, 401 aa, unidentified
MNAVGIDVSKGKSMVCVMRFFGEVVLEPFEVLHTAQNLNDLAGKLKALDGETRVVLEATGNYHKPVAFVLHNAGLFVSVVNPVLIHDYDNNSLRRVKTDKKDAVKIANYTLDKWTRLRQYLPEDEARLALKNCYRQYQQAVAIRTMLKNNLISSLDLTFPDANNLFSSPAKSNGCEKWVDFIGEFWHSGCVSSLSADAFAKKYLKWCQKHRYNFTRSKSDEIYSCAVNATSLPKSPTSKLLIQQQVAQLKAVSKSVAAFQQEMLRLSQQLPEFDTVMEMYGVGPSLGPQLMAEIGDVRRFSSKKSLIAFAGIEPQPNDSGKIVGNDKGISKVGSAVLRRTLFLIMTVILQTQPQDEPVFQFMNKKRSEGKPYKVYMMASANKFLRIYYARVKAVMDSECSQ

SEQ ID NO: 105391 - protein, 389 aa, unidentified
MQCFDANKSLIVLDQDSTLVAVIEMSLSGWLVAGVVPGLKRQPKKKLDPDPDALLALLQRWRNEAMKAGRQVERMTVAYEAGRDGFWLARWLNGRGIEAYVIHPSSIPVPREHRRAKTDRLDTELLMRAFLGWLRGEVKHCTMAAIPTLEEEDAKRPNREHQMLTGERTRLINRLKSALIRLGIRNFKPTLGKAAERLAELRTPEDVPLPENTLAELKRDMARLSLVKDQIKAIERDRLVRIAKAANHGPNVMVQLIAQVIGIGLETADMLVQEILSRNLRDRRAVARYGGLTGSPDESGSRRREKGLPRSGNSRVRRGMIEFAWRFLQFQSDSPLAEWYRNQTQSGRKDVRKRTIVALARKLLIALWRLATQGVVPEGIALRKASATH

SEQ ID NO: 105392 - protein, 479 aa, unidentified
MTTHARRLVGIDLGIASAHTVRVLDEAGHTIAKRKAWPTVSSLTDVETTALAGAPEGTRLEVVVEPTGPAWLPIAVFFTRRGHLVHRVSSAKAADLRRFLSRHTKTNGIDADTLARLPLFDPAGLQPLVLPGAEQAALDRRVRATDRLTQAGADHKRRIKDLARQLLPMSPLTADLGVADLAVLEHYADPNALLRFGSKRLTTLISKASHSHQGSDRAQQWIDAANASLDLYAGHPAAAFADLAAEIATEVRLLRAVQTELVAHAEHREIRYRRVDPAGLARSLPGVADIGGPALVAAIGDPTRFATGKAFRSYTGLTPKASETGDTDRKGQPMSKAGSRLLRTTLIRAADNARHQDPQLARIYYVQMVERGKDHLGALCVVAANLAERFWAVMNRGHPYLVCDTNNTPVDPVQAKAIIAAHWQVPAEVRARRRSKKGKAPQTVRTGQPKPPAQRESRRGDLPRPAWSATPPDEVNRSA

SEQ ID NO: 105393 - protein, 338 aa, unidentified
MNFVGIDLHKQTISVCVVSQERKVSSRRTFRCRQPDRIRAYFAALGEFQAVVEATASYEWLWVLLEPLADRIVLAHPGKMRIIAESTRKSDKLDAEVLAAFLALDMIPQAYRPSPRERAHRVLVRHRRYLSKRSTALRNKMRRILSDYNADREDLFTAAGTGYLKQVAVSDSHRFVLDQLLASWLAHQAQLEQINRKLRAFARQAPVREREARAVLSTIPYVGPVTIDVVLSELGQIERFGSQKQVCAYAGLAPGQRESAGRVKAQGITKTGSSLLRWALIETAWRLVSKTRRWRALFEPLAKRRGRKKAIVAIARRLLCMMTAMLQDGRPYRYAVGR

SEQ ID NO: 105394 - protein, 368 aa, unidentified
MGKIRLVEVVGQQRTSTPRRPDPGSDVWCAIDISRTKLVYCVRWGGVEQFRQSTPMGLEHVRALVERYRDCRLHVAYEACGFGYEIAWWLQEQSWVSLTVIAPSRIERAPGLQVKTDRVDAGKLARKLEKGDLKGIYIPSRTLHEDRTLGRAYTQCVKERKRAQIRLRSLMQEHGKLGPLPAQGWTPYNQWLAKLELPVAVRAGVEAHLQMRATADLQARRLRAALGLLAANQPYKELVRRLSTQSGVGTYSAIRLVLELGNIDRFPTTDSLPHYLGLTPSQYGSGELDHRGHILKHGPACLRAILLQCAWAAVRQGCDTELLVVFERLAPRVGRKRAIVAVARRLAIKLRKLWLQVAHPHSAADAAA

SEQ ID NO: 105395 - protein, 457 aa, unidentified
MSKAKRSSRKRAISPVHPHAAAIDVGATTHVAAVGPDRDPEPVRSFGTFTADLHRLADWFERCGVRTVAMESTGVYWIPVYEVLEQRGFTVVLVNARDAKHVPGRKTDVSDAEWLRRLHEYGLLRASFHPEARIAALRDYLRQRERLLDYAASHIQHMQKALTQMNLQLHHVVADITGASGLRIIRAIVGGERDPAVLAALRDHRCKASVETIRQALVGNYREEHVFALAQALELYDLYQAKVAACDARIAAVLDRLQAERPVPTAPLPAPRHQTRTPNAFAFPAREALHRILGVDLTRIHGLGPYLALKLVAECGTSLTAWPSAKHFTSWLCLAPSNKISGGKVLSSKTRRSNNRAAALLRLAAVAVGRTETALGAFYRRLSGRVGKAKAVTATARKIAVLFYNTVRHGMTYADPGASYYEERYRQRVLTNLRRRAKSLGYVLQVADPTAPVAEVS

SEQ ID NO: 105396 - protein, 353 aa, unidentified
MKTYYVGMDVHRASIMIVVLNGAGKVVMQSVIETGAERVRGFLKQLRGKVSVTFEEGTQANWLHEVVRPLVTEVIVCDPRHNKLLQSGNKNDRVDAQKLAELLRNGSLKAVYHGDHEVRTLKELVRTYDCLVSDTTRVMNRLKANFRGRAIACGGHDIYRQDRREQWLEKLKEPGAKQRAGFLYEQLAALKPLRHKAKLAMVKEVGRQTAYLWLMSVPKLGAVSVAQLIAVVGTPHRFRSQHQFWTYVGLAVVTRSTADHEVVAGVLRRSKRPVSTRGLNRNHNHLLKRVFKNAATSACHSGPFKAGYEARVLQGMAPSLARLTIARQLAATTLALWKRGEQFDPERKKQQTV

SEQ ID NO: 105397 - protein, 405 aa, unidentified
MRYYLGVDWADQTHAVWVVDESGTKIAARAVSHTAEGLGEWGRELDEWRAQGIDLWAAIERPDGRVVDFLLDHGVVVYPVNPKALDRARDRFRQSGAKSDPFDARVLADFLRTDHAHLRALQPSSEAAQELKLLTEDCQRHIRQQTRLVNQLTATLKAYYPRALEVAEVTSALAREFLPAYPTPEALTALTERQWQRWARAHRLPEARAGELWAVLRQPQLPVPAHVVRAKARLMQTLMEQLRPVVAAVAQYRKAIDDFFARMPAAQWARTLPIGTHGITAPTLWARLGDAPGRWESFRHLQAHAGTVPVTKRSGKQQRVVQFRFACDKALRYVVDQVAYLSLLSSAWARPYYDQQRARGHSHRQALRALGAKWLKIIFIMWQRQVPYDEQYHLATMTRQQLGRR

SEQ ID NO: 105398 - protein, 345 aa, unidentified
MEPMYYIGLDVHKRKISYCVKDSGGKVYSEGSLTATRLDLDVWMKTLPQPWSAAMEATMFTGWIYDHLKPHAAALKVAHPLMLRAIAAAKKKNDRIDASKICDCLRCDFLPECYMAPTAIRERRRTLRYRNLLVRQMVQMKIKISSLLMEAGVSYNKQRLHKAGYFRELLATNPDINEGLKPLLQLCRETVVRLQKTESAMVRSLERDSLLMDRVERLMTIPAVGPITALTWTLEVGDVQRFSSIKKAISYCGLCGAEKSSGSTVQRTPLSKQRNKHLQTTLIEAAKMAPRNSPELAMLYDKEKQKGNANRATLAVARKLVAYLVAVDRRQKEFLTVERENRTAA

SEQ ID NO: 105399 - protein, 394 aa, unidentified
MKLVGIDVGKNSHHFCVMDKETGEFNVAPSSFSNNKEGFDFLINSLKPYSKKSILIGMEDTGHYHVALLKFLLSNGYTVALINPKTTDLTRKMEGGITKNDKLDTITICDVLDTPERKKQYRITKVDRFDLYEQRQLTRHHHNLKEELNVYCNRLQKSIDLVFPEFNTLFSSKYGIVYMNLLKTFGSAEAIASTDIRTIRKCFEVKGRGGRISLTPEKLKECAKNSIGISSEVETIQIKHLVNQITLIKEQIAEIDKKIEEFSIQNNSPILSIPGISHFSGTSILAELGDIHNYSKPSQIIKYAGVAPLTYESSQFTAQHTAITKKGCKYLRKTLYQIITPVIQCNPVFKKFYQLKIAQGKGHRCAQGHCVRKLMRVIYHLLSTGTQFDPALLR

SEQ ID NO: 105400 - protein, 406 aa, unidentified
MLFVGDDWAEDHHDVEIQDETGRRLAKARLPEGISGMARLHGLVGRFLPEDGDAAGVKIGIETDRGPWVAALVASGYQVYAINALQSARARQSQGVSGAKSDAGDAHVLADLVRTHSHQLPTVAGDSEHAGAVKVLTRMHQTLIWDRTRQVLRLRSSLREFFPAALEAYEDLAFPDVLELLTKAPEPNSAVRLTRAQITAALTRAHRRDREAKTTAIMAALAAEHLTQPPLIAAAYGATVRALAALIGTSNEQITALQGQVEACFGQHPDAEIYLSQPGLGLVLGARVLAEFGDDPTRYDGARARKNYAGTSPITRASGKKKVVLARYVRNNRLADALHQQAFSALSGSPGARTYYDALRDRDISYNAALRQLGNRLVGILHGCIKTHTPYDEATAWNQHTQQAAA

SEQ ID NO: 105401 - protein, 328 aa, unidentified
MEREYIGIDLHKASFQVCAMTSTGERQWEQRWPTTDAGIAGLLARCGAQSRVAVEASSPTWAFVDRIVEHVGAVHVVDARKTRLKAGYAAKTDRLDAQRLADALRRESVVGIYYPPPSIRDVRELCRYRGHLARMQASLKQRIQALLLRQGVQVPIKGLFTARGSMWLAALTLPGWAGASLTGLRQIVTDVRAQLVPVLAELRTIAATDPIARALDARPGFGPVFSVTLRAEIGTMTRFPDGPHLASYAGLVPRVERSAGRSWSGRITKAGSPWMRWALIEAAIHQFRRQDDFGRWARHLAIRKGMLKARVGVARALCDELFDAWPRA

SEQ ID NO: 105402 - protein, 467 aa, unidentified
MKHNQQRARSGRKSRGSISLLERIQPDAAGIDCGQNSHFVAVPPDRDPQPVREFRTFTADLHRLADWLAQCEVKTVALESTGVYWIPLYEILEQRGFEVLLVNARDVHNVRGRKSDVKDCEWLRELHSVGLLRASFRPAATIVPLRSLMRQRQTLVEEAATRIQRMQKALTEMNLKLHTVLSDLTGQTGLKIVRSILNGQRDPEQLATHRDHHCHASHQEIVAALTGNYRAEHLFALRQNFAAYEFHLQQIAECDTAIEKLLAKLAEQQPPPSGPLSTPRRKRGSKHAPTFDIRTSLHRLTGGADLSQIHSIGPHAALQIVAEIGTDMRRWPTEKHFTSWLTLAPNNKVSGGRLLTSRTPPSANRAAVILRRCAMSLGRTSTALGAFYRRLAARTGKAKAITATARKLAVLVYRVLSGDLIYNDPGAAAYHQLNRARELKSLRKRAKLLGYQLVNHSTGEVLSIPVS

SEQ ID NO: 105403 - protein, 337 aa, unidentified
MNVTLIGIDLAKSVFQVCAVNQAGKPVFNRQVKRQRLLALLLEYPKAIVAMEACSGSNYWGRTLQRHGMDVRLIPPQHVKPFVKGNKNDRNDAFAITEAAQRPHLRCVPPRTLAQTDLIQAHRVRERQVNQRTALTNQIRGLLNEYGIVLPQGRRRLQSALPGLLENADNELTPEARVLLEELLIEWQQRDAAINRLDRRIDRQAKGSDAAQRLMTVKGIAEKTATALVAHAGDGRAYRNGRELAANLGLVPREHSSGGKQNLGGLTRRGNTYLRRMLIQGAWSVLRNAHRNHDRLSCWARQVAERRGKHKAVGAIANKMARISWALMYYQQSYRPA

SEQ ID NO: 105404 - protein, 367 aa, unidentified
MVWISTKKKIVACILTGPLGKPTHSEIREFTTLIPDMLALRDWIISENCHHVAMESTGIYWIPIYEILEDAFSGDITLLVVNARHMKNVPGKKTDMRDSEWISTLLRAGLLNASFIPEKRIREFRDLNRYRKSIIRDITSQKNRVEKFLQSSGFRLSSFISDIFGASGRNIILHLMEHGQIDKISLDSYLKTKTRKRIDEILMSVNGTLSEHQKSFLKILMCHYDSMKEHLIEIETHLQEDMLPFALQIEQLNTIYGISTTASCAIIAEIGTDMKPFKTAEHICSWAGLCPGNNESAGKRKSTSITKGNPYIKSMLCEIAWVIAGKRNTYLSAWYWRIKQKKGARKAIVALARKLLVIIYTMAKTRH

SEQ ID NO: 105405 - protein, 341 aa, unidentified
MKNLFIGIDFSKEKIDATIITAQGFEELSARISETFPTTTSGYNKLVRWVEKNSLGLGREAWLFCGENTGDYSKPLCNYLYGKGLDMWIENAKCIKDSSGLRRLKSDRADSVMIAEYAMRNYDRAEIYKPLSESLSQLRELFLYRQQLVRHKCGFQVRKGEKKLTMEKSSIKTAISQSGRRMVNVLDKEIEKIEKKIEELIKSDDELKSTYELITTMPGIGMQNALCLLIFTNNFKRFNLNPRKIACYYGIAPFGRDSGTSVHSSPHVHYMANKMLKAMLTQAALASIRFCPLFTNYYNRLISKGKKKQVALNNVKNKLIHIITSMVKKSQPFNPEYKSIA

SEQ ID NO: 105406 - protein, 312 aa, unidentified
MADIVRLAGIDVSKDKLDVHVLPSGESRTVAYDGRGLAGLRRWLLGLGVALVAVEASGGYEREVSEVLEEAGLIVHRLNPLRVRRFAQLKGRLAKTDRLDARTIAEFACAHPQERQPRRDPRRERLAEHLLVRRHTQDAILDCINQLEHLRDGGLRRIVATRKASLERVRDKLDRSLVELIAEHDDLAELSERLRSVPAVGPVLATTLIALLPELGSLTRRQVASLVGVAPFDRSSGRHNAPKSIEGGRAFVRKALYMATMVASRHNPVIATFYERLAGKKGKVRLVACMRKLIVTLNAVVRDGAQWQPRHA

SEQ ID NO: 105407 - protein, 441 aa, unidentified
MAMRKRDEEVVFPNAAGIDVGGSSHWVAVPRQACDEPVREFGAMTGDLNAMADWLLACGVDTVALESTGVYWIPVYDVLEQRGLKVWLVDARQMKYVPGRKSDVQDCQWLQKLMSLGFLRAAFRPDGDVCVVRAVARQRDVLLADQASWVQRMQKALVQMNIQLTEVLTDVMGTTGQAIIRAIVAGERDPEVLARHRHSRVKASAEDIAKALTGNWRDEHLFVLGQALAMYDDIAKHLSECDTKLQALLSQLGQAKVDLGRVPRAGSKTRAAFDTRQTLANWAGVDLTRINGLGLAAVLKILSEIGPDMSRFASVKQFCSWLGLCPGTKISGGKVLSAKTKRSTNRVRQALKMAAMSLSHSDSALGAFYRRLCSRMDKPRANTATAHKLARMVYFMMTRGEAFVDQGQQRYEEQQRERSVAALKRRAAALGFQINPNPVPA

SEQ ID NO: 105408 - protein, 434 aa, unidentified
MMRGNEQEPSLKEKRRCAMKMPPPAPSSEGAVIKYVCGIDIGSQCCVGCICRPDKSVVIKSITFANAREGWQIWEEKLKQLDAPAGEILIGMEATSRYGENLYQELEQRGYVLRLFHPGQTHHFHQQRGLRAKTDRLDAMTIARALLSGEARMGYVPDEQVATYRELVRLHTQLSDTAASYQNEIQALVVVLFPEFTQVKASPCLPTALAVLKAFPSAQALVEAGVEALVQVLRAQPAAHYGRPTAKKLVALANQSVSSGRARAGRSTSLRILCDQLEHTQANLARLNTEIEQLLTTDPGVKGLQQVPEFGPKTLAVLRAELGDVQRFSRIDEVIAYGGMDIEIKESGHRIGKAKLSKHGSGLLRRVLYMSALRCIHRKESAFGASYQRLVQRGLKKGSALMAVMRKMLAVAAHLLMHEDEEYDRSLVCGSAAG

SEQ ID NO: 105409 - protein, 355 aa, unidentified
MSQQKYIGMDVHQATICAAVVDAQGKVLMECVLETKASTIVEFVQGLQGTLSLTFEEGTWAAWLHDLLKPHVSRLVVCDPRKAALLKEGNKSDRIDARKLAEMLRTNQLRSVYHGEHGLRTLKELGRCYLTLSKDVTRTMNRIKSLYRSWGIPCHGSSVYAPRQRAEWLAKIVEPGVRMRAAYLYQQLDGLQPLRLQARRELLRESHKHAAVEHLRQIPSIGPIRAALLVALLQTPHRFRSKRQLWAYSGFAVETHDSGEYRWVRGKLQRNRERITVRGLNDNHNRDLKNLFKGAAISASTRPGPLQDFYLARVAQGIRPTMARLTLARKIATITLTMWKKGASFDPEQLRRQAV

SEQ ID NO: 105410 - protein, 442 aa, unidentified
MDIIHPHCAGIDIGSRSHFVAIGQQPEDVKEFGVYADDLTQICLHLKQHTITSVAMESTGSYWQNLYVELIKHGFDVTLCNGKFTKNIKGKKTDVKDARWIQKLHSIGLLTGSFLPDETTEVLRTYCRQRQNWLDLAVQATHKMQKYLKLLNFRLDIVVRDVCGLTGLKIIEAICKGNLNPAELAKHRHFNCRKSEEEIAKALKGNNRQDYLFGLRQEFETYQFIQNKISECETQISRFLQQQINSDPRNKQLQTTDKKHKRLNKNAITGIDLNQAAYQYFGGVDLLNIEGLGHATVLSIISEVGPDGFTKFESAKHFTSWLRLAPNNKISGGKLLSTRTPKGSNRLKIALRNAANAIGNLKDTHLSNFFKRVCFRKGRTVAVSATARKLAVIIWNMVVKAIPYSPPTTYEFLDQKRKRKVLEMKRLIHKFNITTNDLGLQL

SEQ ID NO: 105411 - protein, 466 aa, unidentified
MSSTVKTVSKKMSIVSSLPSEFERIKINAAGIDIGAQKHYVAVPKGRDPQGLDVRHFDTFTADLYALVDWLKQCHIDTVAMESTGIYWIPLFEILEQNGFEVRLVNPRSIKHAPGRKSDVVDCQWIQQLHAYGLLTSAFRPDEQINVLRAYHRQRTMLVNHAATHIQHMQKALEQMNLKLTNVISDITGTTGMKIIRSILTGERNPKKLAKHRDPRCKKSDKEIAKSLHGNWRDEHLFALQQAVALYDFYQTQIEVCDKQIRAQLCRFEDRSDGGEPPVSTGKSKGSGKRLSFDATEHLYRMTGVNLTQIVGLNTPTVLTIIAEVGLDMGRWPTSKHFASWLGLCPGSKISGGKNFSSKSKPSANRAAHAFRMAAYSLHRSQTAIGAFLRRKKAQLGSPKAITATAHKIARIFYEMLKTRTEYKDLGVDYYQTRYKERMLRNLKRKAKAFGLELVNSNQDQLVMVN

SEQ ID NO: 105412 - protein, 337 aa, unidentified
MEYLGIDVHSKYSEVCGLSEGGDVTVRRRIPTTETALRRFFGCRPRAKVTLESGPVTPWVYRLLCELGHDVVVVNPRRVRLIAESTLKTDGIDAEVLARLSRLDLDLLRPVYQRTPEAQELRTRLRVRTSLVKTRTSLINTVRGTVRAQGYRVPSCPTKSFVAHFASLTLRPTLAQAVEPLVTTIGELTDRINDLESELVAESKSSDLLMRLQSVPGVGPIVSLAYAGWMDTPDRFTKSRDVGPCLGLRPSLRSSGGHEIRGRITREGDTEMRRLLVQAAHAALQCRKDSALKRWGEALVERLGKGKAVVALARKIATLLHHLWVTGESFRPFPQEA

SEQ ID NO: 105413 - protein, 375 aa, unidentified
MKEKLRFLGLDVHAETIAVAVAEPDGEVRSLGTIPNRGESIRKMIKKLGPAEKLRACYEAGPTGYVVYWQLAELGIQCEVVAPTLVPVRVGDRVKTDRRDAEKLARCYRSGDLTAVWVPDEGSEALRDLVRAREAAKQDQMRARHRLSKFLLRSGQRPPTGVRPWTRPYLIWVAQLRFTQVAQEATRQDYLHEVEHMRERVARLEQAIMEAVKLASPALQQVINDLQALRGIADISAVTIAAELGQVSRFGSARQLMGYCGAVPSEDSSGKRIRRGSITKTGNAHLRRIVGEAAWSYRRPPGIWYGLRRRQESISEEVKEIAWKAQHRLHKRYMKLGAAGKPQGKIITAVARELLGFIWAIGTRAETTVSQRTAA

SEQ ID NO: 105414 - protein, 349 aa, unidentified
MRFYQQQHPFYCGVDLHARSMYLCVLDHEGTTLLHQNYAADPGAFLAAIAPFRDGLVVAVECMFAWYWLADLCEAHGIPFVLGHALYMKAIHQGKSKNDRLDAAKIAGLLKGGLLPQGYVYPKARRATRDLLRRRSFLVRRRADLLAHLVNTNSQYNLPPLNKKLVYPGNRAELDLAARFTEPSARKLVECDLALIDALDGQIHDLELHLVRTAKVDDAQAYARLQSIPGVGKILGLVLLYEIHDIGRFPAAGNFLSYARLVRPQLESGGKPLGFGNKKIGNAHLRWALGEAACLYLRCSDRAKRWQARTAAKHGPAKTLGILAAKLGRTVYHLLRKREVFDENRFLAS

SEQ ID NO: 105415 - protein, 325 aa, unidentified
MAHEPSPQSASPQPVVGIDVAKDHLDCFVDLVDQSMHLSNDASGIAALISRLRAGNVRLALIEATGRYHRRLAAELLDAGIPVVIANPQRVREFARSMGKLEKSDKIDARMLAAFARASGDHRVAEKTPENQTQLGDLVSRRRALVQVLVAEKNRLCDDLPRLARMQGKKLLRLVEQQIEDLDRAIAKLIAQDDDWKNKSDLIQSVPGVGPVTAHQLIADLPELGKLNRQRLAKLVGLAPLNCDSGKHRGKRKIAGGRGPVRVALYMATLSAMRCCERFKLHAQRLEAAGKPFKVIITACMRKLLITLNQMLKTNTSFHASPIPA

SEQ ID NO: 105416 - protein, 400 aa, unidentified
MNYFLGVDIAKTNHVASLINNTGDVVLRAIKFTNSNDGFNKLLTTIQNKLGDLSNIEVAMKATGHYWLSLYSALTDNGFNVSVYNPYQIKSYRGVYNNRKQKNDVIDSILIADYLRVFGSSKSKLPQEDILSLKQLTRFRTNIVDNVSSLKTQVIALLDKVFPEYKKLFCDTFGTTSKQLLLNCPTPDDILKISTTKLANLLSKHSKGRFNKDTASHLKEVAKSSFGIKFTTDACSFKIKQLINQIIFLENQIDEVSKEIKDLYNKLDSHLLSVPGVGVNLAPIILSEIGDIHNFDKPSKLIAFAGTDPSENQSGNKASSNEKTSKRGSPYLRHAIYTASLVAISNEPELRAYYDKKISEGKHHFVALAGISRKLLTIIYYILKEDRDYIKYDYIKNNKN

SEQ ID NO: 105417 - protein, 340 aa, unidentified
MSATKSIFTMEKFTDTIGIDISKSSFDAYDYRSGSHRQFKNGKNNFLPFLSWVKKLDIPLNQLVICFEHTGIYSLPLAIFLTERKIAFCIVPGLEIKRSLGIKRGKNDKVDSKRIAHYAYLRRDELLLTKLASKPLLKLKSLLNLREKMVSQRAAYKGGINEMKQFVNQRENNIWFSSQNKIIKTFDTQIIKVEAEIRKIIRSDSVLKNQYQLVTSVKGVGLVLGVSFIVYTNGFTSFSSWRKFASYSGIAPFEYSSGTSVKGKTKVSHLANKKLKGLLSNAACSAIRHSPEMREYYLNRIKKGKSKMSTQNIIRNKIVSRVFAVINRNSPYVETLKYAA

SEQ ID NO: 105418 - protein, 458 aa, unidentified
MGSRQHKQARLSARVVEDEDYQVRYERCAGIDVAKASGVACVRLPAVREGGKRVSVIETVQATVPAIAALAGRLAADGVAMVSMESTSDYWRIWYVVLEAAGLGVQLVNSSQARQLAGRPKTDSHDAQWLARLTEMGLLRPSFVPPAQIRELRDYTRMRVRLVQDRTREWQRLEKLLEGALVKLSSAVSSLATASARAMIEAMIGGERDPVRLADLARGSMRARRDQLVQALTGSLFGAHHGELARMHLDHITFLDRQVAALDDSIAACLDRIPRSWGVDAAGVPGPDPGPGAAVLPAVQRLAEIPGVSRDLAMAIIAETGLDMTRFPTAAHLVSWAGLAPVASQSGPRTRKGKKGQGDAYLRGACTQAANGTAKTDTFLGERLRRITRRRGGKIARTAVARSILIIIWHLLKNPEARYTDLGPDWHHRKTDKDKKTRGHIRQLQALGYDVTITPRAA

SEQ ID NO: 105419 - protein, 340 aa, unidentified
MEELYVGLDLHSRNTYTGIMTKDFKRIFGKRLTNDLPVIVGALEPFRNDIQGIVVESTYNWYWLVDGLMDAGYDCLHLANPSAIKQYEGLKHVDDKSDSFWLAHLLSLGILPEGYIYPKEERPVRDLLRKRSFLVKQRTSHIHSLKSMIERNTGERISTRKLTGPDRIDLEQLLKEEYLFLSANASRSNIKFLSHHIKIIEKAVRKKIEIKKGFEFLKTVPGIGDILALTIMLEVGDINRFPKVGDFSSYCRCVSSKWTSNGKSKGKGNTKNGNKYLAWAFVEAAHFAQRFSPTIKRYYQRKSAKRNEIVGRKAIANKLARACYYIMRDKVPFKEEASFC

SEQ ID NO: 105420 - protein, 316 aa, unidentified
MHTENESVFIGIDIAKDSLDIHVNPTEECWMSANTAKGIQDTVKRLEALTPACIVLEATGGLEMPLTASLAAADLPVAVVNPRQSRDFARVMGILAKTDSIDARVLALFAEKIQPPCRPLPSEEGLALKELVTRRNQLIDMRTMETNRQRRISSRHVVTSIDTVIETINEQLKEIDHEIKQRIKASPVWRMKDKLLQSVPGVGDGTSAILMATLPELGLLTRRQIASLAGLAPMNRDSGKWRGRRMITGGRVNVRKALYMPTLTAVRYNPIIKSLYDRLVNKGKAPKIAITACMRKLLSILNALMRDNSSWRHVHP

SEQ ID NO: 105421 - protein, 378 aa, unidentified
MTSENMIRVAIELSVSSWLVATRLPGAEKSRMHRIEAGDTTALLALVADLQSRASTKLGQTMDVACCFEAGRDGFWLHRLLTAHGVIAYVLEPTSILVNRRARRAKTDRLDAEGMLCVLAAWQAGDRQVCSMVRVPTPEEEDAKRPHREREHLVQEKQRIENRMEALLCTQGIRGRPSLRSWERDIAKLCTGDGRPVPALMQAELNRLRRRLMLILELIRELEVERAAAQAATVDETMTQKITALQCIRGIGANFSTVLVREVLYRSFANRRQLASYVGIAPMPYQSGGIDRDRSISRAGNPRARTTLIQLAWLWLRYQPGSALATWFRERVGTLQGRTRRIAIVAMARRLLIALWRYVETGVMPDGVELRAAAESVA

SEQ ID NO: 105422 - protein, 419 aa, unidentified
MKGHLPAGMVRFPVVYFNYKEIAMDTRRKVTQIGLDVHRRFSIASLRDGSSRIVARQRLEHADRNGLRKKISNWPAETPVILEGTFGWGWMSDELLAAKMEPHLASSRKVAAWRQGRGLAKSNKLDADLLGELWDQKPRWWEVWLAPQEVRDQRELLRHRMSLVRIQTGVKNRIHAVLHRHGIITELSDLFGVSGRRFLSRLVEDEQALRETGRRTLKDQLILLDALRRLIARATRQFRATVRHNATAKRLTTLPGISTVLAYTIMAEIGRIERFADSRCLLRYSLLAPQADDSGEERDGKPIGRRIGHAGRTTLQWAWIEAAHGAVRKDGSLRAIFNRRTNNGKEDRNRGYITVANRMCRIGYAMWRKQMDYQEVPPARPGSMKTGKTGSVKKREELVSSGNGPALPPYGHTPRLIEA

SEQ ID NO: 105423 - protein, 410 aa, unidentified
MGYETINRRVHVMTRKNTLKSLPTDTEFRVVGLDLAKSDVSVAAIPVDNNTPSLVDQMTYADLLDWAGKISPTLFAMEPCNGYSLLCLQLENLGHEIKVISGSTVSMWINTHLSGQKTDLNDAIALARLAVSDAELTPIRHKSITEIRIQTVQAVRQQLMSQRSKSIVSFKALAQQWGIPCAAGHRNLKKLRESIEAKVDLITRPVANAMLFLLDAVKSLDRQIGQLNQTLQELVMSDERGRLLQSVLGVGTQISARVITVVGNVERFNSPRSLVAYVGVAPRNFITGHKNLTKKKHGNCPDLSHKGQGKISRRGDKLLRSLFIQGAACLYRQFCKDQLPECQLKRWILKQLAMQKPYGKLMVSLAAKLIRIVWAVLTYREKFNIQKAGMTRSMWSEMALETPLNKEVPA

SEQ ID NO: 105424 - protein, 345 aa, unidentified
MQAVTIGIDLAKHVFQVHGVSAGDKVVFSKPLRRAQMLPFFARLKPCLIGMEACASAHYWARELKKIGHEVRLMPAKDVKAYVKRNKNDAIDAAACCEAVRRPVVRTVPVKTPEQQARLMQHRVRDLLIRQRTQAINALRSHLAELGIVAAQGYDGLKTLLSIVADEGDARLPEDGRASLSALVNQIAACQAEISAIEKRLLAQHRKNEDSKRLETIPGIGIIGASAIVATVPDASIFKTGRDFAAWIGIVSREDSTGGKQRLGPISKQGNRYLRRILILGALSVVKRARCCPENYPWLTKLLARKPAKVAAVALANKMARIAWAVLTKKDTYHVPQITAALIPA

SEQ ID NO: 105425 - protein, 427 aa, unidentified
MKEQNLPRLEEFRQLKKEIRGSEKHLIVGIDVAKEKHYAYFGTATGKSLLRKLIFDNNRKGFEALLHRAEAIMRQEGLTKVVFGVEPTADYHKPLGEFIINSGQPLVLVANGAVKQNRELLDGRWDKNDTKDCANAADLISQGKFLYYDLPGPEILNLRNLASFKKKLRAQEHSIRMRIRNHLVTQFFPELDEYYGHREGENLAIVKWCLNPEQIAAMEFEQFFQMVTKRNTGATQRERLRSIQKAARCSIGCHVTESAMFEAKMLVEHLERVREMIAETDARIAAVCRQLPGYQSLMSIPGFGPIVTAEVMTALGNPHRFTSSKQVLKLAGLDLSASRSGKNSANVGAKISKKGKAPLRYVLYQSALIATSRNKYFVEYLSKLIVGREREQGIKTKMRVKVAAKMLVIAWTLWKNEEVFQGKYLLH

SEQ ID NO: 105426 - protein, 371 aa, unidentified
MAESSRTIYVGLDVHKDSIAVAYAPEDRGAEVVSLGPIGTRQCDIDKLIRKLQSKGATLVFVYEAGPCGYWLYRYLTRQGLSCHVVAPSLIPRKPGDRVKTDRRDAITLARLMRSGDLSSIYVPQVEDEAIRDLSRGREDAMRDLKATKYRLKAFLLRQDIRYEGRANWNAAHLRWLSEVVCATRAQQIVFQEYVRAVTEQHERLQRLERELHEEVKGWRLYPVVEAIQALRGVELTGAVILIAELGDLTRFDTPRQLMSYLGLTPSEYSSGERRRQGGITKAGNTHARRALVEGAWAYRYPAKVSRHLQLRLEKLPAEVQAIAWKAQVRLCKRYRQLSARGKHANQVVVAIAREMAAFAWAIARTVPLVP

SEQ ID NO: 105427 - protein, 410 aa, unidentified
MSDQTQRYVAFDVHKSYLMVAAVNAAQKVVLPPRRIDFSRFEGWINKHLKATDQVVLEATTNAWYVHDLLEPKAARVVVAHPYQVKLIAAAAVKTDKRDTLALAKLLAANLIPEVWVPPTHVRELRALIAHRRRVVSQRTAAKNRLGSVLHRNNIVPPAGKLFNQENRAWWLSLDLPPSEQLRVRQDLDTLLHLNPQVGEIESELARLSTLDPWADPMTYLVQLPGIGMLTAMTILGAIGDISRFASAKKLVGYAGLGARVYASGQTQRGGRITKQGRRDLRSVLVEAAWSAVRFDPYWEETFQRLAHRIGKKKAIVAIARKLLVVIWHVLSAAETDRRANADKVAGKLMLWAWQIGQEQRPLSPGQFIRYNLLKLDLGHDLDFIVRGGVKRLIPSLDQLKADRPDLFVD

SEQ ID NO: 105428 - protein, 350 aa, unidentified
MARKSNATAVALGVDPGKNTFHLIGLDARGAIVLREKVARDRVVARLANVPPCLIGIEAGMGTHYVTRELLAVGHDVRQVPPAYAKPFRQTHKSDFRDAHAIAEAVQRPTTRCVPAKTDEQLDLQALHRVRYRLVGQRTAIINQIRSFLLEHGITVRQRLHWLRHALPDILAQRTDVLSPRMIRILADLAQDWRRLDERIDAVTGEIEALSKNTDACQHLMTIPGIGPIISSAVVAAIGNGTAFTRGRDFAAWLGLVPKQMSTGDRTILGRITKRGNRYLRMLFMQAARVVLVWPSKWMKHSFGPWLAAAAQRLHHNVLATALANKLARIAWSVLAQHRAYEPRVGAGAA

SEQ ID NO: 105429 - protein, 355 aa, unidentified
MLYLGIDQHARQITISLRGENGDVLQARQVSTEPEKVNAFFQQLTRERLGNGEAFVAVLEVCGFNDWLIRMLRDYRCHQVILIQPEDRKKCKTDRRDAAGLSELLWVNRDRLLHGKPVRGLRQVDIASSTDQENRRLTTLRKNAGQARTRLVNQIRHMLRRHNLQWEMPTKRLPTKAAIAWLKQVVLPEIDRLEMNHLLTDLERVQERLKELERVIAERCGVSKEAALIATMPGVSHFTATSLACRVGRVERFPRAHSLANYWGLTPGCRNSGENNQRLGSITKAGSGMARWLLAQVTHKVLRKDPRLREWFKRIKRRRGATIARVAVMRKLATIIWHMLSKRTSYAECRAHAAA

SEQ ID NO: 105430 - protein, 379 aa, unidentified
MKKPTRYLGLDVHAETIAVAVAEPGRRGEVRALGIIPNTADAVAKLVRKLGVEGLEACYEAGPTGYVLYWQMTKLGVKCAVVAPTLVPVKAGDRVKTDRRDAVKLARLFRSGELTAVWVPDAAHEALRDLVRAREAAKKDQLRARHRLSKFLLRRGLRCNVETKKWTVVFWTWVKKLRFDAPALEATLLDYVTEVEHAAERIQRLERAIDEAAAAAPPQMRAVIDALQALRGIAKITAVTVVAELGELSRFERPRQLMGYSGLVPSEHSSGQSTSRGGITKTGNAHLRHVLVESAWAYRHHPSVGPRLKARQKDLPEEIKATAWKAQHRLCARYRRLTARQKPPQQVATAIARELLGFIWAIAVHTETEFKQRRAKEAA

SEQ ID NO: 105431 - protein, 357 aa, unidentified
MSSKHCCAVASVIGIDIGKNSFHIIGQDQRGAIVLRQKWSRGQLEARLANVAPCLIGMEACVGAHHLSRKLQAFGHDARLMPAKYVRPYSRGQKNDFRDAEAITEAVQRPTMKFVATKTSDQLDLQALHRVRERLVSQRTGITNQIRAFLLERGIAVRQGLRILRAELPRILATRTDVLSPRMLRIVEDLARDWRRLDERIEGLSDEIEALARQDKGCERLMTVPGIGPIISSAMVAAIGTGDAFSKGRDFGAWLGLVPKQISTGDRTILGSISKRGNRYLRALFVQAAWVVLVKLRPDQWQRYGLKSWIEGAKKRLHHNVLAIALANKLARIAWAVLHKGRDFECVKTEETAPQPG

SEQ ID NO: 105432 - protein, 347 aa, unidentified
MDHIGMDAGMVNSHICELREGGEVAERQIRTERKRFQDVFGNRPKARILIEASTESEWIACCLEELGHDVIVADPNFAPMYAHRSRRIKTDRRDAHALAEACQLRAYRPAHRTSPPQRDVRALLGMRELLVRTRTRWIVHIRTLLRRDGLRLAPGRAENFVTRVNDLLLSPQLAAQIAPGLELLAPLNAQIAALDTEVASRAHDDERTRRLMTVPGVGPVTAVAFVATVDRVTRFRNAHQLESYLGLVPREWSSSETQRKGSITKAGNTRMRWLLVEAAWCVMRRKKKPETARLREWADGIALRRGSHVAAVALARRLAGILYAMWRDQTEYDPKELGRRGHVRHVA

SEQ ID NO: 105433 - protein, 350 aa, unidentified
MLIIGCDYHPSFQQIAFVDTETGELGEQRLIHPKEAEQFYGELKERNIAVRVGMEASGHARWFERLLRQLQFELWIGDAAEIRTKRVRKQKTDRQDAQLLLRLIMEDRFPRIWVADAENRDLRQLLWHRHRLVQMRTRVMNQLHVVALNEGLRRRKGLWRPGGRKELELIALAPWAGRRRQDLLDLFDQLTPKIQELTRALEQEVEKRPVTRRLMTHPGVGPLTALAYELVIGTPERFHNGKQIASYVGLVPEEKSSGDRRRLGHISKQGNALLRFLLVEAAQVTIRSQAQWRSKFFHLAMRRGRKIAKVAMARKLAVHLYWIWRQGWDYGQFKRFGSYAGEPGHPDGKQ

SEQ ID NO: 105434 - protein, 343 aa, unidentified
MGQYIGLDVSLKDTAISIREDGKRIWRGKCPSDPGIIAQAVRKHSDDPLSVVFETGPLATWFFHALTGEGLRAICIEARHAQKILGETMNKTDANDAEGLAKLAETGFYKAVRVKSFEAMLIRSLVAARTQLLAITTQLTNQIRGLMKTFGLVVPKSKGRVFIEKVNDLLDGHVELKGIIYPLLEAWQAVRERASTLSRQLLLAARQCQSTRLLMTIPGVGAITAVSYVAAIEDPKNFPKSRSVGAWLGLTTRRYQSGEMDFNGHISRRGDQRLRGLLYEAATSLLTRTRAETVSDLKTWGLQLRERLGFKRAAVAVARKLAVIMHSMLKNGQTFIPTREELA

SEQ ID NO: 105435 - protein, 349 aa, unidentified
MKKCSTVSFEGQVIFVGIDVHKESWVVNLRHCHRELDKFSMNPCPEMLAKYLRKNYPGAEYRSVYEAGFCGFWAHRRLCELGIQNIVINPADVPTSGKERDRKSDAVDSRKLARELENRTLEGIYVPPEDNLELRNLVRRETKLTGNITRVKNRIKGHVNFMGLKFEGWSGRSLKIMYADAEKRHDYALQSMLRELRFLREEKLHVVRDERQCLKRLKRDKIQEHLQSIPGVGFHTAVMLQAELWDLQRFEDKDALSSYVGLAPRLVGSGEHEVLKSAGNRKKKQLHAILIQAAWRSIVYNLETRAKYGALLHKGANPQRAISIIAKKLLYALRAVWLQERDYVVSANE

SEQ ID NO: 105436 - protein, 343 aa, unidentified
MEYYVGLDVSLKQTSICVVNQTGSVVREGVVDSDPEAIAGFLRAQAPGAVRIGLETGPTATWLWTELKRLGLPVICIDARHAKAVLKMQINKSDRNDAVGIARIMQTGWFKEVRVKDLDSHAVRALLASRALLVKIKRDLENQVRGLLKNLGLVIGRAKFNVFAVRAEELIEGRPELVAAVRPLLDARQAIEQQVDDLDRKVQKLARHNAQVRRFMSVPGVGPVTALCFKATIDDPARFKRSRSVGAYVGLTTRRHASGELDWSGRISKCGDAMLRMYLFEAAGVLLTRVPKWSALKAWGTRLIKRIGLRKAKVAVARKLAVILHRMWIDGTEFNWSKKELAA

SEQ ID NO: 105437 - protein, 338 aa, unidentified
MTQHKIIGIDLAKNIFFLFEINHKGRNLSRKKLPRSKLLDYIAAQTPCIIAMEACSGAHYWAREFEKFGHKLLLYPPQHVKNQRRKQKNDYNDAEAIAELALYQRNYTVPHKSIEQQDIQSLIRMRRLCVTERTRLINQVRGLLAEYGIVISKGKASFRQTIPEIMENSENLLSPTLRELLAHQYERYLYIDEPIQWFDEKLNQTVKQFDNAKRLMSIPGFGPLTSQAVAVWLGSGQQFKTGRDASAAMGLVPKQDTTGGNVTLLGITKQGNTYIRSLLVHGARAALRRAKFKSDKLSKWMLDIQERRGANRAAVALANKFMRIAWAITTKKEEYQPA

SEQ ID NO: 105438 - protein, 423 aa, unidentified
MFQDAGDDQQLIARVAALDIGKAEVTWCVRVPDPKREGGRLQQVGTCSTMARALMHLADRLTGWGVTRVVMESTSDYWKPPFYLLEAAGLETWVVNARDVKHLPGRPKTDKLDAVWLCKLAERDMLRPCFVPPAPIRVLRDLTRYRADLTVQVTAEKQRVEKLLEDAQIKLSVVASDIFGVSGRAMLDALVAGQRDPVVLANLARARMRAKLSDLREAFDGARFGDHHAFLLSTMLDRINALQGDITRIEDRIEAQIAPFADAVARLDTIPGVGPTAAWNIVAEIGVDMTRFPTADHLVSWAGFAPLVKESAGRKKGKNATGHGNSYLARTLGQAVLGTAKTDTFLAERYRRLARRRGKKKAIVAVGRSILVAVWHILSDPTATFIDLGPDFYDTHRGTQRAIRHHLRRLNELGVKITLDPAA

SEQ ID NO: 105439 - protein, 404 aa, unidentified
MEKVCGIDVHRDLLVETILSGESENKETRNFVNDPDDIDKLKNWLRTRECNRAVMESTSVYWVPLYLALEESGFDVTLANAHQVKGIPGRTTDQSSSQWLAHLLRGGQIKPSYVPEKRLRELRELTRLRVKYVQNRTAFKNRCQKVLNRVNIRLRSKMTDVFGRAGMEILNGLMAGKSVEYILGHTEDKWLKSRCDEIKAVAKGALSETDIFVLKHLTGTIKHLNENIRDVEARVETLVNQRDVEIVSSVPGVGKRSAAAILAEIGDAKRFSDGKKIAAWTGLVPSVHQSAGVSILGSITKQGSKWLRWNMVEVAHAAVRVRDSRFRALFLRVMAKKGKRTAYVAVARKMLTVIWHLLVNGEKFVEEGFEKTVRVYRAAYRGHVPLEEMAEVLRSAGYTVVANG

SEQ ID NO: 105440 - protein, 351 aa, unidentified
MSAKTRQDFSAVAVIGMDIGKDVFHLVGFSSDGSLVLRQKIKRMAFVATFQTLPPCIVGMEACLSAHFVSRTLRGMGFEPRIIPAIYVKPFNKGQKNDYNDAEAALRPNLRTVSEKSQDQLDLQALHRVRSRLVSRRTATINQIRAFLIEQGITIRKGLRAVRNSLLSLLDARQDEISPRMRHIILDLHDDWMRLDARIEAVSGEIEGIGQSEAHCRALRTIPGVGPIISTALVAAVGKGEAFESGRDMAAWVGLVPRQYSTGGRTTLGRISKRGSRYLRTLLIQAAKIILMRPHNWPGLSFGAWLAEADLRMHRNKLAVALANKLTRIAWAVLRYGRGFDARRDPVAEAL

SEQ ID NO: 105441 - protein, 390 aa, unidentified
MYTMIYLGIDVAKDSHVAAAITSDGEVVLKPFPFANSCSGFAKLKSRLDEFPCDSLLIGLESTAHYGENLIAYLVQNAYQVALLNPLQTAALRKSAIRKTKTDKADSFLIAKSMMVDGYRLLEPDDIHLLKLRGLCKTRQNLILLRTRCKIQLGAFVDQLFPELNDFFRAGLHINVSYTLLKLHPRPSEVQSLHLTYLSNLLQKASRGKYTKADAVHLRELARQSIGTDHPSLALQINQTIAQIELFSEQLNQVDNEIVSIMDILNSPIMTIPGIGHINGAMILSVIGDVTRFSSPAKILAFAGLDPAVMQSGNFTARSTRMSKRGNSMLRYALINAAHNVVRNNHTFAQYYASKVAQGKSHYCALGHTAHKLVRVLFTLLTKNIRFDLP

SEQ ID NO: 105442 - protein, 336 aa, unidentified
MLAGIDTHKDTLAVAVIDPGGRPVVVTELANTEAGFDDLEQFLERHAVTRVGIEGSGNYGRGAAVRLVLAGGIEVVEVPPSLTSRERSGRPGQGKTDPIDAVAIARITAREPGLPPVRLAVGEAADLRALANRTHAELHGLRPGYQSTVPRLTGPTFIAAARDLLAGDDSVRARLIRRRLARLAELTAEIREVTDLIAAEVERVDTHLTGLYGVGPVAAATILGEIADIRRYRSRHAFASANGTAPLPANSGRTTRRHRLNRSGNRTLNRVLYTMAITQIRADTEGRAYYQRKRAEGKTGREALRCLKRRLSDVVYKTLHEDLADGRAPTPAAAGR

SEQ ID NO: 105443 - protein, 430 aa, unidentified
MKSNTQNAKIEAITEKTLVLGIDVGSETHYARAFDYRGIEYSKKPFKFSNTEAGFVTFKEWILDLKERHEKDKVVPGMEPTGHYWFNLGKFLQDNEMKPVLVNPHHVKKSKELDDNNPTKNDRKDPKVIAGLVREGRYMIPYLPDGVYADLRTASNIRFQLQAELTRIQNRISRWFNIYFPEYKTVYGKPDAKSGMLILKAAPLPEDILTLGIDGVNQIWRDAKLRAVGKARAKTLIEAAKHSVGSKEGAVAARMEIRMLLEDYESRSIRLQEVMTLIEGLIKQIPMAEKLLEIKGVGIRTVSGFLAEVGDISRFNNPKELQKLAGLALVENSSGKHKGETTISRRGRKRLRYLLFEVAMSLVAKNPEFRELHNYYTTRRLNPLKKMQSLMAIAAKLIRVFYVMLTKGVNYDPKKMVNDIKRPAVYLQTA

SEQ ID NO: 105444 - protein, 279 aa, unidentified
MTMNPAPNTFKHVVAFDVGKESLAVHILPGDERQSIANKPKEIRKLLRAQMRRNTNLNLGPLLVVCEATGGYERQLLEICVELEIAAHKAHGSRVRHFAKYLGLIAKNDPIDARVLALFGSKTDNLRLYASPTPELEALTDLRARRDQIQAMLLAETNRLEHVRHETVTKSLKEHIDVLRQALAVLETTIAAHIQASKELARKADLMRTLKAIGPGTATVLLAYMPELGTFSRAGAAAMAGVAPFDDESGKKKPPPPYRSRPGRRSQGALHGSPDRNPV

SEQ ID NO: 105445 - protein, 386 aa, unidentified
MQKLNDLSRSLTAFEPDGTLIAVIEMSLSSWLVAGIVPGVERQPLKKLAVDESALLKLLHRWREEAEKAGRRIERIAVAFEAGRDGFWLARWLKARGIEAYVIHASSVAVSREHRRAKTDRLDTELLKRSFLGWLRGERDHCKMVEIPTMQDEDAKRPNREHDSLIGERSRIVNRMKAALVRLGIRGFNPKLKRATTRLDGLHTPEGEPIPPNALAELRRDMERRRLVNNQIRQIEEERLERIEQAPCDGAHVMVRLLARVMGVGIETADMLVHEVLSRNMRDRRAVARYAGLTGSPDESGRKRREKGLARSGNTRVRRGMIQLAWRFLLHQKNSALTKWFRSRTENARGTRKPMIVALARKLLIALWRLVREGIVPDGVVLRPAQ

SEQ ID NO: 105446 - protein, 402 aa, unidentified
MNCVGIDVSKGKSMIAVMRPFGEVVVSPFEVRHTASELSELARLLKSLDGETRVVMESTGNYHAPVAWLLHDAGLYVSVVNAMLVHDYGNNSLRRGKTDKKDAVKLANYGLDHWLTLPRYVPEEDTRLMLKTCYRQYQQYSKVQTMLKNNLISLLDTTFPDANRLFTSPPRTDGSEKWVDFVAAFWHCECVCGLSEKAFAAKYQKWCRKHGYHFSEDKALDIYASACGHFGVMPKTDTAKLLVEQAIFQLRATSAALAALKQEMQSLAASLPEYPVVMEMFGVGPTLGPQLMAEIGDVRRFHSKKALVAFAGIDAPPYQSGQMDVRSRSISKRGSAALRRTLFLVMGVYLQSAPMGEPVYQFMDKKRSEGKPYRVYMMASANKFLRIYYASVTAYLNTQTQA

SEQ ID NO: 105447 - protein, 427 aa, unidentified
MNEIESNSIDRFRQFKKEIRGSKEHLIVGLDIAKRKHHGFLGDANGRTLLKGLIVENSAEGFRHLLTQVRFYMDREGLSEVVFGLEPTSVYHKPLAEHLIEQGHLVVYATNEAIKKNRSLIDGRWDKNDTKDSANVADLVAQGKCHYYDLPELRLRDLRSLLLFRKRLKKQLHSCRVRIRNNLVAQYFPELDWFWNNAAAENLAIVRWFLDPGRIRQLSCEQFIAKVTTHNGGLRQQRRLQHIWEAAGQSIGCRPGPAMALEAELVVEMLQSVQAQLSRVEHAIQEIADGFEEYDYLKSIPGFGPYVSAMALAAIGNPHRFENRAQLIRLAGFDLSANRSGEKSKAAVPVISKKGKADLRYALYQAALVASSLTSHFRAYYSRLLDGRQREKGIRTKMLVKIAAKMLVIAWTLMKRKESFNPAHIQA

SEQ ID NO: 105448 - protein, 345 aa, unidentified
MGNELEQLLERPSRPFTPRAGPAWPARILEAGVIYHVKEQLVYLGVDIAKSYLDAAVGNEKRRFSNDTIGHRELINWIEQVKAPVQVICESSGGYERALVQGLARARVKISLVQANRVRQFARAAGILAKTDRIDAEVLCAFGKVMRPPTVTAATLEQEHLRELESQRRHLTRLLVMEQNRGARLSDALVRRLNRSLINQLKKQIERLDLLIEEHIEQSPELSAKAAKLTSISGVGARTAALLLAQLPELGELNRRQVAALVGVAPFNRDSGKMRGKRAIYGGRRPVRHGLYMAALVAARHNPILRNFYQRLRAAGKPAKLALTATMRTLLIVLNSALKPDLVYA

SEQ ID NO: 105449 - protein, 385 aa, unidentified
MSSTAIAPLPTTDQPTPASIFASLELSRSRWLVTVMLPGGGRMSKYSVQGGDAPALLGLLSRLRARAERRVGSPVGIVTVQEAGFDGFWIHRVLQANGIESHVVEAASIAVPRRHRRAKTDVIDGEALLRTLMAFKRGEPRVCSMVVPPSPEAEDRRRVSRERRTLIKERIGHINRIKGLLAAQGIGDYEPMRRDCRERLEGLRTGDGRALPPRLKSEIGRELDRLELVRRQIAAVEAERAALVQEELPARSPAGVLMRLRGIGPEFAAVLWLEGFFRGFANRRQLAAYAGLAPSPWQSGSMNSEQGISKSGNPRLRTTAIELAWLWLRHQPETALSRWFLERVRSDRGRIRRVAIVALARKLLVALWRFVTDGVVPDGAKLKAA

SEQ ID NO: 105450 - protein, 365 aa, unidentified
MKKGSTAAAASNKNFKRKLTIGLDLGDRSSWYCVLDEAGEVISEQKLGTTPKAMREVFAAMPRSRIALETGMQSPWVSRLLSDLGQEVIVAHARNVRLIGESRRKDDRLDARTLARLARIDPQLLSPVKHRSAKAQADLTVIRARASLVRARTALVNTARGLTKSYGERLRGCNPRNLDLEKAQSLSPELQAALGPLLQALESLSERIAEYNRQIEAIAQRSYPQTALLKQIKGVGTLIALTYMLTLEDPHRFRKSRDAGCYAGLQPGRRNSGQSEPQMHISKEGDPYLRTLLVQGAHHILGPFGADSDLRRWGLKLAERGGKNGKKRAVIATARKLAVLLHRLWVSGEVYEPLHNTKRTIVVAA

SEQ ID NO: 105451 - protein, 326 aa, unidentified
MQGKELSEQTTAAKSKAGIDACKSWLDAHVLPSAQTLRVPNTGEGIRKLKRWLDRFEVSLVVVEATGKWHRQVHRSLIAGGIAVAVTDPFRVRAFAKAKGILAKTDRIDARVLALFAALMSPDIRPPASQALEELAELVTARNSAVAEQTALKNQLAAACGAFLKRQLEHRCTRIAKDIEVIEREIARHIAADEGLARRYVILTSIPSFGPTVAATLIACLTELGACSRKQIALLAGVAPIADQSGKREGVRVVWGGRPAVRRALYLAALSAATHNPGMKVFYQRLIAKGKAAKQALIAVARKLIVLANTLIAEDRTWQLSSPKLA

SEQ ID NO: 105452 - protein, 344 aa, unidentified
MNKNWFIGIDVSKKTLDASIFVAGEVINKFPHVQVRNDRQGFRDLLRWAKELGVKTKDTLFGLEFTGYYSDALEQFLARKQICYAMLPTTVVKHYQRGPHDKNDKIDSAKIADYLFRFNGTECIKLRVLPSKALQQLKDLKSERKFLVQQRVTCENRQKVAKSKGEEKHLQKLIDLYKTEIGQVEQQIADVIVLDEEIYTTYRLLNSIPGIGFVNAVNTIANTQNFTAFETARQYAKYVGVAPSEHSSGTSVHWRRRPSPHADLQAKADLSMAALHAIELSAEMRLLYERKLGNKPKDKDMQKKALNAVKFKLIREMFSVAKQARNFELRGLDKAQAQVHSNEE

SEQ ID NO: 105453 - protein, 383 aa, unidentified
MEALLYCACGLDVHKDIIEACIMRGVDAEPEIIRDSFGATKPELQRLMQWLLDNDCFTVAMESTGVYWKPIYQILESESVYLEQIWVVNAHHMRNLPGRKSDVKDAEWIAKLLRHGLLEKSFVPCIAIRDLREAARLRRTFVQERCRYVNRLEKFLQTHGFKFSSVMSDILCMSGKKLLHILCETGTLTQKDVQENCRRLRRSSDEIAAAVCGNLTVAERRLLARLLHKLDSCQEDIDGILEDMRLLCSPFQEQLAIVDSIPGFDQESSMEIIAEISAAPQEHFSSPQRLCKWAGVVPRNDETAKKIKSKKILHGNTYVKSILCQAAWAAVKVRGSPFHNWFWSHQRKIGQKKAIIAIARKLLMLIYLLLNTGQMYQQPGTET

SEQ ID NO: 105454 - protein, 355 aa, unidentified
MKYYTSTTEYNCGIDLHARQMYVCLMDRQGKKLVHTNVKDNDFAYFLKLVEPYKHSLTVCCECMFGWYWLADACQAAGLTFVLAHALYVRAIHGGKNKNDRIDSEKLAHLLRSNLIPPAYVYPSQQRPLRALLRQRLFYVWRRSELLARIHCHQLAHNRVPAKQSRWTRDDWEERLLKAEIHPLRQLALSNDLAMIRHFDHQIYEVEKELQWQTKQVAAREYALLQTVPGIGENLGLTILYEIGEISRFPTVKDFLSYCRLVKGTVASAGKIKGLRGAKLGNPYLRWAFGEAAVIAKRDHFRIRPLAQALEARMNGNKFKANTVLAIKLARCVYFMLKNKTVFDPDRLVAALARN

SEQ ID NO: 105455 - protein, 387 aa, unidentified
MQKPHDNSKASPAAFMQDNTLIAVIELSLSSWLVAGLIPGVSREPLKKLEPNAEDLLKLLHRWRDEAINAGRQITRIAVAYETGRDSFWLARWLRERDIDAHVIHANSVTVSREHRRAKTDRLDTAMLKRGFLGWLRGERGHCTVAIVPTMEEEDAKRPHREREGLVHEQTRVVNRMKSALIQFGVRHFNPKLRKASVKLETVLTPEGKSLPPNTIAALRRDMERLKIIKEQIKAIEQARLQQFEQKPEALANRMVYLLVRIYGLGLETADLLVHELLSRTLRDRKAVARYAGLTGSPDESGSKRREKGLSRSGNTRVRKIMIQLAWRMVKFQPDSALVQWFKQRTENAKRSRKPIIVALARKLVIALWRYANDGVIPEGFRLHSAA

SEQ ID NO: 105456 - protein, 342 aa, unidentified
MTYYAGIDVSLEYSSVCVVDGAGKIIREQRIASEPEALIAWFRGLGFGLERIGLEAGPMSQWLYAAMRAAGLAVELLETRHVRDAFKAMPVKSDRNDARGIAQLMRLGWFRPVHCKSMAAQEVRALLTARKLVQSKLLDVQMSLRGLLRGFGLKVGATTSSRFAGRIRDLVEGNATLEVIAAALLVVHETLRRELAGFEKRVRSIARSDGRVRLLMSTPGVGAIVALTYVAAIDDPARFKSSKGVGAHFGLTPKKYQSGETDITGRISKIGDEGVRTALYEAGHIILTQPLKGCTALKSWAMRLAKRAGMKKAKVALARKLAVIMHRMLVDGTLFASAAVAA

SEQ ID NO: 105457 - protein, 351 aa, unidentified
MSLVLQSSLPYPNSCLGTSPHQQTRDTKMAGVSFCGIDVSMDRLDVMLLPEERSFSVSNSAAGWAALVAQLRGSAIAAIGVEASGGYERGVVRTLLAASLPVRQVNAYKLRQFAKACGVLAKNDPLDARMIASFVALMPVRDVAPKPPALERLAEILAVRRQLSDERVAAENASRLLEDPMLRRLSRRRIARLAADIDLLDKRTLEIIAANAELTHRYRLLTSMSGVGPVLAFTLIALLPELGRLTRRQIAALVGVAPYAFDSGKMKGKRCIWGGRAPIRRVLFMAAQSASNWNPVYKAFNARLKAAGKLPKVATVAVMRKMITTLNAMLRDDLAWADGRHIVPTTRLPAR

SEQ ID NO: 105458 - protein, 347 aa, unidentified
MQSIANLPVIGLDLAKSVFQLHIVDADTGEIQRRQIKRARLTEFFAKCVPSLVAMEACGASHYWARTIRQLGHEVRLLPAQHVKAFLLRDKTDAMDAQAIWVAAQQPHIQSVPVKTERQQACMALHGMRRQLMKMRVMQTNALRGILAEFGIAMPVGHKQLLKTIQGELARAQQLDLLPADLVISVQEQIKRIDALQSDIDSIAQRLLLMIREDRQMQAIRQIPGVGELGSSALVAAVGDFSAFKSGRQFASWLGLTPRQVGTGGKTQQLGISKRGDSYLRTLLIAGARAVITRSAKSKWIELLLERRHYNVVVVALANKIARTAWAVLTRGAAFDQAKWNPAECGA

SEQ ID NO: 105459 - protein, 438 aa, unidentified
MSNKVIFNLDDLFISVGIDVGADFSWMSIALPNQQFVGKPYKILHNSIDSLTTAVSKIKEAEELYSLESRIFLESTGIYHYPLFCYLRDKGFNCSVINPIITKNSTNINIRKVHNDRFDSKKAALVGLKPDLKVSLMPSDLALNCRNLCREYYDLMDNRSAYVNKLQGELRMAFPQYLSIFSKVTINTSLTLLETYTSPSAFLEADKQEIINIIKSTARFGLTYAQNKYNAIIQAATDANQFGYIIDSNIKRIRLYISFIRKYDEEINNILESLHELVDANEDADFVKQIHLIETFKGAGFLSAVSIMGEIGDFSAFSKPKQLFAYFGLDPAVKQSGKFEGTKVQMSKRGSSIARRVIHTLTLQSISISRNGEAKNPVLREYYLKKCDSKPKLVAMGAVSHKVCNMIFAILRDNKSFEIITPQEHIKQYNASKCDMAA

SEQ ID NO: 105460 - protein, 421 aa, unidentified
MPRKPQSIESSFAVLHSHCAALDVHKDSIMACLLTPGEGDEPRSEVRQFGTTTGELQALARWLLESGITHAAMESTGVYWKPVFNILEPVCELILVNARDVKQVPGRKTDVADCVWLAKLLRYGLLKASFVPELEVRELRDLCRMRTTQVREIVQVGNRIRKVLEDANIKLDSVASDLLGLSGRTMIQAIIGGEQDPAVLAGLARARMRSKIPELTLALEGRVRPHHRFLLKEWMWILDRLEEQILRLEQEIEKRMPPFEWAAALLADKPGFDRVSARNLIAEIGADMSRFPSARHLASWAGVCPGNNESAGKKRSGKSHRGNRWVKGTLTQIAWAASRTKDSYEAAFYKRLVPHRGKKRALVALANSTLQAVWHMLSKHQTYIDLGADYFETRHKEKLTRSLVKRLEKLGHKVTIEQAAA

SEQ ID NO: 105461 - protein, 331 aa, unidentified
MNYSHFVGLDVGKKTFDASLMSAAEKELSHKSFDNTPTGIQSLLDWIAGYHLSLSKLLFCAENMGSYVTELSVSSVSMGFSLALVCPLTIKKSIGLQRGKNDRIDAKRIANYAVLHYRKLELYKLPDKDLVRLRGWIIIRDNLVKQKVSSIKLLETFSWMAKLADVTESISFLEEQLKSIKERILEVEEDMEQLIAASTSLYTNYLLLRSIKGIGIINAIVLLCVTDNFQRFDNPRKFACYCGVAPFEHTSGISIRGKTQTSSLANKEVKVYLTRAAITAISWDPQMKAYYKRKIAEGKHKASVINAVRAKIIARSFAVIRRQTPFVTLAV

SEQ ID NO: 105462 - protein, 372 aa, unidentified
MNNKLIYVGLDVDDTQYHGAAFDKETGEIVSFKCRPTLKGLVSQLEKIQKYFSVESLKLCYEASYIGHCLQRDLMQAGFNCDVISPGSIPRKGSKAIKTDRIDALDLAQFYANDLLTIVQIPDAETEQDRDLLRSRQQLMKQQNDLRRHIQSLLRRNGLHYKAETNNKTHWTKHHYCWLERTVEGCSGSLGTNLQLLLRQLKSINEIVGAYSEEIELMAKQPNYQQAVSALTCYKGIKNLFALTMITEIGDVKRFAHPRQLSAWVGMDIREYSSGGKHHRFGITRQGNRYLRTAFIEANQRAYRTTKLSREIKARRVNTNPEYIVIADRCLKRLSKKGNRLLEAGKHPNKVKVACAREMIGFVWESLNKVAA

SEQ ID NO: 105463 - protein, 358 aa, unidentified
MELGVSVTVGVDTHADAHVGVALDYLGRRLGEVVVPNEVTGYRSMLEWALNLGELSCVGVEGTGSFGAGLSRFLRSWGVRVVEVNRTSRQHRRRHGKYDAADAEAAARAVLSGDATGEPKAGDGQVEMLRALKVARRSAVKARTQAANQLHALVMTAPEQLRADLRGLPAKKLVQKASRFRCGPELADPTAATKFALRSVARRYRQLSEEVSGLEEQIERLVKEASPELVALERVGPDTAATLMIVAGDNPKRLRSEAAFANLCGAAPIEASSGKTVRHRLNPHGNREANRALYMVALNRMRRDLQTQTYVARRTTEGKSKREIIRCLKRYIAREVYRALIVTRPEIIPGEEDLASYA

SEQ ID NO: 105464 - protein, 362 aa, unidentified
MSSSTQSFIGVDLHKCTVTLTAVDPLGEKIAGLKISTKSVGKIEDWLSALPRPTHLAVEACPFVEWFIERFRPGVDRIDIADATELANRRGKRRKTDRNDALDVARRLARGECPLGFIAEPELMQLRKLGRHWRCLSRLLSRTKHSMKSMLNAANIRGPRFDGAAAQRWLLANRDLLGPVQQDAFADFIDILNLVERQRERLRRQMIFASRSGKYAATSARLMTVPGIAEIWATTITAEIGPFERFPNADALEFWAGLTADLKESAGRTQSGHITKAGSVTLRWALGKAAVTLCQSDAGQEAIRQRLIARIGRPKANVAMARRLLRVLYAMMRDGKAYQGGPKRDRTAAANRARLTRKKQVA

SEQ ID NO: 105465 - protein, 350 aa, unidentified
MQPVIGCDAHKHFSVFVSVDQHGQASRPVRVDHDRDLYCSYLRSLPAGSEIALEATGHWYWIVDAMEEAGHHPHLANPFEAKRRMAKSNKTDALDAKGLAILLRCGTLPESWIPPGELRDQRELLRTRMALRDLRTSLKHRIHAGIDRYGLQADAISDLFGTKGRIYLASILKVLPAETAHMIALQLNSIDQLEDKIEAIERRIAEQLKTSPEMRLLRTVPGLGPILAPLVWLEVGDVERFPRAEHLASYAGLVPRIIASGGHIRHGGTCRNVNHYLKWAFVEAANCAIRIKAHRQNHIGLLYQRLYPNKGHGRAVVAVARHLAEASYWVLRKKQAYRAPQPRTELRIAG

SEQ ID NO: 105466 - protein, 356 aa, unidentified
MKQVKTLSFAGQDIYCGIDVHKKDWSICIRDDERELRCFSQPPQPAILADHLKRNYPQANFQAVYEAGFCGYWIQQGLSQQGISCIITHAADVPTTDKDRRQKTDRVDCRKLAQALKEGSVKAIHIPNQQIIEDRSLVRGREQLVQDQTRYKNRILSWLHFFGIAIPEGYKKSTHFSKRFISWLEQLPINENAKSSLQAKLGALQGIRNQLLLVNRSLRKLAQSERYEKKVELLRSIPGIGITNAMIFLTELDDINRFKSFDHLSSYAGLKPDIYSSSDTTIIKGITHRCNLLLRDSLVESAWKAVAKDPALLMAYKEYKKRMHYNNAIIRITKKLLRRIRYVLLHQTPYVTGVVE

SEQ ID NO: 105467 - protein, 421 aa, unidentified
MNGRSDEYALLVGLDWADETHDLACLSEAGGKRSQLRIGSDPESIRQWMGEVGSRFPNGRVAVCVEQSRGAVAYALGAYAAVDLYPVNPVTLSNYRKAFKPSGTKDDPGDAALCLDLLVNHREALSRLEPDTELTRMLQLFCELRRKAVNRRAQVTNELISTLKQYYPQALTLIGDNRHSKMACALLMRWPRFESIAGADAQSVRKFYYVHHSRSERCIRKRLELIASGCPLTTDPAIVEPLMMHAKQLVSEIRALNKSVERYDDRIRKLFAAHPEAMLFRSFPGAGEQLAPRLLVAFGTNRERYGAADEIAAYAGVAPVIERSGKSEWVHWRWHCPKFMRQSFVEFAAKSVGQCEWAASHYHKQLQRGKEHNAAVRSLAFKWLRIIFRCWQQRKPYDEQRYLAALARHGSWIAGDLARPG

SEQ ID NO: 105468 - protein, 450 aa, unidentified
MLADQLDYVVGVDPHRDTHALAVVHVLSGAVVFEATVAASSEGYARVLQLVEAHALGRRAFAIEGSGSFGAGLTRFLSGRGERVLEVGRLRRERRSGGKSDALDAIRAARSVLAQERPATPRVGGERQALQALVAAREGAVNAKCAGLGQLRDLLVTTPEPLRSELRPLTQARLLRRLAATRPETRRDPELRGNMLALRSIARRVLELTAEERTLAREIEALTRKLAPQLLDQPGVGPHAAAQLVLSWSHPGRIRSEAAFARLAGAAPIPASSGQTVRYRLDRSGDRKLNRALHLILVTRTRLHPPRSPTSNDASTKARLDAKQPAASSATSPATSTAYSNTERQRRPLDKHRSIAGPIRCPRTRSHQLSNQGATTPSAPASQASRNPAAVRFSRSVESEALATSWMTNTASAAAHGRLCALAINRTYGFGSRRSASMPPRPAGSSRSRT

SEQ ID NO: 105469 - protein, 408 aa, unidentified
MQTHNCEVVITPQYTIGAGIDCHKDIMVVHISSKDGQKSETKEFKTFTDDLDELTSYLVKEKVEVVLMESTGVYWISLYHKLISAKLNVIVANPQHIKQMPKRKTDRKDAKWLCTLAINGLVRKSFVPDGVHYSFREYCRIRDNYRKRITQLNNRMVKILERSNIKLRSVSSSIRTKTCQLIIESILSGITDPTQLSELCLGKLKNKKDEIEKAVKGTITEGDQIILRLLQEDRSHAQKQLDSVNEKILEMEQTHYTIEVRLLDEISGIGQLTAQQIIAEIGTDMSKFETADQLTSWAGLAPGNNESAGKKKSTSTKKGNKYLRTAMVTAAWAAARSKKTYWFFLFNYLKRKMSAKKAIIAIARRMLKVVFKVLKDKIQYVEGGRELFDRYQHLRLAKQVDKSTIIAA

SEQ ID NO: 105470 - protein, 417 aa, unidentified
MRTLRGSSLEWTARTEEVPLRELVAVPVDVGKSSAMVMACDFTGRVLLPAVEFPLTREGVAQMLARVRGAVPAGAQLVRVGVEAAGHYHLPMIAAGVWPDDWQVVELNPAHVSAQRRVNGQRGVKTDRVDLVAIADLLLAGRGSPVVACGEPLIELAAWVAHRRRRGEVRTATKNQLLAQLDRAFPGLCLALADVLGTKVGRLVAAHFADPVRLARLGPDRFREFAARRGVRVNRPVATRLAQAARAALPTGQAVIARQILQADLALLGDLETQIAAAGERIADLLPATEYHVLTTTPGWGVTRAADYAAALGPFARWGSPAKVYRAAGLTPIVYASAGRRRDAGISREGSVHLRRALLGLGIGLWQKDPAARAYAHALRERGKPGGIIACALAHRAGKIAFAMVRDQAPYDPARWS

SEQ ID NO: 105471 - protein, 379 aa, unidentified
MQQDSEIYVGLDTSKLKISVALATAGRDGEVRFFGDIDSTPEAVARLVAKLEKRHGQLAFCYEAGPTGYGLHRQITTLGHECTVVAPSLIPRRPGDRVKTNRRDAVTLAKLHRAGELTAVWVPDPGHEAIRELVRAREAAMAELRRARQQLQSFLLRQGRIYTGRAAWTKAHARWLSELAFTQPALYLVLQEHRQAIADAEKRLERLTRQVSEAAQTWSMAPVVAAYQALRGVAFLTAVTFVAEIGDVRRFDSPRQLMAYLGLVPSESSTGEQVHRGRITKAGNSRARRVLIEGAWTYRHPARMSRLLQERQADLPPAVREIAWKAQVRLCGRYRKLMARGKRQTVVTTAIAREMAAFLWAIGHEVEPTAAAPSDGQGH

SEQ ID NO: 105472 - protein, 469 aa, unidentified
MDLLKLPIYTFCCKFLDVEEKFMKKVFVGIDIGKGKDSIHVIDILGNPIIKKGFDIQNDYYGFIKLRDRLDLILKNLNLTYDDCLVGFESTGHYWFNVRDYLNDINIDTVMVKGDKVKHRRALEEGQKGKNDTLDARVIASCLRNNNYILIRNDERALRALKKLTRMRDNQTKDLVALKNKIHRCIDICNPVFFKIFGNLNSKTGLELMKLYPSPKDIINVDLLDIKEKLRVNVSKPNLRMVNLYKEECESWVHIVKEPTYAEKIEMVMYINKYFLEKEYKEELDKEIRKIAKDLFPLYSEFEKIKGIPMIQLISVLSEIGDISNFKNTRALLGFLGLTVIGKMSGQYVGEIKINKAGSRIVRKHLFNIMESLIKHNEYFRVAYCYYKSYRHKDPTKKRSMQIAVMCKFVRVMYGMLKYNASFDYKEMMKGYYFGDCNMQVFKEEFEGENRRKKIENCKLAYDIYTIYS

SEQ ID NO: 105473 - protein, 408 aa, unidentified
MEVVFSRCAGLDVHKQTVVACVLVREGRETHKAVQTFGTTTPAWLALQTWLTEHRVTHVAMEATGSYWKPVFNVLESSFTTWLVNPAHIKRVPGRKTDVKDAEWIADLLPHGLLQPSLVPDRSQRARRELTRYRQALIEERAREVNRIQKILEGANIKLGAVLSDVLGSSGRRILTALAAGETDPGRLAALADERVRATAEELQRALHGVMGAHQQFLLRQQLRHLGHLEDPIAELDAEVAARLAPFVPTRDLLETIPGVGRRTAETILAEIGPTVTPFPTPAALAKWVGLAPGNHESAGKRLSGRTVPGNRTLRAALVEAAQAAGRTKATYLGAQYRRAARTKGAKRAAVIVAHSIVVDIWYILHRQEPYADLGVDDFDRRDREHAARQAVKRLEALGYQVTLTAIV

SEQ ID NO: 105474 - protein, 356 aa, unidentified
MKNNKLNYSGQKIIVGIDVHKKNWHITIIANGLKVSSLSVPPYPNKLYSFLVKHFPNGDYYSVYEAGFSGFWAHRELCALGIKNIIVNPADIPTKTKERRRKTDKIDSEKLARELSAGSLEGIYVPDKQSEGFRALVRLRRQLSKDQSKVKNRIKSLLLFLGEDVPEDINTKNWSQKYINALKELPIEVKESKQTLDNLIQYLEVIRLQLAKVIKQLRIAVSNNHEARKIVELLMSIPGIGFTVGTIIYSEIMDIKRFKNLDQFASYVGLTPDVKASGEREHVKGLSKQSNDKLKNYIIEAAWIAIRKDPALLMAYGKLKSRMSSGSAIIRISKKLLNRIRYVWNNEKTYVLAVVE

SEQ ID NO: 105475 - protein, 350 aa, unidentified
MKHTATTIGLDIAKHSFYAVGVDRNRHEVLRRKLTRAQVLRFFRAHPSAAIGIEACAGAHYWARTLNAMGHDVRLIAAQHVSRRVVGNKNDYRDAQVITELRGNPQMPFVPINTEAQQDIQMLHRVRERLVTHRTAVMLQIRGLLGEYGAVFAPGVRSLRQGLVEVLGGEHLSLSVSALETFSDLYRQWQQLDEQVLGYDRRIQQLAQQDEAVARLMEMPGIGSLNGTALLASLGDARHFRAGRIFALNLGLTPREFSTGGKQRLFGISKRGDRYLRTLLIHGARSALRCAEGKPDRLLQWALRLKETKGFNVAACALANKLARVAWALVAHGRRYQPQGLTLAESASHE

SEQ ID NO: 105476 - protein, 389 aa, unidentified
MKIYVGIDIAKLNHFAAAISSDGEIIIEPFKFTNDADGFQLLVSKLESFDKNSIIIGLESTAHYGDNLVRYLVAEFYQVCVLNPIKTCQMRKNNVRKTKTDKVDTFVIAKTLMMQDDLRFITFFDLDMMDLKALGRFRQKTIKQRTRLKIQLTTYVDQVFPEIQYFFKSGLHQNAVYALLKEAPSPKEIASMHMTHLANLLKVNSHGHFTKEQAKELRVLAQKSVGANDSAISIQITQTIQQIELLDSQLQKIEAEMTDIMKFNDSVIMTIPGIGYINGGMILGEIGDIHRFSNPNKLLAFAGLDPSVYQSGNFQAKTTRMSKRGSRVLRYALVNAAWNVVRNNATFKAYYDAKRAEGRSHYNALGHCAGKLVRVIWKMLTDEVEFNLE

SEQ ID NO: 105477 - protein, 400 aa, unidentified
MKGRAGSGGPGRACAGRAAGSRPSAPNCKVRGRADCTRAAGQFETEVPTVSNPTRWVGVDLHRRRSQIAIIDEHGELTLSRRIVNDPETFKELLGDPDATHVALEATYGWEWLADLLEEVGYDVHLAHPLRTRAIAAARVKTDAVDAPTLAHLLRAGLLPEAYIAPAELRDLRELLRHRAVLTRMRTAVKNRVHALLARHGIRHEHTDLFGKAGREFLAGLELPEGSRRRLDSLMSLIADFDREITATTREIDARAKTDDRVPVLCQIRGVGRYTAMLVIAEVGEVKRFPTARHLCAWAGLTPTVRSSDGKARLGHISHQGSPALRWALSEAAQKIPTGGGPLRAMFERIAKRRGRNIAKVAVARQILTLCYYGLRDGEIRCLTNQPDSNDHDDELAEAA

SEQ ID NO: 105478 - protein, 450 aa, unidentified
MGNASGVSRGDRNRNARLARLRSLVPVTNAIVGIDLADAKQMVVVTDHDSKVLARKTFRCRAWDLGAALGWAAERAAAKGFSGVTVACEPTGHRWRVLGQLAADRSMPFVCVQPMLSSWARRSEDLTSDKTDEKDAVLIARLTAQLRCYVPEPVDETWGRLRHLGARREQVIVEMVSQIQQMRALLECVWPAALDTAKQPFRSKTWVAAMSAICERDGGDLDRTRRLGPARFEQAVRREILKRGGQKPSLRIARRLFAALTDPTGVIAHRPGALERVAFLLVDWHTAGDKLTDTEARMISVLGELKLTALATSIPGLSPVGAAAILAETGDPNRFASGRALVKHAGLAPREKLSGTFVGRTKLTGAGRPGLRLAAWRAVWGTQRGNTVYAARYRHLTSRGQNKLTATQAQTVIAAAILRQLHAVITTGQAWDPDIATHGTGHRKQMPIAA

SEQ ID NO: 105479 - protein, 330 aa, unidentified
MMLHAIDLHKRSLEVATMRADGEGEPRVVRMPACERALGSYLQQWPASRHRVVVETTGSWYWIADLLREHGAELKLAHAAKVQAITAAKVKTDSVDALTLLTMLRLNLVPEAHVISPELRELRDLLRLRLRLVDKRTSSLNSIARLLEKYNRASVEALPELAQAQAALHHGQIALLAVQIKGLEKRIHRELRPNPTVRRLARIPGIGRLNAWAIYLEIDGIERFATERRFFSYCRVVPGSDNSGQRTRNKRSRAGNRYLKLAFSHAAVRAIPRYAEIGAAYRKKLRKKNEALARAWVRKELARIVYHVLKDDVDYDNTFRGVALSRPKRA

SEQ ID NO: 105480 - protein, 359 aa, unidentified
MQRNKISFKGQKIYIGIDVHVKTWEVCVLTESGYRERHPQQASAKTLFDFLKKHFPDGEYHAVYESGFSGFATYYALKEYGIDCVVTHAADVPTIQYEEVMKTDKVDAAKLARSLRAGDIRPIYIRERENIDDRSVIRIRKTIQKQLSGYKSRVKHLLHCNGVEMPDRFASPGTHWSKAFIKWLKENVVLLSPSRLSLDLLVKQVETIRHTLLDATKAIRRLAQADRYRSNYEILMSIPGIGVSVAMCILTEIYDVKRFRNENQFASYLGLIPTCHNSGERTSSGEKTFRGNKHLGPMVIEAAWIAVYRDYGLGLAYARYKQSMKPQEAIVKIARKMSNIIFSVLKNGRKYEPYRWDKE

SEQ ID NO: 105481 - protein, 402 aa, unidentified
MNRNTGMHAGQVIGWINGLQVVGMDIAKSVFQIYTADMKTGELRDKRLKRDKVLEYFRLMAPAVVAMEACGGAHHWARQLQKLGHQVRLVHARAVRPFVQGNKTDVTDARAIWLAVQQSGMRFVAVKTEAQQAALALHRQRQQLIKMSTMQLNGLRGLLYEFGVTFPKGRRAMMAQVSAGIDSLAPALPKMTIDSLLQQVQRIAQLRQSIDEVEVCLKQLIKQDRQMQRALTVPGVGVLGATAAVATMGDPHHFKSGREFCAWLGLVPRQEGTGGQVKLLGISKRGDKYVRTLLVHGARAVLLRKSEPSAWQNQLQQRRHKNVAIVAQAAKIARTIWAVLAKEQDYQVNHKSVRPQPGAQRQQAPGQEQGPTCPPRRSFLASDARRHGQVCAETAAQRSQQA

SEQ ID NO: 105482 - protein, 328 aa, unidentified
MTKRTTICAGIDTGKRKLDVGLDGSGKQLQVENTPEGHKILLTWLRQHRVKRVGIEASGGYEQPVVAELRRKRFVVVVFQPAQVRAYAKFHLQRAKNDKIDAALIAACTAAVRKIHAAPDPRLLPFAEQLTMIDQINEDIARLKNRIESCRNAQIKKLWKEDIARLEKREKAELKALVASIRKHPDLAKRLGLINSVHGIGLPTAVAILVRLPEIGRITREQAVALAGLAPYDDDSGEQVGVRHIEGGRKRLRRALYTASLAASFRWNQQLIQLYQRLTAAGKEHKRALVACARKMLIFANTVVARGTPWRDEPLAVKASMAGSLSVS

SEQ ID NO: 105483 - protein, 360 aa, unidentified
MVRYSLGIDMSYKIFHVCLSLMQADGNVRVKGTSKFQNDKDGFVLPESWLQKHLKQKELPVAIVMEATGVYYEKCALHLYQAGYRVSVVLPNIAKKYLQSLGQKSKNDKIDAKGLSTMGAERNLTGWEPLNDFFYILRSYTRQHESLQQTKTIINNQLHAQHNKAHYNELVEQQLGQLIEVIEGQLKELATAIADHIKTNREVSQRVKQICGVKGIGILTVAVIIAETNGFALFKNIPQLVSYAGYDVVEDQSGKRAGKTKISKHGNGHIRRAMHMPALHAANWKGSVFQNLYQRVVERTSIKMKGYVAVQKKLLVTTYTLWKKNESFNVGNENEKHTKEQKQMLPSLVSPKADKKVVPA

SEQ ID NO: 105484 - protein, 391 aa, unidentified
MPDVSSNASAATTRTFVALDVHKNAITAGVLAREGSQPELVQLENSEKAIRRFIKRLGGARGLAVCYEAGPCGYEPSRLLASMGVACDIVAPSLTPVRPGDRVKTDRRDAKKLVRLYRAGELSLVAPPTPEQEGLRDLVRCRDDLRRARTAARHRVGKQLLRYGRVYREGKKAWTLRYRAWVRRQRLDDPLAQAALEHMLCHLDAIDAQIAALDRQLEQVAASPPWCDPVRWLCCFRGISTLTALALLAEIGDFRRFASARELMSFLGLTVSEYSSGERRQRGSITKTGNRHARRLLVEAAWHYQHPPRLSARLRSSGQLVPPEALARAWQAQIRLHERHRHLTANGKLPTVATVAVARQLCGFLWATMTRQPLRDDHSAHPRPRTEVLAA

SEQ ID NO: 105485 - protein, 353 aa, unidentified
MRIVVALDVHRRQITYKTLNRESGEVRRGRIVPATRGAVREWLEQFAGCEVEFALEGTTGWRFVVEEIERAGQRAHLADPAETAGKRGRKRRAKTDNADCDLQLKLLLAGELPESWIPPAHLLELRTRVRMRKVLIDQRTAWQQRLQAQLFHQGVAAGLKPRTRAGREALAQAELSPAGRELVALALRMLETIDRELAPLDRALRAFARRQPGCRALIANLYGVGAITATAILAELGDCRRFTSSDDAVRHSGLDVTVHQSDSKRAAGHLSHQGPELLRWALFEAAHQSARRSSPDHDYYLQVAGRIDHNRACLSVARKLCRRAHHILRELGDQALAPVESEPQAEEAIQAAA

SEQ ID NO: 105486 - protein, 350 aa, unidentified
MGRNDRPRVCDESAKDVVPDKRFENMTYIGIDISKATFVAAFPHGKGYRTETFQNDVKGIRRFISKLDPDIHHCVMEATGNYCFLLLYLLDKAAIRASLINPKKIKNYFRVMMSVTKTDSKDACLIADFGERFKPEPYKFPSEQIMLLKQKKTVLRQLQKQLTATKNLLSSLEPLPVKDKKCVNSLKQTITFLEKQIKYMQQEMEAVVSDVFDKQLKLLTSIKGIGVTLATALIIATGGFTYFDNAKQLSRFIGICPTIEQSGTSVNIRGHINRNGDETLRSMLYVAAWSASQHNAACKECYQRLRGKGKPGKVAMIAVANKLVRQAFAVVTSNKSYSDGFVSTKPGTAS

SEQ ID NO: 105487 - protein, 349 aa, unidentified
MRYIGVDQHKKFSYIAVMDERGRVVKEGKVVNEREGLKKFLGSCKDGKAEAVLEAGPNWVFMYDWLEGEVDRVKLAHPLKVKAIADAKVKTDKIDAKILAHLLRADLIPEAYVPKAETRKVKDILRQRMFFIRMQTMVKNKIQAVLDRHPEIDGEFLGTDLFGKQGMEYLAQIELPTPDKYIISDSLKFLLVLRQHIKRTDGIVERLSRGDRRVKRLQTVPGIGKFFSVLIATEIDDISRFPDAKRLCSYAGLIPSTYSSGNKVFHGGITRSGNKFLRWALVEAVWPAIKKDSSLRYYYHKIKEKKGANVAKVAVARRLLTIIYHILKEDRDYSINSPAAPYVSIVKAI

SEQ ID NO: 105488 - protein, 560 aa, unidentified
MKRIAKAPRTPSVKRIAKAPRTASKQVPAKSPRKEPKGSTRTQKPARPKPKASTRSASQSAHQESKDATVLTAGKAASSPSSPCSAAAKKFVARKKGSRDSRLCAAPGGSGRAVALRSARRPRKAAGDGQTDASGGGSELRMAPRKPGQKLADLSPALKTEAGTPTRSKAQSKQGAQERSTMRSIGLDLGAKKISFCEVKDGTVIDRATVALEALTPRLGPNTPPARVVFEASRDAWYVHAKLTEWGHEPVMVDTTRVKMLGIGHHRRKNDRIDAEVLAHAAEHGRIPRAHVLSPERQQLRKYLGVRRSLVEARANFATTIRGILRAERIKFASCAVEYLPERLRQAEMPENTRELLSPMVKAMQTLNPEINRIENQLYALCEREPVVALLGSMPGVGLIVAAAFVSVIDNAERFRNAHQVEAYLGLVPRLDDSGDRKRRLGSITKKGNSYLRALLIQSAWQVLKNPDGNDPLKRWADAIVQRRGKRVAVVAVARRIVGILWAMWRDGTVYDPSGLGNAQAQGLRAQANDTLNRAEAMRKAAKKLQPRRIRPSTSEAIGM

SEQ ID NO: 105489 - protein, 412 aa, unidentified
MELLHRRCCGLDVHKETVVACLRLVSDGKVTTEVRTFQTTTAGLLRLSEWLAANGCTHVAMEATGVFWKPVWHILDDGEFELVLANAAHVKNVPGRKTDVNDAMWLAELLAHGLIRASFVPDTQTQEMRNLLRTRKQLVREQSSHVLRVQKTLEDANIKLDSVLSDLMGKSGRAMIEALIAGETNPAKLASLADRRVKASPEAFREALRGRVTKHHRFLLRLHLNQIDALDAAMATLDAQVEANLGPFRTAVDLVMSIPGIKNRGAHVIVSEIGIDMSRFPSDAHLISWACICPRNDESAGKRRSNRLRKGGTWLKTTLVQCAWAAVKKKDSYLQAQFYRIKARRGPKKAIMAVAASILTAVYHMLKDGTMYKDLGCNHFNRRSTDQQKKSLIKRLADLGYTVEIKPLAATA

SEQ ID NO: 105490 - protein, 334 aa, unidentified
MHNRQNYLYVGVDLHKEHHTAVIINCWQEKLGEIQFENKPSAFSEFLLEVETYVSNGLSVVFGLEDVGGYGRALAKYLVDHEQVVKEVNPALSFSERKSQVMIQKNDSWDAECVARILVNKFEQLPNVNPNDLFWSIQQLVSRRNALVKAQSALKNQLHIQLNHHYPSYKKFFSELDGKTALAFWEQYPSPSCLEGINIKRLTAFLLDVSNNTCSVRKASEILRFMEEDGKTMKEYQEMRNFLVRSIVREIEFKKKEIKYIERELKQLVNLLDYQLETMPGIELVTASALIAEIGDARRFPNANKLARFAGIAPVYFGSGGKGKTHKSKQGNRA

SEQ ID NO: 105491 - protein, 333 aa, unidentified
MHKNQFTVCYLGKKGEHQLQVFKVMAKDIEAFKQTVTKIDVVAVESTGNTGYFVRQIQNSVKEVKIINPTQFKIISTSVKKTDEHDALVIAKYLSKGLIPEVRMRSKEQSQIASLIGTRDKFVKLRSCLKNKIHNILNANGIVTKREVFGSDKGLERILSIDIEDSYRFELKIIVEQIRSLNKSIDEINEEITGRGKNLEGHKNLTSITGIGDISATILLNTIGNVSDFADDSKLAAYFGIVPRVAVSNETSHYGKITKMGNKIARTTLVQSTLIAIKYNPYLRKFYFRLKAKKGSGKAIIATARKLLTIIYRTLKNNWVFEDFNQFKLAVTV

SEQ ID NO: 105492 - protein, 315 aa, unidentified
MAMPVSISKPIVGVDVAKNELVIYNAELDLLEEIPNTKAAITKWLKALPGAVVIAIESTNIYHLAFADLAHEAGCVIYMIGGYELHHYREGVKVRAKTDALDAKLLARYLKNEQQELRPWTPPSPLYRQLLSLFRRRAALVQARVGLEQSWANEPLLKTAFAEQVKSMQQLETLVEKTINDQLKEAGLVGQLKRCLKVEGIGFLTGARLIAAFQRGDFRNADAFVAFLGMDLRVSKSGQKDGRRSLTKRGDPEARRLLHNAAMSASRTKAWKGFYESQRARGFSTTQALVMLARKLARVAFALLKGQGEYRPKVS

SEQ ID NO: 105493 - protein, 348 aa, unidentified
MALTIVETRAITGGVDTHADVHVAAALDPVGGLLGVREFPVTPAGYAGLLGWRGGFGTVCLVGIEGTGSYGAGLARHITAAGVRVVEAGRSDRQDRRRQGKSDPLDAVSAARAAQSGRARGAPKGRDGSVEAIRALMVAKRSARAERTQTTSQARSLIVTGPDDVRARFARHTAAALVAETAALRPRPGDVVGYATRIALRELGRRAEFLGDQLDRLDALIVPIVTAHAPGLLALYGIGPDTAALLLIPAGDHPERLRSESARAHLCATAPIPASSGKITRHRLNPGGDRQANHALWRIVITRMSSHPPTRAYVERRTGEGKSKTEIIRCLKRYAAREIYPQLRAAAD

SEQ ID NO: 105494 - protein, 301 aa, unidentified
MKHVLGIDVAKTKLDVALLFPDGKCHTRQVDNTTAGFEVLSAWLAKRAVVDLHVGMEATGTYWEAVAEYLIDAGYRVSVVNPAQIKDFGGASLVRTKTDQVDARLIARFCLAQNPEPWSVPSPALRELRALVARRDALIAMRTQEHNRLLVAREVVREGIEAHLSQLEQAITEVEAAIRQKIDDNPDLKEQRELLDSIPGLGEKTLPVLLSHFGGEPRFTKAKQAAAFAGLDPRQHESGRSVRGKPRLSKVGHSALRKALYMPAMVTITKTTWGKAFRDRLAAAGKPPMVITCLPAGRSAP

SEQ ID NO: 105495 - protein, 381 aa, unidentified
MKKELYLGLDVHKDCISTAVAEEERRGEVRDTGALSNDLHAVEKWIGRLRKTHGKDVILRACYEAGPCGFGLARRLQQLGVDSQVVAPSLTPTRSGDRIRPDKRDARPLARLLRAGELSAVYIPEPTDEAIRDLCRARSDAVDDRRRSRHRLKGFLLRHGYRYQGKSSWSAAHEHYLRELVLPHPAMKVILEEYLQGIAAAGERIARCEAAMGDLLEQWRLRPAVGALMAMKGFRTVAAMILVSELGEVHRFSHPRQVMAYVGLVPTENSSSDRRRQGHITKCGNAHARWLLVECAQHYASPPKVSKELSRRQQGQPNEVRAISWRAQNRLHRRYARLLARRLQRNKAMVAIARELCGFIWEVLRTQSCYQRQQSTAGVKS

SEQ ID NO: 105496 - protein, 365 aa, unidentified
MASLPSGPETVYAGMDTSMREIVCGVLRPGREVPAVERIPNDEESVRRLIGKLGDPRLLSVCYEAGPSGYELHRLITSMGAACQVIAPSLVPKGGSERVKTDRRDAVRLTLGLRAGILTPVRVPSQEEEAVRDLVRARGDVLDDRRRAQQRLNAFLLRHGRIWGGPKWSIAHRAWVERQRFDEPALQEALDAYRGALEAREAELRAAGDRLTVWAGRAPLAPAVARLGAYRGIAELTALTLAAEVIDWHRFPSARAFMGFTGLVPAEYSSGARTRRGSITKAGSESVRTALVESAQAYRHRPAIGAVLRRRQDGADPGTLARSWKAQQRLHATWKKMTARGRPHGVTVTAVARELAGFVWAEMTS

SEQ ID NO: 105497 - protein, 366 aa, unidentified
MLRFRLMVKRGHRCTGPKHQEKRSMDYFAGLDVSVKDTSVCIVDDTGKITREVRVASEPDALLAVLTNRSYRFKRIGLEAGPLSQWLFSALAEAGLSVICVETRHMRAVLKAQINKTDRNDARGIAQMMRVGLYRPVHVKTLRSQKLRMLLTHRKLLQSKAIAVENDLRATLRNFGLKVGMVGTARFEARIKELVENVADLVVLVEPLLVVRRTLREQIGVLHRRLLAIVRDDAACRRLMTVPGVGPVVALTYRATVDVPARFRKSKSVGAVFGLTCSRDQSGERDRPGAISRCGDEMMRAMLYEAAQAMLLRSAKWSWLKAWAMQIARRRGMKRAIVALARRLAVIMHRIWVDGTEFRWTRQVTA

SEQ ID NO: 105498 - protein, 326 aa, unidentified
MNSVRMHIGVDVGKSSLDVCFPDGKKEHLKNNKPGRARIIHAAKKLGAIVCFEATGIYEEDLANECLAAEVRAARLDAWKTRQYAKSRGRIEKTDRLDSEMIRDFASSLEEGKLPFVKPRSAAHSRIKEYAKIRENLMKARVVVSSQLEFVRDKSARRNIIAIVERIEREIARLEDECGKSVDEDERMSSLSRRFLEVKGVGPCLVRAIFAECPDIGSFSKKGIAKFCGKAPIASKSCTVEKQSRMRRGRQGLRQAFHMAALSASKHNHVLCETYRRLVANGKPKMVALGAVGRHLAILLNNIAKYPDFKIRHEPEDGKRKLHATC

SEQ ID NO: 105499 - protein, 434 aa, unidentified
MKRRAYRATEVKNVLLEEVLRSAPAGAATAGLDIGKYEVRAVVRWKEGSFERPWKARNPSEIEAVVGLLRKVADHRALIVAMESTGTYGDALRAKLDQAGLEVHRVGGKAAHDYAEVFNGVPSQHDGKDAAVIAELAAFGKSSLWPYRPKSESDGEMAYWADWLDAQQDIQRLWTGRLESLLARHWPEATRLLELSSVTLLRALAHYGGPAQLAKDSSASARLASWGRHVLGAEKIEKFLASAAQTAGVRQGVQDIQRVQQYATMALAAYRETQKARLKLERLAQGNEVIGRQAKVVGAATACVLWVALGDPKDYPCGEAYRKAMGLNLQERSSGKYQGQLKITKRGPSIVRRWLYFAAMRTAQSVFVKPWFEAKKAKDKDRGNGALIAVARKLALALPAVGAQGKPFEPWRLFSQKDLVRKAQQAKRRAARSR

SEQ ID NO: 105500 - protein, 355 aa, unidentified
MQKYKVSFKGQNIYVGIDVHLKTWHVTTLTESGCKYSFSQHVDAKELFDRLNKKFPEAHFKSAYEAGFCGFSVHYALTELGFENIVVHAADIPTTGKEKALKTDAVDSEKIAWALKRGELTGIYIKDKRYMDDTNLMRLRQRFIMDLSRQKNRTKHLLYTQGVTYPERFRKNSTHWSRNFMKWLREEVELLSEQKMSLILLCEQVENTRKAILKVTREIRRLSTTDRYKENYNLLITVPGLGLITSMSVLTELDNNIMRFPNERSFVAILGLIPTCHDSGDRKVSGEKINRGNKHLGPLIVESCWIAIQRDIELSAYYSKCCQSMKPHKAIIKVARKLACRAYAVLKTKARYALP

SEQ ID NO: 105501 - protein, 382 aa, unidentified
MDTSKNWSRIIGLDLSKATFKGCILYGEGFVQRKNFSGEMKRDESGYVLINNTIQVGDIVLMEAGSSSFNLARYLQKNSKALDVIVLNPAHLRIIWDSQKKNDKADAMKIACIARDMRPEAWPRVTVPSEKEQSERSVIMHWVFLRKQETMICNRFFALFNSLGFPEIDKSRLKKDSDFRIQTINDLLSFNELAFTDAIMLEQQISIVQQQLAIMEDRLRNICLDHPQQALAWFSIPGIGLVNAATMIAYIGDGSRFSKPDQLMNYAGMVPKQNQSGTVDIKGKITKRGCSAIRRNIIQGAQVVMQQPPVCALTKYAYRRKKECPFNGKVAVAVANRMLRTGLALLHHDDLYRPMIQDGFDKLRRKLAENKLQALVPYLTSR

SEQ ID NO: 105502 - protein, 379 aa, unidentified
MGSEMCIRDRAWMADFAEKYGKNVVIPGMEPTGHYWFNLGAYLQDNGMKPVHVNPHHVKKSKELDDNNPNKNDRKDPKTIAALVNEGRFSYPYIPTGIYAEIRSLSNLRLQTQEEITRIKNRIARWFSIYFPEIKDVYRNPDSVSGLMILKEAPLPQDIVKLGVDGINKIWRDAKLRAAGLKRAKTLVTAAEHSIGSQEAPDSARIELKNLLNDYEIYKNREEDLMSLTEEKLSEIPHIDKLLEIKGVGLKTVSGFVAEVGDITRFDNPKQLQKLAGYAIVECSSGKHKGESHISYRGRKRLRYVLYEAAISLIARNEEFKEVHRYYRTRKENPLKKMQSVIAVACKVLRIFYTILTKGVTYDGAKMMQDIKRPQMLAA

SEQ ID NO: 105503 - protein, 351 aa, unidentified
MDSTVGIEQPQASQTHVLGIDISKDTLSICLIDGTNRQTAQSPIDSVDAVENRRRGYRSVERRIRKHKVASQSVSVVMEATGVYWEACAHFFHEEGYSVYVVNPARTGRFGSTYRQDGKTDAIDAETIARYGVSMPMRSWQPPEPLCHELRQVLRLRDATVGMLTQTKNQLHAATHEAHPCKFVVAALRRQIAFQEREVARLIAEYEKRVQASPSLGRTQHLLEAIPGIGPVIAGTLLTETGNFHAILSGRQLVAYAGMAPTPRQSGSMDLPRHISKAGNPRLRRAAYLAAVSATRTSSPFATFYKRLVGNGKPRKVALVALARKILTVAYAIVRSGTPYNPDHLSHAPAR

SEQ ID NO: 105504 - protein, 316 aa, unidentified
MEIAPIFIGIDVSKARLDVAMRPLAEKLSVSNDEAGIEALVKRLSELKPVLIVLEATGGLERSVSGTLGSAQLPVVVVNPRQVRDFAKATGQLAKTDRIDAEVMARFAEVIRPPLRPLPDEVSLELRALIARRRQLIEMMVAEKNRLSAASKAVRKRIAAHIRWLETELDRADKDLDHSIRQSPIWQEHEDLLRSAPGIGPVVSRTLLAELPELGRLNRKQIAALVGIAPLNCDSGTFRGRRGIWGGRATVRAVLYMAALVASRRNSVIRDFYKRLRDKGKAPKVALVACMRKLLTILNAMIKHKTRWSEVIPQTS

SEQ ID NO: 105505 - protein, 421 aa, unidentified
MPNIEIGVDFMVKENFIYVGIDLHKETHTAVMIDCYNQKLGEITFPNRPADFPKLVTKVKKCNTDAKEVVYGLENAYGYGRPLAVWLIDKGYFVKDVNTAISHRQAKHRGAMYRKSDSDDAEAIALATLNMLDKLPDACPNDAYWSLGQLVHRRDNIMKQRTRLVNQLHEQLCIAYPSYKSFFNDISRPTALYFWEHYPSRKYLRGKSVEDLRKELVPVSHNRCSTKNCEKILDAAASDKVKNNAYQDARDMVTLSIVSDLQHYDSQLAEVDKMLEQMYKMLGCTLTTIPGVNVITAVKILAEIGDIKRFSNANKLAQFAGIAPLHLSSSGKGKDLATKQGNRRLQATIYFLAIQMVHISSKGTPRNPVVRAYYEKRKAEGKTSQQALICISRRLISIIYGMLKSGTEYRMPVMENTGETV

SEQ ID NO: 105506 - protein, 415 aa, unidentified
MALKIVYKICCGIDVHKNFVVACIASTDGKGVTTYESHRFSTYTRGLKNLLQWLLKHNCKDVCMESTGKYWIPVYNVLENDCTIVLAHPKYVKAIRGKKTDKKDAKWIADLFKHDLVTGSFMPPADIRQLRDLMRYRFKLTCFKSSEKNRLQNCLTVSNIQLGNVVSDTFGKSAQAILDKLLENPADTSFDLEPLVYKSLKKKLPELRDAIDGYITPEQAGKLKVIKAHYENLESRKAELEELILALAAPYQQELAILQTAPGIRSDFTAIGIISEIGTNMEAFPSAKHLCSWAGLAPTNNESAGKKKSVRVSKAGCYIKPLLVQCANAVIKSNKHPEFRNRYLRIKKRRGHKKAIIAVARMLLTALYHMLKNGENYNAELYRKSEVPPVDREITVEQAIIIARNQGYKIKSATA

SEQ ID NO: 105507 - protein, 346 aa, unidentified
MGMDIAVLGVDLGKNICSVVGLDGSGAVVMRRKVRRETLIALAEKLPTCIVGMEACCGAHHLGRVFAAHGHDVRLMSPEYVRPYIKAQKNDDRDAEGIAEAATRPTMRFVELKSQDQLDMQSLHRSRDRLVDERTALINQLRAILLERGMVAPQGKRKLEQFLAVLMDEQGGEGLSPRMTLLVADARAQWAELDRRITAFDAEFVRWVKDNQEARRLMTIPGIGAIVASALVAAVGRAESFDRGRDLAAWLGLVPRQFTTGGKPKLLGISKRGNKYLRRQLIHGARAALPYVAERDTPLGRWAKGLMSRAHRNVAIVAFANKLARIAWAVLQRGERFAATGMSMTA

SEQ ID NO: 105508 - protein, 341 aa, unidentified
MDKELYFGVDVSKKTLDLAYYDGETIDWKNAHIKVSNDDAGFKKIGSWVAKVGKDFDTFLFCMEYTGLYNQNFRLWLESKEYIYGMVEPRKMHHFEPDLDDDQRSLDRIKTDELDAFRIAIYCEQNHKKILRNPSKLPSPVYFKLKRLLAERKQNTKQSTLYKQQLHDICAYDTDLSVERKKLLLKNMMENQKAIDKEIDSYMNEDASISKNYDLLTSIPGIGRIIALETIVLTENFTAISNPRKYACYIGIAPFKKESGTSVRKRTAVSKKGFSEAKADLSIAVLSAIKNNPSIRDYWIRKRKEKCGGIVLNAVKFKLVLCMFAVIKRGTPYVETDAYKN

SEQ ID NO: 105509 - protein, 347 aa, unidentified
MDQQCHYVGLDVSLETTSICVIDDAGAVIWRGKCRSDPDTITAIVRQHAPGAVRVGLETGQLSNWLTLSLRRRGVPVVCMDARHAKAALSLQINKTDANDAFGLAQVVRTGWYREVAVKSMDAHTLRMLLVARSRLVSQRQATANTIRGLLKTFGLVVARGSKGLFPVRVREQIAGNPALIAIIEPLLAVWHAIRDQVGMLDRQMLARARNDQVARRLMTIPGVGVVIALAYTAVIDDPARFRRSVSVGAYLGLTPRRYQSGEVDTTGHISKCGDSLLRGYLYEAAAVLLCRDARASILKSWGLGLAKRIGMRRAKVAVARKLAVIMHRIWSDQGEYRWTAIPPTAA

SEQ ID NO: 105510 - protein, 457 aa, unidentified
MKKKKKTVSYKRHQERKRWITGKKVIGIDPAKEKHQVTVLDERGIQMGESFSINVTHKGFNEDLWKKLGKILGEFRKEEVVFAIESSCDLWRVFAGYLHRRGYTVLLVSPLITSKTRATINNDFSKTDPKDAFLVAENAQGGKYNEYKSYCPEINKLHSLCIAHDKLTKDRNRIILRLRSLMEEIFPEYLKCMHVEIQTSLYLLGKYFLPEHFLKLDVKEEQMNIRRISNGNHNAGTLMKLKEYAQNSIGADKRGEEESVRIILDAWISQLRLIHENMKSIGNRMIELAKETEFFEIIVSVPGISDISAARLIGECRDLRLFTHYKQIEKMAGSNIRLCDSGKYAGTRRINGMGNKRLLKLIYIMTTQTARFMPEVRIKFIKRQMRNKSYRKNIFAASSILLRLLMELIKEKRTYEFRDDKVMELARLELKYDPEGMKGKKRKMKRKNKKNAAQEAA

SEQ ID NO: 105511 - protein, 338 aa, unidentified
MDKYSGIDLHANNCVVVVSDEEDRICCERRVPNDLAKVLALLEPFRSDLVCVAVESTFNWYWLVDGLRAAGFDVKLVNTAAIAQYEGLKYSGDEHDARHLAHLLRLKLLHFGYVFEPEWRAVRDLGRKRLQLVRTRTTHVLALETIYARQTGGHISGRAAKQIDIEDVARLGWSEDVTLAAQVNVLAVQAMERGIAILERRLHERVKLLPEYAVLKTVPGVGEILSTVIMLETGPIDRFTSAGNYASYARCVGSGRYSNSKKKGEGNRKNGNTYLAWAFVEAAHFALRYNDAAKRFYERKRARSNTALATKALAHKLARACYHMLKGQIVFDEKRCFA

SEQ ID NO: 105512 - protein, 314 aa, unidentified
MDSADVAVGIDVSKAEFAIAAHPSGETWTTRTTADAIDELVHRLAILQPAVIVVEATGGYEMALVAACAAAQLPVAVVNPRQVRAFAQALGRTAKTDAIDADVLALFGARVQPAPRAVPDAATQALAALIARRRQLLEMLGAEQRRLEQATTNAVRRDLRNHIRWLERRVKDVDDEIGGAIQGSPIWRVQDDLLRSVPGIGPTVARTLLADLPELGRLDRRAIAALVGVAPFNCDSGQFRGRRKIWGGRPAVRKALYMAALVAARHNPLLARFYQRLRAAGKPGKVALVAVMRRLLTIINAMIKHQSAWRPEAA

SEQ ID NO: 105513 - protein, 406 aa, unidentified
MITVGIDIGKERHAAAAIAASGEVLVQPRFFGQNAEGFAALLAQLGKLGKAADIRIGMEATGRYWLPLRHALAEKGYRVESVNPLITSAEIAKDVRGRKTDKADALAIAFALLRNRHNPAPAEDAAADALKSLTRHRTFLVRQRSNVKRCVHAALDVTFPEAGAALGPLFSATALAVLEAFPSARLLSGANLRTLAAIASKASRGRMAADYARSVRDAARTSVSAGITNEGDEAALVSLIEQIRFADGQIEKAEEKIRAMPAPKAAALLASVKGLGTLLPRVIASEIGDMGRFRDPPSGKPPRDMDKRILAFAGCEPRLRESGKWKGRTKISKRGSPALRTALWQAASMCRLHNPLFTQVYERQVKRGKPHSVAIFYVARKLIEVLCGMYKTGTPFSPQYAGGTAC

SEQ ID NO: 105514 - protein, 399 aa, unidentified
MKTTDRTAVMVGLDVHRRFSTVTARNAEGKIAWRQRLEHEDRNGLRKRLEDWPRGVPVILESSFGWEWMCEELEQAGLEPQLASSRKVAAWRDARGMAKSNRTDADLLSELGSQTDWWWQVWLPPQEVRDRREWLRYRMSLVRLQTGLKNRIHAILHRHGILHDFADLFGAQGRRMLTRLANDIQDQRLRASARATLKGYLQLLDQLRRQIATVTRTIYRQLRATPEGKRLQGLPGVGSVLAHTILAEVGDFGRFRSAKHLSSYSLLAPRAFDSGEETDVAPKGRHVGHMGRRTLKWAWIEAAHGAVRRGGRFREVFDRYTDGGKRNRNRGYILVGHELCRTAYAISKKETQYRDDPPQRPGSSKQGAASRQHNRRRNATSQNSRPGTGQPDHGLVVVG

SEQ ID NO: 105515 - protein, 337 aa, unidentified
MNNIEGCGVEVSARELVVARKGKAGVQLTRFANTAAGHRQLLRTLTRGGQRVRVVLEATGLYALDLALLLSAQEQVQLMVANPRAVRHFAQAMMQRSKNDQLDAVVLLEFAERMPFTPWVRPAENTLALWAIARRLQALTKLCTAEKNRAHAMGLSEAIPAMVRRDIARSLQFHQRAMKKLRQQALQCIAADAQLQQRYQLLRSVPGLGEISAVQTLAELLLLPADRDVRQWVAYAGLDPREYSSGTSVRKYTRISKVGNAHLRRALYMPALVASRVEPHLRGFYEHLLARGKSKRQALVAVARKLLHAIYGMFRSQRPYDGTRVYLAAAAQAEKFS

SEQ ID NO: 105516 - protein, 432 aa, unidentified
MKFNQSNKQNQRISRISETTLVIGTDIAKHNHVARAFNYRGIELGKRCLFQNDENGLLNLLAWAESIKQEQGLTDVLLGVEPTGHYWFPLFHFLKQRGIEVVLVNPHHVKKSKELDDNSPTKNDIKDAKVVAKLVIDGRYTQPQLPEGVYADLRVLMNQRDRLCGDLNRVKGRIHNWLDRFFPEYTQVFKDWEGKASLITLQNFPLPQDVIAAGETTIAAIWKKNGVNRAVGPKRAELLYRKARKSIGLTEGATAARHELAMYMEQYVMLCRQIEQLMELVAGLVEQIPGAAHMMSMPCIGLVTVAGFLAEVGDLSGYDHSQQIVRHAGLSLRENSSGLHKGETTISKRGRCRLRALLFRAALTMVAKNPEFRALHVYFTTRRDNPLKKKQSMIALCNKLIRVLFELGRKQKNYDASKVLGPHREAQLQAAA

SEQ ID NO: 105517 - protein, 377 aa, unidentified
MHSENIAAYVGLDVHKETLAVAIAAPERLGEVRYYGTINNEAQAVRRLFQKLQGLYGNILSCYEAGPCGFGLYHQLTAMNIKCQVIAPSRIPKSPTDRIKNDHRDAISLARLLRAGELTPVWIPDLTHEAMRDLTRARAAAKRDSRVARQRILSMLLRTDKHYAGKHWTGKHRTWLANQSFSQPSQQIAFQHYCQSLEQIEDRILQLDQEISRLLPEWSLCNLVCQLQALKGVGQLIAITLVAELGDFSRFSNPKQLMAFLGLVPGEYSSGNSIRPRGITKVGNSELRRLLYEAAWSYRTPAKVGAWLIYYRPDSVTQYSKDIAWKAQQRLCSRYRSLTAKGKKSQVAITAVARELTGFMWDIALAAQSSFSQQKQN

SEQ ID NO: 105518 - protein, 401 aa, unidentified
MVVVAVDVGKNTVALSVTDEQRHRLLGPVDFAMTRPGLAATLARIQEVVPATAVVRVGIEAAGHYHQPLMVSSSWPAGWELRELNPAHVTEQRRVQGRRRVKTDAIDLEAITELVLTGAGSVVTDRALVIGELAARFAHRTRRVEARSGLKNQLLGQLDRAFPGLTLVLPDVLGTKVGGLVAEHFADPARLMGLGESRFIRFAATRGLQVRRPVAARLMTAARDALPTRDAAVAREMLAEDLALLKVLDGQVAAVEEQLAVVLPASPFAVLTSVPGWAVVRASGYGAAVGDPDRWPGPRQIYRASGLSPMQYESAGKRRDGAISREGNVALRRALIDLGIGLWLNEPAAKAYAAGLRARGKKGGVIACALANRANRIAYAMVRDQSRYDPTCWTQTTEQEA

SEQ ID NO: 105519 - protein, 359 aa, unidentified
MLHAGLDLSRKRLDVCLLSDQGELVDELAAVPDAGGLKTLADRVGEQEEPVCAVIESMTGARFVHDTLESHGWSVEIADAQKVKGLAPLAVKTDRIDARVLAVLSQRDLVPAIWLPDPRVRRERELARFRLHLVKHRSQLKHRIHSALMSFGRPCPVTDLFGVEGRELLGRLEIPEPWRGNIDASVHLIDCLETQISEINAELRSGGADHPYVPKLLTVPGIGWVLAFTIAAEIGDITRFETPTKLTGYTGLCPRVVQSGESDRRGPLTKQGPRYPGRHRPQAPDRGLAHALAPRALQPTCPGELPLLSDRLTVLHGIETPGQLPGTICAQSAEREMSPTHPPAGSGPTTRATPGRSPP

SEQ ID NO: 105520 - protein, 453 aa, unidentified
MELDPGFLEHLRLSPRAVIGSGARLLEFLFAGPHADDATQEEEMELLHRRCCGLDVHKETVVACLRLVADGKVTTEVRTFQTTTADLLRLSEWLAANDCTHVAMEATGVYWKPVWHILEDGEFELVLANAAHVKNVPGRKTDVNDAMWLAELLAHGLIRASFVPDTQTQEMRNLLRTRKQLVREQSSHVLRVQKTLEDANIKLDSVLTDLMGKSGRAMIEALIAGETNPTKLASLADRRAKASHEEFREALRGRVTKHHRFLLRLHLNQIDALNAAMATLDAQVEANLGPFRTAVEQIISIPGIKNLGAHVIVSEIGIDMSRFPSDAHLISWAGICPRNDESAGKRRSNRLRKGAPWLKTTLVQCAWAAVKKKDSYLQAQFHRIKARRGPKKAIMAVAASILTAIYHMLKNGTMYKDLGRDHFDRRSTDQQKHRLVKRLADLGYAVDIKPLAA

SEQ ID NO: 105521 - protein, 403 aa, unidentified
MRVPAALDKAWAGIDVGKGHHWVCVVDRDGRQLLSVKVANDEAEIAAVIGSVTRLAGKLTWAVDIVGAPSALLLALLSQAGQPVRYASGRLVAAMSGAYPGEGKTDPKDAFVIAETARLRRSLPVIDHKTDLVRNLSLLTAHRADLVADRVRMINRLRDVLTSVFPALEREFDFASCKGALVLLTGYACPARLRRTGQARLAGWLRQRRVRGYAGVAARAVAAAQSQRITLPGQDIAASIVCELARNVLVLDQRVAELDKQIAALFAEHPQAEVIQSMPGFGPILGATLLVTAGDLAAFPSAGHLAAAAGLVPVPNDSGRRTGNLHKPRRYSRPLRRVFYLSAQTSMMRDGPSRDYYLKKRQHARAHNQAVIALARRRVDVLWALLRDNRTYAAIPPAPAIAA

SEQ ID NO: 105522 - protein, 347 aa, unidentified
MTHYIGCDVHKKYSVFAAMDDKGNVCTSRRVEHDLDIFRSYLAELPPGSPIAVETTGNWYWIIDEIERAGHLPELAHAVKSKLMMGEINKTDKLDASGLATLLRNGTLPSVWIPKGELRDQRELPRMRLVLVHMRTAIKNRIHATFAKYAIQFESESDLFGTRGRQAMSRRLPELPPETRHSVEQEIMLLDELAERIDQAEQRIHEVIKVTPEMKLLMSLPGVGPVLSITIALEVGDVARFPDSAHLASYSGTVPRVTSSGGKTRFGRTRPDVNHYLKRAFVEAANVVVLNQTRWPSRHVVRLYQRVKANKGHGKAVVAVARHLAESTYWILKKKEPYEEPVSKKQG

SEQ ID NO: 105523 - protein, 405 aa, unidentified
MIFVGIDWSEAHHDVCVLDDQGMVLAKGKVSDDVSGVGRLHAMAAEHAEDPSEVVGIETDRGLLVGSLVQAGYRVYAINPLAASRYRDRHAVSRAKSDPGDAKVLADLVRTDRQNHREVAGDSELAEAVKVLARAHQNLIWSRQRQVNALRNTLREFYPGALRAFTTSQLATIEACSVLAMAPTPTWARDKLTLQRLRRSLSASGRKRNLDRRAKQILHALQAPELSAPALVEQAYGEVVGSLVVVIDGLTHQIAKLEAELAERFEGHPDAEIITSLPGLSSVLGARVLAEFGDDPTRYQDARARRRYAGTAPITRASGTRLVVLARVARNRRLFDACYLWAFSSITTSAGARRYYDAHRARGKTHHQALRALANRWIGILHGCLTRHEPYRENVAWVAPVEAAA

SEQ ID NO: 105524 - protein, 343 aa, unidentified
MQKQSYAGIDLHSNNLFVAVVDQSGKRLSHRRLPCSLDEVLEYLNQDGVGEIKEIAVESTYNWYWLVDGLKNAGYHVKLANPAGMCQYNGLKCADDKSDAYFIAELLRLGILPCGTILEPPARAVRDLLRRRQLLVRKRTSLILALKNQHIRTHGQNLSLARVKSSSPEMMAGLFEDCHEQLAAEITKDEIEHLDGNIKRIEKACWQQAQKAQGYQSLNTLPGIGLVLSGVICLETADISRFASPESYASYCRTVAAKRTSNGKSKGENNAKCGNKYLAWAFIEAANLARRYDENARRWFDRKAAKTSKIIATKALACKLSKAAWHLMRNSGSYDPARLFGTT

SEQ ID NO: 105525 - protein, 285 aa, unidentified
MSSEKYIGLDVHQATISVAVMDSQGKFIMESILETKASTILEFLAGLRGSLFVTFEEGTWAAWLYDLVKPHVTEVLVCNPRKIPLLKQGNKSDKIDARKLAERLRLKDLKPVYHGETGVRMLRELARSYLTIVKDLSRVMNRLKALYRSWAIPCAGRDVYYTRHRSQWLEKIPEAGTRRRAEQLYQQLDLLQHLRQQARRELLAESRKHAITAKLRKIPSLGPIRSALAVALIQTPHRFRSKRQLWTYSGLGLETRDSGEYCDLRYVHCLSLAESNGTLGFGSTH

SEQ ID NO: 105526 - protein, 397 aa, unidentified
MYIVGIDIAKRKHEAAVIDGEGTVIIKPFSFTNNCSGYNRLLAMLAKAKLPLDEVSFAMEATGHYWLALFTRLQKEGFRVQVINPVQTNSIRSFYIRQAKTDPRDALLIAEVIRFGHFSESTLHPENIYELRELCRGRHAIVSMQADVKRKVVALLDQVFPEYETAFTNLFGDTSMAILQTCPTPKELSEMPLEELCHLIEVPSHKRFRMAKARELQALARNSFGFAMAGDVFSTMIRLYAKHLDFLKQQVREMDRKIAEIMDTLDTPITTITGIGPTLGAYILSEIGDISRFSSAAKLAAYAGIDPTMRQSGEYNGVRNRMSKRGSPYLRHAIWLAASSAVLHDPALKLYFQKKRDEGKPYMASVGHACRKMVSIIYAVMRDNKAYTPCIPNEISA

SEQ ID NO: 105527 - protein, 408 aa, unidentified
MEKKAKQTYQFLLRLNEGGGIDVHKQTFKVAACHENEVPQERTFGTFTKDIYAMRDFLVEQKIKHVVAESTGVYWKPMYRILTAAGIEVSIVNPARVKQMPMEKTDKKDARWLAKLLMNDMIKKSFVPDDQQEQLREFSRMRTKYIRQMSRVKNQIVRLLESCNFKIRSIVSDISTKTAQKLINAISNGQTDPALLIALCHHSVRKRQGDERLKLAMDGRFTNYMQQQLCMLLNDLYYFEKQKKQTDNVLEELFTSEQIEKIKKLDEVDGVSKEQAEIIMAEIGAGIDSFGEADQGAKYAGLTAGQRETADQPKPVRAVPGNKHLRVVMVQIAWSAVKVKNGYWKAEYQYLKKRIGAKKAILAIARKIFKAIYKVLTTAHRYEQWDAKKFYDNRIKTIEFKKRLSMVV

SEQ ID NO: 105528 - protein, 344 aa, unidentified
MIYVGLDVHKGFSRMGMFDPATGELQDLGQVSNDRHALQASLQGMRGPKTVVLEAGRSSHYMAALLEPMAEQVWIVDPGEVRRLQQSVAKTDRRDAAAIAWWAAKGVLKPQWRPDAQMLDLRELTRGKTALTRLSTQLRTMIRMLLARHGYECPHRDLLSHRTQIWLDTVTLEGYAGEMLSVLMELLHIVQQRADDFERKVEQAAISNPAARLLRTIPGIGPFLSLAMAVEIGDVRRFPSPCHLRGYSGLDPSVYQSGDKDARGPLTKKGNKWLRYAAVLAAQRIAQMREPDPRLKRTFLSVAFRHGRNPGKIAAARRLLDLVYHMLKKEEAYRAPTARAASTV

SEQ ID NO: 105529 - protein, 349 aa, unidentified
MGMLAEQVDHVIGVDTHRDSHTAAVLDLTGGLVAGTTIPADAFGYKRVLAFGRSHAPDRRAWAIEGTGSFGAGLTTFLLEQDEWVVEIDRPARPARRDGAKSDELDAARAAREALSREHLAQPRCRGEREAIRVLLTTRHGAVLARTKAICHLKALLVSAPEQLRHHFRKMTTDEQLTRCARLRTSASQTAEHRCTIVALRSTARRALALEADADDLETEIEQLVKRVAPRLLSEPGVGAISAAQVLCSWSHPGRIRSEAAFAALGGVAPIPASSGQTVRYRLNRGGDRQLNRALHTIVLSRLVHHPETRAYAVRRAAEGRTPREIKRCLKRHLARRLFKLLEAPPDDA

SEQ ID NO: 105530 - protein, 341 aa, unidentified
MGEVIIIGLDLAKSVFQAHGADASGAVIFRKKLRREQVAAFFAKQPACIVAMEACASAHYWAREIAALGHETRLIPPAYVKPFVKRQKNDMADAEAICEAAQRPTMRFVAVKSAEAQAATVVFRTRDLLVRQRTRLINALRGHMAEFGIVVRQGVGHVAKLIDFILDPCSDLPQEGRQILALLVQSLQQLQVQIGVLDAEIAARAKTNSTARRLMTIPGIGPIGATALVALAPPAHTFKRGRDFAAWMGLTPLQHSSGGKERLGKTTKMGERSLRRLLILGASSTVKAATRKPPAPGSWLGRMLARKPRMLVIVALANRMARIVWALMAHGGTYRAPAVTA

SEQ ID NO: 105531 - protein, 402 aa, unidentified
MNCVGIDVSKGKSMIAVMRPFGEVVVSPFEVRHTANELSELAGLLKSLDGETRVVMESTGNYHAPVAWLLHDAGLYVSVVNAMLVHDYGNNSLRRAKTDKKDAVKLANYGLDHWLTLPRYIPEEDTRLMLKICYRQYQQYSKVQTMLKNNLISLLDTTFPDANRLFTSPPRADGSEKWVDFVAAFWHCECVCGLSEKAFTAKYQKWCKKHGYNFSEDKALGIYASACGHFGVIPKTDTAKLLVEQAISQLQTTSSALAALKQEMQSLAASLPEYPVVMGMFGVGPTLGPQLLAEIGDVRRFHSKKALVAFAGIDAPPYQSGQIDVRSRSISKRGSASLRRTLFLVMSVILQCAPIDEPVYQFMDKKRSEGKPYRVYMMASANKFLRIYYASVKAYLESLEHD

SEQ ID NO: 105532 - protein, 455 aa, unidentified
MSKSNRTDTPLRAARAQISNPEITVHAMYRSAIGIDVHLNLLVCCHQKQVAGHREQSESRDFNTDRASIDAFAAWCRECNPDIILMESTGSLWQSPYEALERAGFTSEQLALINARDAKAAAGRKTDRKDASRLASLARTGNFKKSFVPEKAFRLQRVISRDLQKNRNDISRTSNRFGKSLNLTGCRPTTVFSDIRGGKAASLILMAKLRDDPHLFDVIKQNSRRLRASPEQIMQALNFEIEPMMKEQILALRKKIDQLEEYDRSTFERLRQLQAPYEKDIQLLITITGIQERSARMIYAELCPDLKEHFPTSEQFASWLGICPGDNTSAGKQKSGKCPKGNKHLRRTLIEAARGLAVGGTAALKEKFQVLKMRRGYRRAMVAFAHLLARIIYSVLTHQKGFEPYQSTAFRDTLMERAKNGVKQLLKLKGTKYVIADGLVVETKTGAILGAVVSS

SEQ ID NO: 105533 - protein, 388 aa, unidentified
MNVGADKSEPLTAIQTNLGAIFVSLELSRSSWLITSLSPGGGEKMSKHSVPGGDFAGLMERFAQLQEKARRRTGQSFRIIVVQEAGLDGFWIHRALQNEGIESYVVDAASIATPRRRRRAKTDKIDGETLVRALLAYKRGEPRVCAMVKVPTPSEEDRRHLCRERKALTAERVRHVNRIKGFLFSQGVSGYQPLRRDRRQRLEELQTGDGRAFPQHLKALINRELDRLELLLKQIKTVEAARDALLAVEQTAMPAPAAMLLDIRGIGPEFAAILWSEGLFRHFENRRQIAAYAGLAPTPWQSGAVDREQGVSKAGNPRLRTTLIQLAWLWLRNQPRSALSVWFHERVSRNGGRLRKTTIVALARKLLVALWKYVTAGVVIEGVTMKVA

SEQ ID NO: 105534 - protein, 377 aa, unidentified
MHKDGSAFVGLDTSKLKISVALAEEGRQGEIRFFGDIENTPGAVRNLVTKLTGKYDKLQFCYEAGPTGYGLHRQLTDLGQDCVVIAPSLIPKRPGERVKTNRRDAVSLARLHRAGELTAIWVPDAEHEAVRDLVRAREAAMLELREKRQHLQSFLLRHGRIYAGRRPWTKVHARWLSNLTFSHPAQYLVLREYRQSIEDAEARLERLTDQVAEVVSSWSMSPVVDAYQAMRGVAFLTAVIFVAEIGDVRRFETPRQLMAFLGLVPSERSTGETVRRGGITKSGNPRARRVLVEGAWTYRYAARLSRPLEVRQERLPKTVRAIAWKAQLRLCARYRRLAAAGKRQTVVTTAIAREMAAFLWAIGREVEPLQPKQVAAC

SEQ ID NO: 105535 - protein, 415 aa, unidentified
MSLGGYIMQVTFGIDVSKSTSTVCELIGESKNELTITNNRPGFIQLLNELTAFSKHPQIIFEATGVYSRRLQAFLEDYGYEYVVLNPLKAKKEMDMGLRHNKTDKTDAYHLALIQRLYHHPINQLQSQTYKQLNALSRFYDQLTADLVMAKNRLHQALQSTFPEIENLFSAAKGKNYWQIVNHYPHCDLVRKDDKKQIINWLMKLKGIAFNHAQRTTDKLIELAHLAYPVVSCSDIEVQQAQYYARRLLNLSNQRQRIITKMVKLAKTLPNHDLENLESIPGFAQTTAVRVLAELGDLRRFSNPNKINAFIGIDPGRYQSGEMDSNLSITKHGNAVARKLLYRAIGQIDNAAKTNPCHIADYYESKKLSSQTKGFKKIAIASIHKLIRTIYALIINDQPYDYNVATHNQKDFSRN

SEQ ID NO: 105536 - protein, 338 aa, unidentified
MAIVTVGIDLAKNVFAVHGVGESGKPELVRPEVRRDKLLNLIGNLPPCLIGMEACSGAHYWAREFQKLGHTVRIMAPQLVAPYRLGGRNVKNDAADAAAICEAVARPNMRFVPIKTLEQQSKLFVHCAHQGYVCERTALINRVRGLLSELGIILPQSQKAFKQGVHQVLEDLPGYCNLVIGEMLSELSNLEERIAQNEKTIAQLAREDEQAQRLMQLRGVGPTTATAIVASIGNGHDFRNGRQFSAWLGLVPRQNSSGGKTKLGRITKAGDSYIRTLLVLGARSLLISAKNKKDPVSRWALQLKERRGFGKAVVAIAAKNARMCWATLHLGDGFKMPA

SEQ ID NO: 105537 - protein, 412 aa, unidentified
MDVIVERPAALDVHKAQVTACTRVPGEHGERVQHLAEFKTTVRGLLALRDWLASHGVTQVAMEATGVYWQPVWHVLEDDFELLLVNARHVKQVPGRKTDVSDAEWLCRLAEAGLLRSSFVPPKPIRELRQLTRYRKAQISERQREANRLHKALEDSGIKLDCVATDILGKSGRAMLNALCSGTTDPAVLAEMAKGRMRTKLPELREALEGRFNELHALLIGSILAHLDFLDGQIEALSQAIEVKLAPFASAVELLRTVPGIEQRTAENVIAEIGVDMGQFPSDAHLASWAGQCPGNHESAGKRKSGKTRKGSKWLNEALKEAGMGAIRTNGSYLQALYRRKKSQLGHARALGAVKHSILCSIWHMLSTGELYNDLGADYHARRNPERQTKRLVSQLEALGHHVTLQAVQVAA

SEQ ID NO: 105538 - protein, 337 aa, unidentified
METQLFMGCDISQDSFHYCLCSKSDILQEGHVVNAIKPIRAWLKNLQKNHKLDLSQIIFCLEHTGVYSAILLRELSSLSLTIYLESAVNIQRSLGLQRGKNDKIDAQRIAQYAMRNADRLVQWKPKRQIIERLQILIRMRERLIKARTEISRFNQDAKRFLLKEECQLVIEGSKKTLEAIAKDIQKVDDNIKSLIKSDDNLTRLTKLITSINGIAWVTCSTILVRTNEFKDFKEAKKFACTAGIAPFEHSSGKSVRGKTRVSHFAHKDLKTLLHMCAVGCISRKGELKDYFDRKVGQGKNKMSVLNAIRNKLVRRVFAVVRDNVMYDKNYKYTLRMV

SEQ ID NO: 105539 - protein, 376 aa, unidentified
MTAATRSEMSSVSEPTLYVAFELSKKEWKLAMTSGFGVQPWLRTVASRDWPGVERGIARGRARFGLSATAPVVSCYEAGRDGFWIHRALVARGIQNRVVDSASIEVNRRARRAKTDRLDALKLVMMLVRVCAGETRVWSEVHVPTVAAEAARQVSRERTALTQDQTRLVNQMRGWLATWGATLPSRRREPWWTTVRDWAGAALPAEVQARLARAEVRLQALEAQIAALDAQQHAARTTAPAASPLRQLVQLKGVATTGASVLLDEGLVWRAFRNRRQIGGLLGFAPTPYDSGETAREQGISRAGNARLQAVSIQLAWNWVRWQPQSALTRWYQVNFGQGKRARRIGIVAVARKLVIALWRYVTRGVLPEGAILKVA

SEQ ID NO: 105540 - protein, 343 aa, unidentified
MQIRSVGIDLGKTTFHLVALGDSGKVLLKKKFSQKQLIVFTANVQSSLIGMEACAGAHFLGRALRAQGHNVKLIPAQFVKPFVKSNKNDFIDAEAIAEAVDRKNMRFVAIKTDDQLDLQALHRIRQRVIQRRTAVINQIRAFLLERGMVFAKSPIRLREAIPTVLENAEENLTPRMRNLIAMMWSEWKDLELQLAAMNAEIEQIASSDAACQRLRQIPGIGPLVSTAIVASIGNGSAFKKGREFAAWMGLIPRQHSTGGKARLYGITKRGNRYLRMILIHGARAVVLRSKRDRIAMGPWITALERRAPRNVLIVAMANKLARIAWAVLSTGQDYRAVPNSLEA

SEQ ID NO: 105541 - protein, 374 aa, unidentified
MTMMQHQRSRYIGLDVHGATIAVAIAEEDGPPTSYGNIANDPSAIRKLMTRLGGPEVRLRVAYEAGPTGYVVHRQLASMNVECMVIAPSLIPVRAGDKIKTDRRDALKLARLLRSGDLTAVWVPDQAHEALRSLVRSRADAKADQLRAKHRLSKFLLRQGCKPPFGVRSWSVRYFQWLRQLQFEHVADQVVFADYLAEVTAEGERIKRLEAALHQCAETSAQVALIRALQAFRGIGFLSAVTIVAEVGDLRRFRTAPQLMAYAGLVPSESSSGSKQHRGPITKTGNSLLRHVFGEAAHHARHAPRIAGTLKQRQAKLPQPIVDLAWQAQLRLHARYRHLGSRIGPHKAVTAVARELAGFIWAVGQLTEEVPTAA

SEQ ID NO: 105542 - protein, 418 aa, unidentified
MMPRFIGVDIHRDFAQIAIVEDGLVVDAGRVDCRPEALRKWAAQLTIDDQVALEATGNSDAIATLLSQHAGRVVVSNPLKTRAIAEAKIKTDKVDARILAQLLAADFLPSVWLPDDRTAMLRRMTTARAHLVRQRTRIKNRVQAVLHRNLMPRPPVTDLFGKTGRSWLELLPLPEDERASVTSLLRQLDFLGAELTDADRAIAQQALGDQAVRRLMTIPGVDVIVAVSIVAAVGDFSRFESPDKLVAYLGLHPKVRQSGNSPAIHSHITKTGRASTRGMLVEAAWIAAKAPGPLRAFYHRIKQRRGFQIAVVATARKMLVLAWHLVTKDEDYAFARPSLVAFKRRKLELTAGAPKAHARRGTGYDYNDKQLRRFERDLVEKSEQAYERLVASWQPSRPAGADRIDFHPTDKEQMPTKA

SEQ ID NO: 105543 - protein, 315 aa, unidentified
MTQEKVWVGADICKAHIDVYILPEAETCQYDNTPEGVEALMMKLKALSPQLIVFEATGGLERLLVERLQAHELPMAMVNPRKIRAYALALGKAKTDILDAEVIARFAESIKPTPQPPGTDEAKKLRDLVTRRRQLVTMRVSETNRLSRCPESIEADISEHIEHLSQRIDQLSEEIKALSKQQREWEQKRKILLSVPGVGPVSAALCLAELPELGTLNEKQIARLVGVAPINRDSGKQKGKRMIQGGRTHLRCGLYMAALVATRFNPVIKKFYQRLIKRGKLHKVALTACLRKLIVILNAMVRDHRMWQVPAQVDS

SEQ ID NO: 105544 - protein, 388 aa, unidentified
MNRILKIGMDVHSTNYTLCAMEPTIGSEDRVYGEVQVSPDYKEIICFIESLKLKLGINDKYSIECGYEAGCLGYTLYHQLTEAGINCVILAPTTMLSSQGQRVKTDKRDARLIAQCLCYGGYHAVYIPTGEDDAVKEYVRMRDDHKLALKKLKQQINAFVLRHGHQYERTKWTQKHVTWLRKLELDPMYRETLNEYMASYEEQEAKIERYDKRIEEIAAEERYQENVKKLGCFLGIRTHTALSLIVETGDFKRFAKGNTYAAFLGLAPGEHSSSTSVNRLGISKAGNTHLRCLLIEAAKGICKGAIGHKSKELRSRQSGQSAEVIAYADKANNRLRSKYYKMIRHGKKKNVAVTAVARELACFIWGMMTDNISITSSTGTSVPAVSQG

SEQ ID NO: 105545 - protein, 309 aa, unidentified
MTKSITFVGLDVHKNSISVALADSGRNAEVRNYGIIGGGLDDLDRLVKKLSGHDKEFQFVYEAGPCGYEIFRFLTAQGLECSVCSPAHTPKSAADRINTDGRDAMMLARLHRAGELTYVFVPRADDEAMRDLTRCREDAKKAQRVTQQQLGGMLLRLGYRYEKDNWTKAHFGWLADQKMPTDSQQVVFQVYINAIKETTNRVDRLTKQIETLVPAWRMAPVVTAFQALRGVSLIVATTMVAEVGDLTRFENPKQLMAFLGLVPSEHSSGEKKRRGRITKTGNGHARRVLVEGAQAYRHRARLTRPLIKR

SEQ ID NO: 105546 - protein, 343 aa, unidentified
MTTVNTIGLDIAKNVFQVHGVDEEGCVVIRRQLRRRQVLNYFSKLSPCLIGIEACGTAHYWGRELHKLGHDVRLMPARYVKPYVKRNKNDAADAEAICEAVTRPTMRFVPIKTIDQQSVLMLHRTRQLFVRQRTSLINGIRSHLAEFGIVAGVGRHGVEVLLDLIRKGEDDRVPPTARDCLMALAAQLELIKRQILEIDRRVLAWHRSNNMSKRLEAIPSFGPLVASAIVASVPDPHVFRSGRDMSAWIGIVPRENSTGGKQRLGSISKAGNRYLRKLLFIGALAVIKRVKKVGSSKHPWLASLLERRSVKVAAIALANKVVRIAWAMMTRSETYRASQPVAV

SEQ ID NO: 105547 - protein, 348 aa, unidentified
MKKTVKQVVGIDVAQKELVVSLGRMHDDWTPELYASKTFANTQKGFISLVSWIKKLTDQLTTVRYVMEATGVYHESLAYFLDQQGHEVTIVLPNKISNYMKTLSVKTITDKTAAEAIAMFGLEKKLDVWKKPKPIFKKIRQLTRERGQVIQARTVVKNQLHAEQAEAEPGENTIQRLKKQVVFLNNQEKQIKQELKALLQSERQVKDTMRVITSVPGIGELTAASVLAETNGFELVRSRRQLASYAGYDVREKQSGTSVKGKPRISKRGNKYLRKAMHLPSLTAIRHDEGFKAFYARLMAKHGIKMKAAVAVQRKLLELTYTIYKTGRPYEKNYLSKNAKAEVIEAIG

SEQ ID NO: 105548 - protein, 464 aa, unidentified
MNPVTVSASRSSDCLLVGDDVSSIRNDVCVLSATGEVLLNHQPFANDVPGYHALRDTVLALLDQTSAGGVDYAGEATGWYWFHTFYALAHDEALNGIDLRLSLFNPRQTHAFKKVMASRDHSDPKDARVVAERARFARAEHPPVLEDTWLGRRLLTRHYYHLSHALAAEKTYFSAFLFLKASAYRQLKLFTDVFGATSSAILTQYSTIQELADLPLAELEGLLKTLSHNHLPDVEEKAQRLHAVAVNSFPVPPHMIEPLNFVLRSTLEHIRFLEQQLGDTVAAIEQAFAGVRELAWLMSIPGMGLILAACLLAELGPFDRFFNGTVTNHKTGHTRAKNARDAEASIAKWVGLWWPRHQSGTFEGEITRMAKDGNRYARYALIQLANCLREHSAEFAAYYDRKHAESKTHAHKRALVLSARKAIGLIVALLHTSQTYRAPEPYRNVLSPHQARKQAVDSAATAAP

SEQ ID NO: 105549 - protein, 460 aa, unidentified
MNQFYLGIDASKGYSDFVMLNAKKQPVIENFQLDDTFDGHARLYQRLGSFNQDHPQATIYAAVESTGGYENNWFQSLLKFQDSLPIKTAHLNPLGVNYNHKADLKRNVTDKISAQNVAEYMIAHPEKVSYQHQGSLASLRKQWGFIAMLTKQSGQLLNQLESLVYNANPEILMYCKDGPPQWVLKLLTRYPTALRLSKAKAKSVARIPYVSRERAQQLVATAKKSVASADDDVTEQLIVATVKQVLGLNNTIKAQAKILTDKCAVPEVELLKTFIGIGDYSAIGLMLEIQSVQRFMSSKKIASFFGIHPVYKKSGDGTWKYRMSKKGRKEPRRILFMVAMSAIKSNPLIRSIYQQAVGRGMEKKAAVGLCMHKILRIIYGMLKHNQAFDPEIDRKNRQKKPLQQRRVRPDKDRRYQDFDSKAPISSRQKKKREERKQSQNVSNVEYGINEASVPITELTN

SEQ ID NO: 105550 - protein, 369 aa, unidentified
MPPASHPEVTPVKYVGIDVHKKMCQVAVLDDEGELLDETRFMNTPEGIEEFAQRLSAYGDEVRAVVESTGNLWIQVHDRLEVHGYDVALSSPANSRLVSDSKVKTDRTDARALARLHRAGVLSTCFVPGEEERSRRELLRHRLRLVKNRTAVRNRIHSLLDKHGLRIPYKTPFSKKAVRWMRERSLGFMDDAILRSDLALLGALDEQIGYVEEKLAALSVDDARVRLLMTMTGIDYFAAMLVLAEIVTIDRFSSDKRFSSWMGLAPRVRQSGEKTWIGGVGGPGNRRMRWLMVQCAHSACRFDPRLRRLYDRHSRRKGEKSAVAAVAHEMARVMYFMLKRNEPYRGVNRRLWERKLKSLEKRALNGLRN

SEQ ID NO: 105551 - protein, 319 aa, unidentified
MYKVIGIDVSKATLDGCFLDGSQKESFVVSNTQQGFKKIALKAKGALVVMEASGPYYLQLSNYLHTHGIEVSVVNPLVIKRFSQMNLQRAKTDKKDAETIANYGRIYDPKRWSPNSKNTNSIGQLHSAMELLDKQIRQLKGQQEAFDNSGELASLLRKELKSMVNFLVKKKLSLEVERLAEQGFGEKIDEITSIPGIGKKTAIMLNVITDGFTKFEHHKQLTAYIGFSPRVYQSGTSVKGKGHICKMGNAQIRKLLYLCSWTAKFCNKACREMYERLKEKGKPERVIKIAIANKLLKQAFAIGKSQMNYSENHGDNICF

SEQ ID NO: 105552 - protein, 316 aa, unidentified
MNQTAYWVGIDVSKAQLDGHIRPTAEAFQVANTEAGIAALVQRLQQLQPTLVVMEATGGLEAPAAAALALAQLPVAVVNPRQVRDFAKATGKLAKTDAIDAQVLAHFAEAVQPAVRPLADAASQQLAEIVARRRQVVEMLTAEKNRLGTVRGAMQQDIEAHIAWLETRLEALEAQLKQGIEQSPLWLARVNLLQSVPGVGAVLSSTLLVNLPELGTLTHKQISSLVGVAPLNRDSGKKRGQRVIWGGRAQVRAALYMSALAATRYNPVIKAFYERLCAKGKLKKVALTACMHKLLIILNAMVKTGTPWQLNTAEKA

SEQ ID NO: 105553 - protein, 445 aa, unidentified
MIRKVMEVIYQCVAGLDVHKETVVACRRRLIGNWQVELEIETFRTTSAGLRALAGWLLEWGVTHVAMESTGVYWVPVWNVLEGQFTKLLLVNAQHLKKVPGKKDDQSDAEWIAQCMQVGLLRGSFVPRSEIRQWRQLTRQRTKLTDHRTSVINRIHSVLEQGNIKLSSVATDIMGVSGRAMIRALSQGESDPVRLAALARGRLKTKYEQLVESLDGQLTANQRWMLKQLLEQLEELENKDAIYSERIRGQMLAYERQLELLDTISGIGRRSAENLLAEIGPEMDPFPTDNDLVSWGGLCPGKNESAGKKRSSKTPDGNKWLKRVLVEAAWAGTNEKNSYLAALYRRLASRRGKNRAIVAVARTILQAAWHILKEDVNYKELGGDYFERLNEEKSTKYLVKRLEKFGYEVVLKPKKAKKAALELKPKKTKKAKVELKPKKASEATA

SEQ ID NO: 105554 - protein, 334 aa, unidentified
MQNITLIGIDLGKHSFHIHCQDKSGKALLRKKFTRTKLMQFLATCPPSVVVMEACAGAHFMARCISDFGHETKLISPQFVRPFVKSNKNDFVNAEAICEAASRPSMRFVQPRTETQQAMRALHRVRESLIRDKVKTTNQIHGFLLEFGISLPIGDAVIKRLSLVLAEHEIPEYLSRLLVRLHTHYFYLVEQIAELESELSQSINADDTAQRIMTIPGVGPITASLLSSQLGDGKQFSCSRDFAASTGLVPRQYSTGGKSTLLGISKRGDKNLRRLLVQCARSFIMRLERKHGKLAEWVREQLNKKHSNVVTCALANKLARIAWAITTQKKEYQA

SEQ ID NO: 105555 - protein, 339 aa, unidentified
MKFAGCDLHKQSISVCVVDQSRQVLQRRRLACYDEMALRKFFSELGEFKAVVEATASYEWFVQLIEPLASRVVLAHPKKLRVIAESTRKSDRLDAQVLAEFLALDMVPTSYRPTPRQRDHRQLVRQRDRLQRRLTSVKNRIRRILSNYNADIKSLFTTKGLQYLAAATLSLADRFAIDQMTEELHFGRAQVQAVEKQLVQFVEQSPARERELRTLLRSVPGVGFVTAEVLLAEIADIERFGSQKQVVAYAGLAPGQRESAGKSRELHLEKNGSKLLRSSMVEAAWRLVRHSPRWRGIYERLKVRVKAKKAIVAVARRLLGLVTAILKSGRPYSATYQPA

SEQ ID NO: 105556 - protein, 348 aa, unidentified
MIKRLLKQVVGIDVAQKELVVSLGKMDEDALTLIYAFKTFSNNQKGFTALVQWVAKQTVEAFPLRYVMEATGVYHESLAYFLVAKAYRVSIVMPNKITNFFKTLETKTITDKSMAEAIALFGLEKKLDDWVQPKKVFRNLRQLTRERDQLTVERTMLKNQLHAEQAEADPSQTAIERMKFRIKVINTQLKEIMAETKAIMDDDVEIKRTVELITSIPGIGPLTAAVVIAETNGFELISSKKQLTSYAGLDVKEKESGTSVKGKSRISKRGNRYLRKAMYMPAMAAIRHSERYKAVFVRIVSRNGIKMKACVAVQRKLLEMTYTIYKTKTPYQMDYLQIGQQNEPALNN

SEQ ID NO: 105557 - protein, 438 aa, unidentified
MSNKVFFNLDDLFISVGIDVGADFSWMSIALPNQQFVGKPYKILHNSIDSLTTAVSKIKEAEELYSLESRIFLESTGIYHYPLFCYLRDKGFNCSVINPIITKNSTNINIRKVHNDRFDSKKAALVGLKPDLKVSLMPSDLALNCRNLCREYYDLMDNRSAYVNKLQGELRMAFPQYLGIFSKVTINTSLTLLETYTSPSAFLKADKQEIIDIIKSTARFGLTYAQNKYNAIIQAATDANQFGYIIDSNIKRIRLYISFIRKYDEEINNILESLHELVDANEDADFVKQIHLIETFKGAGFLSAVSIMGEIGDFSAFSKPKQLFAYFGLDPAVKQSGKFEGTKVQMSKRGSAIARRVIHTLTLQSISISRNGEAKNPVLREYYLKKCDSKPKLVAMGAVSHKVCNMIFAILRDNKSFEIITPQEHIKQYNASKCDMAA

SEQ ID NO: 105558 - protein, 357 aa, unidentified
MAALSIADVPANVTVGVDTHKHSHIARAKDGLGRHLGQLEIETDPRGYAGLLAWAQEFGPVVTFGIEGTSSYGAGLTRFLRAQGQAVIEVLRPVRRDRRFGGKSDPIDADAAAGAVLSGRATAVPKAGDAGVEMVRALKIAKQTAIKARTQAVNAVKGLVVMAPDPIREQLRNLKTPALVRTCSAYRVDRASDPTSAIKLSLRSMCRRYVALDQEVGSFEKELDALTIQLVPQLRQLFGVGQDVAATLVLAAGDSGDRLRSEASFSMLCGASPIPASSGMVQRHRLNRGGDRQANAALHHIVIVRLRHDEATKAYFAKRKAEGKSKKEIFRCLKRYVAREVYRTLVGPREEVIRSAA

SEQ ID NO: 105559 - protein, 379 aa, unidentified
MTTSAPLSLSTLVALNDQRSGEREPSMLIIGCDFHPTFQQIAFTDTETGEYEERCLHHLQEAEQFYRTLAEDKVRVGMEATGSFRWFRRLLAELGHELWLGNPTQIRASAPRRQKTDKRDARQLMKLLLEERFPRVWLPTVADEDLRQLLLHRCRLVRLRTKVRNQLDAIAKNEGLVGQRVGTRKGRQQLAALPLSGWYQQRRQDLFELLDRLEERIAPLNQAVQQAAEERADAQRLMTHPGVGPVVALAYVLAIGDWQRFPRGKYVASYLGLIPEEDSSSNKRRLGHITKEGNSLVRWLLVEAATKAQQSDPAWHRQYLRLARNKHHGVAKVAIARKLSIRLYWMLRSGQDYEQVKERSSHAGQSVEVRGHGLRRPRF

SEQ ID NO: 105560 - protein, 355 aa, unidentified
MNDTKYIGLDVHQATISAAVLDSTGKLLMESVVETRASTILQFIHGLRGSVQVTFEEGTCAAWLHDLLQPHVANVLVCDPRKNALLKSGNKNDRIDARKLADLFRSGLLCPVYHGENGVRALQELARGYLALNRDVTRVMNRVKAIYRSWAIPCAGQRVYAPRYRSEWSGKITEVAVRRRAEIYYQQLDGLRSLRQQVRHDLLAESGKQGATKLLRQIPSIGSIRAALLIALMQTPHRFRTKRQLWAYSGLALKTSASGEYRFEEGQLKRSKKFLAIRGLNVNHNPDLKNIFKGAAIRAAAVPGPFQQFYAALVATGMKPTMARLTLARKIAAITLIVWKKGVRFDAQYLKQQAA

SEQ ID NO: 105561 - protein, 332 aa, unidentified
MFVGMDVHRNRTQVCVLDHKGNEVRNRNVANNRIALKKELAGLRKGTPVAFEAAYGTGWIAEMLGDLGFEAHLAHPAGCRAIADAKLKNDRVDARTLANLLRTGYLAEAWLAPKDVREQRLLLRERARLVRIRTSAKNRIRAQIADEGVPAPSHGLWTKDGAAFLDALDLSPMHRWVVSDCQALLEVLGSRISLLEAEIRRQAKPDKRVDALMDIPGIGLLSAMTLVSEIGDISRFATARKLCAWAGIIPSMRNSDRTLHHGHITRAGPAAVRHVLSEAAQTAIRKEPYHSDFLATKRRRGTGIALIRVARKLLTQSFYALWALEDEQRQCS

SEQ ID NO: 105562 - protein, 345 aa, unidentified
MEPMYYIGLDVHKKKISYCVKDVSGRIHSEGAVAATRTDLDLWMKALPQPWTAAMEATIFTGWIYDYLLPHAAALKVAHPLMLRAIAAAKKKNDRIDASKIADCLRCDFLPECYMASTEIRERRRTLRYRNLLVRQAVQLKNKIAVLLMEAGVSYNKQKLHKVGYFRELLKTHPDINDSLRFLLQLCRETLVRLQKIESALIRSLERDRLLAERVDRLMTIPAVGPITALTWALEVGDVKRFSSIKKAISYCGLCSAEKSSADVIKRSPLSKQRNKHLQCTLIEAAKLAPRNSPGLALIYDQERRKGNANRATLAVARKLVAYLVAIDRSQKDFLVIGEQNRTAA

SEQ ID NO: 105563 - protein, 438 aa, unidentified
MSTLAYVGLDVSQDDASVCFLLADGAEPVPRWTVPNTQPGADTLSITLAQLAQMHQIDQLRIGMEATGLLWWHLACHLKDTPVLAPFAPRIYALNPHLIKTFRANYGALPKTDRADAFLIAERIRFGRQLPSPFQLDARYAPLQRLTRFRCHLAQNLAREKSYFLSFLFLTFSTYGQIAPFGDPFGATSSAVLDEFTTEELAQQALEELAAYLQSKGRGHFASPATLAATLQRAARDSYRLDKVLQEPLRLVLGTTLATIRSLQTQLKTLDKTIAQELAAIPQTLASVPGLGPVWTAGLIAELGDITRFDDEAAIAQYAGLTWETRESGRFQAEDTDLTKHGNCYLRYYLVEAANSLRQHCPEYGRYYAAKYAETPKHPHQRALVLTARKLVRLIDVLLREGKRYMTPEERQLREDARPPHHARPARQRRSSLAPAVD

SEQ ID NO: 105564 - protein, 354 aa, unidentified
MSSTAVAQKSISWVGMDVSADTFDVCLYPLDCDPKTPSALRRLAVGTFDRTEQGTREFLGGLSTDNPLHLVMESTGRYSSQLATWILELCPDVRVSIINPRRVSDHAKALGMRSRTDPICARIIASYGATFQPKPWNRSAPEYQELQAMTRVRQGLVEQCTAIKNQLGDLARETLPKQRMADLKLGLSSIEQALIEQIQHIEAQIEELLATHIELKADRDLADTIPGVGHVVAGTLMAELGDVRRFGSRKQIEVYAGVNVSRRVSGRTINKTLGLSKEGSSRVRRCLYLAAMGASRGDNALARHYRQMVARGKNKKCALGSVMRKILGIYRRVLISGRDYHDNLVEPRTQGLKK

SEQ ID NO: 105565 - protein, 354 aa, unidentified
MDIKYIGMDVHKEAIAIAVMKGDGKLVMESIIETKASTILQFIQGIRGDLHVTFEEGTWAAWLYDLLKPHVTQLVVCNPRKNALMKEGNKSDKIDARKLADLLRGGYLSSVYHGENGLRTLKELARSYLTISKDLTRVMNRIKALYRSWGILCGGQQVYAPRHRAEWLQKIGEVGVRRRAEFFYQQLDALRGLRQAVRRDLLAESRKQSATKLLRQIPSIGPIRTALLIALIQTPHRFRSKRQLWTYSGLAIEARDSAQYRYVDGQVQRSKKPQQLRGLNQNHNHDMKAIFKSAATMASSREGPFHDFYQGLLTKGMKPAMARLTLARKIAAITLILWKKGAHFDAERLKPQAA

SEQ ID NO: 105566 - protein, 340 aa, unidentified
MKLYCGIDLHSNNNVIVILDEADKVVYQKQLNNDLASILEQLSVYKGKITAIAIESTFNWYWLVDGLMDAGYTVKLVNTTAVQTYSGLKHSTDKDDARWLAHLLRLKILPTGFIYPREERAVRDLLRKRSQLVRQSTTNILSLQNILARNTAQSLSSYKIKKLDDEQAEKLLDDPNTTLALKCNLNVIRCLQSTIAEIETTVLQQARIRAEFKQLLTVSGIGEILGLTIMLESGDMSRFPKVGNFSSYCRCVKSERLSNGKKKGEGNRKSGNKYLAWAFIEAANFAIRYNDKIKAFYQKKKAKTNGIIATKAVANKLARACYHVLKDQVPFDVNKSFSRR

SEQ ID NO: 105567 - protein, 387 aa, unidentified
MIYVGIDIAKETHVAAAVDSDGVIIIEPFSFTNDHEGFKLLKSKLDTLDRNNLLIALESTAQYAENVIFFLHSCGFELAVINPVQTAAMRKTGIRKTKTDKVDSLLICKTLMVNSFRHYTENDIKTLKLKSLCRFRQNLKKSKARLKIQLTSYVDVIFPELQSFFRSGLHIKTCYELLKAHSSPDDIAALHLTKLSNILSKASRGRFGKQDAQSLKSLAMSSVGVKNTYISIQITQTIAQIELIESQLAELETVIEAAVDELDSVIMTVPGIGKLNGAMILGEIGDIKRFSNPSKLLAYAGLDPVINQSGKFNAKHTRMSKRGSKILRYALINAAWNVSLNNDTFKRYYDSKIAQGNSHYSALGHTAHKLVRVLFKLLNDNIPFALV

SEQ ID NO: 105568 - protein, 318 aa, unidentified
MTQVALFVGIDVAKDKLDWCIRAVARATASNSPDGCAKLAAELKARGVTLAVMEASGGYERTMAAALRKQRVPVRIVDPKRIKDFARAAGRRAKNDPIDANTIAWFAHTFTLAAEDKPDKEREHLAALVAERQDLVEIRTQCLNRNQHKAPVLCQHVRKNVLNEVKQGIAKLDAAIAAWIAKCPRLAARARLLASVPGLGRKSVAALLAWLPELGHITRQQIAALLGVAPFDNDSGEHASIRHIAGGRRQLRNSLYMPLVGAATQHNPILKKYFKRLLASGKLKKVAILACMRKLIVILNVMLAREQSWNPQPTSAQP

SEQ ID NO: 105569 - protein, 342 aa, unidentified
MNGDYDGRQYVGIDLHRRRSVIVRMTEQGEQLGWVRIDNDPVALGLELAKAGPDPEVVLEATYGWYWAVDALQTAGAHVHLAHPLGVKGFAYRRVKNDVRDAADLADLLRMHRLPEAYIATPQERELRELVRHRAKLVALRSGLKAQVHATLAKQGRLPAASDVFGRAGMAWLRSAPLELVYRQRIDSLLELIDAYDGEIETFRTMIANRFTGHRGYRAIQQISGIGPTFAAVFVAEIGDVTRFSRPEKLCCWAGLTPRHRESDTTVHRGPITKQGSKLVRWAAIEACQHTRAGTKLSADRSRIIAARGRNVGIVAAARRLLTLVFYGLRDGEIRALAARAG

SEQ ID NO: 105570 - protein, 348 aa, unidentified
MTIVEPVSARAVTGGVDTHLDVHVAAALDDIGGLLGVESFEASPAGNDKLLAWLRAFGAVALVGVEGTGSYGAGLARSLRAADLKVVEVDRPNRQARRRTGKSDPADAVEAARAALSGRAQGAGKTRDGNVEAIRVLVVAKRSARSTRIASLNQIRHLGFTAPDELRDRLRGVSRDHLAGVAAALRPRAGGDPVMTATKTAIRILGRRVLALDEELAAIDALVAPLMAATAPSLLGLHGVGIDTAATLLVAAGDNPGRLRSEAAWAHLCGVAPIQASSGKVTRWRLNRGGDRQANSALWVIVITRMGSDPRTRAYVERRLKEGRSKPEIIRILKRYVAREVFGHLPRT

SEQ ID NO: 105571 - protein, 489 aa, unidentified
MVTKRKTGTTGTNRRRSRSQKFKKAVLGRPQGGIQARVQAVGPEKFGVVAIDCAKARSTWILVDFYGNVLCHPPNVEHNRSAFQMAVLTLKQAVEKHDLKDVIVAVEMTGTYHKPPMRAFREAGFETRLVHPFASSYYRQPVHGDQKTDENDLDSIFRAAVNGFGLIEKPVDAIYQQLQILARHRRDLVKKRSKLQCQIRHHLELALPGFGALFDKDDLWSQVTPVPLLEAIAQRGGMVDVVKQAGQKGITQWLSDANVRFHKKTVERVTVWAANAAESDAMAAFHTRVWMSQLADWKQKMLQIHEIERDSASVLVKTPYVLLLSHPGINVVSAAELAGEMGPIENYATAKSICGRAGLFPSRYQSDEVDRGGKLTRFRNARLRAAWMMVADNMVKCNAYWMKKAERWRGEGHKPQDIRARIANRMTRGVFKMVSGRQIYQHASRLDRGYVMKARRSRQKGPQELGTLLVAVLARLGIAPKDEDTLEST

SEQ ID NO: 105572 - protein, 369 aa, unidentified
MNDITYVGLDVHKATVSVAIAESGRGGEVREVGVFENRPDVLRKMIARIGKHRRRLNFCYEAGPCGYGLHRLLTGLGHDCVVVAPSLIPMKAGDRVKTDRRDALMLAKLHRAGELTPIWIPDAAHEAMRDLVRARATAVRALSKARQHLQGFLLRHDRIYHGARAWTLAYRRWLTTVRFDHPAQQIVLQDYIHAVEDAESRRDRLTRQIEELMPSWSMAPVATSLQAMRGVALVAAVTVVAEVGDFRRFTNARQLMAYLGLVPSEHSSGSTVRRAGITKAGNALARRVLIEGAWTYRMSARVSRKLHDRLEPLSAAIRDIAWKAQVRLCARYRRLVAIGKPKVVVTTAIAREMVGFIWAIARVAQPELI

SEQ ID NO: 105573 - protein, 348 aa, unidentified
MDYYAGLDVSLEETAICVVDGTGRIVKEARAASEPVALAVALNQFDLPLERIGLEACSLTAWLHEGLRAAGLPAICIETRQANAAMKTMPNKTDRNDARALAQIMRTGWFRQVHVKSRQCRLWRSLLVARRTVLNEMRSIENVVRAILREAGLKLGTPGRPAFAGHVRELAGDDPVVMQLVEPLLAVLASMLGALAMLTKQVMDLVKMEAVCRRLMSVPGVGPITALAFRATIDQPDRFKRSRDVGAHLGLTPARYQSGETDIQGKISRCGDELARTALYEAAHTLLVRSKKWSSLRAWGMKIARHRGMARARVAVARKLAVILHRMWSDGAEFRWGKDPADGATAAA

SEQ ID NO: 105574 - protein, 343 aa, unidentified
MIVVLGIDLGKNLCSLVGLDAAGAVILRRRMRREGVVAFVAGLPPCLVAMEASCGAHHLGRQLVAQGREVRLMPPEYVRPYVKSHKNDDRDAEAIAEAATRPTMRFVALKTEAQLDLQMLHRARERLVGRRTALINQLRATLLDRGVAVPQGKRALQRALPQILEPADTGLSGRIVALLTDMLAEWEELDRRVAAFDTEFLALAREDDAVRRLVAVPGFGPLTASALVAAVGDARRFKRARDLGAWLGLAPRQATTGGRPRLLGISRRGDGYIRKMLIHGARAALPGLVARETTTGRWLRGLLERTHKNRVVVALAHKLARIAWAVLVRGEAFDADRGAVPAG

SEQ ID NO: 105575 - protein, 430 aa, unidentified
MKSNTQNAKIEAITEKTLVLGIDVGSETHYARAFDYRGIEYSKKPFKFSNTEAGFVTFKEWILDLKERHEKDKVVPGMEPTGHYWFNLGKFLQDNEMKPVLVNPHHVKKSKELDDNNPTKNDRKDPKVIAGLVREGRYMIPYLPDGVYADLRTASNIRFQLQAELTRIQNRISRWFNIYFPEYRTVYGKPDAKSGMLLLKAAPLPEDILTLGIDGVNQIWRDAKLRAVGKARAKTLIEAAEHSVGSKEGAVSARMEIRMLLEDYESRNTRLQEVMVLIEELVKQIPMAEKLLEIKGVGIRTVSGFLAEVGDISRFNNPKELQKLAGLALVENSSGKHKGETTISRRGRKRLRYLLFEVAMSLVAKNPEFRELHNYYTTRRLNPLKKMQSLMAIAAKLIRVFYAMLTKGVDYDPKKMVSDIKRPAVYLQAA

SEQ ID NO: 105576 - protein, 351 aa, unidentified
MPKRTNAVAVSTIGIDTGKNTLHMIGLDEKGEIVLREKVSRSRIAARLVNVPPCLVGIEAGMATHYMARELVALGHVVKQVPPAFAKPFRQGHKNDFRDAHAVAEAVQRPSTRCVPIKTDDQLDLQALHRVRSRLVGDRTAVINQLRGFLLEHGIAVRQGHRFLRQQLAQILATRTDALSPRMIRIIGDLVEDWAHLDERIERVTDEIESLARTDSSCGRLMTVPGIGPIIASAMLAAIGNGAAFAKGRDFAAWLGLVPKQLSTGDRTILGRITKRGNRYLRMLFIQGARAIQLHPASWAKHSFGPWLTAAARRLHCNVLTVALANKLARIALTVLVQARNYETRIAPAAA

SEQ ID NO: 105577 - protein, 412 aa, unidentified
MEVLYPHCAGLDVHKDTVVACVRHMATGSVEREVRTFKTTTKDLLALSDWLAEHGCTHVAMEATGVYWKPVWHILSDGDFILVLANAAHVKNVPGRKTDVNDATWLADLLAHGLIRGSFVPDEQTQEMRNLLRTRKQLVRECSRHIQRLQKTLEDANIKLDSVISDIMGLSGRAMIEALIAGESDPERLAQLAHRRIKAPPEALCEALRGRVTRHHRFLLRLHLKQIDAVNVAIDDIDQEVDAQIEPFRTAIQLLITIPGVSELSACVILAEIGHDMNRFPTAAHLISWAGLCPKNDESAGKRRSTRMRKGAPWLKTTLVQCARAAARKKASYFQAQYHRLRARRGDKKAIGAVAASILTTAYHMLKYGTLYEDLGPDYFDKRGKGKHVHRLINRLQNLGFAVQITPVEAAA

SEQ ID NO: 105578 - protein, 380 aa, unidentified
MEIVYERVAGIDVHKKQITVTVRTPGQRPGKRRQQVRRYATFYAALREMTAWLVSEGVTHVAMESTGVYWMPVFHALAEPGSPEIVLCNAQHVKNVPGRKTDVKDSQWLAQLMEVGLLRGSFIPPAQIAAIRQLCRYRRTLRTREGQRPRKMLEDGGIKLDSVASDVLGVSSRSMIRALIDGERDPAVLADLAQRTLRRKIPDLTLALAGRFGAHHGVLCELHLDHIDHLDAMIGRLDARIAQATAPFADACQRLMSIPGVGEHAARAIIGEIGTDMSRFPTAAHLASWAGLCPGNHESAGKQLRRLKRRMGKKSGPKAAVAVAHTILTIAWHLLAHGGTYTDLGADYYTRREEDPETLAAKLKRKIESLGYTVELSPVA

SEQ ID NO: 105579 - protein, 427 aa, unidentified
MKYTQNDRISQLTETTLIVGVDIASQIHYARAFDFRGIEHGKVIKFTNNREGFMKLQLWIKDLSVKCKKDHVVIGMEPTGHYWFSLAEHAKNHGLKVVLVNPYHVKRFKELDDNNPSKNDRKDPKTIAMLVKDGRYVTPYIPEGVYSELRTAMSIRNRITRQLSSVKNRVKRWLAIYFPEFNTAFASWEGKAAQICLEKFPTPLLVIEQGVSGITHHWKEARLRAVGIKRATKLYKAAQCSVGVSQGLMAAREELNLLLEEYTLLKRQEQRIMAMVEGLLSQIPACQELLKIKGVGLITAAGFLSEVGDITRFDSPKQIQKYAGLNLKENSSGKHKGRTTISKRGRSGLRALLFRTVMPLVAKNDEFRELHRYYTTRSDNPLTKKQSLVALMCKLIRVFYAILTKNVAYDGQKMLSDIQRPALQLAA

SEQ ID NO: 105580 - protein, 443 aa, unidentified
MEETEHNDEPLARVAAIDVAKATGMVCTRVPHASVAGRRVQRVWNVGATTTAILELGGHLVREGITRVVTEATGTYWRSWFYLLESCGLDCWLVNARDVKNVPGRPKTDKLDAVWLAKLTERGMLRASFVPPKPIRNLRDLTRLSTVFTRERTRTRQRVEKLLEDAQIKLSTMASDIFGLSGRAMLDALISGERDPRVLADLARGRLASKKAALVEALTGQFDEHHACGCRPLLETADHLTAKIEDLSARITQALAAIPPVDGQGDMGRTTERPEQAAAGLLPLIDRLDEIPGIGPRAAGIILAEIGPDMRVFPTPGHLASWAKLAPRTIQSGAKNASGPTGKGNPWLRGVLGEVATAAAKTDTFLGARYRRLVKRRGHRKALVAVARSILVIVWHLINDPTARFTDLGPDWHSRRLDPERKTRDLVRQLKALGHEVTLVPTA

SEQ ID NO: 105581 - protein, 317 aa, unidentified
MAEVTFPQLIQRACGIDVHLKVVVATIDGAGIQRETRSFKTFTSSLNELKEWLLSNGVTHVGMESTGVYWKPVYKVLEDSIPNVWIVNARHIKNVPGHKTDKMDSEWICKLLLAGLLKPSYIPPKEQRQLRDLTRCRNKLIQQIASEKNRMMRILEDCNIKLSSVVSNTSGTTATSLIDMLCEGKVLTLDDINSVYHGKLSASPEELLEACTGFVEEHHIYLLQMIRKDIDQTQTLVDDLSERIKRLLSKYENVLELLREIPGFSTKVVEDLVSEIGLDMSHFPSEKHLSSWAGLSPGNNESAGKKKAHESLTETNR

SEQ ID NO: 105582 - protein, 465 aa, unidentified
MTPHKDFFLHPRPSTPPPPQPPARTGPLQVFNPHAAGIDIGEAEHWVAVPPDRAPQPVRRFGTFTADLDVLADWLIDCGITTVAMESTGVSWMPLFELLAPRGLQVLLIDPRQAQRAPGRPKTDRLDGQWLQRLQTYGLLAGAFRPEAQVCVLRNSLRHRQRLLTSAAHHMQPMHKALQQMHLTLTQVVSDITGATGMAIMKALVAGERDPQRLAALRNAHCQHDEDDIAKALQGTWHAEHLFAFQHALSLYAFSHQQLALCDQQITRHLATFADKSAGQPLPPKARRSKKTNEPRFDARTPLYRMAGVDLTTLEGIEENTALVILSEIGTDMHRWPSVKHFCSWLGLCPQHKISGGKVLSRRVRPGAHRVTVALRLAARSLHHSQSALGAFFRRMKARLGTPKAITATAHKLARLVYSLLQHGSAYVQQGVDAYEAQYRERKVQSMAKQAKVLGYTLVPLPSQG

SEQ ID NO: 105583 - protein, 369 aa, unidentified
MEKDTTYVAMDDSKRKIVAGILRPAAQEPELREIANDPRQIRRLFERLQREGPVAACYEAGVSGYDLYRQLTPLGVACSVIAPALTPRRPGQRVKTDRRDAAKLVRLFRAGELTAIHVPDERQEAVRDLVRCRDDLRRDVLRWRHRVLKLLARHGRTYLAGRNWSQAHWRWIRAQRFDQPPLQRAFEATLFTLEQALARQAELDTELAALATTAPYREPVAWLRCFRGIETLSAIILLAEIVDFQRFRRPRELMAYLGLVPSEYSSGDTHRRGALTKAGNSHARRVLVEAAWHYRHRPALGRALATRSHGQPDELLGHAWRAQQRLHRRYRHLVGHGKRPPVAVAAVARELVGFIWAAMTHHEHRRDAA

SEQ ID NO: 105584 - protein, 338 aa, unidentified
MSLYAAIDLHSTNSVLAVMDEQGRSLLRCRRPNELSRLLADLAPYQDQLAGIAVESTYNWYWLVDGLMDHGYAVHLVNTAAIPQYDGLKHGDDDTDALHLAQLMRLGLLPEAYIYPREQRATRDLLRRRFALVRQAVQLMLSMQSSFSRSTGKQLSANALRRMNPAQWEGLLPDLTTRYGVLIQFKLWLTLQDQISALEHWVHNDLQQPEPLRRLQSVPGIGPILGMTILLESGTITRFASVADYASYCRMVESVRWSNGKRKGHGNRKCGNRYLCWAFMEAANYAIRFHPAIRRWYDRKRARKHRIVALKAVAHKLARACYYMLREGTAFDPARAFG

SEQ ID NO: 105585 - protein, 316 aa, unidentified
MQTPSVYVGIDVSKTRLDVAVRPSGGLSHVTYDAAGITTVVTQLSQKQPIRIVVEATGGLERPLVRALVAAALPVIVVNPRQVRDFAKATGQLAKTDALDAQVLARFAEVIHPSLRALPDPQTQELAALLARRRQVLAMQRAEQNRLDRAPVRVQNRIEVHLHWLGDELARLDEELDDQIQQSPMWRAREDLLQSVPGIGPVMCRTVLAELPELGLLNRKQIAALVGVAPFNRDSGRLRGHRTIWGGRAPVRTALYMATLVATRWNPVIRPFYQRLRDAGKAPKVALVAAMRKLLTILNAMLQHGTPWRPVVLSEA

SEQ ID NO: 105586 - protein, 344 aa, unidentified
MDHFAGLDVSVKETSVCIVDDTGRIVREVKVASEPDALLAVLQNPAYHFKRIGLEAGPLSQWLFSALAEAGLPVICVETRHMRAVLKAQINKTDRNDARGIAQMMRVGLFKPVHVKTLVAQEQRMLLTSRKLLQRKLLDLESDLRGTLRNFGLKVGIVSGSRYEARVRELVAGFPRLAAITEPLLNVRRVMRQQFAVLHKMLLDTVRGDRVCRRLMTAPGVGAVVALTYRATVDQPQRFVHSRAVGAHVGLTPKRYQSGETDYDGRVSKCGDALLRTMLYEAAQVLLTHGNKWSWLKAWGMRVAQRRGMRRAIVRRLAVVLHRMWVDGSEFRWSKDSAAVPAVA

SEQ ID NO: 105587 - protein, 408 aa, unidentified
MNSLFVGIDVGSKNNVVYLMKPDGSKHSGFSVQNNLGGAKLLSEGIVSALKSMQLSDVVIGLEATSIYGDSLVYALREDGSLGRFQRKIHVLNPKQVRKFKEAYPDLPKNDCVDAFVIADHLRFGRIAKEVYVDDYRYQALRTLTRSRFDVIQNLTREKQRFANYLFLKCSGIAQAKDIQNTSATTIALMEHFESVDDLANADLNELTAFISKAGRGKFADPNATAKAVQAAARGSYRLPKTVNDTVNQAMAVSITSMRALKEQVKTLDNAIEQQFEIIPNTLTSIPGIGKVYSAGIIAEIGDVHRFDSQASVAKFAGLVWTQHQSSEFEAETTHLIKSGNRYLRYYLLEAANSVRRCDSEFQRYYDLKFHEVNRFQHKRALALTARKLVRLVFRLLKDNRLYIPPEG

SEQ ID NO: 105588 - protein, 382 aa, unidentified
MSSTGHTLGDQTAIRTDLAAVFVSLELSRKSWLITSLSPGREKMSRRTVTAGAVGELLELLRRLGAEAERRDGRCYRIVTIQEAGLDGFWLHRVLELEGVESHVVDAASIAVSRRRRRAKSDRIDGEALLRTLLAYKRGEPRVCSMVRPPSPEAEDRRRLGRERKTLVAERTARTNRIKGLLFAQGVFDYEPRGRDRRARLEAVTTGDGRPVPERLKGQILRELDRLELVEAQIKAVEAERDALLAQAHAASRLGRLVGVGPEFANVLLGEAFWRSFDNRRQLAAYAGLAPTPWKSGSIDREQGVSKAGNPRLRTTMIQLAWLWLRHQPKSELSLWFQQRVSQGQGRIRKTGIVALARKLLVVLWRFEVHGELPAGATLKPA

SEQ ID NO: 105589 - protein, 348 aa, unidentified
MAHFVGLDVSVKETSVCVVDDAGKVILEQKVPTEPADIIALLTSLGVSYGRIGIEAGPLSQWLVNALTAVELPVICVETRHMKALLTAQQINKTDRNDARGIAQMMRVGLFKPVHVKTLAAQEQRMLLTSRKLLQRKLLDVESDLRGTLRNFGLKVGVVSRSRYEVRIRELVESFPRLAAIVRPLLAVRRVMRQQLAVLHKMLLDTVRGDPVCRRLMTAPGVGAVVALTYRATVDQPQRFLHSRAVGAHVGLTPKRYQSGEIDYDGGVSKCGDALLRTMLYEAAQSLLMQSRKWSWLKAWGIRVAQRRGIRRAIVAVARRLAVVLHRMWVDGSEFRWGKDSAAAPTVA

SEQ ID NO: 105590 - protein, 484 aa, unidentified
MAKHKQSTFERLRNGKLPCNRKQRRELERRLNSADPGLEVVNPHAAGIDVGNDSHYVAVPPGRDARPVREFGSWTAALEEMAQWLKSCGVETVVMQSTGVYWIAVHDVLQRHGLQVNLVDARGTKSVPGRKSDVQECQWLLKLHTYGLLRSCFLPAPEIHRVRTVWRLRDQHVKDAGRCIQHMQKALIEMNVQLHIAISDLSGVTGQAIIRALLSGQRDPRKLAALRDRRIQATEEEIIHSLQGNWKEDVLFELQQAVEAYDFYQKQMAECDSQLKLYLSALATREGLATTSASSAPAAAAEVGKKPRPRKPKGNQPAFDLEAELQRILGVNAKRIDGIDVMTIQTVLAEVGPDLSAWKSEDQWSSWLNLAPKHDISGGRVIRHRREYRTNRAGNAFRMAAESLVRSQSYLGARYRYLRAKLGGLKAVKAMARVLACLYYRLVTKGQLWIDRGTVEFERRRQQRDLASLQRKARGLGMQLVPAA

SEQ ID NO: 105591 - protein, 389 aa, unidentified
MKIYVGIDIAKLNHFAAAISSDGEIIIEPFKFTNDADGFQLLVSKLESFDKNSLIIGLESTAHYGDNLVRYLVTELYQVCVLNPIKTCQMRKNNVRKTKTDKVDTYVIAKTLMMQDNLRFVSFFDLDMMDLKALGRFRQKTIKQRTRLKIQLTTYVDQVFPEIQYFFKSGLHQHAVYALLKEAPSPKEIASMHMTHLANLLKVNSHGHFTKEQAKELRILAQKSVGANDSAISIQITQTIQQIELLDSQLEKIEAEMTDIMKFNDSVIMTIPGIGYINGGMILGEIGDIHRFSNPNKLLAFAGLDPSVYQSGNFQAKTTRMSKRGSRVLRYALVNAAWNVVRNNATFKAYYDAKRAEGRSHYNALGHCSGKLVRVIWKMLTDNVEFNLK

SEQ ID NO: 105592 - protein, 410 aa, unidentified
MAYKVAGIDVHKKVLMVVILDVDDPEAESQRRRFGTTTSELQHLSSWLRQQGVQQAVMESTAQYWKPVWYELEPYMKLSLAQAFSNRAPRGRKHDFRDAERLVRRLVAGELTLSFVPEPQQRLWRTMTRARVQLTEDKSRLHSQLECLLEEMRIKLSSLLSDLLGVSGYRMLRTLAGGETDPRKLAAWADDRLQCSEKQLIDALSGSPQPVHLQLLALYLDRHQMLVEQIAKLDRLIAEALTQHQEAVARLALAPGLGVDSAQQIIAEVGVDAGTFPTAGHLSAWVGTCPGRDESAEENHSSRSAKGNKYLRRILNQAAHAAVKKKGSHFQAVFHRLLPRLGYKAAIWAVAHRLCRLVWKMLHDAVPYVEHGSEPDARTKHRRARQLLRRLRKLGYQVDLRAINPTPATA

SEQ ID NO: 105593 - protein, 324 aa, unidentified
MIDGVLGIDVSKNALDVSMSGCNKIRARSFVNSAHGWRDLLDWLVTQKIQRVHACLESTGRFSLGIACALHEAGHVVSIVNPAQIRDFARTKLGRNKTDGVDASHIREYCELFKPQPWAPPSNAHRTLGELQTIRAGIIAGLTQWKNRRNSGMVDAVAQSLADVTISHFASQLEAVDEAIAQTIDDDSDLRRQRDLLLSISGVGETLAGVVLAELPGPNVLRSSSEVVAYAGLNPRLYQSGTSINRITSISKIGNAVLRTALYMPAMSAMRYNPAIVALVTRLKAQGRLKPKQIVVAAMRKLLVLCFGVLKTGKPFDPAIAMGR

SEQ ID NO: 105594 - protein, 372 aa, unidentified
MTSMPEPTPIDRAHDEREEVVLGVDTHKDLHVAAVLSGLGALLATRAFPTTTAGYRRLVAWARSFGALRRAGVECTGSYGAALTRHLQAEAIEVVEVNQPDKATRRKRGKTDAIDAEAAARAVLSGRATATAKTSNGPVEAMRVLRMARNSAVNASTKAINQLKAVLVGADPTLRDSLAGLGPASLVRRCAELPDPTPGSGLSEVDRAVVFTLRTLAARIMALKAEAYQLHKQLRALIAAHAPKLLERRGIGPDSAAALLIAAGDNPERLCSEGSYAALCGASPVEASSGKTQRLRLNRGGDRQANAALYRITVSRLRWDSRTQDYLRRRLTEGKTRREAIRCLKRYIAREIFTLITPKAATALANQTANAA

SEQ ID NO: 105595 - protein, 434 aa, unidentified
MDEVNRNRLEEFRQLRKEIRHSEEYLIVGMDIAKDRHYAFFGTATGKTLFKRIVFSNDHEGFRKLLDQAEALRVQHGLKRVVYGMEPTANYHKPLGEYLIKLGKTVVLVSGVTVARNRESLDGRWDKHDGKDSVNVADLISQGKCLYYEYPSAELRGLRGLLSLKRRLKKQEHGYRVRIRNQLIAQYYPEMDRDYERLGEEGLSIVKWCLAASEIAQLEVDPFIERVTSRRITTEKRRRLEQIWEKAGESIGCEVVPGVGHETKVMVEGLRQIREMIKETEQKIEELCKQFAEYPYILTIPGFGPDVSAKVLGAVGDPDRFLNGKQVLKLSGFDLSANRSGKDSDKAIPEISKRGKADLRYALYQAALIASLKNRDVMIYYTSKIRGREREKGIRVKMRVKLAAKLLVIAWTLMKKKEAFNPAYLNRSSLEKMV

SEQ ID NO: 105596 - protein, 355 aa, unidentified
MPSKADTAVARTIGIDTGKNTLHMIGLDERGAIVLREKISRARIAARFMNLPPCLVGIEAGMASHYVARELVALGHEVKQVPPAYSKPFRHGHKNDFRDAHAVAEAVERPSTRCVPIKTDGQLDLQALHRVRSRLIGNRTAVINQIRGFLLEHGIPVRQGHHFLRKQLPLILATRTDVLSPRMIRIIGDLMADWKYLDERIERVTDEIEALAHADEGCQQLITVPGIGPIISSAMVAAIGNGAAFCKGRDFAAWLGLVPKQMSTGDRTVLGRITKLGNRYLRMLFIQGARAVLLRPASWVKHSFGSWLTAATRRLHRNVLAVALANKLARIAWTVLAQGRRYEARVEPRVEPATA

SEQ ID NO: 105597 - protein, 497 aa, unidentified
MSRNIFPERSQGAAELLANAESRNVLVVPIDFAKRIHVVQFARGTGEYLLKRPLNVRNNVAGKQFLLDRIAKCCAKHRIPKCNVLVGGEDPAEYAVNFALWVQAAGYRFVRVNPMEAKKHRTNTRATSDALALDGIAQIMLLRRGYDLQAHDELYGALKMAERARRSLRKQVTATRNRIHKDVELLCPGLLDRKLSGLLPFGGGSLELMATGCSVAQLGRMRTARLAKLLAKAGTQKPAEAAAKLKAFAQSALPPDPAIVPYRQRSLAGKVRLFREQCANLACEENEMARCLVQTPGFLLTSIPGLGVVLGGGIVAECGDPDRWPDPDRIASYAGLAVRQQQTGGPNSEPVTGRLPLDANHHLKDQLLQAAFHVGTTPHPAWQALGLPGHHPLREHYEQIEQRGGHSRMGTVKKLLRIARAMMRERRIYLPTAALDPNAPDAMPPVRLIAYRRAVGRMLVAKWRRYDLEGIPDEANQLKLWLRETDQIEKFLNNQDK

SEQ ID NO: 105598 - protein, 429 aa, unidentified
MDHAALFPPPIVAWIGLDWADQKHDICLQATGSRDREYTVVEQKPEALHGWIAELRRRFPQGLIAIALEQSRGSLFYALMNYEFLRLYPIPPKALADYRQALHPSGGKDDPTDARLLLEFLYKHPERFRPWVADDVQTRQLALLNEHRRQLVDDRTALTNRLTTLLKGYFPEALRWVEDLRTPLAWDFLARFPSLEQAQQASRLDVLKLYRAHTRRPPKQIEELYEQIRTAHPLTTDRAIIASSALMVGILVEQLRTLGAGIERVEHQLADVFAAHPDHAIFQSFPGAGKALAPRLLAAWGSDRQRFQDAANMQCFAGPAPVTVRSGKSQWVHRRFASPTFLCQTFHEFAAQSRLKSPWAKAYYQQMRSKGADHHPAVRALAFKWIRIMFRCWQDRTPYDEARYQQALKHRGSPLASTLSRLAASPAPA

SEQ ID NO: 105599 - protein, 465 aa, unidentified
MQNSYELFIGIDVSKNKADAAIIKLYRDRSRKPKLLRKKIAFRFLTSEVDEFLSTVRKYIDDNCTHVTYAMEVTGSYSDNIYDALTSNKLEIEDVFLLEARYVQNWCKTHNRPKSDPLDAESIASIIAFEYDVKFVSKFDSSNEKGYTDLKHLVHRYYQLKKVLTQEMNRLIATCDRFFPELQYVFKPKSAAFLAILSVYPTTYDIINATKSEVFDLVFQATKHHVSMDKIDSLFDYCKDSLAPRVVSNDISSLILNQVSSVYHLRADLHEFEKLVKATASQFVLFDILQSMPGCGAITAATVIAETCDIKRFSSADNFVSYAGLAPVNKRSGSSVEVLGKISKKGSKFLRHALFMIAEFARRHNPILKHFFEIKKNGNKKRHRLAVVAVANKVARYIYSVMKHNSEFIILDSDLSRLPEDTRNSFFHNISFNIPKNNRKQVYRFCDCNGKISEFVYNSKDINEE

SEQ ID NO: 105600 - protein, 484 aa, unidentified
MRAFPPCINTHPRDAGPGADSVKSGADTGERRMTIPALPSGLQPEDFEKIEAAVMETARGRWFLLEYARRQRAEEAGRLILAVERLERRVAGVEPAPPETGRAADSDVAVICEPCNLLFAETAIVANAVTDARPVEPWALKPVLKPGSASVVSSNPNSRLGRLRSPLAQGWDKMDAIVVGIDVSKDRLDVYIRGKDESFAVPRDAEGLAVLIERLRPLEPRAIGLEATGGLETFVAAGLASAGLPAVVVNPAQVRAFANALGKRAKTDPIDAFVIAHFVEATAPEIRPLRDAETRLLADLVARRREIVAMIVAERQRENHAPARVKKSIVRLLKALQRELDSLDSDIDDAVKTSPVWREKEDLLASVPGIGATIARTLLAELPELGALDRREIAALAGLAPWTRQSGKWRGKSFIGGGRAAVRTALFMGAMVAARHNPVLKAFRDKLVAAGKPKMVALIAVARKLLTILNAILRDAKPWRKQTA

SEQ ID NO: 105601 - protein, 338 aa, unidentified
MKLYGAIDLHSNNNVTVLIDEQDQVVYQKRLPNDLSLIAQQLSGYQDALQGIVVESTYNWYWLVDGLMDQGHRVHLANTAAIQQYEGLKYTDDHTDARWLAHILRLGVLPEGYIYPKEERAVRDLLRKRGQMVRQRTANLLSLQNLITRNTGSSISSNRIKTLDSETVDALLPNQDLALAVKANLAMIQCADGQIDILERTVTDRVKLRAEFSFLKTVPGIGQILALTIMLETGEIKRFSTVGDYASYCRCVGSQKLSNGKKKGSGNTKNGNKYLAWAFVEAANFAIRYNARIKSFYQRKKAKSHGVLAIKAVAHKLCRACYYIVRDQVPFDVAKAFA

SEQ ID NO: 105602 - protein, 338 aa, unidentified
MTTGLAAGTYELFVGIDIAATTAEVSTQRPGAKAGRSFKIDQTPEGFHRLVHTLQATDNEPSHVLVVMEATGSYWMSLATRLVHEGFRVSVINPSQAHHFAKALLKRAKTDAIDAQTLAQLAMVLQPEPWMPPPQIYYALQQRLAQRDDLLNLRQQVRNQLHALDQHPEVIASVRTRMESLLLLFQSQIDEVEGEIAAALNQDSAWAAAAERLQSIKGVGWVTAAWTLVTTLNFTTCDTVDALTAYAGLAPMPRQSGSSVWHRPSIGHSGNGRLRTAFYMATLTAARFNPAIKAFYNRLLEAGKPEKVARCAAARKLLHMAWAVVKKDQPFDPNYAQG

SEQ ID NO: 105603 - protein, 343 aa, unidentified
MEQYVGLDVSLKETSICVVDGSGEIVCETSVGTTPETIAKFIEKRAPSAVRVGLESGLLSTWLWHGLRALDVPVVCLDARHAASALKMQVNKTDRNDAAGLAQIVRTGWYREVEVKSLACHEVRAVLLARSRLVASRRDLENQMRGLLKPFGLLVGKVRGKGFEGRVRELIADAPAMAEVIDALLLARRTLCTQVARLDVRVRMLAQTIAPCRRLMTVPGVGPITALAYVTVIDDPGRFRKGRSVGAYLGLTPRRYQSGEVDRAGRISKCGDGLVRTLLFEAAGVLLTRVQRMSPLKAWGLRLAKRIGAKKAKVAVARKLAVILHCMWTDGTEFWWTKEDVRA

SEQ ID NO: 105604 - protein, 394 aa, unidentified
MKLVGIDVGKNSHHFCVMDKETGEFNVTPSSFPNNKEGFDFLINSLKPYSKKSILIGMEDTGHYHVALLKFLLSNGYTVALINPKTTDLTRKMEGGITKNDKLDTITICDVLDTPERKKQYRITKVDRFDLYEQRQLTRHHHNLKEELNVYCNRLQKSIDLVFPEFNTLFSSKYGIVYMNLLKTFGSAEAIASTDIRTIRKCFEIKGRGNRISLTPEKLKECAKNSIGISSEVETIQIKHLVSQITLIKEQIAEIDKKIEEFSITNNSPILSIPGISHFSGTSILAELGDIGNYSKPSQIIKFAGVAPYHYESSQYNAQHTAITKKGSKYLRKTLYQIILPVINNNPVFKKYYLLKISQGKGHRCAQGHCIRKLLRIIYHLLETGQSFDSALLR

SEQ ID NO: 105605 - protein, 349 aa, unidentified
MRFYTNQHRYYCGIDLHARMMYVCVVDQTGTVIVHRNLATTREAFEQVIGPFRGEVVVCVECIFSWYWIADLCSELGVAFVLGHALYMKAIHGGKTKNDKIDSQKIAGLLRGGMLPMAHAYPQEHRSTRDLLRRRMYLMHQQSELLAHIQNTNIQYNLPGFEKRIGSPSNRTTLAEHFEEPMVRTSIEADIDVLDRLHEVLLKIERTVLAQAREADPVGLQLLRSIPGVGKILSLVILYEMEDVKRFPKVGNFISYARLVKCSRESAGKKSGARNSKIGNAHLKWAFSEAAVLFLKDHQAAKDWHDKLVSKYGKAKSLSIMAQKLGRTVYFMLKRKEPFDPKRFFAQEV

SEQ ID NO: 105606 - protein, 412 aa, unidentified
MQIIHECCAGLDVHAKTVVVCLIKRGKKQTRTFSTMTDDLLRLSDWLTGEGCTHVAIESTGVYWKSVFNILEGVLEVILVNAQHVKAVPGRKTDVKDCEWLADLLRHGLLKASFIPPMEIRELRELTRYRQSLIREQTALSNRVQKLSESGNIKLSQVASDALGVSGKLMLRALADGETDAEKMAQLARRRMRSKIPELQRALEGRMTKMQRWVLGELLTRYEEIEQAIERVERQIDEEVSQGPDPFVQEAVELLQTIPGIGESVAETIVSEIGVDMRRFATDGHLASWGGMCPGNNESAGKRKSGKTTKGSTYLRAALTQAAWAASHTKETYLAAQYQRLAKRMGKKKALVAVGHSILVIVYHVLANRASYQELGGDYFDRQTVVQQRTRLIRKLEALGLKVTVEELPVAA

SEQ ID NO: 105607 - protein, 340 aa, unidentified
MKEVTTIGLDIAKQIFHAHGAGSSGAPVFSRRITRQKLIQFFASQPRCVVAMEACAGAHHWGRELMRLGHEVRLIPPAYVKPFVKRQKNDAADAEAICEAAQRPTMRLVPVKSEAQQASAAVFRARDLLVRQRTQLLNALRGLLAEHGWVAPKGLFHASAMMAKIEGPSCELPASARDVFLVMIASVRALDERIHLLDREITKRAREDETARRLMTIPGIGPITATALLALAPAPESFRKSRDFAAWVGLTPLQRSTGGKAKLGSITRMGERTLRRLLILGSAAVVLHASKRGAAKGSWLEQMMARKPRMLVTVAFANKTARIVWALLAKGGVYRAPAVA

SEQ ID NO: 105608 - protein, 349 aa, unidentified
MKGTTIGLDIAKRVFQAHLVDSASGEVTRTRLQRGEVLQHFAQLQPSRIVMEACGASQHWARELVKLGHEVSLIAPQFVRPFVKTNKNDVADAQAIWTAAQQPEMRSVAIKSEEQQAVLALHGIRERLKKSRTAAINQLHGLMGEFGVELPRGWRTMLPKAAAALDAAQSPVPALLQPQLRHQLDEVRSLTEQMAQVERQIMAWKRCQEDCERIAAIPGVGLLTATAAVATIGDAKVFRSGRQLAAYLGLVPRQSGTGGRVKLLGISKRGDTYLRTLLIHGARSVLTHTDPKAEPNTWLSRMLQRRPHNVAAVALANKMARQIWAILAHGSKYEPHRGSPREVATTAPA

SEQ ID NO: 105609 - protein, 384 aa, unidentified
MPRPIKESTEVELHVATLFASLELSQTSWLVTSLSPGSVSMSKHSISAGDGAGLVGLLARLRTKAESAAGVPVEIVVIQEAGLDGFWVHRLLEANRIESHVVDAASIAVPRRRRRAKTDAIDGETLLRTLRAWKRGEPRVCAMVAPPSPEQEDQRRISRERAILLRERVRHVNRIKGLLASQGITDFEPLHKDRRVRLEALRTGDGRPLPPRLKAELLREIELIELLLLQIAEVETERDSAAEFDTAQNLSPIALLTRLRGIGSQIASVLYFEGLYRHFGNRREVAAYAGLAPTPWRSGTIDREQGISKAGNPRLRHIMVELAWLWVRHQPDSALARGFRERVGAETGRVRRIAIVALARKLLIALWRYVNLGELPEGAVLKPA

SEQ ID NO: 105610 - protein, 343 aa, unidentified
MVEISMIGLDLAKNVFQVHGVDATGGVVLRRQLRRGQVERFFAQLAPTKVGVEACGGAHHWARVIEKYGHQVRLMPPSYVKPYVKRNKNDGRDAEAVCEALGRPTMRFVAVKSIEQQAVLAVHSTRALLVRQRTMVANALRAALSEMGIVAAQGIKGLQELMRQLETPSEAIPELMRGALLVLAQQWKGLDVAERGLERQIKRVALADQDARRLMEVPGVGPISASAVVAKVPDISVFRTARDFAAWSGLTGRDHGTGGKHRTGPISKQGDRMLRTLLITGASSYLRHQRVRGVPDPWLRDLLARRPYKVVMVALAAKTARIIWALLTKGERYRNRAAVPAAA

SEQ ID NO: 105611 - protein, 363 aa, unidentified
MKIMTGIDLHSNNALCGLMDENGQRLVHKQLPCDLPAILQLLAPYKDRIATVAIESTYNWYWLADGLRDHGYHVVLANPARMKPYDGLKHTDDVSDAFFLTELLRLNILPTGYLYDRQTRPVRDLLRRRLLLVHQRTSLILSFKSLSERTLGQRVALARVKALKPDEARARFTAPADQLLSGTEIELMGHLTQAIHQIEAHVLSVAEKWKSYQRLQELPGIGKILGLTIALETGDAKRFAGAGNFASYCRCVKSLRTSNGKKKGENNRKCGNTYLAWAFVEAAHFACRCDDQCRRFYDRKKQQTHPVIATKALACKLAKAAWHVMAEDVPYDAARVFGPGKKTDLGESRREPAKGSGRTSQTD

SEQ ID NO: 105612 - protein, 417 aa, unidentified
MAAFVGIDWADQKHDVVLRSAGDPAKAEHQVIKSEINALNDWIAQIQERFGTKGKVLVCLEQSRGALIYQLMAYELFELYPINPSQLANYRKTFFSSGAKDDRPDADLLSELVMCHRDRLKAWKPDDQLTRELASLNEGRRNAVNRRTELANEIKSQLKLYFPVALQILENDITTALAADLLVQWQTLAELQKVSPGKLRKFFYGHNSRQEKKILERLALIKEAKPLTTDVAIIRPNALRVKLLAQQLKSLLPFIAEYERRIAELFGSHPDRFLFDNLPGAGPALAPRLLTAFGTDRDRFEVAGDLLNLSGIGPVRIASGKKTGKSASVHCRRACPKFLRQSFHEFGECSIRYCPWAQACYQAQRGRGKGHHAAVRAVTFKWIRILFACWKQRTPYDPQRYFQALQTRGSDYAQTTA

SEQ ID NO: 105613 - protein, 364 aa, unidentified
MKKSSKKHQGGTVAESKPGQVVGLDLGDRHSRYCMWSMSGEEMEEGRIQTTAASMEKHFGSEPRMRVALEAGTHSPWVSRLLQSYGHQVIVANPRKIPTLTKSESKNDRNDAKQLARMAAFDPKLLHPIEHRSLERQQDLNLIHTRSVLVRARTMLINSARGLVKSAGQRLPACSSEVFPEKVPAAVPPALKAACTPLLEQITQMNKTIAAMDKQIDKLDKKYPEITVLRTVPGVGPVVAACYVLTLGSPQAMETNRQAGAYLGLRPRQQQSGDCDPQCRITRTGNTYLRSLLVQSAQYILGRFCPDSELRRWGLKLAASGGKRGKKRALVAVARKLAVVLLSMWRNRKNFVPFPQPAAQLATA

SEQ ID NO: 105614 - protein, 346 aa, unidentified
MLYAGLDLSRKKVDVHVLNQAGQTITTTWAPPTADGLRGLAARIALYGEPVAGVVESMTGARFVHDQLELAGWDVELADAAKAKALAPLTAKTDKIDARVLAELARHDLVPAIWLPDPSVRAERERARFRLHLVRHRTALKNRIHATLMTFGQEVPVTDLFGQTGRELLARLDLPEPWATTVGRSLELVDDLDRQIDRCAADLRAMGADHRYVPLLVTVPGIGPLLGYTIASEIGDIGRFASPKRLVAYTGLCPRVYQSGDTDRRGPLTKDGPKYLRWALIEAATHADRHARFASRYERTKRRLGKQRGSRIARVELARELASVIWYVLTRQEPFRAAGPATCLVA

SEQ ID NO: 105615 - protein, 380 aa, unidentified
MSIGGCAKFRYTRQVMFKQNQINSQVRGERDASNKYETIKLGLDVHADSIRVVRMIDGATPQPAQKMSPKDFLIWVAKQVPLAKKVHSCYEAGPFGYGLHRQLVALGIENVVIRPQALDEYYSRVNTDKTDAAALTRRLDAYVRGNRKALSVVRVPTEAEEQKRVASRQREQLMRELQRVAAQGRSLLLSQGYREKGVWWKLRWNHLQSRLPEWLVKHLEVFRAVLQTLQIQLNEATRSLEEHAPEARPRGMGGLTCAIIQREVGDWQRFKNRRQVGSYTGLCAGVASSGRSTQMLSVNKCGNQRLRCALVVMAWRMLIYQPRCHAVEKWRKVLLNAKAKASAAARKKAIVAVARQLAVDLWRWQTGRATPEQLGWEMAA

SEQ ID NO: 105616 - protein, 475 aa, unidentified
MGKGSGTTRGDRRRNARRERLRAILPRDGAVIGIDLAEDKQAIAVADHDVRVLARKTVKVKAFRLGEALDWAVAQARVKGFSHVAVACEPTGPRWLQVQRLCAERGLPLVCIQPLVSHIAREQQDFTRHKTDEADCVMIARLATELHCYIPEELDETWAHLRHLGRRRVQLITAATASVQRVRDFLSVAWPTVTETCARPLESVTWLAALQAVTSRCGGDPGRLAGMGEEAFTALVRSAMAGWGARRACARICVRVFAALTDTEGVVASCRRGLLRRVADELGDLQRTRAQLRAAEADMVSALDELGLSRLGDIPGLTATGAAAILAETGDPRRYDSSSSLVKHAGLAPADNASGALSGQAHISRRGRPALRLAVWRAVWPMLRFNPVMAAKYQALTRAADAAARAAGVHHGARTRPATAAAAAARARHATARVACAASLLRWIYSMIVHGTSWDPAVAASTACQHPPASQPEAA

SEQ ID NO: 105617 - protein, 344 aa, unidentified
MTYFAGIDVSLEESSICVVDAGGKIVREVKVLSEPESLVKFFREAGVVVSRIGLEAGPLSQWLYDGLTEAGFEVVLLETRHVKAALSAMVVKTDRNDARGIAQLLRMGWFRPVHAKSVGSRDVRALLTARKLLQSKLIDVELSIRGILRGFGLKMGKISKGRFEARVLELIEGHAMLEQIMAAMLHAREALRTEYTTLHRQVLALARACPISRRMMTAPGVGPVIAITFTSAVDDPHRFPRSKSVGAHFGMTPRKYQSGETDVNGAISRVGDAAVRTALYQAAHIILSKATPYSSLKVWAMQVAKRRGMKRAKIACARKLATILHRMWIEESDFRWGKETTPAA

SEQ ID NO: 105618 - protein, 420 aa, unidentified
MNYARIRVLPEVPPGGVCAGIDWAAASHTVCVVDMKGQATDRFAVAHDRAGIAALIGRLRGNGACEAAIERGDGVLVDALLAAGLTVVVITSRQVRNLRSRYVASGAKDDGFDAFVLADTLRTDRARLRPLVPDSPATAALRQAVRFRKDLVGDRVRAANRLRAHLQTAFPGAVGLFSALDCPLSLAFLAAFPSRAAAAKLDEQAIAAWLRTVPHRGATRPAVLAARLAAAAPGTGDDAAQAAVTLQMARAAAGTAARIRALEPMIAAQLRAHPDQHIFTSLPRAGTVRAARLLAETGDCRSRYPDPQALAGAAGVSPVTRRSGTWISHHFRWDVNACLRDALCDFAADSRRASPWAASIYTAARQRGKDHPHAVRILACAWTPVIWRCWQDGTAYDPAKHHALQDILARQTPDKAQQEQ

SEQ ID NO: 105619 - protein, 437 aa, unidentified
MRRKKNKANKSVNLQILPVVNPNAAGIDVGAKEHLVAVPCDRDPKPVRTFQAFTPDLHELAAWLKRCGIQTVALESTGIYWISLYEVLEQYGFEIRVVNARHVKHVPGRTKTDVLDCQWIQKLHSFGLLNGSFRPDQQIRKLRTYMRLRDNLGVASTQAVHHMQKALFEMNVQLSNVISDIVGETGLHIIEAIIAGERDPKQLAALCSTRIKASRETVAKSLHGSWDEALLFALKAALETFRFSQTKIQECDCCIQQHLAQFESRVEQINSPQDLKTQLHRVCGVDLTKIPGIKEQSAQIIISEVGLDMTQWKTEKQFCSFLGLCPDNSISGGKVLHRATRKVYNRAADALRLCAQSLTHSKSALGAKYRRLKARLGAPKAIVAMAHHLARLVYRMLRYGQNYVEQGIHQYELKFQLQRIKWLKKEAKSLNLQLVPA

SEQ ID NO: 105620 - protein, 417 aa, unidentified
MNTHWNEQPYFAALDWASDHHDVIVLDRQGAVQSEFRFPHTAEGWADFSAKMSPFAGAPITLETSSGPAVDQLLQRGWAIYPVAPTAAARYRERKVPSGTKTDRHDTWALADALRTDGHAWRILRPQDEATATLRILCRDEIALIEQRTALVNQLQAALREYYPVALQAFEDWCAPFTWAFIVEFSTPAQLRAAGRRRWEKFLHVHRLWRPDTAPRRLELFASDALQASPSVTVAKGLLALSLARVLITLKNQLDQYRQQIGEAFRRHPDHDLFGSLPGAKEFLAPRLLAEVGSVREDYPDADALMCLSGVSPVGYQSGQVEKCRLRRACNKVLRATVHLWVNASRRRCRWADAYYHHKRGEGHSHASALRCLGKRWLKILWRMWQTRQPYDESRHLAQVQRRNAITWQALAALPSE

SEQ ID NO: 105621 - protein, 354 aa, unidentified
MDTTTTVSVDLAKNYFELAISTQAGVIERRERLSRARFLRFFSNYPASTVVMEGCGSAHYWARCLRTQGHQVRLLPAHHVQRYVRGNKTDRADAAALLEAARCAEIRCIPIKSVDQQVVQQLHRLRQQYQRTRTARVNQLRGCLREFGIFIPQGIARGLSAVRAALQCADNELPDLLRPHIGELLQEVDVLKMQIARIERTLRELTQHDPVVHRLLQIPGIGLLGATALRAAVGDITRFATGRELACWLGLTAREHSSGERRRLGSISKRGDPYLRTLLVHGARSALVAAHRTVLAGHSPDRLRAWALRTEQRRGINKATVAFANKLARIVWATWAHERTFNGDWQRSALLPES

SEQ ID NO: 105622 - protein, 372 aa, unidentified
MEKFSKYVGLDVHKDTIAVAIAAEDSEVRFYGEIANNPTAIIKLVKLLSKEGELVSFCYEAGGCGYKIYRQLTAMGKDCIVVAPSLIPRKAGERVKTDRRDSINLARLYRAGELTPVWVPEDEQEALRDLTRAREDMKHFERQAKQRLLAFLLRHGWMYRGKARWTHAHYRWMETVKFDRQAQQIVFQEYKDIVNSFGTRVEEIENQMQIHAKESLSWPVIESLMSLRGVNFITAFTLIAEIGDLQRFASAPKLMAYLGLVPSERSSGNSVRRGGITKTGNSHVRRVLIEAAWTYRFAARRTPIIQRRMDKVPTAIQEISWSAQKRLCQRYKTLQTNGKLKVQVCTAVARELTGFIWAIGQATPMMKNTPTN

SEQ ID NO: 105623 - protein, 354 aa, unidentified
MIIIGADYHPGFQQIALVDTDTGEFEERRLEQREEAEKFYRDLATRLLCVRVGMEASGQARWFERLLGELQFELWIGDAAEIRTKRVRKQKTDRQDAQLILRLLLEDRFPRIWVPSWENRDLRQLLWHRHRMVQARTRIMNQLQAVALNEGLRCKKRLWRDKGREQLESFRLAPWASRRRRDLLELLDRLSPTIAGLPQAVEQEAEKCPEAQRLQTHPGVGALTALAFVLIIGRADRFQCGKQIASYLGLVPREESSGQRRRLGHITKQGNSLLRFLLVEAAQVTVRSDQEWRNRYFHLALRRGRKIAKVALARKLAVRLYWMWRKGWDYEQLKKFGSHAGQPGNRDGVQSNTE

SEQ ID NO: 105624 - protein, 315 aa, unidentified
MTHFTIGVDISKDHLDAFRMSDSARRRFANDAAGHKAFLGWLAHPETVEGTRIVFEPTGPYHRSFERTLAAAGVALVKVNPRQARRFAEATGKLAKTDPLDAAMLARMGALLELEARPVRSPIANDLKDLHVAREALVKSRTRAKTRAKMLTLPLLKRQNGDQLKQIERQMAAIEKEIMALVNADPDLAGRLAILVSIPGVSTLTALALLIDMPELGTLDHGQAASLAGLAPMTRQSGRSSGRAFIRGGRANVRRALYMPALSAMQFNPDLKAKYQQLKAAGKASKVAITAIMRKLIVLANALLRDQRTWAQSLP

SEQ ID NO: 105625 - protein, 372 aa, unidentified
MPDSTRFVGLDVHRDSVAIAVAPLVGPIEDSTELPHQLPRLRRYFERLLKAGPVRACYEAGGCGYGLQRAMTSWGVVCEVIAPSLIPRRPGDRVKTDRRDAIMLATAYRRGDLAPVRVPSPEEERVRGLTRAREAFKNDVHESKQHVLKFLQLRGIVYREGKKAWTKRFRAWLEQVRPTLDPLDARVLAAYLSSLSHKETLRAALDAEVERVAQTRPYAEQVSRLRCLRGVDTLSALSLAVEIGDASRFDTPRRLMGYLGLNVSEHSSGGSTRRGAITKAGNTRCRRLLVEAAWHYRHRPAPSAAILARREGQSPEVLGSAARADDRLHRRFAALLERMPAQKAVVAVARELVGFVWAHMVGTPHALAARMR

SEQ ID NO: 105626 - protein, 347 aa, unidentified
MTIVEDRPVITGGVDTHADMHVAAALDPVGGLLGVQEFPATAAGYASLLSWLRSFGILAVAAVEGTGSYGAGLARHLAAAGVRVVEVDRPDRQDRARQGKSDPLDAVSAARAALSGRASGAPRGRDGAVEAIRALMVAKRSARQERTQAINQARALIMTGPEELRARFVRRSPAQLIEAIAALRPRPGDVPGYATRVALREPVRRDWFLDAQLDRLDELIGPLVTARAPGLLALHGVGPDTAAMLLVAAGDHPERLRSESSWAHLCGVAPIPASSGKTAGRYRLNRGGDRQANSALWRIVIVRMSSHPATRAYADRRSKEGLSKKEIIRCLKRYVAREVYRQLRNGA

SEQ ID NO: 105627 - protein, 343 aa, unidentified
MKITTIGLDLAKHWFQVHGVDANGRVVVRRRLWRSGVIAYFRSLEPCLVGMEACATAHYWARELIALGHRVKLMPPAYVKAYVKRNKNDAADAEAICEAVARPSMRFVPVKDAEQQSVLMLHRARSLLVRQRTMLVNALRAHMAEFGIIAPQGLRHVEILTKTIAHQQERLPELARAILQMIVGQLNGTMVRIREIEGQLARWHRESPVSRLLATVPGVGIMGASAIAATVADPTLFRSGREFAAWLGMTPRQNSSGGKERLGRTSKRGDKYIRSLLTAGAVAVLRHARNRPTRDGEWVRALLARKPTKLAAVALANKTARIVWAVMMRGEGYQPKEVFGRSA

SEQ ID NO: 105628 - protein, 360 aa, unidentified
MSNPESVNNFVGIDISKRGMEVLRISFNGKFERFKTKTTQEGEMKLINWLKGNDISVLEAGSQTFRIAKRLKNHGFDTIVLNPGDVRTIYASLRKTDKEDALKLARLAQRNPRKELPEVIVPTDEEEDARRLTTEQAHWSKQKTINKNRLHSLFTQAGLTDITKRNISSHANREEVIPYLPERYQREALRLQQSLELIDENLNAIDAEIRERLQRNKDYAKLSMSIPGIGPVTTHALLAYLGDCSRFSSGKQVSYYTGLVPRVDQSGESERYGSIIKRGCTPIRRVIIQCAWAMVKSEYGGPLKEFYEKLYPRIGKKKAIVATARKMVETFYAIMKSGEFYWGVPDGIILKKMKTYGLIA

SEQ ID NO: 105629 - protein, 392 aa, unidentified
MDWGGSFHQLCVLNTTGQVLMQQRINHTVAGLQVLAAQLGKLGSVLIAIERAEGLLVEFLQTLPKVTVYCVSPKISARARERYRLSASKSDSFDAFVLADTLRQEHWRWRPLSRPSPLAAELQAVSRDRQRVLHAKVACESRLRAVLETYHPAPLHLFSELDRDISIAFIRAYPTPDQARRVKSARMAAFCARQHYSGRTDPAVLVDRLTLHLLSASAGTTAGKSFAARLFAEELRMHTDHLRAFDRRINQLLDQHPDAPIFLSFPGIGPIVAATLISEMGEDRDRFPTLEGLLAEAGLAPITKASGRTRQVRFRYAANRRMRHVIDWWAFVASREDPWSQKVYQTARARGQGKYRALRGLGARWMRILWRCWTSRTSYNPERHPRPELLSA

SEQ ID NO: 105630 - protein, 338 aa, unidentified
MKVYVGMDLHATNTYVGMVDEENTVLHKQRYRNELPLILSGLDPFKKDIQGVVVESTFNWYWLVDGLMDQGYRVHLANVSAIKQYEGLKQIDDKRSAFWLANLLRLGILPTGYIYPKEERPTRDLLRKRLQLVRHRTSHVLSVKNILARNLGLRMKSEDVKRITDPEVRRLFPDREMQTMVLSSVGLIRHLEDQISTIEAMITKKLRVRKEFTKLMTVPGIGKILTLTIMLEVGDIHRFPTVGDYSSYCRCVKSIRTSAGKIIGYGNRKNGNKYLSWAYIEAAQFARRFHETVRTYYEKKMAKTNRIVAIKALSHKLTRASYYVMRDQVDYDPARLFA

SEQ ID NO: 105631 - protein, 323 aa, unidentified
MYKVIGIDVSKKKFDRTFLKGDKKWINKTYENSLEGILEFYKELPEGDCVFVMEATSSYYLKLAYFLSEKGEKVAVVNPLKIRRFAQMRFERVKTDKADARIIAQYGMSENLKFWEPMGRDLIDIRQICSVMEKIVKDRTMWNNKKEALENDPRHSRIAMNEIDEMLAFFEDKHRNLEIALNKLIEANYEAENSIIRSIPGIGPKTAIMLLALTDGFKRFSNYKEFISYVGLSPRIYDSGTIKGRARICKIGMGRARQLLYMAARAASKYNKVCKELYERLLAKGKAKKLALIAVANKIIKQAFALIAKNEFYSENYTLKLGI

SEQ ID NO: 105632 - protein, 341 aa, unidentified
MKEVVRQSIGIDCAMGEHVAAFSVMNLDRSVSHLSGLTFKNSGAGFKKLEKWIKKHHPCPDLTIVMEATGVYHEQLACFLTDRNYFVSVVLPNKAKYFAKTLDSKTITDKISAQSLAIMGLEKKLIKWEKPSELLNQLRQLTRERDQVVHERSQIKCQLHAESSGAWPNSSSLKRMNQRIKVLDKQVVEIELEIQELVKKDTDLSERIKRICTIKGVGILTAVTVIAETNGFSSIRNKKQLVSYAGLDVKQHSSGISVNKKSRISKHGNKYLRKCLHFPALAAIRFEKSHKELFVRLVSKHGIKMKGAVAVQRKILVLIYTLWKNETVFDPEYEIKSPEMS

SEQ ID NO: 105633 - protein, 376 aa, unidentified
MTEKLRFLGLDVHAETITVAVAEADGEIRSLGTIANREESIRKLIRKLGPVEHLRACYEAGPTGFVLYWQLTQLGVKCDVVAPSLVPKKPGDKVKTDRRDALKLARSHRSGDLTAVWVPDEASEALRDLVRQREAAKQDQLRAKHRLTKFLLRTGQRPPLGMKAWTERYVEWVQQVRYTHPAQEATLLDCLNEVQHMEERVKRLEQSIVEVIQLAPVPMQDVVRGLQALRGIAHISAVTIAVELGNITSRFEHARDLMGYSGAFPSEDSSGERIRRGGITKSGNAHLRRIVVESAWSYRHRPAIGARLRKRQEGLPAEITEIAWKAQNRLHKRYMTLMARGKEQRKTMTAVARELLGFIWAIGIKAEASCKQQLAA

SEQ ID NO: 105634 - protein, 379 aa, unidentified
MDQSRILYVGLDVHKDSIDIATADAAHEAEVRHLATVAGGSVPVTKALRRLISAGHRLHIIYEAGPCGFALARHFAALGWHCDVVAPSSIPRPSGERVKTDRRDAMKLARLARVHELTSVRVPDSADEAIRDLVRAREDAVREQRNARHRLKALLLRNGIVYSARSSWTCAHLRWLATIALPHAAQQIVFQEYLHAVSEAGARIARHEQAMRDVLGSWTLAPVVAALQALRGVQLIAAMTLVAEIQDFWRFDNPRRLMAYLGLVPCEDSSGPRRRLGAITKAGNAPARRMLVEIAHQYRLPAHVSPIIAQRQAQLPKAVTDIAWAAQTRLCSRYRRLTARRVHHNKIVVAIARELCGFVWAIAREVTPPPASTTPLHPH

SEQ ID NO: 105635 - protein, 406 aa, unidentified
MEVICPRCAGLDVHKQTVVACVRIAGDGAPLQEVRTFATTTAGLLALADWLESFGVEHVAMEATGVYWKPVWHVLEGHFELVLANAAHVKNVPGRKTDVNDAMWLADLLAHGLIRASFVPPAPVQELRALTRTRKQFVRERSSHVLRIDKVLEDANLKLGTVLTDIMGKSGRAVLQAIVDGQTDPERLLSCVGRVKASRAEVLEALRGRISAHHRFMLKLHLGHIDALDKAIAEIEKEVGLGLEPFRQAAKLLSTMPGLSAVSAHVVVAEIGIDMSRFATPGHLLSWACLCPRNDESAGKRRSTRLRRGGKWLKTTLVQAAWAAIKVKGGYLQAQFHRLRARRGAKKAIIGVAASMLTAIWHMLRDGTEWHDLGAAHFDRADAQKTANRLIRRLQQIGYHVTAVPA

SEQ ID NO: 105636 - protein, 346 aa, unidentified
MPASFHCGIDLGSKKTQVAIIDDEQRVLSNVRLDNDLIAIRKQLEPYRGRVQVVAEATFNWYWLIDGLQADGHPVTLAHTAGLAAISAAKVKTDRRDALTLARLLRAGMIPPAYIYPSEHRPTRDLLRHRWDLVAMRATEYRRIRNLLYQHGICDLGLADIKALDTEDVERLLQHPLTQAKALLELERIRLFTQQIEAVESELETVADPRPEFALLQQIPGVGTVLGLTILYEISDVSRFADVRHFASYCRVVPGCADSCESRRRGRNDKSGNPYLKWAFTQAATKAVAHYPRFKQYFERHLRRHGGRAKKIVCYAITAHLLAKAAFHILRTKEPFSEEALFRHQP

SEQ ID NO: 105637 - protein, 381 aa, unidentified
MRGASLLTEYREVSNKYGLEAQERRLAMNEHSTVKTSQTIGEDLGDRTSELCVLDAKGQVERRLRMATTAEAVQRTFEGLAACRVVMEAGTHSPWMSRLLQARGHEVVVANPRKVRLIGASISKDDQRDAELLARLGRVDVKLLAPIQHRGAEVQRDRALLQVRGTLVQMRSMLINQVRGLAKSHGQRVPKCSAESFPKHARATLEGELFLGQALLLEHIETLTQSVRGLDRRLEQMCTQDYPETLRLRQITGVGPITSLTFVLSLETPSRFRRSRSVGAYLGLRPKRRDSGERRPELRITKAGDSELRQLLVQCAHYILGPFGPDCDLRRFGERLIAQGGKRAKKRARVAVARKLAVLLHALWRSGEHYEPLRHASALAA

SEQ ID NO: 105638 - protein, 349 aa, unidentified
MRLYTQPHRFYAGIDLHARSLFTHILDDRGRTVFEKNLPASPAHFLDAVGPFRQGLVVGCECMFAWYWLADLCEDHAIPFVLGHALYMKLIHGGKAKTDRIDAAKLAQLLRGGLFPMAYVYPRAKRQTRDLLRRRSFFVRQRAQLIAHVQNTNSQFNLPPFAKKLTYAANRAELDIADRFRDPSTRLSIAADLKMIDAFDSQIADLERHLVKNAKVDDPVTFHLLRTTPGIGPILGLILLYEIDTIGRFPEVGNFLSYCRLVRCAHESAGKVKGSGGKKIGNGHLKWAFSEAACLMIRSCLPVKAWMQRQEKKRGKRKALSLLEAKLGRAVYHLCHKRVPFDLKRFLNG

SEQ ID NO: 105639 - protein, 415 aa, unidentified
MALKIVYKICCGIDVHKTFVVACIASTNDKGITSYESHRFSTYTSGLKTLLQWLLDRNCKDVCMESTGKYWIPVYNILESDCSIVLAHPKYVKAIRGKKTDKKDAKWIADLFKHDLVAGSFMPPADIRQLRDLMRYRFKLTCFKSSEKNRLQNCLTVSNIQLGNVVSDTFGKSAQAILDKLLENPADTSFDLEPLVYKSLKKKLPELRDAIDGYITPEQAGKLKVIKAHYENLESRKAELEELILALAAPYQQELAILQTAPGIRSDFTAIGIISEIGTNMEAFPSAKHLCSWAGLTPTNNESAGKKKSVRVSKAGCYIKPLLVQCANAVVKSTKHPEMRNRYLRLKKRRGHKKAIIAIARMLLTALYHMLKNGENYNAELYQKSDLLPVDREITVEQALMIARNQGYKIKSATA

SEQ ID NO: 105640 - protein, 338 aa, unidentified
MKTYVGIDYHKRFSYGTIMTEAGQIIKQSRFDNHPEAVAAFLGECGSNGCSAVLEAGYNSLVMHDWLDELIGSVTLADPLKVKAIAEAKIKTDKIDSTTLAHLLRCDLIPSAHVSSPAARIGKKLLRHRMFLVRLSTMVKNRIHSLMDGFPLIRDTRSTKDIFSKKGVCWLKQIELPKYGRRILDSEVSLLEYFGSQIKCVDGWISGFGHKDQRVKNVMTIPGIGKFFSLLVVSEIDDINRFRSPAKLHAYAGLVPSTHSSGGRTYHGRIIKQGNKYLRYAMIEAVWPALSKCMDVEKVYNRVYSRRGANSAKVAAARRLLTMVYRVLKEDREYRYRY

SEQ ID NO: 105641 - protein, 343 aa, unidentified
MELNAIGIDLGKTLFHLVGLDASGNVVVRKKCSRAQLLKYTANLRVQRIGMEACSGSHFLGRALREQGHDARLMPAQYVKPYVKTNKSDYIDAEAIAEAVQRPTMRFVPIKTEEQLDLQAVHRLRERWVMRRTAVVNQIRGLLLERGVTLPKGRSHVDEALPEILQDADLKLSGSFRLLLAELQLELEQLAEHIQQMDSAIQHTVKENEACQRLTTIPGVGPVIATALIAAIGNGSGFRKGRDLAAWVGMVPREYSTGGKQKLLGISKRGNNYLRTLFVQGARAVMRYRAKQAPGLNHWLTQLLARTHQNVVIVALANKLIRMAWAVLCKNEVYRAPALVASD

SEQ ID NO: 105642 - protein, 401 aa, unidentified
MKRLSGGIDVGSESHHITILDEEDHILYNQKVAHKLNEFTESIKQFKKIERKEKGVISFALEGKNGYSAPFDRILLDQGFTLYNVDNLKLKRFREAFAGEWRDDQRDALMLSKMLKLKEHINSPKEKVFIKIEKPSPLTESLKLLSCHQQTLIDEKVRLVNRLRKKLLEVCPQILELGKAKSKKLIAILTKYPDFSKYKRITLCSLLKIKGIGEKGAFFLLKRLNHLEYMPGLTDIYKTIILSYAKRISELQKEIEDIDKKLDEIGEKDKGVIHLKTIPGVATKLASRLIGEIGDINRFPSEKQLAVYCGIACVDNNSGKVTKAKAVYKANKICKQTLITMAGGSIRLSLQCRAYYQKKRAEGKSHNHTLRCLARQLIKVIYKMLTEDRDYMVRKELRKVA

SEQ ID NO: 105643 - protein, 344 aa, unidentified
MKITTIGIDLAKNVFQVHGVDEHDQPLIQRKLKRNQVLDFFVQQTPCLIGMEACAGAHYWARRLQAQGHTVKLMAPQFVKPYVKANKTDAADAEAICEAVTRPSMRFVPIKNIDQQAVLSLHRARQGFVKARTAQANQIRGLLTEYGIVLPQGISHVAKRIPEIVEDAANNLPDVFRQLLVRLRAHLVELDRQVQELEQQIIVWHRSNEDSQRLEKIPGFGPLTASALVASLGDAKSFKNGREVAAWLGLVPRQHSSGGKPFMLGISKRGDAYLRTLMVHGARSVMRVAENKDTPTDRWSTNMLIRRHKNVVAIARANKNARVAWALLAHGRDYDVEYERSASR

SEQ ID NO: 105644 - protein, 336 aa, unidentified
MNNYIGIDVAKATLQIYIPSGKIDIEISNTLTALKNLYSKLKKIYKKEIKDVVFVYESTGSYSSILEIFSQKQDVKCFKVGAVQSASFAKTIKNRSKTDKVDARMLSRMSILAKSKDIKVPYRDNKAHQIRSLMKYYQSLIKEENRHSNYKEAARYNNEDSYVLKRLEQKIKSLKKEQSSLIKKILQIIEDNDIYKKAYNNIISINSVGEKSAIILLYLFLRYPNASRQHITALCGLDPIHRESGTSLKKRARISKQGMSLVRNILFMPVMTAVVRNEEMKYHYEKLLERGKCKSLAQIAIMRKIVLLAHSLYKNDEKYDTIKYLNHLDIKDGLMS

SEQ ID NO: 105645 - protein, 345 aa, unidentified
MTYYTGIDVSLRSVSICVVDDKGEVCLEAKVAAEIDAIVDRLRRFSGDVKSVGFEAGTLTQYLTYGLQAAGFEVICLEARQVSVTLAAMRNKTDRNDARGLAQILRTGWYSRVHVKSLHSHQVRALLASRKAILKKCVDLENELRGLLKVFGIRLPSRVGHGSFDAELRETVCSDEMLACALVPLLDARTVLYKTYLKLDNAVKGRVRLDPICRRLMSIPGVGPVTALTFKAAVDDPNRFKSSRTVAAHFGLTPRRFQSGEVDNPGHISRAGDADVRSALYVAAHSLLTRNAQWSTLKAWGVRLAKIRGHRRAVVAVARKLAVILHRMWIDGSEFRWGSPAQTVA

SEQ ID NO: 105646 - protein, 351 aa, unidentified
MNIIGVDYHPSFQQIAFMDQETGECGERELKHSDGEAEKFYRELQQRGISVRVGMEATGYSRWFERLLAELGFEVWIGDAAEIKTKRVRKKKTDREDARLMLKLLLENRFPRIWVPSPENRDLRQLLWHRHRLVQMRTRIMNQLQAVAMNEGYRWKKKLFSEQGRGLLEKLSLAPWARRRRKELLELLDQLDPKTAELTAAVEHEAKKRPEVVQLMTHPGVGPITGLAYVLVIGTPERFPCGKQVGSYTGLIPCEDSSAGRQRLGPISKQGNTLLRFLLVEAAQAAARCNPDWRRRYLHLMMRREKRIAKVAMARKLAVRLYWMWRNGWNYSQMVEFGSHAGKLVTGHGAK

SEQ ID NO: 105647 - protein, 439 aa, unidentified
MPTPSLPVLDPTAAAIDVGSEQLHVSIAGRPPKVFGTTTGELYALRDYLLAQGVRSVAMEATGIYWLCPYEVLEKAGLAVVVVNGKYVKNLPGRKTDISDCQWQATLHAHGLLKPGFVPPEHIRRLQDYMRVRSDHIVMAGSHEQHMQKALERMNLKIHDVISDLTGVSGLKMVEAIVAGERNPVALLALCDPQIQNNKAGRLRAALEGNWKDEHLFALRQAYELWQFYQKKIGECDQAIEGVLKGMVGPEDPKSPVPPATKRGGVNAPQIAGLHGLLWRLCGGKDPTQLPGVADYVLLQLLSEVGTDLAKNWRTEKQFTAWLGLAPGSRQSGKRRGSQRRSRNRAGRLFCVIARSVGRSVDKALGGFYRRLKGRKGGLVANLALARKLAELFWRLMVHGVNYVEQGLKKYQEKVGQTELRLMQKLARKYNMVLQPKAA

SEQ ID NO: 105648 - protein, 320 aa, unidentified
METKNAVIYAGVDVAKATLQLHLLGRQNELANTPAGLRQLLKQVQKVPGLHVVCEATGGYEQPMVKALHHAQVPVSVTNPARFRAAAQAQGQRAKTDPIDAAGLTDYGQRFEPQATPPTSATQQKLVALTQWLQQFIHGQAMAKTQAEHHQEPFVRRQHAKLMVHLHSQVDAVEQQIEALVKENAELQERVNCLDDIKGVGSRTAWMVLAHMPELGQLNRRQVAALAGLAPWTRDSGTIKGKRCIGGGRPEVRVALYMASLSAARSNPVLCALFKRLRAKGKLGKVALTAVMRRLVIYMNHQLKDLAAKKANEKTEPAKA

SEQ ID NO: 105649 - protein, 416 aa, unidentified
MSLALPEALFYTGIDWAAQTHAVCVMDAGGKIAAEFTIEHSADGIAALVRRLARYGIPGDMPLAIERPNGRLVDLLLEAGHPVVPVSPNAIKTWREGEVLSGAKSDAGDAAVIAEYLRLRQHRLRTAAPYSDETLALRTVVRSRGDLVEMRVAAINQLSALLEAHWPGARAIFADVESPISLEFLTRYPTPAAAAHLGEKRMAAFLVKHGYSGRRPAAELLARLRAAPAGTSRESLTEALRDAVLAAVGVLTALNAAVKNLDRSVAAHLGEHPDGAIFTSLPRSGQVNAAQVLAEWGDCRQAYDGPDSVAALAGVTPVTNQSGKHRAVHFRWACNKRFRVAMTTFADNSRHASPWAAKIYSDARASGKDHPHAVRILARARIRVIWPCWLEGIPYDPARHGAAAALARQTAQPVTA

SEQ ID NO: 105650 - protein, 450 aa, unidentified
MKLSCRGHLAPPSMKHSYNFSVTCHGFRCILKITAKFDFYLSQQLAYKTECELPHLNHHLSSRTAAEGRTVKYQKTGSYAVNSIHGGSIMEKVYDKCCGIDVHKKLIIACFKKGNQQEIREFGATTRELLEMADWLKDGGCKMAAMESTASYWKPLYNILESSGLNAIVVNARHMRAVPGRKTDVKDAEWIADLLMHGLLRASYIPDKDQRELRELVRYRKSLVRERNRELNRLQKMLEGANIKISGTITDINGKSARNILEYILSGKQIGSAEYDILYEKKVIAHNLKASKEQIIDDLNGIMSDIQRKMLRLLLKHLDELNAIINELDDDIDNFMKPQEKQAAKAIQDIPGIGNTSAQAIISVLGTDMERFPSDGHLASWAGLCPGDNESAKKRKSGKTRKGNALLRETLVVSAHSAVKNKRSYFYAQFMRISAHRGKSGPMSQSLIQC

SEQ ID NO: 105651 - protein, 363 aa, unidentified
MKIIGCDFHPSFQQIAMVDTDTGEEIQMRLSHSNGEAQRFYESLSGEVMVGVESTGNMRWFQRLLARLRHSLLIGDATAIHASHTRKQQTDKRDAAQILKLLMDKRFPSIWIPSMEELDLRQLLKHRHTLVQMRTRVKNQLQHIAMNEGFQKKRKLWTKEGLEFLRNLELGPWSQRRRDDLLKILEELNEQIRQLSQAAEAEAEKQPGAQLLMSHPGVGPILSLATVLTLGEVRRFQTSKQVASYIGLIPCEASSGVRRWLGSISKQGNSFMRFLLVQAGIVAARKDETLGRFYQRLAHKKHHGVAKVAVARKLLVRLFWMLRTNTSYPAVVVRMQGSSSHPVVEVMADPLSGRPASRKKNKK

SEQ ID NO: 105652 - protein, 427 aa, unidentified
MPYKIASIDVHKAMLAAVNSDVEVVGEFEFERRQFGTTDGGLHQLVDWWIEQQVDEVVMESTAQYWKPVWAALERYWKPVVQKREGARPTTGSLHLAQAQSNRARRGRKRDFTDAERLLKRLVANELVLSLVPDPEQRLWRTIARAKKQQIGNRVQLQNRLEALLEEAYIKLSCFVSDLLGLSARRMLKALADGETDPEAVAALADNRLRATPNQLSDALGACRELNPVYRRLIKAVLEELELIDKHISRLDQEMADLLRPYQEQVQRLAEVPGLGPDSAQQIMAQVGATAATFPSGKALSSWVGVCPGDNESAGVNSSSRCPKGNRTMRSLLNQAANAAIKYKGGIFQIIYRRYVSRLGHKQTIGVVAHRLCHLIWKILHQGVRYDERGPDVNRRSQHQRTRRMIYELRKLGYRVELANSQSPVQA

SEQ ID NO: 105653 - protein, 347 aa, unidentified
MGYFAGLDVSLEETAICIVDDGGLIVREARIASEPEALVAFFRASGMAMERVGLEACSLTAWLHDGLTEAGIAATCIEARQAKAAMGAMPNKTDRNDARGIAQIMRTGWYRAVHVKNPSCRSWRALLTARRMVLNKRRDVENGVRALLREVGLKIGTPSRKNFAARVRELVADDPVLTGLAESLLSVIDVMSREVDRLTKRILDEVRVEPTCRRLMTVQGVGPLTALAFRATIDRPDRFRRSRDVGAHLGLTPRRYQSGETDVQGHISRCGDELARTALYEAAHSLLIRSTKWSVLRAWGMNVARRRGMARARVAVARKLAVILHRIWTDGSEFRWGKQVVTAAATV

SEQ ID NO: 105654 - protein, 465 aa, unidentified
MGKGSGGNGMTRGDRRRNARRERLRELLPRGGAVIGIDLAEDKQALAVVDHDVRVLARKTVRVKAFRLGEALDWAAAQAKVKGFERVTVACEPTGPRWMQVQRLCAERGLPLVCIQPLVSHIAREQQDYTPHKTDESDCVLIGRLAAELHCYIPEELDETWAHLRHLGRRRAQLITAATASVQRIRDFLSVAWPVVTEACAGPFESVTWLAALQVVTARCGGDPARLAALGLEEFTVLVRGAVPGWGGKKGLSRICRRVFAALTDTEGVVTWSRRGLLRRCADELGDLARTRAQRRAVEAEMVLVLGELGLSRLGDIPGLTAVGAAAILAETGDPRRYDSSSSLVKHAGLSPSENASGAFEGPARMSRRGRPGLRLTAWRAVWPMLQFNPVMAAKYAALTQAAAAAAADAGPQQGRAAAAARARRAKARVACAASLLRWIYCLVVHGTSWDAAAASGAICQPEAA

SEQ ID NO: 105655 - protein, 390 aa, unidentified
MYYCGIDVAKRKHAIALLDEHGHLVHRPFTIDNTRAGFDQLWQALASLSGPVLIGLEATGHYWWALYEELTQHDRPVVVLNALQVHAFRKSGVRKVKSDRTDANWIAEFLRFSQPIPAQPTTPVLLQLKEVSRFRYHLTDQIGDCKRKLLSILDRVFPEYETLFSSVFLTSSRQLLARAASAQERALFDLAELTDLLKTTSRSRFGRTKAEIIQAVAQQSVGVRFLADAAQLEVRCLLAQIDLLEEQRDQVDEALAQLMAQVPQHLTSVPGVGPTTGAALLAEIGDIQRFEAPEKLVAYAGIDATVYQTGQFEARQMHMSKRGSPYLRHALWQAASMAIVHDSELRAYYDRKRQEGKSHGTALGAICRKLITRIYIVLKENRPYEVRAQH

SEQ ID NO: 105656 - protein, 443 aa, unidentified
MSTLAASPAEPVFAAFAAIDWATKEHVVASVPAAGGRIEIAKLKNTPEAVELWSAALRNRFPNGPIAVAIEQKRGAVIYMLSKYDHLVLYPVPPTLSSCYRHAFFPSGAKDDNGATLLLLDLLRHHRDRLFPLQQDTPETRLLRFLTEHRRGLVEQKVSVVQQLTDCLAQYFPQLRAWFGALDTALIEVLLERWPSLQQLQSSHRGTLKRFLAEHRSWDNDRMTEQIRQIYAAIPATRDEVVLEACSRRTAACLAQLRVLRDQASAYDKRIAAITADHPDAAIFRSLPGAGDALVPRLIAAFGTDRNHWRDAGDLQRFSGIAPILVRSGNSSRVAMRRACPKFVRQTFHEFAAHSLRFCPWAKLLYEHHLKGDKKNHHSAVRAVAFQWIRIVYRCWLDHEPYQERIFLEAQRRRNSPFAAKNTAVTAIEFQTQAGFQKVIAKA

SEQ ID NO: 105657 - protein, 420 aa, unidentified
MKVVYPTCCGVDVHKSFLVATIIKTTSGVQPSYQKKRFSTFNNSILKFKNWLIENDCYDVCMESTGKYWIPVFNLLEDVINVTIANPKWVKAVKGNKDDTKDSKWIGDLFRLGMVKGSFIPCKNIRILREFTRYRYKLISARASEKNRFQNALTVCNVALDSVVSDIFGKSATSIINYLIEQSDNSINHEEISNRLLRSLKKKSDSVIESIEGYQMADSQKYRMRLVRAHMDYITSAINDIDTMLDSLVEPYENAINLLCTIPGIKRDSAITIISEIGTDMAQFSSSKRLCCWAGLAPGSNESAGKKKSVRIARAGVYLKPALVQCAHAAVKSDKTPYYKMKYERIYKRRGKKRAIIAIARMILTAIYQMLSTGEVWNPCDLYKIDMPQPLVDKQKAKAIKQAYKLLVSEGLISEPLLAS

SEQ ID NO: 105658 - protein, 453 aa, unidentified
MAQHNRSINIKTVKARAALTLTHPNAAGIDIGSASHYVAVPPDRDDEPVREFPSFTADLEQLADWLKACGVDTVAMESTGVYWIPLFELLDARGFTVLLVNARHVKNVSGRKSDVLDCQWLQQLLTYGLLRGAFRPADEVCALRSLSRQREMLLRSQGRHIQHMQKALTQMNIQLANVISDVVGETGQKILRAIVAGERDGQMLAAMRNVRIRASREEIAKSLQGNWRAEHLFALKQALAHFDFIGTQLTECDSDIEAQLQRLQSHDGDPAKGKKRSRTRNAPKFNLRELMFKMCGVDLTRIDGIDVTTALTVLSEVGPDMSRFSTAKHFASWLGLCPGTKITGGKVLSGKTKRVVNRAAQALRFAAAALRTSQSALGAYFRRLCSHMDKPKAVTAAAHKLARLIYTMLTKGEEYTDQGQEYFEERYRERVLRQLSQRAEKMGMKLVVNPQPA

SEQ ID NO: 105659 - protein, 337 aa, unidentified
MNNRNVIALDLAKNIIQVAKVSKHGEIVFNKAQSPSKVRQILANSSPSIVAMEGCGSFHYWGRVAQSYGHEVRGMSPKHVKPYISKQKTDANDAIGIAIAAIQPNMSFSPVKNIEQQILQTLTVSRKFLDKQLTQLGNHIRALFYEYGITIPRSKKALKRVLTERNDLPEVLLPLLSVLKAQYQHIEQSLNDVTKNLELLVSQNEQCQRVIALEGVGVLGAAGLIASLSQTKHFKNGRCASVYLGVTPKQFSSGGKTVMLGIDKCAGDKQLKSCLFLGALSYISNLPEKPKTLKQQWLLRLVARSGVKRACIALVNKNIRTAWAMLKQGTNYQPAMI

SEQ ID NO: 105660 - protein, 442 aa, unidentified
MARKPSKQRFTIVHPDCAAIDVGSREHFVAVDPRYENAVQSFTSFTDDLYKLADWLHSLAIKVVAMESTGVYWIPIYEILSERGFEVYLVNARATRQITGRKSDVLDCQWIWQLMTHGLLRGAFRPSDPTCCVRSLVRQRAFKVKDQAQTLNRMQKALSQMNIQLANVISDISGVTGMRILRAIIAGERDPARLAELTDGRIKAGKDTIARSLHGNWRREHLHALAQELAAYDFLEQQIAECDDVIGKALEQLPVLEHEPQPPRKALRSPHRTSAQQAALHQALWQVLGVDLTAIPTIGVDTALVLAGEIGSDLSRFPSSQHFCSWLGLAPPTRISGGRQLSGGGPKIINRAAQALKQAASNARNDKGFIGASHRSRLTRMDTSCAIKATAHQLARLVYTLLTKKQTYVEQGLEAFEAKSQDRQLRALLRKARKLGYQLVAA

SEQ ID NO: 105661 - protein, 348 aa, unidentified
MRFYTHHHKYYCGIDLHTSVMFVCITDRTGTILVHKNLKTTPEAFSRIIEPYREDLAVAVECVFVWYWLADLCEQLGVTFVLGHALYMKAIHGGKVKNDRIDSEKIAQLLRSGMLPQAYAYPQAMRSTRDLLRRRMYLVRRQAELQGHIQNTRHQYNLPAFEKRIDRAVNRHGIADRFEDPMVAASIRIDSDLMDSLHQQILSVERLIAEQAREHDPVALQFLRTIPGIGKILALTILYEIGDVNRFPQVGKFISYARLVKCAHESAGKRVSGRNNKIGNAHLKWAFGEAACLFLRESDQAKAWHQKLVSRYGKGKALSIIAQRLGRTAYFVLKRRTPFDREKFFASL

SEQ ID NO: 105662 - protein, 339 aa, unidentified
MNKIIYIGMDVHSSNFTLCSFEPGYGFEADKIFGQTQIKEDIFNSTVKYINKLKSMRPDVDVICGYEAGGLGYNLHRKLKAKEIESVILAPTTMAVARNSSKKKNDYRDAITIAKCLASSAYKAVYIPDEKDEDVRDFIRMRDDHKTALKQIKQQLNAFCLRHGHHYDKPKWTGLHLNWLRKLELSKVQRETVEEYLATYEALTSKIAALDVRIEDIASEERYSEKVNKLKCIKGIKTHIALSFVCEIGDFNRFKSADKFSGFIGLVPGECSSGNTERMLGITKAGNRHLRRLVVEISNTYRRGAVGRKSVSLRERQKDMPKDVVAYADKATNRCQRKY

SEQ ID NO: 105663 - protein, 343 aa, unidentified
MQIRSVGIDLGKTTFHLVALGDNGKVLLKKKFTQKQLITFTANMQTSLIGMEACSGAHFLGRALRAQGHDVKLIPAQFVKPFVKSNKNDFIDAEAIAEAVDRQNMRFVPIKTDDQLDLQALHRVRDRLITRRTSVINQLRAFLLERGLVFAKSPAKLRERMPDILENAEEDLTPRMRNLLALLWNEWKELELQIVEMNDEVEQIASSDPACQRLRQIPGIGPLVATAIVAAIGNGAAFRKGREFAAWMGLVPKQYSTGGKAKLAGISKRGNNYLRKILIHGARAVVLRSKRERIAMGSWLTALEARAPRNVLIVAAANKLARIAWAVLSSGQDYRAVQEPVAA

SEQ ID NO: 105664 - protein, 327 aa, unidentified
MFFIGIDVSKAKLDCTLLTAEADKRKTKVVVNTAAGVQALLAWCAKHGAQPAQLHAILEPTGLYHEQAATALHDAQVRVSLVNPAQARDFAKALAMRSKNDALDSYVLARYGQTLSPALWHPAPLHARQLRALLTRREALGKDLLRELNRKEKSQFSPSAPLVDGSIDKAIAFLREQIKQIERAIDQHIDNHPDLKQDRELLNSIPAIGPQAGNAILAVMHNRRIDSAQTLAAYLGVVPVQRQSGSSLNSCARLSKAGPSQVRATLYMAALVGTRHNPHIRALYQRLLKAGKSKKAALGAAMRKLVHLCFGVLKNRIPYQPNYAMHA

SEQ ID NO: 105665 - protein, 372 aa, unidentified
MTSIIYVGMDVHTTNYTLCCYSMEDDRFFVEVQVEPDAKNILKYLARIEKQQSRDCRIVCGYEAGCLGYSLYHQLHAHGIDCVILAPTTMMTKPGKRIKTDRRDARLISKCLAFHTYSPVYIPTEVDDAVKEYIRMRDDANSALTRVKQQIIAFCIRHGKIHDGKSYWTNKHLEWISSLDLGNKILSEVLQEYLIRYYQLREQVDMYDMRINELAQAEPYRQKVEKLGCFRGIAAHTVLPFCVEVGDFRRFATAQQFASYLGLVPGECSSGDKQQYTGITKAGNSHLRKLLVETAQVFGRSATKSGKSVALKERQAKCDSLTVAYADKANARLKKKYFKIAMRSKVNIAKTAVAREMACFIWGMMTDNISCA

SEQ ID NO: 105666 - protein, 370 aa, unidentified
MQRKQISFKGQKIFVGIDVHKDSWRVAIAPEMGVVKGHSQNPSAKELFDFLKKHYPDGDYHAVYESGFSGFSTYYALTDIGIDCIVMHAADVPTTQYEEFMKTDRVDAAKLVKSLKAGLLTGIYIHERDNIDARSVVRLRKTTQKMLGGCKSRVKHLLHCNGVVLPERFSRPGTHWSKAFIRWLKEEVRLISSTRDSLDILIEQVESLRKTLLGATRKVRRLSQSDRFKPQYDLLASVPGIGISVAMSILTEIGDISRFRNEREFASYLGLIPTSHSSSGDKVSHGEKTFRGNKKLGPQLVEAAWISIYRDHGLGCAYMAYKKRMEPQKTIIRIARKLSNIIIAVLKTGEPYEPYQWIEKERHTDRKTTS

SEQ ID NO: 105667 - protein, 338 aa, unidentified
MKTTTFGVDLAKRVFQVHWVNMETGEINRRQLRREQLVTFFASQAPALVAMEACGSAHYWARRFAGLGHQVRLIAPSFVRPFVKRNKTDVADAQAIWEAAQRPDMRFVAVKSEAQQAVLTLHRVRQQLVKMRQMQTNQIHGLLYEFGAAIHRGRHGMDDASRALAGLADSLPAMVIDTLREQLQRIEALNREIRTIERRLAAWQRQDEAATRLNAVPGVGLLTATAAVATIGEAGTFRSGREFAAFIGLVPRQSGTGGRVRLLGIGRSGDVYLRTLLIHGARSVLAHSKHPGDALRRLLARRPFNVVVVALANKMARTIWALLAHGRMYQPGYAAQPA

SEQ ID NO: 105668 - protein, 355 aa, unidentified
MDSKKYIGMDVHKESISIAVMNGAGKIGMECVIETKASTILQFIDGLRGDVHVTFEEGTSAAWLYDLLKPHVTKLVVCDPRKNASMREGNQSDKIDARRLAELLRLNHLSPVYHGEHGLRSLKELVRSYLTITKDLVRVMTRVKAIYRSWAIPCAGKQVYAPRHRVEWLGKIGEPGVRRRAEFYYQQLDALRTVRQEVRRELLAEAKKHQAWKQLCQIPSIGPIRAAVLLGILQTPHRFRSKRQLWTYSGFGIETHSSADHRSVDGQLQRVKKQSSIRGLNRNCNHDLKNLFKGAAIVASSKPGPFQEFYTTLLTKGIRPEMARLTLARKIATIVLMVWKRGACFDAQHLKPQTA

SEQ ID NO: 105669 - protein, 393 aa, unidentified
MRYFAIDIGAEHHVAAAVDEDEQILLRPLRFAEDTDGYRRLRDALGAPDDVLVGMEATGHYWQNLFAFLVAEGFRVVLINPLRTRRFAEEDLQRTKTDAIDALGIARFVRQKRPAPVAIADEATRELRELVRLRDQLVAQIQEQVNRLHRLVDLGFPELTRLVHDLSGPLATTLLQRYPTARQFASERPRRLAKLVYAGRNSVGDERAKALVEAAKRSVGAHHGNAYQIQVRYACEQLELLRRQLRQTSRDIDGLIAKHELGKLLVTIPGIGPQTAARVLAEAGDLSSFPDGDALASYAGLVPGLRHSGKSAPLRASLAPMGNARLRRGLYMPTLRAVRSNAWLRAFYERLVAAGKPKKLALVAAARKLLLAIFSVVKHRRAFVARLPQEASS

SEQ ID NO: 105670 - protein, 380 aa, unidentified
MREFTIARLRALARGRKSQRLTGRTVGLDVGDRASRYCTLDEAGAKLKEDKLPTTKAGLDAAFGKMAPCRIALEVGPHSPWMSRHLAALGHEVIVANPRKVRLITQSVKKNDRMDAELLARLARMDPQLLSPIRHRGEEAQADLAVIRARAGLVDARTALINCARGLAKPMGERLKACDADQVKASLAEGLGERVRKVIGPLLQGVEAISQQIEVCDQAIAEIATRYPEVKLLQQVWGVGALIALTYILTIEDAQRFEHSRDVGPYLGLTRKQRDSGDSQPELGISKAGDELLRRLLVQGAHCILRRDAPDSDLKAWGMARLQARPGQKSSKRAKKKVVVAIARKLAVLLHRLWVTGEVYDPHYNRKAAAAAKRKTRPAA

SEQ ID NO: 105671 - protein, 404 aa, unidentified
MSAISGIDWAADWHDVRVADADSGELLVEQRFAHDEAGIGALVELLIAQRVARVAIERPEGLLIGRLLAAGIRVLAMHPNQVAAARDRFRAAAGKSDRFDAFVICELCRTDHHRFAALAPSGDETIALQALVRTREDLVAVRVHLANQLRAQLDCFWPGAGRIFADADSPIALAFLARYPSPEAARGLGPKRLTAFLARNAYSGRRSVDELLERLRSAPIAAIGELEHEARHNTVTGLVAALTPIVAQISLLTSQIAGAVRTHPDGPIFLSLFRDPNSVITAAGLLAEIGDNRARYPTADSLAADAGQAPVAKESGKRRHATFRWACDKRLRNHFGVLADSTRHWHPWAHDVYHRATDRGCEHPHANRILGRAWTRILRRCWQDHIPYDPTRHGNLTQLLQQHG

SEQ ID NO: 105672 - protein, 407 aa, unidentified
MGVFVGVDWGGGSHAVCIIDARGEMLDQFMAGHDRDGLAALILRLRKQGEPGDIRIAIERPSGLLVDALVEAGFVVVPIHPNVVKACRPRYRAVSAKSDPGDAYVLADILRTDGHRLHALKPQSDAIKALRGLVRGRDDLVSTRVALANQLTALLDSFWPGAAAVFADIASPIALAFVERYPTAESAARLGPGRMAAFLAQHSYCGRRSPEALLQRLHAAPGGHAGEAESEAKGELVRALARTLQSLVAEIARITHRIEHTVAQLPDGRIVMSFPRTGKICAAQILAELGDVRERFQTEDQLAAEAGLAPVTYQSGKSRGVAWRWACNKRLRAAITCFADNSRHQSPWAAHVYKRARARGCDHPHAIRILGRAWARVLWRAWTDQQPYDPAKHTAAKTFRAPPTHSG

SEQ ID NO: 105673 - protein, 377 aa, unidentified
MVPLQSCPIARPPGPHSPAGGVAVHQPEQATEVIIGVDTHKDTHTAVALDTLGTRLGTTTILVSREGYRQIEAWARSFGSVRAFGIECTGSYGAGLSRALQASGHRVLDVNRADRRARRRHGKNDPLDAEAAARAVLSGQATALAKSGTSSVEMVRHLKLARDSAVKARAQAMQMLKALIVSAPAELREQLEGIRGKVTLVRHLAALRPGPMTSTTASAKVGLRAISRRWLSLSEEIEAHDRDLDVLAATHTPELITAPGIATGTAAEMLIVVGDNPERIRSEAAFAKMCGACPLPASSGKTSRHRLNRGGNRQANAALHRVIVTRMRCHQPTIDYVRRRTAEGKTKAEIMRCLKRYVAREVFTHLCKPRQPASETA

SEQ ID NO: 105674 - protein, 410 aa, unidentified
MNRDSNSVERVIGLDAHPDSFTAAVLRGQTPAQALTEKVSNKLPIAQFQLWAQKNSTPQDLFVLEASGNSFQLVRELATLERKALVLESRHLGKLKEAHANNDKISALRIAKAYLAGTAKTVWVPDSQTQERRDLFHAHRKAVKRTTQMRNRILSYLSDNGVRLKAPAEPAQTQLEANSLRQAKEWSPRQWQVLEGMLMEWRHAQEQRTHWRSLIAQEVLADPLLLSIVRFCGIRDLVAFALGALIGPITRFATPGKLVKYVGLDPAFDHSGEGQWEGGIGGHGRKDLRCLLIQSAQAILRSKDPMARWGRKLLARKGSLNLVAAAVARKLVMAVWYLMMGRSGTVERIDQSLSIKIGKIISSVGASALEQLGKTPKQLREEAYQSLKSTRIYLLDPNKMFAPNLKLLRE

SEQ ID NO: 105675 - protein, 318 aa, unidentified
MSDSVFVGIDVSSQTLEVASSRASKSWQVSNDGPGIEQLVTQLTELAPALVVLEATGGYEFDAACAAQAAGLTVAVVNPRMARNFARALGALAKTDALDAKMLAAFARVLHQHPERERYVKPLADAERQRLQALVLRRRQLVQMLASERQRLRLSHAIARPSIERVIDFLKKELADSDAEVAAHVRQHHAELAAALQSVPGIGAASVAVLLAELPELGQIDRRRVAALVGVAPLNRDSGQMRGQRAIWGGRADVRRTLYMATLTAVRHNPTLRAYYERLLLTGKRKKVALIAAMRKLLTMLNAIAKHGTQWNPPTPNT

SEQ ID NO: 105676 - protein, 351 aa, unidentified
MMIIGVDYHPSFQAIAFFVEETAECGEQELNHSDGQAEKFYRDLQQRGISVRVGMEATGYSRWFERLLAELGFEVWIGDPAEIKAKRVKKLKYDRYDARLLRRLMLENNFPRIWVPDPENRDLRQLLWHRHRLVQMRTRIMNQLQALAMNEGYRWKKKLFSEQGRAQLEKLTLAPWASRRRQELLELLDRMNPTIEELTAAVEREARKRPEVLRLMTHPGVGPLTALAYVLIIGTPTRFARGKQIGTYVGMIPSEDSSARKQRLGHISKQGNSLLRFLLVEAAQAAARNHPDWRRRYIHLAMRRHKSIAKVAMGRRLAVRLYWMWRNGCEYSQSLEFSSYAGKLGTGHGAK

SEQ ID NO: 105677 - protein, 421 aa, unidentified
MAQLAQEEFAAFIGLDWADAKHDVCLQATGTARREFLSFEHRPEAIDAWVQTLRTRFHGHPVAVCLELNKGPIVSALRKYDFLVLFPVNPLTVARYREAFTPSRAKDDPTDAELQVELLLKHRDKLKPLQPQSPAMRVLAQLVEHRRRLVGDKVRCTNRLTSTLKNYFPQVLQWFPEKDTAIFCDFLSRWPTLKAAQLARRSTLEGFFRVHHVRSVDVIDTRVQAIKSAMALTTDDGVITPNVLLVHALVAQLRVTLQAIADFDNAIAQRAQAHPDFPLFDALPGAGAVFAPRLLVAFGEQRERFTSADELQKYAGIAPVTERSGKKSWVHWRLQCPTFLRQTFVEWAAESTRHSFWAQVYSQQQRDKGKAHQAAVRALAFKWIRILFRCWQDHTPYDESVYLQALKRRSAPLLHNLAKGA

SEQ ID NO: 105678 - protein, 363 aa, unidentified
MQVRHIFVGIDLGDKNSVARIAVDRDKSERFGFLNTRQGRARLFREAKRRSEQADGATIVMAYEASSCGFVLSDEAEALGIKCRVLAPTKMEKSVEQRQHKNDDRDANDVLEKLRGHVLAGNRLPTVWVPDLETRDDRELIRTRLDLTEKQTQIKAQIRMLIKRHGLEKPSGLGAGWTIGYRRWLQALRESEQLLGWSTRQALDSLLRQLQCLEAEIDRVQKPLEELANEPRHKPIIEELRQEAGVGLLTAMVYRTEIGQAGRFGRGRQVGKFVGLTPTSHESGQQSDRKGHISRQGPPRLRKVLCQASWVHIVHDARAGRIYQRLVSRNPKKKKIALVAVMRRLAVRMWHRMRKIELQQVRA

SEQ ID NO: 105679 - protein, 427 aa, unidentified
MSKQNDLSRCLVALEQDATLIVVVEMGQASWRVAGIVPGLDRYPLYPLKKLGADRDALLQLLHRWRNEATKAGHAIDRIAVAYEAGRDGFWLARWLRSQSIEAYVIHLSSVPVSREHRRAKTDRLDTELLKRAFLGWLRGEPKHCSMAAIPTLEDEDARRPGRERQILVEERTRILNRLKANLARLGIRGFRPNLARAPSQLGALRTPEGVAIPTNTLAEMRRDLDRLRFVKQQIKEIEKTRAERLAKAPNERRYVAARALTRVVGVGVETADMLVQEVFSREIRDRRALARYAGLTGAPDESGQRRRERGLAKAGNARVRRGMIELAWGSSRAPEGQPAERMVSEANGGRAAGRAQDNDRRTGAQVPYRAVAARRDRRSAGRSSASPGGVATTELLQLERHRDGRAADDGPRRRQPDVDYGLRAAV

SEQ ID NO: 105680 - protein, 345 aa, unidentified
MSYFCGIDLGAKRSQVCIIDDNLKVLVNRKVTNDIEVIHGLIRPHGLVPTVIESTFNWYWIVDGLMKRQVPVTLAHSLKLAAITSAKVKTDKRDALTLAQLLRAKMIPISYVYPAEQRPLRDLLRQRWDAVALRADEYRKMRGRLYREGITTVGSNEVRLMGEEEVNELIDHPLIRRQMMANIERVELLTRQIKSFEKELLLQVKTRLDFTNLKTIPGIGDMLALTLLLEIGDIARFPKARLFASYCRVAPGCADSGDSHRRGRGNKQGNPYLKWALTQAAEYARRFDQQFADYFDAVLHKHPGASGTIITHCIVAHRIAFAVYHVLKDGVPYNPEKLFRSNPES

SEQ ID NO: 105681 - protein, 344 aa, unidentified
MDYFAGLDVSLRSCALCIVDSKGAIVLERELACDVDEITNCLKGFIHPVVRIGFEAGTMSQHLFYGMTNDGFDVVCMEARQVSAALSAMRNKTDKNDARGIAQILRTGWFSPVHMKSREAHNIRALLSCRKALLNKTIDLANEVRGLLKIFGLRLPKTVQHGSFDDLVRPLIAADEVLSQAMLPLLDARVAIYKNYLALDRRVKRAARNDDVCLRMMTVPGVGPIAALTFKAAIDDPARFKSSRTVGAHFGLTPRRYQSGEHDNPGRISRAGDRDVRAILYAAANSLLMRTMAGSQIKSWGMRLMRTKGRRRAVVAVARKLAVLLHRMWTDGTEFRPERVEGVA

SEQ ID NO: 105682 - protein, 343 aa, unidentified
MVHYVGLDVSLKQTSICVVDQAGSIVREGVVDSDPGAIAAFVRLNAREVGRIGLETGPTATWLWTELKRLGLPVICIDARHAKAVLKMQINKSDRNDASGIARIMQTGWFKAVQVKDLESHAVRALLASRALLVKIKRDLENHIRGLLKNLGLVIGRAKFNIFAVRAGELIEDRPELIAVVGPILKARGSIERQIDDLDRKVLNLARHDAQVRRFMTVPGVGPVTALSFKAAIDNPTRFKRSRSVGAYIGLTTRRHASGEVDWSGRISKCGDTMLRSYLFEAAGVLLTRVPKWSALKAWGIRLAKRNGLSKAKVAVARKLAVILHRMWVDGTEFNWSKKQAAA

SEQ ID NO: 105683 - protein, 417 aa, unidentified
MNAKTKPFLETSPAPKPPLRVIGLDAHPDSFTAAILCGPTPASAVVEKVFNQVPMDRLRSWALKHTTTEDLVLLEASGNSFQIVRSLAAIGRQARVLESRHLGQLKEAHANNDKISAVRIGKAYLAGTAKVVWVPDAQTQERRDWFHAHRKAIKRTTQVRNRLRSYLSDNGVRLPRHTRLTEPASLSPVLRNAGHWSARQWQVLEGLVMEMQHAEQQRQHWRRLIAQEVLEDPLLLSLVRLCGVREMVAFALGAFIGSIERFANPRKLVKYIGLNPAFDDSGQGHWQGGIGGHGRKDLRCLLIEAAQAILRCGQTATARWGRKLLGRKGNVNLAVAAVARKLVVAVWYLMKGRWSAVEEVEASLSRKIGKIISQVGKEALSQMGKSRQPYRQEINQRLQQGRVYVLNRNKTFQPAVA

SEQ ID NO: 105684 - protein, 391 aa, unidentified
MVCVGIDVAKDKHDCCILDSDGMVRADCFTIPNNMDGFKQLLQTIRNCTKKSDKIKVGLEATGHYSYNILGFLLDNGLPTYVINPLHTNLYRKSLSLRKTKTDRVDARTIATMLLSDVDLKSYTDIAYHNEELKSLTRYRFDKVRERAKLKQSVSRLVTILFPELEKLVPSLHIASVYALLSEYPGAKQISEIHLTKLTNLLTTASKGRYGKEKAIQIREAARASIGSVMPAKSLELKHTIKLIQELASEINEIEDSIQKIIDELNPPILSIPGMGVNSAAVILAEIGDFSNFSSPDKILAYAGCSPSTYQSGKLTNCYAHMEKRGSRYLRHALYNATKYVCYWNPVFAEYLAKKRAEGKHYNVALSHAMKKLVRLIYALQKSGKAYLAAA

SEQ ID NO: 105685 - protein, 371 aa, unidentified
MKKNNTCGQSRKGVAKGRSGTLTIGLDLGDKSSRYCVLDNNGEVQREGSVGSSKKAMKQVFGPRKRCRIALEVGTHSPWVSRLLKELGHEVIVANARQVKLISASSRKDDRLDAQTLARLARVDPQLLRPIQHRSEKAQGQLLQIRVRAALVDTRSGLVNTARGLVKAMGERLPSCDTDQMEVERMAGLPAEIQEALRPLLEEVESLTEKIKQCNEKIEQIARQEYPETALLQQVSGVGTLIALTFVLTLEDKQRFQRSRDVGCYVGLRPKRSSSGESQPELRITKEGDVYLRKLLVQGAHCILNRRGPDTDLKRWGLILANKGRKNAKKRAVVAVARKLAILLHHLWVSGEVYEPLRNSNSRARQQKAVA

SEQ ID NO: 105686 - protein, 394 aa, unidentified
MFLVGIDIGKHKHSFCIINKETGESIVRPKFFNNNKVGFEELLSSFKGLPKKDILIGMEDTGHYHFTLLKFLLDKKYQVALINPVTTDLTRKLSGSHTKTDKLDTLTICDVLTSNQRTKPYRISKVDRFDLYEQKQLTREHHNLKEQSNVLKNRLQKSIDIVFPEFNDLFKSMYGVVYMNILKEFGSADAIAHSDIRTIRKCFAFKGRGKRIELTAKELKNAAINSIGFPSIAEVVQIKHLVNQIELIEEQIEELDKKIEEFSIANNSPILSIPGISHFSGTSILAELGDIHNYSKPSQIIKFAGVAPLTYESSQFTAKHTAITKKGSTFLRKTLYQIILPVINNNKVFKDYYNLKLSQGKGYRCAQGHCVRKLLRVIFQLLSTNTQFDPTLLV

SEQ ID NO: 105687 - protein, 408 aa, unidentified
MLFVGDDWAEDHHDVEVQDEQGRTLKAARVPEGIDGMARLHELIARFLPQDSDPGQVLVCIETDCGPWVRALVAAGYQVYGVNPKQAARHRELMSLSGAKDDKADARTLADMLRTRRHQLRQVAGDSDEAEAVKVAARAHQTMIWERTRHMLRLRTALREYFPAALEAYKPLGLAGADTLELLARATDPTSAARLTIGQITAALKRARRRDVPTKAAAIQAALRTEHLGQADIVTGAYAASVRATVAVLRTLGEQIKVMEGEVGACFGRHPDAEIYLSQPGMGGITGARVLAEFGDADGRYADAKSRKNYAGTAPITRQSGKTKTVHARFIHNDRLVDALHLQAGAAILHDAAARAYYDELRAREIDHNAALRQLGNRLVGILHGCIKTKTPYSQAAGWAHRYQHLIA

SEQ ID NO: 105688 - protein, 349 aa, unidentified
MKIIGCDFHPSYQQIAVLDSVTGEMVEKALSHERKEEVRAFYAGLKGSVRVGIEASGQSQWFERMLAELGHEVWIGDAAKIRASCERKQKTDRRDAELLLRLLAEDRFPRIWVPTAAERDERQLLLHRHKLVRMRTQVKNQLQAQALNQGVQRKRKLWSEAGRKQLESLPLLPWASRRRAELLQLLDQLEASISELDRAVAEQASARPAARRLMTHPGVGPVTALAFALTMGPAERFQRGKQVASYLGLIPSEHSSGGRKQRLGHISKQGNPFLRGLLVEAAQSAVRYEPEMRRAYQRLAQRKCRALAKVAMARKLAVRLYWMLRLQVNYAQLIQGSHAGQPGTFCGRG

SEQ ID NO: 105689 - protein, 351 aa, unidentified
MWIIGCDYHPSMQDIACVDTESGEYLERILQHSTGEAEKFYRDLKQKRAAVRVGIEATGHARWFERLMAELGFELWIGDPAEIKAARVGRQKRDREDARLLYRLLTENRFPRIWVPDPANRDLRQLLWHRHRLVQMRTRVMNQLQAIAMTEGVRMRMKLWSKSGRAKLESLAVAPWAARRRKDLLELLDRLTPKIEELNVAVEQEASKRPEVRRLMTHPGVGPVTGLAFVLVIGTPQRFRCGKQIGNYLGLIPCEDSSAARQRLGHISKQGNSLLRFLLVEAAHAAVRFDANWKRRYLHLAMRREKRIAKVAMARRLGVRLFWMWRKGWDYQQVLQFGSHAGELVTGHGVK

SEQ ID NO: 105690 - protein, 434 aa, unidentified
MAGSFSSIGGGDPDAETSDREEIIERVAALDIGKAELVCCMRVPCAEGKSRRVQEVTTYQTMTRTLLGMVDRLTELGVTRVVMEATSDYWKPPFYLLEAAGFETWLVNAKDAKHLPGRPKTDKLDAVWLCKLAERQMLRPSFVPPPPIRVLRDLARYRADLIGVRTAEKQRVEKLLEDAQIKLSVVAADIFGVSGRPMLAALIAGQRNPQILAQYARGRLRGKLADLEEAFTGRFTDHHGFLLAKMLARIDQVDTDLTDLDARIEAELAPFAQAAARLDEIPGVGHDTACIIVSEIGIDMSRFPTAAHLCSWARFAPGVKESAGRPKGNGTTGHGNRCLARVLGEAAVSAGRTDTFLGERYRRIARRRGKQKAIVAVGRSLLVIIWHLLADPDTRFHELGADHYDRYLNTLAKRRNHVRQLEALGYRVTLEPAA

SEQ ID NO: 105691 - protein, 385 aa, unidentified
MGSQTFIPRDYDVFSGLDVDKRSISVTFTDHDRFLKSLRMPYSAEHLLNHVRKHFPNKKVAFVYEAGPTGYGLYDGIVAQGYPCLIAAPSMIPKAPGQRVKTNRLDSKALSESLRGGQLKSIHVPSAVYRELRHLTQLRDVLVSELVGMKQRIKSLLLFEGIEFPPAPPGSQWSSIVKNKLRKLPCSGTVRFKLDQLLDNLEFNEKQILKTIREIRRYCQNDPELSGCMKYLMSLPGIGWITASQLLARIGDWRELHNIRQLGGFLGLVPTEHSTGERTDRGSITRTGDERLRSKVIQASWSAIRQDGELREFFRTVCRKHPREIASRVAIVAVARKLSVRIAVVLMKQRPYEVREKVHSAPLTQEETVPQGTTRREPEPGEKNS

SEQ ID NO: 105692 - protein, 418 aa, unidentified
MNSDPASIPILRYIGIDIHKHYLVIGGMNSQKEWVLRTRKVRMSRFPEWVQKNINPSDAVVIESTSNAWEIYDLLAPLVAKAVVANPLKVGEISGAKVKTDRLDVERLLTLLIADIVPEVWVPPHHVRDLRSLISHRWRLHKQIAMTKNRLQSFIHRFNLITPEGPLFSEKNRSWWQQQDFSSIVRLQIEQDLLILEHLSNHKEAIHQELARLSNRKPWADDMVFLMQTPGLGIVLSMTVLSAIGDISRFKHAKNLVGYAGLGAGVHDSGQKHQGKGITKRGRKELRWAMVEAAWGAVRSDPHWKSQYEALKNRGKHSNEAIVAIARKMLITVWHLLSKREPRRHSTEEDLAYKMLIWAQRMDENALRGLTRQQFVKYGLLRLGKGFHLTRIVRNGLPRRIAPTDEVIALLPQLNLLE

SEQ ID NO: 105693 - protein, 345 aa, unidentified
MHNTRVGVDLAKDVIQVCIYSNHKVISNTEMTTAEFSLWLVCFKPTFIVFEACGMSNYWLQAARKAGHDARLVSAKLVSLVRQNQKTDANDALAIVQTTFLPDVKYISGKSMEQQQLQSINRFRDLADKQHTALLNQISALLAEFNIKASYKTRGLGALIKSTLEDAENNLTHEFREALNVAWQQCLVIKQSLDAYNRCLLNSIEQHAECKRLLKLEGVGVINAINLYVALGCCDLGVFKKGKDASACIGVTPIQHSSGGKVKLGSIGKSSKNSKLRSQLILGAMSAVRQMVKRPAVTKKEAWVQELVKRRGQRCAAVALANKTIRTAFAMLTKDTEYKAELIAG

SEQ ID NO: 105694 - protein, 407 aa, unidentified
MEVICPRCAGLDVHKQTVVACVHIARDGAPLQEVRSFDTTTSGLLALADWLESFGVEHVAMEATGVYWKPVWHVLEGHFELVLANAAHVKNVPGRKTDVNDAMWLADLLAHGLIRASFVPPVAVQELRTLTRTRKQFVRERAAHVQRIEKVLEDAKLKLSVVLSDILGKGGRAVLQALVDGHSEPEYLASCITTRVKASRTELLEALRGRVSAHHRFMLKVHLSHIDALDKAVASIETEVGAGMKSFRQAAKLLSTMPGLSEVSANVVVAEIGIDMSRFATPGHLLSWSCMCPRNDESAGKRRSTRLRRGGKWLKTTLVQAAWAAIKVKGSYLQAQFHRLRARRGTKKAIVAVAASMLTAAWHMLRDGTEWNELGATHFDRADAAKTANRLIRRLQQIGYVVQATPA

SEQ ID NO: 105695 - protein, 356 aa, unidentified
MSIIGGLDIHRKQLTFDYVETETGRLERGRIAPADRERLADWLTRFESSTPVAFALEGCTGWRYVVEEMHKAGVRPHLAEPADTAALRGPKRRAKTDKADAKHLRELLEAGRLPECYIPPEPVLEWRAVLELYSDLRVEHTGWAQRVHATCFHQGTTALGDAGVVRGSRERLRSIVDDQLSVAGRLQVNTALSIMDTLAEHLDRLRRRIVATAWQVAGARALMDAIYGVGPMTSLALVCWLGGADRFSSSRKAVRFVGLDITVYSSDSKRRPGRLSRQGPEVLRWLLCEAAKTSARSSAPDHGYYTSVRERYDGNRAALSQARRIVRRAAHILTDLGDEAFTTTRQPTTPHAAVTR

SEQ ID NO: 105696 - protein, 377 aa, unidentified
MEHDSTTLYVGLDVHKESITVAYARGSGEVELLGKTGTTQADVDRLCRRLQSKARHVCVVYEAGPCGYGLYRQLVQKGFGCMVCAPSLIPRKPGERVKTDRRDAIKLVRSLRAGDLSSVYVPTVDDEAFRDLARTWVSAKDDLKRARQRVKAFLLSHGVRYTGRADWGPSHRRWLSSYTFGSAWQQLAFEEQRRAIEDRLAQCVRLEAALREAVAGWRFYPVVLALQTMRGVQFTTAVGVLAELGDLSRFAHPRQLMAWLGLTPSEHSSGEKRRQGSITKNGNSYARKLLVEAAWSYQHPARVSPEIQRRHEGIPKPIVDRAWDAQVRLCRRYRKLVARGKQKNIAVVAVARELAGFIWDISQLAMSLAVPHEGPTA

SEQ ID NO: 105697 - protein, 454 aa, unidentified
MSKAKKSGDMPIVHRNAAGIDIGSQFHVVAIPPDRAEETVKSFKSFTGELHAMASWLLMSGIETIAMESTGIYWIPAFEILESYGFEVFLVNAREAKNVPGRKTDFSDAQWLQKLHQFGLLRASFHPTSDIAELRAYLRQREKLLDYKAAHIQHMQKALMQMNIQLHHVVTTITGKTGMSIIQAIVAGNRDPQDLVKFRDARCKNSAETIRAALTGNYKPEHLFALRQSLELYDIYNEKAAACDQEIQTVLDRIQQNIMPPEQPLPKAKHNTVNKNAPDFDIRQVLFNIIGVDLTQITGLGPYLSLKLVSECGTDMSKWPSAKHFTSWLCLAPSNKISGGKILSSRTRPSSSRAAALLRLAAAAISRSETALGAFCRRLSARVGKAKAITATARKIAVLFYNTLRHGLLYVDPGADYYEEQYKSRILGHLRRRADSYGFTLQPKDVSAATIGVS

SEQ ID NO: 105698 - protein, 409 aa, unidentified
MLKIVYPICCGIDVHKTFVVACIASTNDKGVTTYQTKRFSTYTKNLNELSDWLSVNNCKDVCMESTGKYWHPVWNVLERTCRPVLAHPKYLKAIRGKKTDKKDAKWIADVFKHDLVSGSFIPPVIIRKLRDLMRYRVKLTNYTTGEKNRAQNCLTTSNIQLDHAFTDVFGKSATRILNHILDNPGDKTFDVTPFVDRRCKTPIEEIQLAVDGDISSEQAEKLKIIRSHMDSLDLCKVNLESAILFLVDPLLPQVNLVSSVPGIKDFSAIAVIAEIGFDMSVFPTAKHLCSWAGLAPQCNESGGKKKSSRVSKAGAYIKPLLIQCSNAVVTSNKHPEIKNRFLAIKKRRGHKKAIVAIARMLLTAIFHILSKSEPYNPALYRNSDVPPVDSVERAVKLLEKRGFTVSQPT

SEQ ID NO: 105699 - protein, 360 aa, unidentified
MTATMTYVGLDVHARSTHAAAIDVASGELCRARFGGGSEEVIGWLAALPQPLRGCYEAGPTGFALYRACSSVGLRVDVIAPSKTPRAPGDRIKSDRKDAELLARLLLAGQLKIVTVPSPSVEAARHLCRAREQVRSDLMRCRHRVSKLLLLHGRVYPEPSTWTQRHRQWLARQQFDEPASELAYLDTLAAVDGLVARKSALDERLSRLALEGEWWPTVARLRCFRGIDTLTALALSLEIGDFARFENPRKLSSWLGLVPTLDQSGESRRQGAITKTGSSYARRLLVEAAWHYLREPRIGATVANRQQGQPAHVLQIAWRAQHRLHRLHTRLRAHGKPPNVATVAVARELTCFLWAAAMAE

SEQ ID NO: 105700 - protein, 350 aa, unidentified
MTTPRMALPKLTIGLDLGDRYTQLCALDARGQIRATERLRTTPAALERPIAAVPRCRIVLEVGTHSPWVSRLLQRLGHEVLVANARQLRLIYGSDRKSDRVDAETLARLGRLDPALLKPIHHRGPEGQAALAQLRARDALVRTRTLLINHVRGAVKAWGARLPASSAPAFATTAAGGVPLELRRALGPLLELIATLTHEIRGMERQLERLAQEQYPETARLRQPSGVGLLTALCYVLTLEDPGRFHQSRAVGPYLGLCPRRDQSGGRDAQLRITKRGEAMLRRLLVSGAQYILGPFGPDTDLRRWGLRLAARGGKNAQKRAVVAVARKLATLLHRLWVSGAAYQPLRAAA

SEQ ID NO: 105701 - protein, 406 aa, unidentified
MELVALHKRVIGLDVHQAQITACAIIEEGDGTTRVEQRQFGAFKRDRRALAEWAAALLPEAVVMESTGIYWKSPYAALEAVGIRALVVNARHVKNVPGRKTDVGDAQWLATLARAGLLRGSFIPPALLRELRLIARQRQKLVGQLASEKNRLHKVLTDSGIRLGVVVSDLHGQSARAMVKAIVAGRASHEVLDCASKRLKASREELFDAVQGELTPSHRFVLDELMRHIEEIEARIGRFDARLLNGLVGEHNTLALLQTLPGVDLIGAAMLLVEIGSDMDAFGSADRLASWVGVCPGNNESAGKRKSGRVRKGNLYVRRLLCEFAHAASRTTSVFKSKFQALTIRRGHKRAIIAIAHKLLRTIFFMLKRREHYRDSATDYEALSVQRNAPRWIKALTRFGFIPASA

SEQ ID NO: 105702 - protein, 429 aa, unidentified
MNYNTQNAKIASITEKTLIIGIDVGSETHYARAFSWRNYEYSKKPFAFSNDEAGFSSFKDWMDDIAEKHGMKVVIPGMEPTGHYWLNLGAYLQEQGMKPVHVNPHHVKKSKELDDNNPSKNDRKDPKTIASLVNEGRFSYPYIPTGIYAEIRNLSNLRIQTQEEITRIKNRMARWFSIYFPEIKDVYRNPDAVSGLMVIKQAPLPCDIKELGVDGVNKIWRDARLKGAGIKRATTLVTAAEHSIGNTEAPRSARKEIRNLLNDYEIYKNRMDELMEEIEETLSEIPYIDKLMEINGIGIKTVSCVIAEVGDIGRFDNPKQVQKLAGYAIVADSSGKHNGESRISHRGRKRLRYALYEAAISVIGKNKEFKEIHSYYRTREKNPLKKMQSVIAVACKLIRIFYTILTKGVDYDGQRMLADIVRPEMQLAA

SEQ ID NO: 105703 - protein, 411 aa, unidentified
MLKIVYKNCCGIDVHKTFVVACIASTDDNGLATYQIKRFSTYTKNLRELAKWLEDNNCKDVCMESTGKYWHPVYNILETSCNVVLAHPKYLKAIRGKKTDKKDARWIAEVFKHDLVSGSFIPPAKIRELRDLMRYHSKLTNYTTGEKNRAQNCLTSSNIQLDHAFSDVFGKSATSILNHILSNPDEPNFDVTPFVDRRCKTPIEEIQLSIDGNISHEQAEKLKIIRSHMDNLDTCKLNLESVILAVAEPFLPQINLVSTVPGIREFSAIALIAEIGTDMSVFPTAKHLCSWAGVAPQCNESGGKKKSSRVSRAGAYIKPLLVQCANAAVKSKKHPEIQKRYLSIKKRRGHKKAIIAIARMLLTAIYNILNKNEPYNPELYRKADTLSVDREQQAILLLQMRGYSVSKVIPA

SEQ ID NO: 105704 - protein, 358 aa, unidentified
MKELTTGREAILIIGVDLGDRLSEVCVMDASGEVTARTKVKTTAAGFEKIFRAMVPARIALEVGTHSPWVSRLLQSWDHEVLVANARKVRLIYQSTSKSDRMDAEALARLARLDPKLLSPISHRSGERQGHLALLRARDALVRARSLLVNHVRGAVKAMGGRLPACSTVAFATKASPHLPDTMRLALEPLLKVVETLTEQIDEAERGIGQVARKHYPEVVVVTQPTGVGLLTGLRFVLTVEEPRRFRRNRSVGAYLGLTPRRSQSGDRDRQLHITKAGDSDLRRSLMQCSHYILGPFGPDSDLRRFGMKLAERGGKSAKKRALVAVARRLAVLMLSLWKTGEVYEPLRHTQLVAQVPA

SEQ ID NO: 105705 - protein, 399 aa, unidentified
MNRNRTVAGLDVHKDSIYLCIMGHDEAIIFEKTYGVLTPDLRQMCQEMVERGVTEAAMESTAVYWVPVWNELCESMELKLVNPYFIKQLPGRKSDVKDAQWIAECLLKNLIRGSFVPEPIVQDMRKLNRRIFDLQEDITYYTNKLDAALHRCGFRLSNYVCKITGKSYRKAVASIAEGETDPETILKCIHGRVVNRHGRDTLLAAVTASFSQTDITVIRQYWELIAIYVRQSEECQSQLTALCESNFPTEYKRLQTIPGVKERAATAIIAETGVDMKMFATAAALVGWCGLKPRNDVSNGRYKSRKITHGNKYLRKILIEISWTASRTRNCFFSNFSYIQVTQKHKSKMKIQVAIARKILVAVWHMLSKGEDFIDIYLKRLEQQRLMEEKLKSLELKMA

SEQ ID NO: 105706 - protein, 412 aa, unidentified
MKQIRDKVGGLDVHRDSVVACTRVTMPTGEVEVAKERFPTTQAGLAALTAFLIEAGAKTVAMEATGIYWRTVYYALEGLFEELWLCNAAHVKNVPGRKTDLSDAEWLADVAAHGMVRPSFVPPSDIRELRELTRYRKTQVDARAKEIQRLEKVLQDAGVKLTSVASTVWSVSSRSMIEAMIAGERDSVVLADMAKGKMRNKTDRLEEALESNFGAHHAILCRQVIDHLDFLDRSIATLSAEICERLVPFEPQVALLTSIPGISATTAQVIVAETGADMSRFPTAGHLCAWAGVAPASYESAGKKRPVGTRRGAPWLRRTLIEAARAAARTKGTYYSAQYSRIARRRGPNKAAVAVAHSMLDTAWHLLSTGALYQDPGADYFERRHDPAIEAKRLQRRIEALGFAVTIEEKAA

SEQ ID NO: 105707 - protein, 376 aa, unidentified
MEHDSTLYVGLDVHKDSITVAYALGVGEVELLGKIGTSKADIDRLCKRLQSKASRIRIVYEAGPCGYGLYRQLAGKGFECMVCAPSLIPKKPGERVKTDRRDAVKLVRSLRAGDLSAVYVPSVEDEAFRDLSRAWVSAKDDLKRARQRLKAFLLSHGVRYSGRADWGPAHQRWISTFAFDTVWQQLAFDEYRRAIEDRLAQCSRLEAALREAVVNWRFYPAVLGLQAMRGVQFTTAVGMLAELGDLSRFVRPRQLMAWLGVTPAEHSSGEKRRQGSITKNGNSYARKLLIEAAWSYRHPARVSPEIQRRHEGIPKAIVDRSWDAQVRLCRRYRRLAARGKNPNIAVVAVARELSGFIWDISRLAMSLAIPNAAQTT

SEQ ID NO: 105708 - protein, 398 aa, unidentified
MTESSDYESVQVFIGVDVGKDTHHAVAINRSGKRLFDKALPNDENKLRSLISDLKQHGQILLVVDQPATIGALPVAVARSEGVLVGYLPGLAMRRIADLHAGEAKTDARDAAIIAEAARTLPHALRTLKLADEQIAELSMLCGFDDDLAAQTTQASNRLRGLLTQIHPALERVLGPRLEHPAVLDLLQRYPSPEKLASLGEKKLAAQLCKLAPRLGKRLAADIAQALAEQTVVVPGTNAAAVVLPRLALQLITLRKQRDEVALEVEQRVLAHPLYPVLTSMPGVGVRTAARLLTEVACRAFASAAHLAAYAGLAPVTRRSGSSIRGEHPSRRGNKALKRALFLLAFAALRDPLSRAYYTRKMSQGKRHNQALIALARRRCDVLFAMMRDGTFYTPQGS

SEQ ID NO: 105709 - protein, 429 aa, unidentified
MEKIRKNLAGIDIGAKKVFTAVEGQPVVSHLTFTEDFLSLRDYLLKLKIESVAMEATGVYWIILYEILEEAGMDVWLVDGRQTKQVPGRKTDVKDCQWILELHSYGLLNRCLVVDSDIKELRSYLRLREDHIRSSSMHINHMQKALTQMNIRLKDVIDQIHGKSGMAIIEAILKGDRNRDVLVRLCHGSILKKKKELVYKPLDGRYSDAGLFALEQAHSAYNFYLRQIKQCDERINVVVNRIGRTGEGQNNIGKRKPIRHHKPEVDKLDANLLNIFDSHDATLISGITGYTWLQQLGESGRDLTRWPTEKHYTSWLGLSPGQNNSGKKTRNARKKGKPAAGQIFRTIAQSILNSKDIALGAFGRRLRARKGPGIAIKALGRKVAVLYWRVMVKGLEYTEKGIKQYEEQLVLQKLKTVMKLANELNLQVT

SEQ ID NO: 105710 - protein, 362 aa, unidentified
MRTQTYKKSEPELVNFAGKTIYSGIDVHKNSWNVSICLDDMFVKRFHQEADPKALHAFLTNRFPGAKYVACYETGFSGFSVQRELAELGIECVLAHAADIPQTNKEKLNKTDKVDSRRIAEALSKGMINSIYILDKQAEADRAFVRYRRGCKERLKARKAAIKMKLFTLGIKIPPQFDKSHISKKYISWLRSLTFDEPITKFTLDFMIEDIEALRKKEYELNKCLRKMSVSDRYKDIYIELNKIPGIGLISIMTLLTELVDINRFGSFKKINSYVGLCPTEFSSGEKSMHGKITPRANKGLRTVLVEAAWTAVSCDPAFTQKYSELCKRMKKNDAIVSIARKILSRIYAVWSKKIDYKIGVR

SEQ ID NO: 105711 - protein, 374 aa, unidentified
MSNHSEAFVGFDTSKLRNAVAIADGGRTGEVRFFGEIDNTEVATAKLVKKLAAKYQRVTFCYEAGPTGYGLYRQIKSLGHECIVAAPSLIPKRPGDKVKTNRRDAVSLAKLLRAGELTAVWVPDPRHEAMRDLVRAREAAMLDLRSKRQRVSALLLRQGRPYAGRTPWTKAHMSWLASQTFAYPEQRIAFEEMMLAIRQEQERLDRLEQAIRGAVPDWSLAEAATALMAMRGIDLIAATTLLAEVGDLSRFRTPHELMAYLGLVPSEASTGNTIKRGPITKAGNRRARRMLVECAWSYQHPPRVGRAKQQKVDAASPAVREIAWKAQCRLYRRYRALIRRGKLKTVAITAVARELAGFIWAVSREITIARAAAK

SEQ ID NO: 105712 - protein, 356 aa, unidentified
MSSEVKYIGMDVHKEAIVIAVRDTRGHVVMESIVETKASSILQFLHGLRGELHVTWEEGTWAAWLYDLLQPQVQHMVVCNPRRNALLKEGSKSDKVDAGKLADLLRSGMLRPVYHGENGLRTLRELGRSYQTISKDLTRVMNRLKAVYRGWGIPCAGTQVYAVRCREEWLSKIPHAGVRRRAELLYQQLDGLQALRRELRPEFLAESRKHKAAKLLRQIPCIGPIRAARLIGLMQTPHRFRSKRQLWTYSGLGIETHDSAQYCFVRGQVQRSKKPQQVRGLNRNHNHEMKEIFKSAATRASCGTGPFHDFYTGLLAKGMKPEMARLTLARKIAAITLTLWKKEERFDVEQLKTQAA

SEQ ID NO: 105713 - protein, 401 aa, unidentified
MKELWCGLDWATRTHAVCVVDEDGQIRARFEVPNTGKSFAGLIKRLSKLKVTGVGIERVDGPLVEAMLEAGLAVHVIAPSMLKAVRTRYGAAGAKSDPGDAFVLADLLRTDHHRLAPLVPDGPATKALRALTRTRKDLVQARVALTNQLEAQLHVCFPGAVGLFADLHSAVAAAFLRRYPTASRAARLTEARLAGFLRRISYCGRTPVDELLRRIREAPAATLGAEEDEARAACVLALVDAIQTCQGRARELEAEVVERLEVHADASIFTSLPRAGRGVRAASLLAEIGDVRERFPDAESLIALAGAAPVTRASGKHRSVNFRWACDKKLRQAVVDFADDSRHASRWAADIYGRAVDRGCTHPHAVRILARAWLRVIWRCWQDRAPYDVTKHRGAVMLQAA

SEQ ID NO: 105714 - protein, 389 aa, unidentified
MPTEVDRAETPIAIQTHFAAIFISLELSRSVWLITSLKPGGGERMSKHSVRAGDVAALLSRFSDLKQKALARTGKSFPLVTIQEAGLDGFWLHRVLKKEGIESHVVDPASIATSRRRRRAKTDKIDGEALLRALLAYKRGEPRVCAMVKAPTPEEEDRRRLSRERKVLIAERVEHVNRIKGLLFTQGIADYKPLRRDRRQRLEELTTGDGRPLPTHLKTQITRELDRLELLLDQIKLTEADRDALLATQQTTSPAPAGRMLLDFKGIGAEFAVVLWLEGLFRHFDNRRQLAAYAGLAPTPWQSGSIDREQGVSKAGNARLRTTLIQLAWLWLRHQPHSALSRWFHERVKRDGGRVKKTTIVALARKLLVALWKYVTTGVVVEGAIMKAA

SEQ ID NO: 105715 - protein, 409 aa, unidentified
MDVLFDRVAGLDIGKASVTVCVRTPGPQGKRVSQTRTFKTMTRSLEVMRDWLLDEGVALAGMESTATYWKPVFYALEDHMDVWLLNASHMKAVPGRKSDVRDAEWIAQLIEHGLVRPSFVPPPEIRRLRNMTRYRVQLTGDRTRDITRLEKLLEDASIKLSVVASSVDTVSAMAMLSALVAGERDAEVMAQLARGRMRSKIPDLAEALRGRFDDHHALLVGQMLARIELVNTALDTLNVQIETAMSPWADKLDLLQTMPGIGPKTAQVFIAETGGDMTPWPTAAQLAAWVGLAPAMHESAGKRTPAGSRHGNKFLASMLVEAAGSVGRTKNTYLGAQYARLVSRRGQKRAAVAVAHSMLVSAYYMLTRGEPYHDLGPDWLGKRNDAAHTRRLVAQLERLGHTVVLDSVA

SEQ ID NO: 105716 - protein, 470 aa, unidentified
MSKKVSRRPASQVEVRSTAALPILRPHAAGADIGAHEIYVCVPGPDNTQLVRIFGVYTAELHSLADWLVENHIETIAFESTGVYWIPLFEVLESRGLECCLISGNDVRHIPGRHKSDVLDCQWIQTLHARGLLKASFRPEADLIALRTLLRHRAQLIEHRSPHILHMQKALTQMNIRLDRVVSDVTGQTGLAILRAIVAGERDPHKLAALRNYRCKKDEDEIAKALTGTWREEHLFVLKQSLEMYDFYTRQLEACDAEIERQYSVTRPNSPDPNPDDQAPLPPNKRNSHSKNLPKDTPIHVRQHLRRLTGVDITAVDGLSLDGAEKIIAEIGTDMTRFPTEKHFCSWLRLSPNNRITGGKVIASSTGKSHNRARQAFLQAAASLARSQSALGAYYRRMRARIGPAQAQVATAHKLARIVYHMLKYKVEYQTLSARQYEQAYRQREIHFLQRKAAQLGLSLTPQPLAEAVS

SEQ ID NO: 105717 - protein, 346 aa, unidentified
MAYYVGLDVSVKETSICILDSKGAVIARTDVSTEPDLIARFISKHAPGVERVVHESGILAIWLTRELEKRGVPIICIDARLAHKALSGRINKSDRGDAEGLAQLARTGWFTPVHIRSEASERVRVLIGARERLIRMRKDLEGHVRGVLKVFGICMKSVGTGKLRKDFRGQLATAADKDPAIKLMAEMFIPLHKTLCIARDALDEEVRIMARESDLACRLMTVPGVGPIVALAYIATLDDEKRFRKSIDVGAFLGLTPKRHQSGEVDWSGKISKCGDCDMRRLLYSAASTLISCTRKPSRLREWATRLAERKGHKKAAVAVSRKIAVILHCLWRNETVFEPGMEGAS

SEQ ID NO: 105718 - protein, 418 aa, unidentified
MKVVYPVCCGVDVHKTFLVATLITSQGITPKYSKKRFSTFNNSILQFKQWLIDNKCFDVCMESTGKYWVPIYNLLEDSIHVTIANPKWVKAVKGNKDDTKDSKWIGDLFRLGLVPGSYIPNKSIRILREYTRYRSKLVSCKSSEKNRFQNAFTVCNVALDAVVSDMFGKSATSITDYLISSDSFDPQHCVAFLQKSLKKKAATVIESIEGYQMTKEQKERMIMVRSHLEYINQSINDLDAKLDIMVKPYENATSLLCTIPGVNKSSAITIISEIGTDMTQFSNSKRLCCWAGLTPGNNESAGKKKSVRITRAGIYLKPALVQVAHAAVKSNQSPYYKLKYERIAKRRGKKRAIIAIARMILTAIYHMFVTGEEFNPCDLYKIDMPQEMKDIQKEKAIKQAIKLLTTQGLIDPSNISIA

SEQ ID NO: 105719 - protein, 343 aa, unidentified
MGRTFVRRERSSHAMSALVCGLDVHRDSTYATILDCEGKIVSQRRMSNEAVLSYLSGYRVDRIGMESSSQVAPLYRTLTKNGYAVSVSHPKKTRYIAEAKIKSDRVDSKAIAELVRLDALPKAYMPDQETAILREKIRRRAFLVRERVRLRVKIKSILTYEGIKPQIDHGLFTERGVEWLHSLSLEPVESYLRIIKTLDNEIKQLSKHLKELVENDEDVKLLMTIHGVGYYTALLVKSEIGDINRFSDGDRLCSYGGLVPSTHASGGTVRHGSITKEGSRWLRWVMVEAAMTHVHKYDTAITKAYHRIAERRGKQVATVAAARKLLLCCYAVLKNKHPYYDQA

SEQ ID NO: 105720 - protein, 341 aa, unidentified
MNITTIGLDLAKEVFQVHGVDERDKVVLRKQLRRCEMAKFFTNLQPCLIGMEACGSAHYWARKLGEFGHTVKLMAPQFVKPYVKTNKNDAADAEAICEAVSRPNMRFVPIKNVEQQAILSVHRARQGFVKARTAQGNQIRGLLSEFGIVIPKGITAVAKRMPEILEDAENELPGTMRHLLERLANNLKEMDRQVVELELQIKHWHRTNEASQRLEAIPGIGPITASAIVASVGDAREFKNGRQMAAWIGLVPKQNSSGGKQALLGISKRGDTYLRTLLIHGARALIRYAENKTEPDSWLRNLMMRRNKNIAAVALANKNARVVWALLAKDRSFQPDYAAAV

SEQ ID NO: 105721 - protein, 384 aa, unidentified
MIYVGIDISKYKHDLFICNDFGEIIVDNFSFSNNQKGFQLLLKRLKPLSNVRIGMEATGHYGLNLKMFLEKNNYSFMEFNPLLVKEFHKSLTLRKTKTDKVDAMVIARKLMSIPYKPNSPLSYHKFGLKSLTRYRSSLVKQRSKHIIEITNVLDIIFPEFKSFFNDSFSVTSLFILNKYKSAEKIANIRDFETLRKLSRGKFTYAKFIKLKELAENTIGESNDLLKLQLETSLTLYNSINTQVDILDEKISTIIKELNPPTLSIPGIGVSSCAVIISEFGDINRFGGPNQMLSFAGLEPGINQSGLSFSKGKMVKRGSSHLRYSLMNVAMSIVRHNPVFYDYYYKKRTEGKPHRVALSHICKKLIRVIYILETKNIQFDSSLLR

SEQ ID NO: 105722 - protein, 361 aa, unidentified
MLKYCLGLDVSSKELYVCLSVIDHLQKVTVKSSSKFLNNANGFESLVAWLVKHHKQKDVPLVVVMEATGVYYENVALFLHLKGYKVSVVLPNKAKKYLQATGLKSKNDRIDAQGLSRMGAEQSLDVWQPKDEYFYQLRSLTRQQQSLQELKTNINNQLHADEHGMYQNEVVISQLKLLIKTINDQIRDMEAAIVAHLNKDKEVAKLVEGITLIKGVGALTVAIILAETNGFALFKNIPQLISFAGYDVVENQSGNHTGKTRISKKGNGHIRRSLHMPALAVIRYQQSPFIQLFNRTLQRHGIKMKSYVAVQKKLLVLIYVMWKKKERYQPIEKIDYSGEQEQMSSSLFSFEEAGAHCIETK

SEQ ID NO: 105723 - protein, 341 aa, unidentified
MSLIKVVGIDLAKLVFSIHGVDEHSKCKLRKTIKRNNLLAEVAKLPLCIIGMEACSGAHYWAREFTKLGHDVRIMACKFVIPYRQNEKNDANDAEAICEAVTRPKTRFVSIKSEEQQAVLCLHRIRQGAIKDRTARINRLRGLLAEFGIIMPKGRYSAQSAIPGILEDGENNLPFIARELLNDLWQSIKGLNDEILKYDRKLHALANQMKDAKRLMSIPGIGEITATAVVATVNDAKHFDTSRSFAAWIGLIPRQYSTGGVARLGHISKRGEKHIRTSLIHGARAVIANCKNKTDRTSLWIKDLVERRGFKRATVALAAKNARLIWALLHSEKEYQVDYVK

SEQ ID NO: 105724 - protein, 322 aa, unidentified
MSYVMKPTAIFGADIAKDEVMVQRHGESAKQRLPNTPKPLGAWLAQLAPGALLVMEATNTYHEMLATLAHAAGVQVVVLNPRCTWHYARSLGVRGKTDRVDTDTLTDFGATQWQRLHRWEPPSAGNARVARLLRRRGKLVHAKVALGQSLSAVKELSSVRRQIERALARMIDRVDLLIVKAVSQDEQLAPLHRLLQTIVGVGPIVAAQLAQALTRMRWRNEDAFVAYTGLDPRPKDSGTHRGRRKLTKYGPPMLRHLLFMGAMSAIKTALYKPMYRALRDRGLETTQALVVVARRIARIAFAMFKTGQPFDPSRLSPAPQNA

SEQ ID NO: 105725 - protein, 414 aa, unidentified
MSYKIAGIDVHKRVLMVVVIDASTPEEKPERRRFTTMPSDLHRLSIWLREQEVEEAVMESTAQYWRSVWLELEPYMRLQLAQAFSNRAPRGRKHDFKDAERLVRRLIADELILSFVPDGEQRTWRNMTRMKTQLRRDRVRLQSQMECLLEEMRIKLSMVVSDLLGASGLRILRALAQGETDPKKLALLGDEQLKCSEEQLVDALTGRPQPMHQEMLGLQLERLQLIDLQIEKLNGLIAQAMKPHQEAVIRLAEVPGLGVDSAQQVISEIGVQASTFPSAAELTSWVGTCPGKDESAEENHSSRSAKGNKYLRRVLNQSAHAAVKKKGSHFQAVFRRLLPRLGYKSAIWAIAHRLCRLIWKILHEGVRYIEQGSESDPKVRERRARTLARALRKLGYDVAITPINPATAEKAMQT

SEQ ID NO: 105726 - protein, 349 aa, unidentified
MTIVEDACVITGGVDTHADLHVAAALDPLGGLLGVQEFPATATGYTQLLGWLGEFGTVALVGVEGTGSYGAGLARHLAAAGIRVVEVDRADRQDRHRAGKSDPLDAVSAARAAQSGRASGAPKGRDGAVEAIRALMVAKRSARAERTQAINQARALIVTGPDELRARFAGHRPAQLVEAIAALRPRPGEVPGYATRVALRELGRRARFLDAQLGRLDELIGPLVTARAPGLLALHGVGPDTAALLLIAAGDHPERLRSESSWAHLCGAAPIPASSGKVSRHRLNRGGDRQANHALWRIVITRLGSRPGHPATRAYVERRTKEGLSKKEIIRCLKRYVAREVYRQLRAGA

SEQ ID NO: 105727 - protein, 355 aa, unidentified
MNDAKYIGLDVHQATTTAAVRDATGNLVMEAVLETKTETILQFFRGLRGSLHVIFEEGTWSAWLHDLLKPHVARVVVSDPRKNALLKDGNKNDRIDARKLSELLYLNRFTPVYHGEHGLRTLKELARSYLTITKDLTRVMGRIKAIYRGWGIPCAGQQVYAPGHRAEWLAKLSEAGVHRRAEIYYQQFDGLAPIRQQARRELLAEGRKHAAVKLLRQIPSIGPIRAALLVALLQTPNRFRTKRQLWAYVGLALRTYTSGEYRFEHGQLKRSKKVLAIRGLNRNHNHDLKNIFKGAATWAAGNTGPFQNFYEACIARGMKPHLARLTLARKIAAITLLVWKKGVCFDAKHLTQQAA

SEQ ID NO: 105728 - protein, 343 aa, unidentified
MDHFAGLDVSVKDTSVCIVDEVGKIVREVKVASEPAALLAVLRNATYRFKRIGLEAGPLSQWLFSAFAEADLPVICVETRHMRAVLKAQINKTDRNDARGIAQMTRVGLYRPVHVKTLRSQQLRMLLTHRKLLQSKAIAIDNDLRGTLRNFGLKVGVVGAVRFEARIRELVEDLSDLAILVEPLLVVRRVLREQIAVLHRRLLAVVRDDEVCRRLMTVPGVGPVVALTYRATVDVPARFRKSKSVGAAFGLTCSRDQSGERDRPGAISRCGDEMMRAMLYEAAQSMLVHSTRWSWLKAWAMTIAKRRGMKRAIVALARRLAVIMHRIWVDGTEFRWTRDAAAA

SEQ ID NO: 105729 - protein, 341 aa, unidentified
MKQEMTVLGIDMAKRVFHAAGMDDTGKIVFRKRLSRHDLMPFLAKLPPVRIGIEACGGAHDWARRFREHGHEVKLMAPQFVKPYVKSNKNDSRDAEAIAEAVTRPTMRFVPIKDVDQQDIQALHRVRERLIGERTALVNAVHGLLHEYGIVIPKGVAKFRQAVVGKLESEQDKLTPLSQEMFWKLVEEFAGLEKQLAYYQEKLEALATTHPECQRLMTIPGIGPLTATALVAAVSDASAFKNGRQFAAWLGLVPRQHSTGGKERLLGISKRGDSYLRKLLIHGARATLRWVGRKTDRRSQWIRQLSERRGKNRTAVAVANKNARIVWALLTSHQVYEPAKS

SEQ ID NO: 105730 - protein, 432 aa, unidentified
MTANPYDLVIGLDRSDQKADLCLIDPHSGQRRPVVIDTAPEALREWLCELRQQHPAARVGLCLEQPAVHLICFLEAYEWITLHPINPITLQKYREAFVTSRAKDDTKDAEYMADLLLTHQEKLPAWAPEDSATRAVQQLVVHRRAVVDERTGLTNRLIALLKQYYPQALELCGEALWRSLATAFLLKWPSLSAVQKVKPATLKQFYYLHGSRSTKLLDQRLALVAKAVAVTDETAVIASFVLRVQLICRQLQLVQQTVTEFDRQISAAYAAHPDRVIFASLPGAGPVFQPRLLSSLGSQRERFDSAGSLQCYTGVAPVTKRSGGSCHIHRRYLCPKFQRQSFHEYAGESILWSRWAAAFYLQQRTKGCAHHTAVRALAFKWQRVIWRCWQDRKPYDERIYEAALRKSGSPIVALFDKVELGKSPWKNPAKKN

SEQ ID NO: 105731 - protein, 407 aa, unidentified
MQEATQHDAVDVFVGVDVDVGVDVGKGQHHAVALDRNGKRLYNKALPNDEVKLRALIAELKTHRRLLFVVDQPSTIGALPVAVARAEGVLVAYLPGLAMRRIADLHAGEAKTDARDAAIIAEAARSMPHTLRSLRLADEQLAELTMLRGFDDDLAAQLTQTSNRIRGLLTQIHPALERVLGPRLDHPAVLDLLERYPSPSALAAANEKTLANRLTKLAPRLGKNWAAEIVQALNEQAVIVPGTQAAAIVMPRLAQQLAALRKQRDEIAAEVERLVLAHPFWPVLTSMPGVGVRTAARRLTEAAPKAFATAAHLAAYAGLAPVTRRSGSSIRGEHPSRRGNKVLKRALFLSAFAALRDPVSRAYYSRKIQQGKRHNQALIALARRRCDVLFAMLRDGTIYPPKSAPDA

SEQ ID NO: 105732 - protein, 341 aa, unidentified
MTEVSTIGLDLAKNVFQAHGADATGAPVFRKKLRRDQVLAFFAAQPSCLVAMEACPGAHYWGREIGKLGHTVKLIAPAYVKPFVKRQKNDAADAEAICEAAQRPTMRFVAVKSEAKQASAVIFRTRDMLVGQRTQIINAIRGHLAEYGLIAPQGPFHVERLIAQVEDPESDIPPAARVSLAVLVGALRHLQEQTAALDAEIAKRAKADETARRLMSVPGIGPLIATAIEALAPPPGTFRSGRDFAAWIGLTPVQRSTGGKERLGRTSRMGERTLRRLLIIAASAVVRWAKRKGVPAESWLGRMLARKPPMLVIVAVANKNARIAWALLTKGGIYRAPAVTA

SEQ ID NO: 105733 - protein, 332 aa, unidentified
MENFYFIGVDVSKKKLDFCVMFEGKVVHEEETANHQNAIMALLHQFEEDYGIAGGQMLVCAEHTGQYTFPLACACKAVECKLWLENPAEIKYSSGVQRGKNDKVDAKRIAIYAKRFQDRVQYYERPTEDIERLKQLESERTLYVTDLAKYKGQMKDQKDYMPRKLYERKMKRLQTLMDDLEKAIQAITYEMDEVIASCPVLCRQRELLMSIDGVGRVVATNMIITTEAFTRFDDPRKFNCYAGVAPFSYSSGSSQHSKARVSHRADKVMKRLLHLAAVAVTHRIGGELKKYYERKVAEGKNKMSVINALRAKIVARMFAVIKRNEKYKPILS

SEQ ID NO: 105734 - protein, 323 aa, unidentified
MQGKDLPKRSATMEVYVGIDICKDRLDVYLHPLGHSVRIANSAVGLKALKRQLCSVKVVRIVMEATGKYHRQAFRTLCAAGFAVCVINPLRARLFAEAHGTLAKTDRADARILALLGEGLAPEARSPVPESLEALQELVHARAAATAETTALVNRLKASATAFLKAELGRRIKALEGHIGRLEAEIARRIAAEPLLARRYAILQSIPGIGKVAAATLLVDLAELGRCSRKSVALLAGLAPIADDSGETSGPRHIKGGRASVRQALYMAAVAAARCNPDLATFYKRLRAAGKKAKVALTAVMRKLLVLANTLLKEDRPWLPNHA

SEQ ID NO: 105735 - protein, 392 aa, unidentified
MGAAKKHGPAAYLGIDVGKSRHSACALDAAGGVVFRADLDNRPDAIDRPPERAGDAALVVVDQKRNIGALVLARAHALGRRCAYLPGYAEKRARDMMPGIAKTDAIDAEVIARTAMGMPQALRPIAAEDAAARSLRALSSQREYAVASRTRAKNRFRAVLLEAGPELERAVDPSSPWQMAVLSELGGAPGCSAAGWGAFADAARRAGAPAARAREFWEALDASAGSGRGAGAGEDVSVRMLAREISALDSDVAELDGLIGEALAGDEVYESLLTIPGIGPKTAAALVTAVDISLFGSHHELASYCGVAPADSRSGTSVRSTSPQRGGNKQLKNLLIFSCNSLVGTDNRFGRYYDECRARGMRHNKALKAVARKRMKVVYAVMWDAVPYEPRR

SEQ ID NO: 105736 - protein, 326 aa, unidentified
MQGKEASEQGAVAKCNVGIDVSKDWLDVHVLPGGEQWRVANTGAGIRQLKRWLMRFELALVVVEVTGKWHRPVQRSLAASAVPVAVIDPFRLRMFAKADRILAKTDRLDARALARFAAVMAPPVRAPEPRSLEELRELVVARASAVGQQTALKNQRSAATVRCLQRLLDRRIGRGERDIAALDAAILARIEADAGLARRFAILTSIAGIGFVAAMTLLASLPELGGSTVKQIAMLAGLAPIADQSGKRDGARVVWGGRASVRRILYLAALSAARYNADMKAFYQRITAAGKAPKVALIAVARKLVILANTLVAQDRTWLPHAPNRA

SEQ ID NO: 105737 - protein, 429 aa, unidentified
MIAAEIERCAGIDVGKEQLAVHIMVGPLDGEPRCEFREFGTINAELKGLRQWLEAEGVTHVVMESTGSYWKPVFNVLEEGFKVYLANPHEVKNRKGHKTDKKDSWWLAHLLRHAMIRPSFVPPRGLRELRDLTRRRRKVIGIASSERNRVDKILQDANVKLSNVLSDLFGVSGQLMLEALLKGKASAPEIAQFAQRSAKRRIPEIIAALEGHRLTDHHRQMIRYSLEHLAFLEKQLLELDQQIVAKIEALGYGGQWQLLQTVPGVKETSAASILAEVGPDMGQFESEKNLSSWAGVCPGNNRSAGKNKGSKTNKGNRWLRGTLIECAWGAAGRKNCFLKQKFWRLATKKQRKPPASMAIAHTLLVLCYQVLKTGRAYQEVGVRLIDPQQRIRLIHHHVRRLGRLGIRVRALAPPQAANAQRNDLAESTT

SEQ ID NO: 105738 - protein, 428 aa, unidentified
MDGQEHSRLEDFRQLKREIRGSKEYLIVGIDVAKDRHHAFFGTATGTTLLKRLVFENTHEGFDTLLIQTEAVKVQHGLQKTVFGLEPTADYHKPLGEFLIKADHRVVLVSGVAVKRNRELLDGRWDKHDTKDSANVADLISQGKCLFYDHPSLPLRELRALVSLKRRLKKQEHGIKARIRNHLLAQYFPELDRYYRHWGSEGLAIVRWCLNPSVIAAMDYGHFTQFVAPQGRSLAQQERLKAIWTRAIDSIGCEAGEALGFEATVMVEELEHIRNAIRATEEKIEEICLQFPEYRYLLTIPGFGPDVSSKVLSAIGDPFRFTTGAQVLKMAGLDLSAERSGDRSDAARPVLSKKGKADLRYALYQAALIASTRNRSFVLYFTNKLRGREREKGIRTKMRVKLAAKFLIIAWTLMKRKEPFNSEYLIRQ

SEQ ID NO: 105739 - protein, 360 aa, unidentified
MAKARTLVGLDVHAAKIVAAVLDAETGELQWFTLDGDVVQAAGLCAGLPRPVRATYEAGPTGYGLARELARREVACVVAAPSKIPRASGDRVKTDRRDAEHLVRLLLAGKLHAVRVPGPEEEALRDLVRAREAVRGDLMRARHRLSKLLLRHGMRFDDGPAWTQRHRDWLAHVKLGWPAAQATMLDAQGAIDALMHRRDQLEREIVALLPASPWTVQIGRLRCLRGIDTLTAVGLCAEIGDFERFARAEQLMNYVGLVPSESTTGQQRRLGAITKTGSGHARRLLVEAAWHYRPQPRIGKALAERQDGQPAEAVAVAWSAQRRLHRTWTRLEARAKRRTIIAVAAARELAGFCWAITQIE

SEQ ID NO: 105740 - protein, 350 aa, unidentified
MKRLEAEMKHIGLDTHSTRTVATVVNDRGKKILRREIPTRELELIDFMQSIPGPKRVALEESQVADFVARMIMPYATEVIRCQPQHNRLISESEDKCDDQDSYSIAELLYLNKLKSVHHPPWEYRQLREAVRAYWTSSRDLARAKSRLKACFLFNGIHCEGEKVYSQRYRKKYRERFHGRSGNLNLLDLHYEALDSCRHTKAGHVRVLRNLAKPLHEELERLQSIPGIGPIGAYTLLAYLENGWRIPNKRKLWQYCGIGVRRHESNGKGYKGASRKGNRYLKNTLMTAAAAVAARRTGDNALAQRWHAGLAGGVAADRLRRNLARKIAVLAQYVLRFKEEYNDERVVTTP

SEQ ID NO: 105741 - protein, 360 aa, unidentified
MLIWRPAGVFAVRNTNGRWGSTPVYNQVLGPDPSNMAEVGMDGKRVIGIDIGKCWLDVASEGAARVERHANERSVILALVATFDPARDVVVFERCGGYERELEGALAGAGVPWAVVHSARVKAFRQVQGIKAKTDAIDARLLREFGRDRLKAGQLRLGRAEDVVLNALMARFRQLKAALHAEQCRRETAAIEPVRASIARTIVQLEAELAIIMAELAGHEANDAQLALKEKVMCERKGVAQATARALAAELPELGRLDRREIASLGGLASRVEQSGRSERRRGLVRGRSAVKVILFNPARTAMRWDPEIKAFRDRLRARGKPGKVIMVAVMRKLLVRLNAAVRDALNQEEVSNQATLGAF

SEQ ID NO: 105742 - protein, 337 aa, unidentified
MAKEKAVRWVGVDVSARWVDGSRAAADEPVSARQFANTPAGHGELASWLTQGGRRARVVLEATGLYSLDLALRLQRTARIEVMVINPRASKEFAGAWGQRAHTDASAAQGLREYAARMPFTPWTPPGPQALALRTIMRRVVALIEARVQERNRLHALSATEAVPAVVRTDIRQHIRTLERRIARLEHEARALVEPAPALRAGFRHLCSVKGIGRRSALMILAEVAVLPGELTARQWVAHAGLDPRPIRSGTSVHPPVRMSKHGNVYMRRSLFMPALVAVRRNPAVQRFATELTARGKAPLQVLVAVMRKLLHAIYGMLKTDTDFDGEKFRRSAHAEG

SEQ ID NO: 105743 - protein, 346 aa, unidentified
MMIIGCDYHPSWQQICWVDTLTGETEEKKLEHASGEAERFYRGLSGPVLIGMESTGNCQWFVEMATTAGHEVWIGDAAKIRASEVRQQKHDRRDAALILKLLVEGRFPRIWMPSGEEKDLRQLLIHRHKLVRIRAQVKNELQHLAMNQGVTRKRKLWSKAGEKVLRELPLKPWASRRREDLFKVREMLNGQVELLDRAVVEVAEKNEKARLLMTQPGVGPITSMAFVLTMGDVKRFQRGKQVASYLGLIPREYSSGGHQRLGSISKQGNGFMRMLLVEAAQVAVRCDPQMRSEYLHRCHRKAKGVAKVAAARKLAIRLYWMLRTNRGYPEVVHVESSSRVPLVSAS

SEQ ID NO: 105744 - protein, 450 aa, unidentified
MSKRPRVLRSKRKIIGPLVIVKPNAAGIDAGSEQHWVSVPEDRTNEPVRPFGTFTEDLYALADWLIECGIKTVAIEATGVYWIPLFEVLEARGLETKLIDSRSIGRRNKKTDVLDCQWIRQLHTHGLLDGAFRPSAEILPFRAFMRQRQMLINYAADHIRHMQKALDLMNLKLHTVISDITGATGLRIIHAILDGHRDPYELAAMRDPNCKNSKETIAKALMGNYRDEHLFALRQAVELFETYQQKLVECDEKIAAQLAAFDRQGDPAKLPKTKMVKRRKNQPRFDGRTLIYQMTGVELTAVHGFGANTLLTILSESGTDMSAWPSEGHFSSWLALCPNKPWSGGKPLPKKLPPIHPNRAAQAFRLAAQTLERVQCGLGAFFRRIQSRYGRAAAIKATAHKLAVIFYSMMKNKTAYRDPGTNYYEERYRERLLNSLKKKASSLGFQLMPA

SEQ ID NO: 105745 - protein, 350 aa, unidentified
MAEGNRVVTVGVDTHKDAHVAAALDASGALLGTASFPADARGYASMVAWMRAFGRVEAAGVEGTGGYGAGLARALDAAGVRVLEVSAPDRSERRRRGKSDGIDAEQAARAALAGTRCAPAKSRCAEMGALGALEAAYAGAVKARTAALNALQAQVVALPEEARAPLRGKGSSELVRACASMRPGAGSSPETLAKVALRSLARRARMLDEEAKGLEAEIDALTKALAPSTRSLLGADPHVAARLLLAAGANVSRLRSEASFSMLCGASPVPVSSGRADRHRLSRAGDRRANSALYTMAITRMAHDGRTRSYVARRMSEGKTKKDAIRCLKRYIAREAYRALAQDMEALGMS

SEQ ID NO: 105746 - protein, 392 aa, unidentified
MVVSVGIDVAKDKHDCFIHSSEGEVLADVFTISNNMDGFHTLLEKIQACTAPQDKIRVGLEATGHYSYNLLGFLLDNGLVTYVLNPLRTNLYRKSLSLRKTKTDRVDARTIAAMLLSDAGLKPYTDTAYHNEELKSLTRYRFDKVKERAKLKTSVSRLVCILFPELEKLVPTLHMASVYALLEEFPGAKQVAGAHLTSLKSLLEKASKGRYKRDVALSIRDAARMSIGSRMPAKSLELQHTIRLIRELDAEIHEIEAEIETMMDEIRSPIMTIPGIGCRMGAMILAEAGDLSRFDSPDKLLAYAGMSPSTYQSGQLNNCYPHMEKRGSRYLRYALFNATKYVCLWDPAFAAYLAKKRAEGKHYNVAISHAAKKLVRLIFAMEKSGQPYRSAA

SEQ ID NO: 105747 - protein, 339 aa, unidentified
MKFTTVGVDIAKSVMQLHYIDAETGEIVNKPVKRVAFLEHFANRSPCLIGMEACGGSQHWARQLTAMGHQVKLMPGKFVNAFVMGNKNDAADARAIWMAVQQPGKSVAVKTETQQAVLGLHRMREQLVKFRTMQTNSLRGLLTEYGEVMGKGRPALDKAIPGVLERLVDRLPTILLDTLREQWSGLAELDKQIAQIERRLQTWMKEDKACKAIAAIPGVGLLTATAAVATMGDAKTFQSGREFAAWIGLVPAQTGSGGKVQLPGISRRGDTYLRTLLIHGARSVLLHAKEPGPWIEQLKKRRPLNVAIVAQANKTARMIWAILAHDRPYEEGYVSVKPV

SEQ ID NO: 105748 - protein, 341 aa, unidentified
MSIITVGIDLAKNIFAVHGVDENGKAALIKPKVSRDQLLPLIAQLPPCLIGIEACSGAHHWARQFREYGHTVKLMAPKFVTPYRMGGKRGKNDAADAAAICEAVTRAHMRFVPIKEEHQQIILCLHRTRQGFVEERTATYNRLRGLIAEFGIVLPQKVACLRKNIGAHLEDIPGYANQCIGDLLSHADQLDARIAEYDRAIAHAAREDARSKRLMERPGIGPVTASALLASIGGGHDFKNGRQVAAWIGLTPGQHSSGGKAKLGRITKAGDGYLRSLLVMGARSILAGLGDQQDGFSRWARSLVERRGYWRAVVAIAAKNARLAWAVLKYGEDFRLNKSAA

SEQ ID NO: 105749 - protein, 346 aa, unidentified
MLHAGLDLSRKRLDFHLLDEEGESVEVGAAAPDADGLRSLAARLGRHGQPLRAAIESMTGARFVHDQLELHGWEVEIADAVKVKGLAPLACKTDRIDAWVLAELSRRELVPAIWLPDPGVRAERERARFRLHLVRHRSSLKQRVHATLLTHGTPCPVSDLFGVRGRALLERLCLPEPWMGTIEASLRLIDELEREIDACEAELRTLGAEHRYVPLLITIPGIAWVLAYTIAAEIGDIARFPSPAKLAGYTGLCPRVYQSGESDRRGPLSKMGPRYLRWALIEATTHASRHPAYRERYERTKARLGKQRGPRVAQVDLARKLAEAIWHMLTHNRPFAPAGAPAPMTA

SEQ ID NO: 105750 - protein, 412 aa, unidentified
MNAVGIDVSKGKSMVAVLRPLGAVVAKPFEVLHTAAELKKLTDFLKSLDGETKVVMEHTGRYYEPVAHTIHHQGLAVSAVNPLLIREYGGNSLRRVKTDKADARKIARYTLDNWADLREYTPMDTIRYQLKTLNRQFHLASKNRTSCSNNLIALLDMSFPGARAWFDSPVRKDGSQKWVDFVLAFWHVDCVRSLSHTAFSQRYRNWCKRQGYQFSAGKAEQIHREAREMIALVPKSPTTKLLIREAALQLTSLSRTVEVLRAEMNRLAAELPEYPVVMAMYGVGESLGPQLIAEIGDIRRFAGKQSLVAFAGVDPMPNQSGAKETRSNRSSKRGSPYLRKTLFNVMKVLIQKSPPDVAVYQFLDRKRAEGKPYYVYMTASSNKFLRIYFGKVRDHLAALDAHPNDTSLANPL

SEQ ID NO: 105751 - protein, 375 aa, unidentified
MQNKVRFLGLDVHADTIAVAIAEPNGELRSLGTIANRAESIRKMVKKLGTVDQLRACYEAGPTGYVLYWQLAELRVNCEVIAPTLVPVKAGDRVKTDRRDAERLARSYRSGDLTAVWVPDAGSEALRDLVRAREAAKQDQLRARHRLSKFLLRSGLRPAQGTKAWTQPYMIWAKQIRFTQVAQESTRLDYLTEVEHMGERVLRLEKAITEAGKLASPELQEVVKDLQALRGIAQISAVTIAAELGNISRFEGARQLMGYSGAVPSEDSSGKRLKRGSITKTGNAHLRRIAVEAAWSYRLRPGVGPALRKRQEGVPEEIKEVAWKAQHRLHKRYMKLSAAGKDQRKIITAVGRELLGFIWAIGTKAEAAVKQQKAA

SEQ ID NO: 105752 - protein, 338 aa, unidentified
MEVSVIGVDLAKDVFELFGVDRAGKAVLRRRVKRRRLLEVIAQTPECVIGIEACTGAFYWQREFEGFGHTVKVISPQYVRPFVKRQKNDSNDAEAICIAVQQPQMRFVPAKTVDQQDIQALHRARQRLVNHRTAVVCQMRGLLLDRGIPIGAGITRVRRMIPLILEDAENGLSGMMRETIAELYDLLRDLDRRVQGFDKRIEAVFRASETCQRIAKIKGVGPKTATAIVAAIGDGSEFKNGRHFAAWLGLVPRQHSSGDRRVLMGISKRGDQALRTLLVHGARSVVRTAPNKTDPKSTWVNQLRERRGFNRATVAVANKDARIIWAVLRTGEPYREAA

SEQ ID NO: 105753 - protein, 336 aa, unidentified
MNKYIGMDAHMSSCSFCVMDEKGRELDNVTLPTNGRLIIDYLRNIGGVKKLTFEECELSNWLYGILKDEVDELIVCNPAANKEYKKKKTDKFDARQLANLLRGNFLTPVFHDGSKREKFRGLMSGYQDLVNDNVRLKNRYKSLFRKSGIKAEGEAIYKDRSLLEKIERTDFRFIGIQLHYLLERMDESLGIYQKQILCSKKHFGEIDNLMSIPGIGYIQAAKIVSQVVAPERFPNKYKYFSYCGLIRHKKESGQRRYGTERVWGNRTLKCVYKMAGHSAIKGTSALRKYYDHLHSKGLDDNKAYNAVCRKIAAISLSIWRKNQKYDDSLVSNDLIK

SEQ ID NO: 105754 - protein, 315 aa, unidentified
MTKQLPLVNVGVDVSKDTLDVHLLERDLSFSVPNEERPIASLIKRLARYRLERIVIEATGRLEHPFVSAAIARGLPVVVVAPLKVRRFAEAAGQLAKTDAIDARLIARFAAALKPVARPSIDTNSQIIKDLVVRRRQLTSLRTTEKNRRGVMPEALKPSIDRIIHTLDREIASLEQLIQDAVEQHVAWRHKRDLLTSMPGIGPSVASTLIGDLPELGSLSRRQIASLTGVAPFNRDSGNFHGKRRIRGGRAHSRTALFLSAMVAIRYNPDIKRFYERLLQAGKHKKVALTACIRKIVTALNAMLRDNQPWQSSFA

SEQ ID NO: 105755 - protein, 410 aa, unidentified
MLKIVYPVCCEIDVHKTFIYCCIATTDNKGITTYKSNRFSTFTNQLKRCATWLKENDCKDVCMESTGKYWIPVYNILELSCNIVLTHPKYVKAIKGKKTDKRDAKWIADLFKHDLINGSFIPPADIHQLRDLTRYRNKLTNFIVGEKNRAQNCLTVSNIKLDYVFTYVFGKASSSIINTLLLNPSEKITDVSKFRTRGMKSTDEEILAAIDGNICNEQAEKLKIIRSHMDSIEECKANLESVILNLAEKYLPKLNLILSVLGIKSFSAVSIILEIGVDMSVFPTSKHLCSWAGLTPQNNESAGKKKTTRISRGGAYIKPLLVQCALAAVKSNKHPKIRNRYLALKKRRGHKKAIIAIARTLLTAIYNILKKNEPYNPDLYKKSDLPPQHKTVSFDEAVFILQRQGYIITS

SEQ ID NO: 105756 - protein, 336 aa, unidentified
MSILKQTVGVDVSMNTLDVRFGTTDTNQQIVLSSSKSFANALAGFKQLLKWVRKSIISTDIPLIFVMEATGVYYERFAHFLVENNFAVAVVLPNKIKNYTKSLESKSKTDPLDAAAITRFGLERQLKPWTPTTESLKALHNFCREYRALKSTMTEIKNQRHALTSSFDPQKQSLKRKNQLLKFLERQVEDIEQELHNIVDADPDLSGRVENIVSAKGLGFITVVCVLAETRCFEYVTKQKQLASYAGFDIIFNDSGMKKGKTSISKRGNKFLRNAVFMPALSAIRHNPQLKEFYNRLVDKGKNKKLALIAVARKLLLLIYTLWKNNAVYDPNYKTV

SEQ ID NO: 105757 - protein, 411 aa, unidentified
MEVVYRRCSGIDIHKESITICVLLMEEGGLKKQVRRFDTMTKDLLQLSTWLQQLGVTQVAMESTGVYWKPVWNLLEDQFELLLVNAQHIKQVPGRKTDLRDCEWIANLLQHGLLRGSYVPKQEQRDLRDLTRYRVRLSEDKVRLANRIQKMLEDANIKLASVATDVLGASGRTMLQAIAAGEDDPEKLAQMARKGLRKKLPQLRLALQGRIRDHHRFLLRQLLEELRFVEEKIDELELRIQRCMLPYQHAITLWSSMPGVRLTTAWSLVAELGTNPEQFPQGSNLASWAGMCPGNNESAGKRKSSKTRKGNRWLRRALNQAAWAAARTKNTYFAARFHRLAAKRGSKRAIVAVGHKILLLAHYLLQHNCPFRELGADYYQRLRAPSLSQSLVRRLKRLGFQVTLTPASQPS

SEQ ID NO: 105758 - protein, 355 aa, unidentified
MKRTVKYVALDVHQATSVVSVRDEVGRVIARTTLPTEAGAICDYFRGMRGTIHVTFEETTQADWLHGLLVPVVHRVLVCDRRGTSQQGNKSDQQDADELSDLLRCGKLRAVYHGGAERATLKELARTYENLVEDSTRVMLRLKAVFRARAIRTAGHAVYRTDRQAEWLRQLGERGARFRAEALYAELEILQELRPKAKAAMVAEARKDPAWAVLRTIPYLGPVRVSLILATMQTPWRFRTKRNLWAYVGLAVVTRTSAEYEMDGPRAVRRRRRFVMTRGLNRNHNRVLKDVFKGAATAAASRTGALQDWYQGLLTRGMREELARVTLARKLAAITLRLWKRGERYDPTQLTVQAQ

SEQ ID NO: 105759 - protein, 355 aa, unidentified
MSSEKYIGLDVHQATISVAVLEHTGKVVMECILETKAATILEFFAGLRGTLSVTFEEGTSAAWLYDLLRPHVARVVVCNPRKNALLKQGNKSDRIDARKLAELLRGNYLKSVYHGETGVRTLRELARSYLTTTRDLTRVMSRLKALYRSWAIPCGGRDVYYARHRAEWLGKIQHLGVRRRAEHLYQHLDLLKPLRQRTRRELLVESRRYPITRQLRQIPCIGPIRSALLVALIQTPHRFRSKRQLWAYSGLALETRVSAQYCYVQGQLRRSKKLISIRGLNKDHNHDLKGIFKAAAITASARPGPLRDFYQTSLAKGIKPTMARLTLARKIAAITLTLWKKGENFDAEKLKLQAA

SEQ ID NO: 105760 - protein, 354 aa, unidentified
MTSTKYIGMDVHKESISIAVRNDAGKIVMESVIETKASTILQFIDGLRGNVHVTFEEGTWAAWLHDLLKPHVTKLVVCDPRRNALLQEGNQNDRVDARKLAELLHNNQLRSVYHGDHGLRTLKELVRSYLTITQDLTRVMSRVKAIYRSWAIPCNGKQVYGATHRAEWLAKINEPGVHRRAEFYYQQLDALRCLRQQVRRDLLAESKKHPAWKQLCGIPSIGPIRAAELLGILQTPHRFRTKRQLWTYSGVGIETSSSADHQVVKGQLERKKKTEVRGLNRNHNHDLKNLFKGAAIVAATKPGPFAEFYAELVAKGMRPEMARLTLARKIATIVLIVWKRGVCFDAQHLKPQTA

SEQ ID NO: 105761 - protein, 342 aa, unidentified
MQKDTRISVDIAKTIFEIAVSDRPGRVARTARLKRPQFLEFFAQQPATTVVMEACGSAHYWGQRLEQLGHHVVLLPPRLVRPYVKRNKTDRADAKGILEASRNEDIHPVPVKTVPQQVLTSLHRMRQAWMAERTARLNTLRGLLRELGHFIPVGSDQVVPAVWTLIEDADSELPEALRPLFADACQEIRDIEAHIKKVEHQLEALAEQLPVVTLLLTIPGVGLLTATALVAFIGDARRFPSGRHLASYLGLTPREYSSGLKRYLGRISKRGDSYLRTLLIHGARAVLLRSRNNQDRLREWASRISTTHVHNKAAVALANKLARIVWAVWTRQQPYHAIQTAA

SEQ ID NO: 105762 - protein, 430 aa, unidentified
MKSNTQNAKIEAITEKTLVLGIDVGSETHYARAFDYRGVEYSKKPFKFSNTEAGFVTFKAWVLDIKEKHGKDKVIPGMEPTGHYWFNLGKFLQDNEMKPVLVNPHHVKKSKELDDNHPTKNDRKDPKVIAGLVREGRYMIPYLPDGVYADLRTASNIRFQLQAELTRIQNRINRWFNIYFPEYKTVYGKPDAKSGMLILKAAPLPEDILTLGINGVNQIWRDAKLRAVGKARAKTLIEAAEHSVGSKEGAVSARMEIRMLLEDYESRNIRLQEVMGLIEGLVNQIPMAEKLLEIKGVGIKTVSGFLAEVGDIRRFNDPKELQKLAGLALVENSSGKHKGKITISRRGRKRLRYLLFEVAMSLVAKNPEFRELHTYYTTRRLNPLKKMQSLMAVAAKLIRVFYAMLTKGVDYDPKKMVGDIKRPAVYLQAA

SEQ ID NO: 105763 - protein, 362 aa, unidentified
MDKITHIGLDVHKDTIAVATLRPGAVICEERTIPNTGEALRALVDSLGDAAGLLACYEAGPTGYDTQRFLDSLGVRCDVIAPALIPRRPGVRTKNDRLDARNLARLYRAGELTCIRVPGATEEALRDLIRTREDLKRDRRIARQRIKSFLLRHGRHYLTASGSWTGVFEKWLRAETFAEPATQAAYAHLLAAEQMRDAQLEALDGEITRAAEHPGLAPYVARLRCFRGIDTLSALTLLAEVGDFHRFAGAASFMAFTGLVPSEHQSGLSRRQGSITKTGNPHIRRVLVEAAWAYRHRPAVGETLAKRQEGQAPEVVAYAWKAQCRLSKRFQILAPKRGHNKAVVAVARELSGFVWGMMTERM

SEQ ID NO: 105764 - protein, 350 aa, unidentified
MVSDVVLPILGIDVSKRTFNVTLLVKEKEKSKKFSNDAVGFPQLQKWLREVAPNGVHACMEATGRYYELLAEFLYSAGHRVSAVNPARIKGYAQAELMRSKTDELDAGLIARFCQKHNPGAWKPLAKEVREVQEAERYLDALKGMRLQETNRLGSGLICDAVREAIAKHIEQMDSEIAELEKWLKEHIKKHERLTEHHKLITSVIGIGDTTAFVWLGEIGYGDGFDVTRQVESFAGLTTKKTQSGTSIRGRDRLSKVGNHYLRKALYMPAMCAIQHNPLIRSFAERLRERGKPPKVIIGAVMRKLLRVIFAVVKSGRPFDLQYHSQPRSSQLAPSTDSSPEPSHVCEVAV

SEQ ID NO: 105765 - protein, 350 aa, unidentified
MIIIGVDFHPEFQQIASVDTDSGEFQEKRLTHREEAEKIYRALACAGQKVRVGMEASGHARWFERLLAELQIELLIGDAAEIRTKRVRKQKTDRQDAQLILSLLLEDRFPRIWVPSWENRDLRQLLWHRHRMVQARTRIMNQLQAVALNEGLRCKKKLWRERGREQLESFRLAPWASRRRRDLLELLDRLNPTIAELSQAIQQEVEKCPEARRLMTHPGVGPLTALAFVLIIGEADRFQCGKQVASYLGLVPLDDSSGNRRRLGHITKQGSSMLRFLLVEAAQVTARSLPQWRSKYLHLMMRRGRKTAKVAMARRLAVHLYWMMRQGWDYQQWIKFGSHAGQLGNRHGVQ

SEQ ID NO: 105766 - protein, 392 aa, unidentified
MVAVDVGKNTVALSVTGAGRQRLFGPVDFVMTGPGLSDVLDRVRGVLPPGAAVKVGVEAAGHYHRPLLTASAWPIGWEVLELNPGHVAEQRRVQGRRRVKTDAVDLEAITELVFAGGGVAVTARAAVIGQLAAWSAHRTRRVLTRTATKNQLLGQLDRCFPGLNLALPDVLGTKVGRLVAEHFADPDRLATLGPSRFIRFAKTRGLRVRQPVAERVVDAARNALPTLDADVARQVLAADLALLVDLDAQVAAAETAMAALLPGSPFSTLMTVPGWGTVRAGDYGAAVGDPDLWPGYRQIYRASGLSPAQYESAGKRRDGSISREGSVQLRRALIDLGLGLWLTDPAAKAYGQGLRARGKKGGVIACAMANRANRIAFALVRDQTSYDPARWT

SEQ ID NO: 105767 - protein, 516 aa, unidentified
MSKTSTKTLRFTKRSRGKKREKKRGRRKPPTAEEIDLEKKVARYGIGFDVHKHTIVVNVQAQLEDATTVEVKHHVFRNSVNGLNELAQFLRKYNPISHYLMECTGVYHLQLVYKLRETFPDRIEKIIPMNPLMIHWRITELGVKNDKADARDIALLSFYDSLLQSSYVGSEYFYHLRDTMRSYHKIRTQTTRLKNRITRRLDSVNQKFPFNLNKEWCLELLDIYLSDHWSLNDAFHTLIESKKKEGKPTKVLEKHETDLIDCGSIILPDEMRFLLQLDFARYLNEDLAQSLLIREAEEQILEDEDLKSNYFKLLDIPGVGNTTALTVLLELGDFRRFHRWQSLVKYCGVVPTVDKSGEYERKGHINRYTNKILRGVLTQAASNLVNRCDRSHDLGRFAHKQRIIRKLPYKKALIKVAQKLARIIYFILVDGISYDLNYELKQKRRKKRMRRLKRKNTLLESSKLRALKRNIQDFLVSNYEYMNSTSKYHLLTGCKRLLRKAEYLDKEESNQEKEKK

SEQ ID NO: 105768 - protein, 430 aa, unidentified
MSKYFYSPTVGIDVSADFSMVAILTPNGDIYKKPFKVKHDVDGFNHLLKEIKKVEKEFNMKTATFMESTGVYHLSLFHFLIQNELEVFVINPLITNSNKNKDIRKVKNDKKDAINIAKLGKFEDIKAYSSFDISVFTLKSLCRDYYKLVDTRSVYKKKLSADLRVIFPGYNKVFSDLTGITSLDILKSYSAPESIINAPKDDVLKLLAKSSRKNMDWCKKTYNKLINAAENATIIGIQSPCFSIKILGIISIIESLNEQIDILLTQIKKMIKGDDLSDNFKQNIKLLMSIPGIGFLTAVTIMVEIGDFNNFTKPKQLVAYFGLDPSVNESGKFKSDKEKMSKRGTRFGRRALYAVALASIRSKRNGQANNKILLDYYQDNLKGKKKKVALVAIMHKLINYIFAVLRDKKPYEQRIPKIHQQMYLRNKLVA

SEQ ID NO: 105769 - protein, 337 aa, unidentified
MKYSGIDLHSNNAIVAVIDDQDHVLYRKRLANDLQQIIAALAPHRDVLQGVVVESTFNWYWLVDGLIAAGFDVRLANTAAIKQYEGLKYVGDEHDAVFLAHVLRLGLLPEGYIYPPEERTLRDLARKRLQLVRQRTVNILSIESLLARHLNLRMNSEEVQRLDDNAARAFALPAHVQRALQASLAVIETLSREIHALELIIHREVRLRPEFAILKTTPGIGEILAATIMLETGTITRFPGPGQFSSYCRCVESRHVSNGRKKDEGNAKNGNRYLAWAFVEAAAAALRCCPQARRFYERKKAHRLPVVAMKALAHKLARAAWYMMRDRKPFDVGRCFV

SEQ ID NO: 105770 - protein, 340 aa, unidentified
MEKRYIGIDLHRNRFTCCIRLENGRTYLSEWASEDLGRFARKLRASDEVAVEITSNTRLFHDAVAPQVARVVVVDTNQFRVISRSVKKTDPNDARLLSLYLSKELLPEVRMKDKQHGQLASLTQTRDTLVKQRSALKNKVNNILSARGLNLAKEALSSEKKLTEVLELPFDEIVRIELRVIVEQIRSLNKSITELEKTIGEEGSKLEGHKGLSSIKGIGKITGAILLSVIGDVNDFPDEGRLASYFGIVPRVSNSNETERSGRIHKHGTKLGRTALVQSALIAANYSPYLKRFYEQVKARRGAGKAIIALARKFLGIIYRTLKNKWVFEDFPNFVLAEES

SEQ ID NO: 105771 - protein, 315 aa, unidentified
MVQNGKVLTNKRSTNTPKATLKAIKGLQKQVRGLNLVNTLFCLEHTGIYAYPLLDTLQQEGANIWLEQAIQIQRSLGVQRGKSDPVDARRIALYAYKNRQEVRLWVPRREKVEELKKLLNLRESSLNTLSRLRKPIKELKSHGNPRIAKLIEDSSQGSIEGARKDLASIEARIDELFSDDTELSRLYQLITSVDGVGKCIAVQVIVDTNEFKNIKEGKAYACYSGVVPFEHRSGSSVGSRSRDRANKGSKTIFHLAAICAIRMAGDLKAYYERKVAAGKHKMSVMSSMRNKLILRVFACVRNNKVYQKNYVHALA

SEQ ID NO: 105772 - protein, 384 aa, unidentified
MSRVVIGVDPHKASNTVVVIDAQERVLGQQRFSNDRAGYRSMKTFACVHRDRVWAVEGARGVGAGLAQRLVAEGEPVLDVPARLSARVRALGGGSGRKTDDADAFAVAVAGLRARDLQVVHQDDGVEILRLLSTRRQELVAQRIATVNRLHDVLCQLIPDGAKRHLGATRARQLLSAVRPRDAVGKARKQLALDYLGEVERLDSRLKELKKGLAEVHAEHPTSLLEINGVGPINAAKILAEVGDVRRFPSRHHFASYTGTAPVDVSSGDNNRHRLNRGGNRRLNHALHIAAVVQYRMPGEAQDYYRRKRDQGKTHLEALRCLKRRLSDVIYRHLVDDLTAGSPGGQVGASLQSSAADLIPMASTSEQSLPGLENDLTPVSAVVS

SEQ ID NO: 105773 - protein, 350 aa, unidentified
MNILALDLGKYKTVFCDYNSVNGEHEFGKVKTTPQTIHDLIVEKQPQRVVLEVCSIAGWVVDIARALGKETETANTTHDAWRWKNVKKKNDKEDALKLAKLSAMNQLPTVHIPNKQVREKRALITYRQRLVKYRKGIKNAIRAIFSREGITTIPKGRKAWSKGGLLWLRAHAKPLKEIGDINQLWRGQLHVEMETFEAISKSLKKVEDKLNEIGVCDERIQRLQTIPGVGPRLAETVVAFLDDPNRFENSKQVGCYVGLTPRQYQSGQTEHQGRISGQGNKILRNLLVEICWVSLRYNPWARDTYKRLLRGSRSRKKIAITALARKLVVKCWVMLRYEQNWKNDIQKNVA

SEQ ID NO: 105774 - protein, 326 aa, unidentified
MDDVGIDLAKLTFDATLLTTSGAQHHHTFANTPAGFTQFGTWLRRYKVSQAHLCMEATNIYWEALAAWGHAQGHIVSVVNPGRIKGHALATMQRNKTDKLDSFVIADFCRTHQPEAWEPMSEAHHHLRALMRHRDDLLQSELQQKNRLRDTTDTVVRSLLEAVLQTLATQLKEVERLIKAHLSAQAELAADLALLTSVTGIAMVTAAKVLAEMPKLAQYDSAKAAAADTGVTPSHYQSGTSVRRRPRMSKMGKAELRAALYWPAITAMNRCPGFKAFADALLKRGKAKKVVIGAVMRKLMHVMYGVLKHRTPYDPAKAFGRIASPT

SEQ ID NO: 105775 - protein, 404 aa, unidentified
MIFTGVDWAEAHHDVCVMGEDGRVLEQRRVSHSVAGIGELHALIAAHAGDGEPVAVGIETDRGLVVTALLAAGYQVFAVNPVAVSRYRDRHSTSGAKSDRGDAKVLADLVRTDRHNHRQVAGDSDLAEAVKVLARAHQSAIWSRQRQVNALRSALREYYPAALAAFGTDLAAGDAAAVLAIAPTPEAGRALSRNKIAAALRRAGRQRNIDHRAREIQAALRADYLQAPAAVAGAYGAAARSAVRLIGAYTAEIAELEEALAEHFEQHPDAKIVHSLPGLGTVLGARVLGEFGDDRTRFASPQSRKNYAGTSPITRASGCSHIVLARHVRNRRLADALDRWAFCSLTHSPGARRYYDQLRARGKTHRQALRQLANRWVGILHVCLHRGQLYDETAAWQHLDTAVA

SEQ ID NO: 105776 - protein, 337 aa, unidentified
MSVYVGIDVHRKRSQVAVVTEDGKVQLNKNTVNGTEPLLRLIGDLPAGTPVAFEAAFGWSWLADLLEDYGFEAHLVHPLRCKAIASARLKNDKVDAAILAQLLRADLLPEAWIAPLEVRQLRALLRHRASLVRLGTSLRNRIHAVAADHGYDRSASYWTGPGRGWLAELDLPAISREIVTDCLAVIDDLAPLIDRIDGELRQHAKADPRVKTLTTLPGVGQFTALMMLAEIGDITRFGSARKLASWAGLTPTVRGSDLKVRHGHISKQGSAWLRWVLNQAAQTAKRSPQFAATYSSIAKRRGKKIATIAIARKLLTRAYHLLAEMPATGATTPPQRP

SEQ ID NO: 105777 - protein, 449 aa, unidentified
MGSSTSHREEKALQVVHPHAAGIDIGSREHYVAVGSDPASVRTFGCATADLFEMGRWLKACGVTTVAMESTGVYWVPVARILEEDFGIAVVLVDPRYVRSVPGRKSDVKDCQWLRRLHVYGLLTGVFRSPTEIEPLKAYYRHRKSLVESCAQQVHRIQKALEVMNVQLHKVLSDITGLTGMRILRAIVDGERDPVILARHRHPSVQSPVEEIAKALGGKFLVEQVFVLQQALEAYDFSHRQIAACDGKIEAYMRTLKPRAGRESPTETTSAPRARRKNQAHFELRAELSRITGVDLTRIPGIDALTSQTVIAEVGIDVSAFPTEKHFVSWLALCPNHAITGGRVRRRKSRPSANRVATALRIAAQTLHKSKTALGAFYRRMRARLGAPKAITAAARKLAATVYRMLKYGEAFVERGQDAYEKQYQDRTLANLRRSAKHLGFQLVAESVS

SEQ ID NO: 105778 - protein, 348 aa, unidentified
MVIIGIDAHKRSHTAVIADTVGRQIAVKTIGTTSNDHLALLAWANKHDDQERLWAIEDCRHLSRRLESDLLAAGEQVVRVPPKLMSHVRDSARTFGKSDPIDALSIARAALREPDLPVARLDGAEREIRLLVDHREDLVAERTRVISRLRWHLHELDPAWAAPANFDRTSAFARIKFHLDEFSGIVADLAQRLLTHLHRLTEEIDELTTELSRRITVIAPALLAIVGCGSLTAAKILGETAGVTRFRSKDAYARHNGTAPLPVWSSNKARHRLSRTGNRQLNAALHRIALTQARCHPGARELLARRKAGGDGGMEALRILKRRLSDVVYRALIDDHRTSAASALILAA

SEQ ID NO: 105779 - protein, 376 aa, unidentified
MARYVGLNAHSKNCVYAIQDENGELVREGQVPTRVEGLMLLKTRGELVAGTPVALESGTMAFFVARHRMALDLKPVVVDAREVRLKASRPTQKSDRRDALELCEGLRRGIYRTLIHVPPPTISRLRETLGRRRHFVRLRTMQVNAATRLLRGAGLGHLARSLGTEKAWTRLVAALALDAELQAFVASHQAVWRCAGEQVAVLEASLASQQAPLQPDVARLRTVPGVGPIVALTVLATFSDVTRFPTAKHAASYAGLVTSTHQSGDRDRHGRITKRGSPELRAMLCEAAHRAGRPDHPLHPYFTVLCVRRGDRMAIVAVAHRLCRILFSMLRRQTDFDLHRLNVEEGSFERTTVHRYRLMPARARGTRKVPVPRRQP

SEQ ID NO: 105780 - protein, 411 aa, unidentified
MRRVIGMDIHRTFAEVVVGEDGRLRHHGRVDMTRSGLEGFGRSLRRTDEVVVEATGNAMAVVRVLSPFVDRVIVANPMQVKAIAHARIKTDKIDAGVLAQLHASGFLPEVWVPDERTERLRRLVARRNQVVRHRTRVKNEVHGILQAHLVPKCPHADLFNNRGRAWRERQVLPDDERAAIARHIREIDRLAEDLADLDVDIAMEVVDDPQVRRLQTITGVNAIVATGIIAANGGIRRFNEPQKLVSYFGLNPRVRQSGLGIAQYGRISKHGRSHARAMLVEAAWAAAKAPGPLRAFFLRIRSKRGHQVAAVAVARKLAVLIWHLLTKEQDYFGVRPALVAAKQRQLALKAGAPNERGVGRRGAAYAYNVKELRNREKAAAENAERAYELMVRHWRSRGPKRRTDATKEERL

SEQ ID NO: 105781 - protein, 410 aa, unidentified
MIDRCAGIDVGQALLVVCVRVVSDRGKLAEEVRSFGATTPDLLELRDWLASLGVTHVAMESTGVYWKAPYYLLEDDFEMLLVNAAHLKHVPGRKTDVIDAQWIAEVLSYGLLRPSFVPPRPFRELRDVTRYRKALIRARTSEVNRLHKVLEDAGVKLATVASDVMGVSGREMMRALIGGVANPQDLAELARARLRAKLPELRKALTARFRDHHAFLLARMLAHVEALEADIDVLSTRIAELTEPWQGQLMILDSITGVGPRAAEVILAEIGPDMSRFPTAGHLASWAGRCPGQRESAGRKGSAKPRKGSPWLADVLTECAWGAAKTKGTYLSAFYRQIMRRQGKQKAVMAVTHKILVIAWNLLTTGALYDDPGAAALCKNNHEQLRRRAIRQLESLGYQVTVKPREKDAA

SEQ ID NO: 105782 - protein, 316 aa, unidentified
MTTPAFAGIDVAKARLDVHLLPAGTAFAVANDPDGIADLVARLRPLGCASVVLEATGGLEAPALAALAAAGLPVSAVNPRQARDFAKAFGRLAKTDAVDAATLALFAERVRPAVRPLPDAQARAFQALLARRRQLVEMRVAEQNRLGAAADPAVRQDLRAHIAWLARRGAALDAELHAAIQASPVWRAKDDLLRGVPGIGPGTARVLLAELPELGTLTGKQVAALAGLAPVARDSGTRRGPRAIAGGRAAVRSALYLAALSAARYNPPLRAFRDRLRAAGKKPKLVLVAVARKLLVVLNAMLRDNRPWNPELVKTA

SEQ ID NO: 105783 - protein, 339 aa, unidentified
MRTLYAGIDLHSNNNVVVVTDEEDAVVYRKRLRNELGDVLNVLSPFEQNLAGVVVESTYNWYWLVDGLMAEGYGVHLANTGAIQQYSGLKYGDDESDARWLATLLHLGILPEGYIYPKEERPVRDLLRKRAYLVRQRTSNLLSIKNLFARNTGRHLSANGVKRLTEAEVDEMLPDADLALAVKSSVAVMQCIDAQIKTLEKVVLNRVHLREDFQRLLTVPGIGSILGLTIMLETGDISRFPTVGDFASYARCVGSAHISNGKKKGKGNTKNGNKYLGWAFIEAATFAARYDETIQRYYQRKKVKAHLMVAKKAVAHKLARACYCMLRDQTDFDVHKAFT

SEQ ID NO: 105784 - protein, 324 aa, unidentified
MIDGILGIDVCKNTLDVSISSYTKVRTKSFTNSPDGWRHLLDWLIAQKIQRVHACLESTGRYSLGIACALYEADHVVSIINPAQIRDFVRTKLGRNKTDGVDASHIREYCELFKPSPWAPPSEAHRRLGELQTIRSGIIAGLTEWKNRKNSGIVDAEAQALADATISHFTSQLAAVDKAIALTIDNDCDLQSKRDLLLSISGVGETLAGVVLAELPGPDVLRSSAEVVAYAGLNPRRHQSGTCIDRATRISKIGNAVLRAALYMPALSAMRYNSAIVALVTRLKSRGRLKPKQIVVAAMRKLLVLCFGVLKTGRPFDAAIAMRG

SEQ ID NO: 105785 - protein, 316 aa, unidentified
MTTLSVAGIDVSKARLDTFVLPQHIGLGSSNDARGIAGLRRKLQHLKVDRVVLEASGGLEYPVARALSDAGFEVARIQPGRVRGFRTFLGRKAKTDALDAELIARFALAMDDEDIRDVPSERAEAIRSLSARRRQIVDLAAQEKTRLRMTRDRVVLQSLRRTIAALNAERLVIEKALTEALEADEQAKRKYALLRSVPGIGNAVATTLLTDLPELGTLNRHQAASLAGLAPHPDQSGTSKASAHIHGGRACVRTALYMAAVNAIRCNPPFKAFYRRLIDSGKPRKLAVVAVARKLVTLANAILRSNQPWTPNHQLD

SEQ ID NO: 105786 - protein, 389 aa, unidentified
MIVIGTDTHKRSHALCAVDEGTGRVRGSREIKADEAGHQAAVRWARGLDEERVWAIEDCRQVSRRLEQALLAAGERVIRVPPKRMGASRRGERERGKSDQIDAQAVARAVVKDGVDRFPVAYLDERAMEIRLLSDHREDLVKERTRMINRLRWHLLQLCPELEANLKRGGLSELRALERLERRLRRLAPSVRLRIAREELAHIRALTRDAKAIESQLLELIRGYRPRLLDEQGCGTLTAALLIGRTAGAQRFRSDACFGRQSGTAPIPCSSGQRTQHRLDRGGDRQLNRALHTIAITRAQHDPATREYLTRKEAEGKTRKGALRCFKRHLARRFWRLLTEPPLERAQATQPVLTANSVEPEPITIPERPAPRREVDRTITGPIQMICIT

SEQ ID NO: 105787 - protein, 417 aa, unidentified
MTSPPSSSSFERYLAIDLHKAYVVIGGVNLQQEPVLSPRRMDLDHFAQWLPKNVHKTDAVVLEATTNAWALYDQVSPYAGKTVIAHPAKVKLIAEARVKTDKIDVGHLARLLAANLIPEVWVPPEPVRELRALLAHRNRLIRTRTGIRNRLHSLLHRHNLSAPEGRAFAASNREWWESLCVSPIEQLRLHQDLALLDFLDPQIETLDQELARLSGSEPWASQFVYLTQLPGLATINALTVLAAVGDITRFPSAEKLVGYAGLGASVHDSGQKHVTGKITKQGRKDLRWVMIEAAWVAVYHHPHWREQFERLKQRKTPSKAIVAIARKLLVVVWHVLTERVADRHADPEMIAFKLLQWAWKLDQVQRGGLTTRQFIRYYLLRLQMGKELSRIHRGGVNQPIASVEELLALRPELKRTT

SEQ ID NO: 105788 - protein, 461 aa, unidentified
MAKSRAKPRRRNQAAPTALPRVNPNAAGIDVGGAFHYVAVPADRDDQPVREFAAFTGELYRMAEWLKACGIETVAMESTGVYWIPVFQVLEERGFEVKLVDARQLKRVPGRKTDVSDCQWLQQLHSFGLLAGAFRPDDQVCVLRSYMRQRAMLVGYAGQHVQHMQKALVQMNLQLQYVVEDITGATGMRIIRAILSGERDPHRLAALRDERCKSSAVTIAKALQGDWRQEHLFALAQAVELVEAYQAKVAACDERIQAHLQTFTDRSDGQPLPKGPPPRADRHDLSFDATAELYRMTGMDLTAINGLQAHTVLKVLSETGLDMSKWPTSKHFGSWLGLAPNNRVSGGKVLSRRTARNANRAAAALRVGAQALHHSKSALGAFLRRKAAQLGMPKAITATAYKLARIIYAMLTEGTEFIERGQDYYERAYQARVLKNLSRRAKELGFCLVKPDQPATQPAYA

SEQ ID NO: 105789 - protein, 387 aa, unidentified
MARVVIGVDPHKRSATIEIMNQREKPVGKGRFGTDRDGYQAMLAAGRKHTDRIWAVEGCSGIGRHVAQRLVADGETVLDVPAKLSARARVFATGQGRKTDPVDAHSVAVAALRTDNLRQVTLDDTTVALRLLVDRRELLGRTRTETVSRLHHLLLELVPGGAKKFLSTQQARALLNTVRPRDVVGKTRRWLASELIHELAVLDKKIKIADAELTELVKTTGSTLQELTGIGPSGSARLLGDIGDISRFASRGHFASWNGTAPIDASSADQNRHRLSRAGNRRINRVLHIMAVVQLRRDTEGRRYYRRKLADGKTPMEAMRALKRRLSDIVFRRMVADAKRLRTGPGGQAGATLQSSAADLSPMIDTSEKSLPGPAEDHHRTPLLTVP

SEQ ID NO: 105790 - protein, 337 aa, unidentified
MTQVHILAIDLAKRSFQVCGTDRGGAVLFNPVLSRARLLQLWNEQLPCVVAMEAFTTSHFWGRVAKGCGHNVRLIPPIYVKPFVKRQKNDAADAAAFAEAAQRPNMHYVEVKSAEHQARAVAFRTHQCFVRQRTQLINALRGHLGEFGVIVAQGPANLTTVVGILADDTNDLPAGVREIGQLYLDQIRLLTEKIDGLMLKLREATKANEEMRRLCTVLGVGPVTAGAILAFAPDLRAFKSGRNFAAWLGLVPRQHSTGRTTRLGGVSKMGQTDIRKLLIVGAMSLIRWIVRKGVLPDNWLGGVMGRKPRMVAAVALANKMARIIWAMMTSEQNYRMA

SEQ ID NO: 105791 - protein, 383 aa, unidentified
MIVIGADTHKRTHALAAVDAGTGRVRGARQIKAEEPGHLAAVRWARGLDDERVWAIEDCRHVSRRLEQALLAAGERVVRVPPHRMGASRRGEREPGKSDEIDALAVARAVVKDGPESFPAAHLDEQAMEIRLLSDHRKDLVAERTRVQNRLRWHLLELCPELERSLGRGSLEQPRQLDRIDRRLRRMSVSARVRVAREQVAQIRVLTRQADALERELLALVKAQRPQLLAETGCGALTAAILIGRTAGAERFASDASFARQTGTAPIPCSSGQRDRHRLDRGGDRQLNHALHIIAITRARYDPDTKAYLARKEAEGKTKKGALRCLKRHLARRFHYLLALPAQTPWPDHSTSDQIPAQSTQADQSNADTRIVGTAPTPMICLT

SEQ ID NO: 105792 - protein, 451 aa, unidentified
MEREEKRLEEFRRLRREIGGSPNYLVVGIDISKDNHDAMMRTPTGKVVYRRLSFHNTREGFENLLLQVEAMRVQHGLKEIVFGMEPTANYHKPLGEFLINQDYQVVLVSPEAASKNRSLLDGRWNKHDGKDCANIADLICQGKCLYYEYPSAQLRDLRNLLSLNRKLKKLEQGLRLRIRNHLVAQYFPEIDQYCHWGASEGLALVRWCLDPTVMARLSEEQLSQRLGTLGRTIAQRRRLSALKDQAASSIGCRFGVSVEFESQQVVKLLKDVRQTIESTREQIEAVCRKFKEYDCLLSIPGFGPTLSAMVLGAIGNPWRFHNGAQVLKMVGLDLSASSSGKAQGQPVVSKKGKAEIRYALYQAAMVASTRDKHFVAYFTDQITGREKENGIKTKKRVKLAAKMLMIGWTLMKKQECFDPRYLTSADPMVAAANSAKAQITGIPKVQPDPAR

SEQ ID NO: 105793 - protein, 411 aa, unidentified
MLFVGDDWAEDHHDVEIQDETGRKLAARRLPEGAAGIARLHELIAAHLGEGGDPGQVAVAIETDRGLWVQALVAAGYQVFGLNPKQVARFKERYNLSGAKSDAADAHALADMVRAERHQLRAVAADTAGGQAVKVAARAHQTLIWERTRHTLRLRSALREFFPAALAAYADLGLTGADSLELLARAPDPAAAAKLTAAQIAAALKRARRRDVPARAQAIKDALRRPQLAQPAEITAAYAAAVQAAAAVLVTLNEQISRLEVQVETHFLRHPDAEIYLSQPGIGTVNGARVLAGFGDAPGRYASAKARKNYAGSSPLTRASGRSKIVLSRFIRNDRLTDALQSQALSALTGSPGARAYYDKQRARGLGHNAALRQLSNRLVGILHGCLKTRTRYNEATAWPGAVANTQPLAA

SEQ ID NO: 105794 - protein, 351 aa, unidentified
MKRYIGLDVHAASTTFAVINESGKRLGAHVVETNGQSLVEQLKTIPGDKYVCLEEGTQSAWVYEILSPHAKAVTVAVVSESRGQKDDERDAFGLAERLRTGSIERKVFKDAGQFKKLRELARTHGMIVQDSVRVQNRIKAMLRSRGVAVSGKSVYAEKDREEYLEKLPDASHGAAKTLYAQYDAVEGIRRQAEKDLVQEAHRHPISRVLETCPGLGPIRVAQMMSIVVSPGRFRTKRQFWSYCGFGIVMRSSSDWVQKKDGGGWERAKVEQTRGLNYNHNHVLKFIFKGAATTVITQLASEPLHQDYQRLTAAGTKPNLAKLTIARKLAAIALSVWKSKEKYDSTKHRKQG

SEQ ID NO: 105795 - protein, 316 aa, unidentified
MVGIDVASTHVDVACLGATLPTELTHISNDTEGHVVLADVLAKLQPGLVLMEATGGYEAALACTLQAVGLRVAVINPRMARDFARAMQRLAKTDRIDAATLAEFAAVLAQRPDCERFVRPLSDPAQQDLAALVTRRRQLVAMRLSERQRLRLARPVTRPSIQALLEAIACQLNDVDAKMLSHVEQHRAVMSKLLQDVAGVGRVAATTLIAELPELGHLNRRQIYALVGVAPYAKDSGSIRGRRRIAGGRFEVRRALYMATLTATRFNPTVGAFYERLVAAGKLKKVALIACMRKLITHLNAIARNHLNAQNQPLIA

SEQ ID NO: 105796 - protein, 364 aa, unidentified
MENVRFVGLDVHKDSIAIAVAEPGRGEPGLLATIPNDTVLLLKKLRRLGPVRCCYEAGPTGFGLKRDLGAAGIECIVVAPSLVPTKAGDRVKTDRRDAEKLARFLRSGDLTEVYVPDEATEAIRDLERARDDAKRAERTARHHLGKFLLRHGRRSPVKTAWCRKHLEWIRSQHFEHPAQEAVLVDYLKAVEELGERVARLTSSIVEMVERWDRRPLVKALQALRGVNVISATIIVAELGDLSRFQTAPHLMGYLGLVPSEFSSGEARKQGRITRTGNGHVRRILVEAAWAYRFRPAASAAIRVRSQGVSDEVKRIAWRAQERLCGRYRKLLARGKNKNRIVIAVARELAGFIWAIGRAPVLLAT

SEQ ID NO: 105797 - protein, 349 aa, unidentified
MGQVSTIGVDIAKSVFQIHGVDADGTVVIRRRVGRARVLEFFADLPPCRVGMEACATAHQWARELKKLGHDTRLMPPTYVKAYVKRGKNDAADAAAICEAVTRPSMRFVPIKNVEQQSALMLHRTRDLLIRQRTQLINALRAHLAELGLVAAKGREGLHQLVTIVMECGDERLPSNARFACQAIVTQLHAVQIEISGLDKRISQIHRTNADSKRLDTIPGFGVILSTAVVATMTDPKAFRTGREFAAWIGLVPRQNSTGGKERLGSISKQGDRYLRRLLVVGATSVINCARARPYKYPWVIELLGRRPTKLVAVALANKMARIAWAVLAKGEPYRAPTRSSNAVVPAAA

SEQ ID NO: 105798 - protein, 350 aa, unidentified
MKKHNTVGLDMGDKIHSLCVLDWRGQVVERAEVGNTGAAIRKRFAKMKPCRIAMEAGTHSGWVSRILEELGHEVLVGNPRKLRAIWDNAQKNDVRDAEMLARIARFDPQLLHPIRHRGKEAQCDLAAIKARDELVKVRTALIAHVRGLVKSTGERLKKCSPECFHLRAAEAMPADLAPALEPVVASIAELTVRIRHCDNLIEQLSAKKYPETERLQAIPGVGPVTALAYVLTLEEAERFEKSRDVGPFLGMTPRRDQSGQTDKQLRITKAGNAYLRRLLVQCANYVLGRHGPDCDLRRFGLKLAERGGKNAKRRAVVAVARKLGVLLHSLWKSGEAYEPNRRPVRAKKVA

SEQ ID NO: 105799 - protein, 416 aa, unidentified
MKIVRPICCGMDVHKNIIVATIGITNKKTRITEYIQETFSTLNHDLLNLKQWLINHKCFDACMESTGKYWIPIFNILEDEINIYLTHPKYVKAIKGKKTDKKDSKWICDLFKHDLIKFSFIPPKEIRALREISRYRYKLVGMRSSERNRYQNCMTVSNIGIGSVFSDPFGKSAQAIMKEVLESDIIEDEKILKCIHGSCKNKDKILDSIKHCNIETDQRFKMNESMTHMEELQVHINNCEIEIIKRAAPMFDQFMHITQLPGISTLSAILIISEIGVDMKQFESDKQLTCWAGLAPANNESANKKKSVRISKAGQYLKPLLVQCALGAIKDKEGYFGIKYSRIKKRRGHKKAIIAIARMMLVSIYHMILTGETFNPSDYESFRNPNPPIKQQVLTEESAIEFLKKSGFDVSKLTKP

SEQ ID NO: 105800 - protein, 355 aa, unidentified
MIVIGIDPHKQTHTAVAVDRQRGELRSELTVSARRQGHERLLEWARELECGRVFALEDCRHVSGSLERFLLQRGERVVRVPPKLMGRARRSARTRGKSDPIDALAVARAFLREPGLAQAFLAGPERELKLLLDHREDLVQERSRIQQRLRWHLHDLDPELEIPAGALDRRCWLERIARRLARGEQTAQVRISRELLRRCRELTGRANELERELAALVASQAPALLELPGCGTLTAAKLIAEAANIARFDSDAAFALHGGVAPLEASSGRKQRHRLNPFGNRQLNCALHRIAVTQGRGHGPARDYLARKEGEGKSRKEALRCLKRHLARTVFRILKTLPPTSSTSSQPLAAAVDLT

SEQ ID NO: 105801 - protein, 341 aa, unidentified
MSVIKAVGIDLAKLVFSIHAIDEHDKCKFRKTVKRNNLLAEIAKLPPCIIGMEACSGAHYWAREFTKLGHNVRIMASKFVIPYRQNEKNDANDAEAICEAATRPKTRFVSIKSEEQQSVLCLHHIRQGAIKDRTARINRLRGLLAEFGIIMPKGRYPAQKAMSEILEDAQNNLPFLARELLNDLWLNIKTLNEEILKYDRKLYALAKQMKDAKRLMSIPGIGEITATAIVATVNDAKHFNSSRSFAAWIGLVPRQYSTGGKAHLGRISKRGEKHIRTSLIHGARAVIANCKNKTDRTSMWIKDLIERRGFKRATVALAAKNVRLIWALLHSEKEYQADYVK

SEQ ID NO: 105802 - protein, 346 aa, unidentified
MYSIGIDAHKRYSQITIMQENGKIVNRCKVNNDRKSIKRALSPYAQDGSKAVLESGWNWGLIYDMVSDCDLEVKIAHPLKVKAIAEAKIKTDKISADILAHLLRADLIPECYVRGKSSQRIQQVLRQRMFLVRLQTMVKNKIHNLIDRQEEAREPAQSFTDLFGVKGMQFLRSTPLPVLERKLLDGQLELLEELRTRISSVESILDQLKENDEIVERLKTIPGIGECFAMLIRHEIDKIERFPSSNKLCAYAGLVPSTYSSGGKTYHGRIIKQGNKYLRWALIEAVIPAIRKDAQISSYYYLMKAKKGSNSAKVATARRLLKIVYQVWKENRFYRIKTSRTALLYS

SEQ ID NO: 105803 - protein, 356 aa, unidentified
MSKTNSVKIIIGVDTHKDIHAAVAINEIGARLGTLTIPVRPKGYRDLEIWARAFGVIHAFGIEGTGSYGAGLSRFLQAKGHSVVEVNRPNRQLRHQNGKSDSLDAENAARAVLGGQANARPKSADSSVEMIRHLKVARDTAVKSRTQAMITLKTIIINAPAALRQALDRIIGKMALIRHLAALRPGPILSATASAKAALRAIARRWLMLDAEIRAHDADLEALTASCAPAMLEAHGISTGTTAEMLILVGDNPERIRSEAAFAKLCGACPIPASSGKTNRHRLNRGGNRQANAALYRVVIVRMRSHQPTLDYVKKRKADGKGKMEIIRCLKRFIAREIFGYLCGARQSLTSLPKTT

SEQ ID NO: 105804 - protein, 398 aa, unidentified
MTESSDYESVQVFIGVDVGKDTHHAVAINRSGKRLFDKALPNDENKLRSLISDLKQHGQILLVVDQPATIGALPVAVARSEGVLVGYLPGLAMRHIADLHAGEAKTDARDAAIIAEAARTLPHALRTLKLADEQIAELSMLCGFDDDLAAQTTQASNRIRGLLTQIHPALERVLGPRLEHPAVLDLLQRYPSPEKLASLGEKKLAAQLCKLAPRLGKRLAADIAQALAEQTVVVPGTNAAAVVLPRLALQLITLRKQRDEVALEVEQRVLAHPLYPVLTSMPGVGVRTAARHLTEVACRAFASAAHLAAYAGLAPVTRRSGSSIRGEHPSRRGNKALKRALFLSAFTALRDPLSRAYYTRKMSQGKRHNQALIALARRRCDVLFAMMRDGTFYTPQGS

SEQ ID NO: 105805 - protein, 352 aa, unidentified
MKYIAFDSHKRYTFASVEDRESGEVTDKRIEHERGALTNFLSRYEPGCPVAVETLGSWYWIVEEIEAAGMEPRLVHARKAKMMLASSKKTDKLDAHGMNRLQRTGTLPTVWIPDGELRDKRELFRTRMVLSRQCVRVKNRIHSTLGKYGIQIEGTSDVFNKKRRAAMEAALDLLPEQTGFSVKELLAELDSIEESLRTFERRMAEVFNDSQDVQLLRTIPGVGQILSVVIASEIGDIARFPSSEHLAAYSGTTPRVHASGGKCHYGRAPADTNHYLKWAYTEAANTIMRNRHRMCLRHAADLYERVRTRKGHSVAIGAVSRHLAEASYWILKKREPYREPSKKVEAVSSTNG

SEQ ID NO: 105806 - protein, 396 aa, unidentified
MSSTEAPTGRVVIAVDPHKASWTAAAVDSGLQPLATLRAPASQDGYRQLRRFASRWPTAVWAIEGASGLGAPLATRLTGDGIEVADVPAKLATRVRMLSTGHGRKNDDADAVSVGIAALTAPGLRSAAVEEAILALRALVEHRDDVVRTRTQTINRLHVLLTRLLAGGAPRQLNADTAARLLRTVRPRSTGPRTLRRLAAELIAEIRHLDRRIATVTGDITTAVAASGSTLTELRGIGDLTAGKILARVGDVRRFRSAAAFASYTGTAPIEVSSGDVVRHRLSRAGDRQLNCCLHTMAISQVQRDCPGRDYYLRKRTAGKGHKEALRCLKRRLSDVVYRRLLQDAIRRDGASPGGHQGATTESSATGSTPTTGSSDKSLPGPASTDPTTPDQDRLD

SEQ ID NO: 105807 - protein, 431 aa, unidentified
MRDRINQRLEEITATTLILGVDIAKNVHWARFVDCRGVEIGKAESFNNSRQGFENIVAKIEEIRNLKIYRQPFGNLIIGMEPTGHYWKAFANYLIEAGYRVVCVNPYHTKKAKELDDNSQTASDKKEAMTIARLVKDGRFFDPFLPQGVYAELRVLVNTRVSVMKRTSAVKNTITAILDEYFPEIWTVFKNPLKGKASRQILKNCPFPAFILLMDEAGILAEIRKAVKKTIGMKKVRELICAAGLSIGVRNGLDAAKMRLGWLMEELEVHEKQLYEIEQAMEAALNKTGYSVQILSIKGVGIVTAASFLGEVGDPLRFQNARQIARYAGYNLVEDSSGKSKSGTSISKRGRKQLRSVLYQMAFTMVGKNAEMKALYQYLITRKANPLKKKQALVVVSKKIITVIYSLIKKQETYNPELVLGAVRKEMMMAA

SEQ ID NO: 105808 - protein, 417 aa, unidentified
MSCLTDPAGVDPSDRKGITIMTNQDGRVGGVDSHKDTIHVAVITGVGQPVDDREFPTTVAGYRRAVAWLIEHGPMDAVGIEGTSSYGVGITTVATAAGLRVVEVNRTRPAERRKQGDRLDAYRAARSVLSAEATTDPKRASIEPLRALTVTRRSAVKAQQAAWRQIGALLINAPAPLRDRYRNLPDAKLVAALAGSRPEQQTDPALGDTMHALRSLARRHRDLAEEIADLETRMLTRATSANPALLAIKGVGPVIGAQLLITAGDNPDRLRSSASFAAVCGTAPIPVSSGRTDRHRLSRGGDRQANAALHHIVKVRMSYDPATRAYRDARLAKGWTLKAVFRALKRAVAREIFQALAGHCAVPDYSDLRPARRAKNLTLTAAATHLGVWPARIGELELGRRPNEELAARHRAWLTAA

SEQ ID NO: 105809 - protein, 363 aa, unidentified
MRDGATVTVGLDVHRASVRLAALRADELLEERTLPYDPVAVERALGRWPRVLCCYEAGPTGFGLYRHLVERGIDCRVVAPGLVPSSPGARVKTDSRDARKLARLLAGGLREPIWVPSAELEAARDLVRAREDARLDRMRDRHRLSKFCLRHGRQLPGASWGGGRRKWLADQRFPFDPQQRTFTDYLHALDLVDRRIEALDVAIRETAAQGPWTPLVARLRCLRGVDTLTALALVAEIGDFERFTSAEQLMAFVGLVPSEHSSGEHRRQGSITKAGNSHMRRLLIEAAWHARRRPKVSGDLERRQRGQDPAVVERAWRCQQRLHRRWQRMAARGKPQQKIVVACARELAGFVWAIATEQPLRPA

SEQ ID NO: 105810 - protein, 338 aa, unidentified
MKLYAGIDLHSNNSVVCVLDEHDKVVYSKRLPNDLRAIIAALRSYAGTLVGVAVESTYNWYWLVDGLQDEGMSVHLVNTAAVKQYEGLKHAGDFSDARHLAHLLRLGILPTGHIYPREERAVRDLLRKRGQLVRQRTTQILSIQNLVARNLGANTSGNDVKRWTQESVEAMALLDEQKLALQANLAVMRCLDTQISTLEKSILARVKLRPDYRALRTVSGIGEVLALTIALETGDIGRFASPGNFASYARMVDSRRESNGKKKGEGNAKCGNKHLAWAFIEAAHFAVRYDATIKRWYQKKSAHSLAVVAIKAVAHKLARACYHVIKSGQPFDAARAFG

SEQ ID NO: 105811 - protein, 363 aa, unidentified
MIIIGCDYHPGFQQIAFVDTETGDCGEQRLQHREEAEKFYRDLAAQGKLVRVGMEASGHARWFERLLAELKFELWIGDAAEIRARRVRKQKTDRQDAQHILQLLVEDRFPQTWVPSGENRDLRQLLWHRHRMVQARTRIMNQLQAVALNEGLRCKKKLWREHGREQLESFRLAPWASRRREDLLKLLDQLNPTIAELTHAIEQEAEKCPEARRLMTHPGVGALTALAFVLIIGRAERFQCGKQIACYLGLVPVEDSSGERRRLGHITKQGNSLLRFLLVEAAQVTVRTIPQWRSKYFHLAMRRGRKIAKVAMARKLAVRLFWMMRQEWNYEQVQKFGSHAGQPENRHGVPENTELLTGASRSS

SEQ ID NO: 105812 - protein, 348 aa, unidentified
MTTYYIGADVHCNNLEIAIMNRKKIIQRYSVPTNITAASQVLDSYTGKKYMVIEEGPMAGWLYRNLRGKVNRFIVSDPRRNKLISSDGDHDDKIDSGKLAMLLEGGYLREVYHSDNEYQVELKHWVILYNDRVRDAVRNINKIRSRCRMHGIAIPRKVLREPKHRAEWLKSLKNTALASQLLMLWIGYDATAKQSRMAKQHMIQLSTKYPVIKLWKKLPGIGTIRAATIFAYLDTPWRFKKKNKLWKYCGIGLQRTASGKDRKGRPKPAILEMPLASNRVLKNAIMGAALTAINQKQNAFKTDYERMVRDGVVPSNARHTVARKLLTVMWACGKQAVRMDRLKYLYRN

SEQ ID NO: 105813 - protein, 396 aa, unidentified
MPATTRHARVPALPESTTAQARLLYLALDLGERHWTLAFTVGRGQRPRVRTIPAGDLERLTTELAAARRRFGLPPETRVVSCYEAGRDGFWLHRALLAAGVTNVVVDAASIEVPRRARRAKTDRLDARKLVTMLVRYIEGERPVWHVVHVPSEADEDRRHLERERETLVADQTGLVNRIQGLLATQGVRLALRGDVPAQLAAVRRWDGTPLPPELRARLEREWMRVEAVRTALRALTTARHRRVTTPTPPAVDAAAVHLTRRLAALGAVGETTAWLLATEMFSWREFRNRRQVGGFVGLTGTPDQSGDRIREQGLTRNGSVELRARVIELAWGWLRYQPASALSQWYRQRYGGGNARLRRIGIVAVARRLLIALWRYAMGGPPPAGAHLKDDAVAA

SEQ ID NO: 105814 - protein, 350 aa, unidentified
MCSLPVFVGLDYHDASVRVCVLDTDGSELANADRRNDWKAIAEFADRFGRPVQAAIESCCGAADLAEELISCAGWSVDLAHPGYVQRMKQNPDKTDYQDAQLVADLERIGYLPRVWLAPQPIRELRHVVRYRLQLTEQRRATKLRVRALLREQRCRAPQGVNAWTKAWDHWLRHTAELSAEGRWVANQHLQELACLATRIRQVEKRLERLTANDVEVQRLQQQVGIGPVTAWTIRAEIGHFDRFRTGKQLARFCGLSPRNASSGQRQADAGLIRAANPALRAVLIEAAHRLVNYDRYWQKFAQRLRAAGKPGSVVAAAVGNRWIRRLYHEMKTPSGELAVAVGPARSEDS

SEQ ID NO: 105815 - protein, 350 aa, unidentified
MTQYYLGIDLHKVFAYWHLTNHKGEVLWHGKVKSTEKDTHAKLNMLSVPLSETVAAIESVEHYGWYANILTDSGIGEVKLANPHKLRLIAENPLKNDKKDAEIIAQYLRSGTLPESYLAPKEVRDLRELVRTRMYLAGVRASAKIRIRNALSKHGLFCKYKDIDGDKARAWLMNAVLPAESRREVESLLAVIDSFDREILIFETEMRNRAKQYPEVKILKTIPGIADIRALIIMAEVGDFSRFPNTHKLSAFAGLVPRSFSSGGKERLGHITKRGSSLLRHAMVQAAQQAHPKWGALYTFYESVKSRTHKGAAKVALARKMLGMCWYLVRKNEPFKARPSIEPAHSVNGV

SEQ ID NO: 105816 - protein, 354 aa, unidentified
MGQSKAYVAIDVHARNCVLGWRNGRGQWQGAERFETGEKELIARTEKISAAVKVVTVEESTLAAWVARTLHPHVAEVIVCDPRCNESVHRDAFKHDDRDVEELSRLLWLGSLKGVYHPQDDARAVFKALAQQYLDLRDTQVRVKQQLKAKYHMWGVTGVEGKLVYSAQERQRYLDTVADASVRHQLLRLYALMDAALKQEADALRELVACGRRYPEIGEFVKIPGVGPVGAHVFDAFIQVPGRFPDKPTLWRYCRLAVTDRTSDGKPLGFRRLDNHGNPELKALSYWAWKGAMQTRARNEVQQFYRASLERTHDKAHARLNTQRKIVATMWAIWKKGEPYRPERFLSPADAAER

SEQ ID NO: 105817 - protein, 420 aa, unidentified
MGRLKIVYPVCCGMDVHRDFLIACIAATNAQGVTEYQSRRFSTYTGSLRELRDWLLANDCKDVCMESTGKYWFPVHNILEESCNVVVSHPKFVKAIKGKKTDKKDAQWIADLFKHDLVRGSFIPPKDIRQLRDLCRYWVKLSSYMTGEKNRAQNCLTVSNFKLDDVFSNVFGKSASAITTQLLEHPGEQFDVAPFVDGRCKTPIAQIQEAVDGIFTYEQAEKLKIIRGHMDSLERHKAELESLILEIAQNYLPQIELLLTVPGIHDAFTAIRILAEIGADMTVFDTSKHLCSWAGLTPQNAESAGKKKTTRIGKSGAYLKPLLIQVALAASRGEKHPEIYGKKQALQKRRGKKKAIVAIARRLLTAIYHILSKNEPYNPAAYIQEDKNPMARQISQEKAFEMLARMGFIVSNPSPLSSSG

SEQ ID NO: 105818 - protein, 348 aa, unidentified
MRTEYFIAMDTHCRTTDVCIKTGGGKLIRREHTQTTIPHLRAIIESVPKPRRVTFEESGIAGWLYRSLKPFADEIIVCDPRRNAYIAKDGDKDDTIDAQKLNDLYRSGHLRIVHQNDSSEQAACKQLVGIYHHRVGHRVAEGSRLLALGKRWGVMLTSGMLMESNARKNLQERFEAAKVPAGMIAAALELWDGYELAVSQEESRYKQLCQMVRDNPMMRRVAELPGYGPVRSATLVAYWQTPWRFKSKPALFKYNGIGLRRQSSGDGYEYLRVEQACNHQLRNVVIGAAETAIKQKENIFARRYGQWIQNGLSPKNARRNVARDMAACIWGMWKTNTAFDPDRIPELS

SEQ ID NO: 105819 - protein, 318 aa, unidentified
MSELIFVGVDVASESLEVARSDRHETWQVSNDESGIAQLVQQLIELSPPLIVLEATGGYEFAAASALQTQGLAVAVVNPRTARDFARAMGLLAKTDALDARLLASFARVLNQHPERHRFVKPLADEERQRLQALVQRRRQLIEMITAEKLRRRQAHAASRPSVDRVVAYLGQELAACDSAVAAHLQQYHAELAAALSTVPGVGRTSVAVLLADLPELGKIDRRRIAALVGVAPMNRDSGQMRGQRSIWGGRHDVRRTLYMATLVAVRFCAVFRTHYERLLANGKAKKVALVACMRKLLATLNSMAKHGSRWNPMMHDS

SEQ ID NO: 105820 - protein, 411 aa, unidentified
MRLFVGLDVSSFDMRVCFLDGEGTKLDTFAVSNDLPGATFLKERLLERVTDQEVDVLKIGLESTSVYSFHPSMFLHHDKDLKRFGAQVFVMNPKQIANFKKSYSDMDKTDEIDAFVIADYLRFGRNQLSVVKESQYMALQQLTRSRYHLVKAMTKEKQHFLQHLSLKCNTFTQEVDSSVFGNAMMELFLEKFSLDEVAEMPLEELAAFLQEKGKNRFDDPACIAAAIQKAMRSSYRLDKVMEDSMDIILGTSIEIIRTFTKQIKEIEKSIKRIMAGLSQTLDSIPGIDPVFTAGIIAEIGQIERFEDESKIAKYAGLYWRKHQSGRFTGETTSLSRNGNVYLRYYLVEAANRVRTQVPEYEAFYQKKYREVPKHQHKRALVLTARKLVRLVDALLRSQQLFTPGKGREAMT

SEQ ID NO: 105821 - protein, 402 aa, unidentified
MNPVIGLDISKDESHGQSFLERGKPYKGTFQFEHTREGLAKLLQAIQNVEKASGLRPLLVLEATGHYQSPVVQFLEEHHYLYIVINPLISNRLRKSNLRKVKTDAADAFLLGELYYKEEFEPYKKRGVQLLNLRYLTRQYESLSKMCVQTKLQFQAVLDQVFPTYKGVFGDIYSSISLRFLNEFPTSYLVLQSDEGTLKSKIKELLSSRRGRSESWICVRVERLLDAAKQNPFQQTMYSSHLINLKVLISLIIQYQEHLSRLEENIDALAKEIEEYDLIQSIPGIGNKIAATILSEIGEVDRFDHPKKLVAFAGIDPSVFASGKFTATRNRITKRGSRQLRYALVMAVQCGLIRSRNMRLKDFYDRKRAEGKPHKVALIACANKLVHWLYVILKSKKKFRSA

SEQ ID NO: 105822 - protein, 373 aa, unidentified
MTLTQDATTKLYIGHDIHKRSWSVCIRTDLFDHKSFSMPPEVDALYEYVSKNFKNYEVRLTYEAGCCGFSAARGFMNLGWEVTVVNPADVPHMDKQNYQKTDKIDARNLAKQLQNNTLTPIYIPTEDHEQFRSLLRQRHRVTKLLRKTKTDIKSMLLFHGVKIPSEYDNNNWSINFRAWLSSLKWSNICGASSMRYKLSQYDFVYKQYLDLGTELRAYARKHHKEDYYLLKSIPGIGGYLSAAILAECGDIRRFDNERQFSSYLGLVPGIYNSGGSETNLGITPRCNTILRPYLIESAWVAIRLDPEIQSYYRKNIGKNPKSIIVKIAHKMAKRILSVIKNKEPYKINNNENVDKNIKLPIEAIEAILNQEDD

SEQ ID NO: 105823 - protein, 402 aa, unidentified
MNAVGIDVSKSKSVVAIMRPFGEIVSTPFEIKHTASDIHSLIELINSVEGESRIVMEHTGRYYEVLAHQLSEANLFVSAINPKLIKDFDNDSLRKVKSDKADAVKIARYALDKWQNLKQYNVMDELRNQLKTMNRQFGFYMKHKTAMKNNLIGILDQTYPGVNTYFDSPARSDGSQKWVDFASTYWHVDCVRKMSLNAFIDHYQNWCKRKKYNFSQSKAEEIYGKAKELVPVLPKDAITKLIIKQAVDQLNSASTTVESLRTLMNETASKLPEYPVVMAMKGVGTSLGPQLMAEIGDVSRFTHKSAITAFAGVDPGVNESGTYEQKSVPTSKRGSADLRKTLFQVMDVLIKTHPQDDPVYQFLDKKRAQGKPYYVYMTAGANKFLRIYYGRVKEYLASLPES

SEQ ID NO: 105824 - protein, 394 aa, unidentified
MKLIGIDIGKNKHFFCVMDQQTGEIISQPVSFSNDKEGFDFLVQKIKSYPKDSILIGMEDTGHYHFALLKYLLDLQYTVALINPKTTDFNRKMQGGITKNDKLDTINICDVLDTPERKKQYRITKVNSFDLYEQKQLTRHHHNLKEEENVYKNRLQKCIDIVFPEFNKLFNSKYGIVYMNILKMFGSAENIANTDIRTIRKCFEIDGRDNRISLTPERLKECAISSIGISSSAEVIQIKHLTAQIELIEEQLTEIDKKIEEFSIQNNSPILSIPGISHFSGTSILAELGDISNYSKTSQIIKFAGVAPLHYESSQFNAQHTAITKKGSKYLRKTLYQIMLPVIRHNPVFNKYYQLKISQGKGHRCAQGHCVRKLLRIIYHLLKTNQQFDPQLLR

SEQ ID NO: 105825 - protein, 363 aa, unidentified
MQIAILGIDLGKNSCSVVGLDNSGHVVVRRRMHRTSVIKFAGGLVPCVVAMEACCGAHHLGRLLRTQGHEVRLMSPEYVGPYVKAQKNDERDAEAIAEAATRPTMRFVELKAEEQLDMQTLHRVRDRLVGERTALLNQLRAVLLERGIAIPQGRRKLEQHLDAMLGGPEWADVAPRMRRLLRDMRTEWQALDRRIEAFDEEFAVKVRTDPVACRLATIPGIGVLNATALVAAIGNGENFARGRDLAAWLGLVPRQATTGGKPRLLGISKRGNKYLRKLLIHGARAAMPFLARSATAHGCVACWQGRIPTLWWWPWPTNWPGLSGPSCGMDVSSRGPTSWHRRRREFGRPRLMRDRSWMSAGGK

SEQ ID NO: 105826 - protein, 418 aa, unidentified
MTPDEKAAYARQFPVHVGVDTAKRFHVLVAMGPDGRRSKPFTVLVSRAGFAAAHAHLQSLFPGVAPGQMLVGLEFAGHHGFTFARFLADQGYPVVNVLPAHTNRAKELEDNSPLKTDAKDAAQIARLVSLGIFVRFPFLQTPYVELRLLSVQRHRLTVEATRFKNRLQGLLDLAWPEFLGQFSGLHKRTPLAILERWPLPAEFVAAAPQTRWRHIKAASRGHVSKERVTTLVTSARETIALTQATPERRLEITQLLARWALVREQLREVEARIAALVEQCPEATVLLTVPEIGAACAATIVAELGTPADFQHPRQVLKLAGMNLTGRQSGQTEGRRRQSKRGRPMLRRQLFLLAGRWCQPRGLYRPEYEALRARGVPGTKAVCSLARKLVPLLLRLMQTSQPFDESRWRAHRRQTAAA

SEQ ID NO: 105827 - protein, 444 aa, unidentified
MAMSKARTGRSKLEVMHPDAAGIDVGGSMHFVAVPNEAAEQSVRQFGVYTRDLQAMADWLQECGVKIVAMESTGVYWIPLYELLERRGFEVMLVDARQVKNVSGRKSDVQDCQWIQQLLSYGLLKAAFRPQDQFCELREFNRLRTRLLADQGRSVQHMQKAMTLMNIQLSQAISDVAGVTGQKIVRAIVEGERDAQVLAAYRDSRIKASEEEIAASLQGTWRAEHLLALKQALGRFDFYAQQLQECETEIQRVMAKLEVHTKELGKGKKRSKAKNAPKFNVRERLLKMCGVDVTKVDGIDETTALNIVAEVGTDLSRFPSDKHFASWLGLCPGTRISGGKVLGAKTKHSVNRASQAFRQAAAALRSSKSALGAYYRRLCGRMDKGKAVTAAAHKLARLFYALMTKGQEYVDQGQQYYEERYRQRVIHHLQRRAQSLGMSLVPTA

SEQ ID NO: 105828 - protein, 349 aa, unidentified
MIRNKPRGATVYGIDLGKNIFHVVGTDSAGNVVQRVKFRRDTLRAFFERAERAVVGMEACPGSQWLARKLQAMGHTVRIIPAQFVKPYVKSHKNDTIDAAAIAEAVTRPTMRFVQVKQPEQVDLQSLHRIRDQMVGSRTRLICQMRAFCLEYGVAIRQGAGLFKSDLPRVIADECNDLTPTMRRLLNATPSTGPRLEKRIAEITREIEALAASDEKARRLMTIPGIGPLGATALLAAAGNGQQFKKARDLAAWLGLVPQQYSTGGKPQMFGISKRGNRYLRRLLIHGARSCVMHLDRSRDRLGAWLRQLHSRMHVNKVTVALAAKIARIAWVVLNRPGAIYERRDPALA

SEQ ID NO: 105829 - protein, 347 aa, unidentified
MDTIGLDLHKRESQLCIIAIDGTITERRIVTSRERVTAVLGDRPPAKILLEASTESEWVAQHLESLGHAVVVADPNYAPMYATRARRVKTDKRDARTLADALKLGAYHAAHRVSADRRHVRAELAVREALVRTRTRYVASAKALVRRDGLRVAASESHLVAKRLAALELSAALAAELLPLFAILAPINEQIKAADHRIAALTTSDPTVALVATAPSIGPITASAIVATVDDVTRFQSAHHFEAFLGVVPGERSSGEKRRIGRITKAGNARVRYLLVEAGWRILRSKDPETAALRAWALNIASRRGKRIAVVALARRLAGIVYAMRRDGRAYDASQLRMPRVRGAQAS

SEQ ID NO: 105830 - protein, 318 aa, unidentified
MSQPNQHCIGIDVAKMSLDIAGTTEFSPFSASNDEDGFMAILKVLKESKISLILMEATGGLEASVACCLQAAGYEVVVINPRQARDFARSMGYLAKTDKLDAAMLAQLAQIIDRHPDRSRFIRALPDEARAVLTAMVVRRRQLNNMLVAERNRRYPSHPQSRKSIDNIINALESELDHISQEMKKHVKVFFMEQAELIGSVKGVGEVTVASLIAELPELGKLNRREISALTGVAPLNRDSGKMRGRRTTFGGRAGVRATLYMAALVATQFNPAIKMFYQRLLTVGKPKKLALVACMRKLITILNTMLRKGEKWDASFR

SEQ ID NO: 105831 - protein, 312 aa, unidentified
MSNPVCYLGVDVAKNSLEVAFERHRWKFSNSKEGHLKFIAQIKKLPTSMHVVCESTGSYHIEMCLALQDAGIAVTIANPARIRYFGKSEGTLAKNDPIDAKLIERFANSKRPPADPPLCRKHLAFSEMAAHRGHLVEMVKVLRTHREQAREPALVKAIDKSIAVLEKRLGLVEDQLRQTIEANPVWKRKFDELTTVKGVGSVTALVMLVKMPELGTLNRSQCGALGGLAPYDNDSGEHQGKRSIRGGRHEVPTALYMAAISVIKFNPILKAFYERLIAQKKLFKVAITAVMRKLLIYLNGLLKTLSEQTLPA

SEQ ID NO: 105832 - protein, 413 aa, unidentified
MIVIVKDYRPGMPVLADGRAVVGIDIGKRKHAATALSPQGEILAQLASFPNTREGVDRLEKEVLRPAGGPGKVLVAMEATGHYWMCLRAELERRGYATVVLNPIQTNARAKTQIRKTRNDRIDSASIARLILSGQAKASRVPDEPTAELRLLTRHRRRLRAAVSDMERYAHTLIDRIFPEYAEVFSDPFLASGERLIRELGLAPRNLVQQTTQVRDLLRAASRNRLAPETVKQLLQAAQTSIGVPQAEDVVQRQLVSILDFRNTLRQQIEHIEQELEQRIKKLQSPLLSLGISSTLAATIHAETDPIGDFRTPDQYVAYAGLDPSLHESGDSVHRRGKISKRGSPVLRQALYLAAFVVYRQHDYFQRLYRKHRRRGKHHCSVMVIIARHLARVIWRLLKDDRPFTKRPPKRTP

SEQ ID NO: 105833 - protein, 466 aa, unidentified
MRKPQVIPDEDHEVIYERVAAVDVAKASGVVCMRAPDTKRPGRYVNRIWDNVPATRARIAELGRELLRGQVQMVTLESTSDYWRVWYYVLESTGLAVQLVSASQARNLKGRPKTDKLDAMWLARLTQWGMLRPSFVPPAAIRRVRDFTRARTDLVHERTRCLQRLEKLLEDAMVKITSVASDGLKAKSVVAMVAALIAGERDPRTLADLAKGPLRSKKDALAEALDGMFDSHHGVIAQALLDQVAFLDQRIAQMEAGAIEALAQVQESWGVDATGETGPGRGAGPDSLVLAAAHRLAEIPGISVWLAIVIIAEIGLTMSVFPTPAHLVSWMGLCRSAAQSGTRHGKGKPKKGNSYARAAAGQAAIGAAGTATFLGERYARIARRRGKAIAQAAVARSIMTIVWHLLNDPAARYRDLGPDFYASRISRDKKIRSHIRGLTALDLTAEDICAALGITAEDIPAGGHAA

SEQ ID NO: 105834 - protein, 342 aa, unidentified
MKIMTGIDLHSNNALCGLMDESGRRVLHKKLPCDLPAILQVLEPYKAQIAQVAVESTYNWYWLVDGLEDHGYPVVLANPARMHQYDGLKHTDDVSDAFFLCELMRLGILPTSHLYNRQTRPVRDLLRRRMLLVQLRTSLILSFKSLNERTLGQRVPLGLVKAMSIEAAQARFTAPADQLLSGEQIGLMGQFQESIAKIEKHILATTKEWPTFQRVQDVPGIGRILGLTIALETGDPKRFASAGNFASYCRCVKSLRQSNSKKKGENNRKCGNRYLAWAFVEAAHFACRHDQRCRRFYDRKKQQTNPVVATKALACKLAKASWHVMHDDAPYDPQRVFGGGKP

SEQ ID NO: 105835 - protein, 316 aa, unidentified
MAKTVSKITLGIDVSKDELVICDWDTEQIIRLANEPADIERYLGSLYGPVRIAIEPTSSYHLAVVERAHAIGFLVYLINPRQLLHYRKAVNVRNKTDPADAWLLARYLAHEFATLRAFKPQCAKAQRLWALLKRRGVAVRTGQTLKQSLRDIRLPAKALFTEIQRVIARIDQLLRTLLRELGWWADYLRCQSIPGIGPVNAAALSAVYHRGAFAGSDAYVAFIGLDVRVRESGNFKGQRKLTKCGEAEIRRLLFCAAQGARSYPSFDNYLQLQLDKGLSKIAAKVILARKLARIAYTLISKQQTFNKQEIIYSQSP

SEQ ID NO: 105836 - protein, 344 aa, unidentified
MNNRTVLALDLAKRVIQVCKVTGEGEIKFNKAMSPDAVRTLLTNTKPCIVAMEGCGSFHYWGRLAQELGHEVRAMPPIKVKPFIGKQKTDANDAVGIFVASKQPSMTFSPVKSVSQHTIQSIQTSRRLLEKTLKSTSNHIGALLYEYGIILGKGKKSLREGMVTYLDPLSTCLTEPLKLLLGSLWQQYQSTLVQFEQLSTQLSQQIKQLEPCRRLMALEGVGEIGAAGLYASLGDGSGFKNGRQASAYIGVTPKQRSSGGKVVMVGIDSHSGDKSLRAILFLGALAAIAQLPSEPKTEKQRWLIALIKRAGVKKACIALVNKTIRTAWALLRYSQPYQPKAIAI

SEQ ID NO: 105837 - protein, 399 aa, unidentified
MLAVGIDISKSKSVAAILNQDGSMHTGPFEFHHTQPELDAFIKYILNSNQSATILMENTGHYHYPVLKAFQEAGLPVCMVNAYQIKKFGDMDLRKAKTDKKDAVRIARYALEKSYSLVPYTSMEQKYEDLRFLARQYNQRMLTLKTNKVFLLNLLDETMPGITNILPLTTRTPETSLSVLFINRFKSYDRIKKMGKSRFLDAFEKIARKSRNRQTKTYGLAIYETALHNITTRGENEYTLGAQDQCLELVCESQKAADSIILKMQTLAETLPEYAVLRSMAGVGDRLGPLILAEIGDIRRFHSGKALNAYAGNDAPPYQSGTFESHNRHISKRGNAALRKYCFEVMQALKLTRPQNDPVYLFLLKKEQEGKPYNVAKMAGVNKFLRIYYARAMETLKQQ

SEQ ID NO: 105838 - protein, 344 aa, unidentified
MGQYVGLDVSLEVTTVHVLDEQGKRVWHGACVSHPAAIAATIRKHAPEVVRIGLETGPLTTWLWQALTDAGLPMVCLDARQAKAALNLRINKTDDTDAEGLAQLVRSGWYREVRVKSREAMLVRSLIGARTQLLGIVTELSNQIRGLMKTFGLVVPKGAGKVFEANVRRLIEDEAAVAAIVVPLLDSWRAVRTQAADLDRQLLSVVRENADCRRLMTIPGVGAIVAASFVAAVETPENFTTSRAVGAWIGLTPRRYQSGEVDYDGHISRRGDARLRALLYEAATTMLTRVQSESELRRWGLALKKRLGFKRAAVAVARKMAVVMHAMWKKGVDFTPKAAPSAAP

SEQ ID NO: 105839 - protein, 370 aa, unidentified
MQFVGIDLHTNRFTCCYRDERSPAGEKDGKRIETFELSTQGLSSFYTTLTKETYVLVEATITTFSFVRLIQPLVKEVIVANTYELKQISLGRNKTDKIDSDKLCRILKMQVLSGEKAITPVTVPPVEIQELRGLFSTYRLLKKQSTQYKNRIHSLLKEELHGFTQEQIFGKTSRKEIREMENAPVLSFQLNLVFDLLENLEASIQTLEDQIKEQAKPYKREIEILTSMKGVSVFIAIAIITDIIDVNRFRNSKAFTSYLRSAPRVESSNTSTRTMGTNKKGRKLSATLLTQSLNHMLDASPKLGKWYNRLTQYKKAGLVRTGLRRRVFAEIFQMLKKGEYHYERDPAKHRAKLLQYRKFLEKRKNSIKTA

SEQ ID NO: 105840 - protein, 375 aa, unidentified
MNTSQAEGMTVTIVDAARPVPGGADTHSDLNVASCLVTGGVDTHLDLNVAAALDPVGGLLGVAEFPTTLAGHRELLGWLSGFGPVARAGVEGTGSYGAGLARFLRAAGVEVVEVDRPNRQARRRSGKSDPLDAIEAARAALSGRACGAAKSRDGNVEAIRVLVVAKRSARSAKIQTLNQIRHLSFTAPDQLRQRLAGVSRQQLAARAAALRPPTVESADPVITATKTALRILGRRVLALDAEKARIDALLATLVTQTAPQLLTVFGVGIDTAAELLVTAGDNPGRLRSEAAWAHLCGTSPIPASSGKVTRYRLNRGGDRQANRALWGIVITRLGNDPRTRAYMARRLGEGRSKPEVIRILKRYVAREVYHHLPRP

SEQ ID NO: 105841 - protein, 384 aa, unidentified
MTIVETRLITGGVDTHLDIHVAAALDGNGGVLGVESFPTTTAGFAELHIWLSSFGSLDRVGVEGTGAYGAGLARFLRTMDVTVIEVGRPNRQARRAHGKSDSIDAIEAARAALSGRASAVAKTADGNVEAIRVLLVAYRSGRDTRIKCLNQLRHLGFTAPDELRERFRDVPAGFLAESAATLRLGRNGDPVWSATKLAIRTLGRRVVDIDADCDRLHDELAILVKATAPSLLDLPGIGVRTAALLLVAAGDNAERITSEAAFAHLCGVAPIHASSGKVTRHRLNRGGNRQANHALWRIVFTRMSSDARTRTSDVVDDRDRVFEMHDVDHAPNKASWVRERERAAFASREYREPEQHRDAVRIEVRKADQIQSERLSPTDHVAQG

SEQ ID NO: 105842 - protein, 360 aa, unidentified
MNNHKYVGLDTDQATIIARVEDAKGNFIMEAAIETSASSIRQFFKGLDGTIHVAFEEGTQAAWFYDVIRPLVADVTVCDGRRNKLIQSGNKGDRIDAAKLTRLLRLGELHAVYHGERSTRGLKELVHGYESLVTDTTRAKNRLKAVFRSQAIRCRGDLVYSQQERKQWLGKLEAAALNARASILYEQYDCLTKLRDKAHKAMTTEARTHPAYKRIKKVSGLGEVRTAQLIAVVGSPHRFRTKRQFWPYCGLAVVTRTSSEYEIVDGQRRRKRNKQAQTRGLNQNYNRTLKAVFKGAAATAIERPPFKQYRQRLIDKGIRPELALLTVARKIAAITLTIWKKGEEFDPERVNQAVPGTGNK

SEQ ID NO: 105843 - protein, 455 aa, unidentified
MPRRRPSTRPVTMPVLHPHAGGIDVGATELYVCVPLDRDPQPIRRFGAFTADLHTLADWLTQCGVTSVAMESTGVYWIPLFQILETRGFDVCLVNARHVKNVPGRKTDVQDCQWLQYLHSVGLLRASFRPPETVCAVRALLRHRETLVQGAATHTQHMQKALNQMNLQLHHVISDLTGVTGLAILDALLAGERDPQVLAGHRDGRIKASRETIAKALVGDYRPEHLFTLRQALASYRHYQGLIAECDGAVQTLLGAVASQVDLARQPLPPAPAGRRKPHRKAPSFDLRAELYRVLGTDLTQVPGLQTPTVYTLFAELGADLSAFPSGAHFASWLGLCPDNRISGGKVLSVSTRPVKHRVAQALRLAAQSLCRSQSVLGDFFRRTRAKLGAPKAITATAHKLARIVYHLLTTRQPYNESRLAVADATRRRHSESRLRAQARALGFQLVPALEPAVS

SEQ ID NO: 105844 - protein, 356 aa, unidentified
MTKALMAGIDLHSNNVVIGIVDQDGQRLKHQKLACDLEQIKQFLRPFKSRLKSVAVESTYNWYWLVDGLRGLGYPVVLANPAKMEQYGGIKHADDKNDAYFLAELQRLNILPTGYIYDPKLRPVRDLLRRRVALVHQRTALLLSFKSLYTRMTGQELKLSRLKSMAVAEAQTLYEHPANQLIATVQKEHIQQLDESVSRIERVVLQSARALPCYRRLNTLPGVGRILGMTISLEVGEIGRFKGAGNFASYCRAVAARRTSNEKNKGANNRKCGNKYLSWAFVEAANFAKRHDEPCRRWFDRKAAQTNPIVATKALACKLAKAAWHVMAHQVDYDGQKVFGRAADSQRKGLAPANRN

SEQ ID NO: 105845 - protein, 339 aa, unidentified
MGKYFLGIDLHKEYAFFSLIDKKRKVLFQKRVPLERKTLLQEIEALPQGTQGVVEPLLSWSVLKELFSKKKKKLFACHPLEVKALSSKKRKNDKYDSLRLAELLRVDFLPKVHIPSKNSQRLKSILMTRELLLKMKHQINQRVSSFYLGLMRKPYFERKLPPFYEKQKEILLLILSLIEKKIKEIEKELKKEYSSQRKVKILLSIPGVGLFCALSFLAWIDDEKRFPHQKAISAYSGFAPIIKESGKIKKKGGLSREGNSLLMRNFYLATLHVSQSWGYLYSFYERLRKKKGKKKARVALARKLFCLCWTLLKKKKLFRKDYPFLKKKKEVKARISTGP

SEQ ID NO: 105846 - protein, 416 aa, unidentified
MFAVGVDVANGRSMVAVLDGMRNMVAKPFEVVHTAQGFAALVEKLRQLDGEVRIVMEHTGRYYESFAMTMHRAGFFVSAVNPLLIKNYQGGINVRKVKTDKADAQKIAQFALDKWTILPHYTPMDTIRYNLKTLHRQFQLASKTKTALSNNLIALLEQSYPGANRYFDSPVRADGRQKWVDFVDTFWHVDCVARSSEHAFVERYRKWCKRHGYVFSEQKAIQLHADARQKIPLVPKSDTCKLLVREAVSQLNAVSRTVETYRAEMDRLASQLPEYETVMGMTGVGKSMGPQLMAEIGDLRCFAHQKSLVGFAGTDPIKEESGDKVSQSAPSSKRGSPYLRKTLFVIMSILLQLQPQEDPVYQFLDKKRSEGKPYYVYMTAGGTKFLRVYYGKVRDCLKAKGLWEVPASASQEVNPG

SEQ ID NO: 105847 - protein, 421 aa, unidentified
MKKRTYRKIAVKEVDVESLIAELGSGRVVFAIDVAKVDMVAAVVAGDGRVVRTVAWKNPTENGLVLELLAGLVRAGLLVEAVMESSGTYGDVLRHQLVAGGVAVYRVSGKRTHDAAEVYDGVPSLHDAKSAAIISKLHVDGASRRWEPLSDEKRGLKAAIATMDLFRQHNQRLIHSLESSLARYWPEVTELLELGSATLLALLARIGGPKDVTREILAARKLMLGMSHRLMSEEKIEAVLISAQSSVGLPMLGQERSALMTLASEAHRALKEFKRAKAEVERLSENTVAKVLAPATGKTTAAVLVADVGDPRDFPCARAYLKAFGLNLREKSSGMLKGRLSITKRGASRARQYLWLAVFRWIQRDPVTRAWYDSKIKRDGGKRAKGVVALMRKFAKALFHVARGAVFDSTKLFDISRLQLA

SEQ ID NO: 105848 - protein, 340 aa, unidentified
MSEVTTIGLDLAKHVFQVHGIDAQGATVLRKRLRRGQVLAFFSRIPRCLVGLEACATAHYWARELAALGHEVRLMPAQYVKAYIKRNKHDAADAEAICEAVQRPTMRFVPVKTAEQQAAQLLHRGREQLVRQRTMLVNALRAHLAEFGMVAAQGLRNVAQLIAIVRDEDDLRLPDVARQVLQVLANQIEQIEAAITALEKQLMAWHKTNPVSQRLASIPGIGPIIATAIATTVADPNVFRSGREFGAWLGLVPRQNSTGGKTRLGGITKRGNRYLRRLLINGASANLLRSKATKADPWVIGIRRRRPPLVVAVALANKTARIAWAVMLRQEQYQPRALAA

SEQ ID NO: 105849 - protein, 349 aa, unidentified
MNEPYAGRQIVGFDLHRRRSVLVRMTEAGERLETVRISNDPEYLREVMTRAGEAPEVVLEACYGWYWAADTLAELGATVHLAHPLGVKMFSYRRLKNDERDAADLADLLRMGRLPEARIAPPATRELRGWVRHRAKLVGLRSNLKCQVHGILANAGITVPMSDLFGASGQRLLATADLATESRSRIDSLQRMITALDFEVELFAKLVAGRLRTHPGYQAIQLIPGVGPILAAVFVAEIGDITRFRRPEQLASWAGLTPKHHESDTTVHRGRITKQGSRLVRWAAIEAVQRLPGHTRIGQVRDRVAGRRGRNIGVVAAARELIELVFYGLRDHRVHALAVHSPARTPLPA

SEQ ID NO: 105850 - protein, 371 aa, unidentified
MNSIVYVGMDVHKEQYTLCCYSYEKDKVEYKQTIPSDYKLVLKYMEQVRSRYDGEVTFVCGYEAGCLGYSLYHQLKEHAVDCKILTPSTMAITNTHHVKTDKRDAANIARCLAFHTYSEVYVPDNDDNAVKEYIRMRDDQKLYLKKVKQQILAFVLRQGKRFEGGKTYWTIAHLKWLKNLELSALQRETLDEYLLTYEYLTEKINRFDERIEELSTAEKYNEKVKHMSCLLGIKTHTALSMIVEVGDFERFEKAPKFAAFLGLVPSEDSSDTKVNRYSIIKAGNSHLRRLPVEATQSYTRGTIGHKSVALKQRQKGNPPEIIAYADKANERLRRRFYKMTLNKGVNRNVATTSIARELACFIWGRMTEHVS

SEQ ID NO: 105851 - protein, 436 aa, unidentified
MRGCRCSMIMGFTKPIEHFNLQRKKVITMNTLYVGIDVSSKSNVVYLMLPNGDKHSNFSIANSHKGSTQLVKRILSALTSHSLDTVLIGLEATSVYGDNLVYFLREDATLAPFNRKIHVLNPKQVKKFHDAYNDLPKNDYVDSFVIADCLRFGRINKEVYLGDYRYKALQNLTRARFFAVQNLVKEKQRFMNVLFKKYSTMTQEKVFSDTFSTTALAVYDEFESAEALANMDLQELTDFIMEKGKNRFPDPDAVAKAIQKAARSSYRLPKTVNDSVNQVLSISITSMKALESQIKELDKAIAAQMELLPNVLISIPGIGPVYSAGIMAEIGDINRFDSQAALAKYAGLAWKQHQSGGFEAEVTRLIPSGNRFLKYYLCEAAFSLVRCDKEYSDFYRLKYKGVNRCQHKRALALTARKFVRLVFRLLKDNRLYCQAK

SEQ ID NO: 105852 - protein, 427 aa, unidentified
MYRLIRALASRSKEAYHARAPQCVLWNRRPQKERNGLSDVGPADKEPQFEIRRFGTMTRDLQKLAEWLKQAGCEAATMESTGSYWKPVWNVLEGQIPKLILANAQHVRALPGEKTDRKDGKRLAELTRHGQVRPSYVPPRAILELRDLTRYRSKLLSAGSSERNRIQKVLEDANIKLGSVLSDLFGVSGQKMLQALIKQDTVDTAKVAQLAHWSLKPKMEAIQQALDGKLRDHHRFLIDASLQNMRFIQEQLMRLDEEIQRRLQPYQEQYALLQTIPGIKETGAARILSEIGPDMSPFPDGDHLSSWGGACPGNNESAGKKFQSKIRKGNPHLLAALTECAWAATKKKDCHFRNKYYRLKSRRGSQRAIIAIDHAMLKCIYVVLSQRQPYQEPKPTSLTEAQKERKASSLCRQLRALGYDVKIQKAA

SEQ ID NO: 105853 - protein, 334 aa, unidentified
MKYVGIDVSAKELVVSILGAEDKSNQSKVFDNTATGYRKLIKHLQPKKYQSRVCMEATGVYHFDVAVALSKINNIELMVLNPKVASNFAKSLSTKSKTDAIDAITLGEYAKRMKFVPWRCPSVDELNVRSYARQLARLTQHKSKLKNQLHALKSSQTEPKEVIRVQEKTIVFYDKEIEKLEAVAIKFIATNKLLNSRFELLLSIKGVAKKSAIQLLGELSVLPSDMGKKQWVAHAGLHPVHCQSGSSINKKPYISRAGNRYLRCALYMPAISAATNDEHVRGFYLHLQEDNDLVKMQAICAIMRKLLHAIWGMFATDKPFDGASFYKLKTQTSC

SEQ ID NO: 105854 - protein, 390 aa, unidentified
MIYVGIDVAKDKHDCCILGSDGEVLFPPFTIQNSLQGFDELYDRICSLSSDTSKIKVGLEATGHYHMNLLHSLLDNGLASYVINPLHTNLFRKGQSLRKTKTDKVDASSIAMMLLTDRTLKPYSDSSYHNEELKSLTRYRFNKVYERSRLKVSISRLVSILFPELEKLVPTLHISSVYALLSEYPGASYIASANLTHLKHLLSKSSKGHYGRDIAIAIRDAATSSIGTIIPAKSMELKHTIRLAEVLTEEIDEIEATINSVMKTLESPITSIPGINTRMGAMILAEIGDFSRFENADQILAYAGLSPSTYQSGQMTASYSHMEKRGSRYLRYALFNATRFVCLWDPTFRAYLAKKKAEGKHYNVAISHACKKLVRTIYRMQLTGELYHKA

SEQ ID NO: 105855 - protein, 370 aa, unidentified
MIVIGADTHKRSHALAAVDEGTGRVRGQREIRADETGHLAAARWARSLDEERVWAIEDCRHVSRRLEQALLAAGERVVRVAPHRMGASRKGERRPGKSDQIDALAIARAVVGDGIEKFPAAHLDERAMEIRLLLDHRGDLVAERTRTVNRLRWHLLQICPELECSLKPGAFNQARVLERVERRLRKQPAGARVGVAREEVAHIRRLNRRIEQLKRELLELVRAHRPQLLAETGCGPLVAAILIGRTAGAERFRTDASFALQSGAAPIPCSSGQRTQHRLNRGGDRQLNHALHIIAITRAHHDPATKAYLERKEAEGKTKKGALRCLKRHLARRFHRLLSPSAQARPQPHDATRADTTTVGAAPIPMVCLR

SEQ ID NO: 105856 - protein, 369 aa, unidentified
MKKHKHYVGLDVHKDTIAVAIAEAGRGGEVRSYGTIANTLDAFRRLGDKIGGESIELHVAYEAGPTGFVLYRWMKKHGIDCIVVAPSKTPQGPGPRQKTDQRDAVQLARLHRAGELTAIHVPDETDEAIRDLTRARADAVADLTRAKNRLKGFLLRNGYRCSVKANWSDAHMRYLRQLSLPIPIHSSVLEECLLGVTQALERISRLEALIEVEAPRWRFYPAVQALTCLRGFKLTAATVLIAEIGDVKRFEHPRQLMGFLGLVPRENTTGQTRRLGSITKAGNAHARWILIEAVHHAFHPPKVSSQLALRQVGQPEPYKALSWKAQSRLHRRGWHLLRRGVMKPKVIVALARELAGFVWALLSQVPLSA

SEQ ID NO: 105857 - protein, 395 aa, unidentified
MFIVGIDVAKRSHEVCMITSDGQTVQRPFSIRNNCTGYNLMLEKIRKHTNIKSQIVFAMESTAHYWLALFTRLRKDGYHVILLNPIQTSAMRDMFIRKIKTDAKDSFIIAELIRFGRYAESNVAQDRLLALKELCRNRFYLVDMAGDLKRKLIALIDRVFPEYEAQFDTIFCKSSVAVLKKYPTPQKLSNAHLDKLTELLWNSSNGHFGEWKARELKELARNSFGVEDCDGAYSTLILLMLDQIQSLSGKADALEKEISRLFQSFDTTVTTIPGVGPIIGAVILSEVGDISRFSSADKLAAYIGVDPSVNQSGEFQAAHAHMSKRGSPYLRRCIWMASQVAVQRDPMFRAYYEKKAAEGLKYMTIIGHVTRKMTAVIFAILRDHKVYEPVLPTAA

SEQ ID NO: 105858 - protein, 388 aa, unidentified
MVYVGIDIAKLNHYASAIDSDGVLLFEPFEFLNDNAGFFTLLSKLNSFEPDDIIIGLESTAHYGNNLVSFLVSKGFHVCVINPIQTANLRKNNIRKTKTDKVDTLVIAKAVALMDHPRFVTLYDIALMQLKNLGRFRMKLVKQRSRTKIQLTACLDQVFPELQYFFKSGIHQKTVYAILKEAPSASQIASMHLTHLKNLLVSNSQGHFKKETALELRVLAQKSVGTVDRSLSIQITQSIAQIELLDRQINTVDNEIKDIVESLDSVIMTIPGIGPINGGMILGEIGDINRFSKPRKLLAFAGLDPSVYQSGNFIAKKTKMSKRGSSALRYALMNAAHNVVKYNQTFKEYYDSKRSEGRGHYNALGHCAGKLVRIIYKMLKDNVEFKLD

SEQ ID NO: 105859 - protein, 362 aa, unidentified
MRIIGCDLHARQQVLAMLDTTTGEVVNMTLKHEGNNVREFYSKLPRPVRVGIEATGSMQWFLNLTEELGIECLVGHPAQIRAAEPRKQKHDRRDADLILKLLAENRFPAIWLPSKELQDLRSLLRHRHQWVRMRTRIQNALQSIALANGLRRGTALWSHDGQTMIASLPLAPHTAYRRNELQALYAKFEAEIEKLNQRVEEQACKRHGAQLLMSHPGVGPITALATEVFLGDPARFADSKALASYVGMIPREYSSGGRQRLGGLTKQGNPLLRFLWGEAGAHAARKDPELQRFYRRKLVQKGLGKASVAVARKLGIRLWIMLRDQIEYNEFCRRGQKQQKSSEACAGMPETPYGAKSHRPVD

SEQ ID NO: 105860 - protein, 341 aa, unidentified
MSNANTYIGVDLHKKSCYVTVMNGDGQIKKQTEISTDSDKVSRFFKKYTAGQVAVESTMNWIPFYENLESLGCHVVLSNPLATKAIAAARIKNDKVDSKILADLLRTNLLPTAYIQPREIRDLKELVRQRVSYVQWRTMLKNKIHSVLFKSNVAQGFSNLYGIAGMKWLRNLELRGIYRQELDRYLKTLDLLNGQIEELSQTIMDTAKTDYDCKLLMTIPGISYFSALVIKSEIGDISRFPNSNKLCAYAGLIPSTYASADKVRFGRITKRGSKWLRKSLIDAVTSGSRHPSRLCFFYRKLKKNKGTGKAKVATARKLCTIIFAMLTDKQPFREFTPIKQR

SEQ ID NO: 105861 - protein, 346 aa, unidentified
MKQISTIGLDLAKNIFQVHGADAEGSPLFSRKLRRAEVLRFLAKLPPSLIGMEACGSAHYWAREIAALGHEVRLIPPIYVKPFVKRGKTDAADAEAISEAVTRKTMRFVPVKSADQQAAGMVLKTRALLVRQQTQAINALRAHLSELGVIAAVGTSKVTALIEIVRDQADARLPEAARLALGEIATHIEALTRQIDKLERKIVTDAKHDADMRRLITIPGVGAIIAASIKALVPDPEGFKSGRHFSAWLGLTPKPHSSGGKERLGRISKMGNPMLRTLLVLGATSVLRHAKGNDKAPQWLTKLLARRPFKVAAVALANKIARIIWALLTKGGIYRNTGNLISTANV

SEQ ID NO: 105862 - protein, 328 aa, unidentified
MIQLGIDVGKSKIDLCLRPDGPEGRKKTKMLTNGPDVAVSVLEWLAKQKVAPADVQVVMESTGTYHEHLAYGLYERAVRVIIANPARVRAFAQGMGILTKNDTVDADVLARYGAMRQPDVWQPPSPAIQELKALLSRRDALVHDVGREQSRLEKLLSTRCSLLVEASVRKILQVLNNELQVVQALIDNHIDKHPELKRDMEYLTSIKGIGSAVGSTMLVVLRGNHFISAEQAASWVGVVPKEKRSGSSVRGRTRLSKNGPPEVRAKLFMAAIVAVKHNPLLKQFYDRLLAAGKAKMSALGGVMRKLVHICYGVVMKQQKYDENYATAA

SEQ ID NO: 105863 - protein, 416 aa, unidentified
MGKQREKACGADIHKNTIVATILSLAGTKNQAEFGTTLPELLRFKAWLIDDGCGVVAMESTGTYWIPIFSVLEDRIEVLVANPYMIKHIPGKKTDLTDSEWLAELCLKGLITPSRIFPKEDRVLRSLTRAREGLVKIRTQLKNKIHRDLASSHIKLSSVITDIFGKSGMHIMRGLLEGQSIDQIIKGIPSGRVKKNADKIKASIENNLDSSQIFLIESNLELIGSVQDKIDKIDADLNRKFIAKLNDLKIAMSIPGIQFTSAATILAEIGDYRNFSSSEKLASYFGIVPFVNQSAGNLHTGCITKHGSKHLRWIMVQVARASSKKIGSKLRKFYLRVRARRGDNVATVALARKILCILHHLLMNQEMYEEPGVAKRTRSVSADQSSSKRRLTAQEMIDILRRSGYEVRKIDRGACG

SEQ ID NO: 105864 - protein, 420 aa, unidentified
MKAYNVDNFAVLIGIDWADQKHDVCEHPLDSGKYHYSVIKSKPEALHDWAMSIKKRYPNQKIAVVCELKKGPLIYALAKYKHLTLFTINPSTVAKYRKAFTPSGAKDDPSDAFVQVEILTLHMDKLSVIEPESASVRSLAQLVEYRRNLVQDSVDLSNKITAALKNYYPQVLEWFNEKDTIIFCDFISKWPSLAKVKRAKKQTLLDFFNSHNSHYVHVNETRIANIKSATPLTEDVGVIVPNQLLIEVFIAQFKVLLKGIESLDKAIKLTYKAQNDKVIFDSLPGAGPQLAPRLLVAFGSNRDRYNDASDLQRYAGIAPVIERSGKKMWTHWRYSCPTFLRQTFVEWAGFSIRYSFWAKAYYEQQKSKGKPHNSIIRSLAFKWIRILFRCWKTSTPYDESKYLEALKRRGSPLLKFAINS

SEQ ID NO: 105865 - protein, 391 aa, unidentified
MIYIGIDVAKDKHDCFITNSDGEALFKAFTITNNLDGFNELHQKIASVMDDVTKVKVGLEATGHYSYNLLGYLIDKGLPTYVINPLHTNLYRKSLSLRQTKTDKVDARTIASMLMSDVNLKSYSDTSYHNEELKSLTRYRFDKVKERAKLKTSVSRLVCILFPELEKLVPTLHIASVYALLSEFPSAKHVATAHLTRLTNLLSESSKGRYGKDTAITFRDAARASIGSNMPAKSLELKHTIKLIQELDSEIDEIEKEIKIIMDEINSPILSIPGINYRMGAMIIAEIGDFNRFDSPDKILAYAGFSPSTYQSGQLDGAYAHMEKRGSRYLRYALYNATKYVCHWDPTFAAYLAKKRAEGKHYNVAISHAVKKLVRVIYHLEKTKQQYIKAA

SEQ ID NO: 105866 - protein, 377 aa, unidentified
MKRIKFVGLDVHAETIAVAVAEAEGEIRSLGMIPNREESVRKLVKKLGPVEQLRFCYEAGPTGYVLYWQLTKMGAACTVVAPTLVPVKAGDRVKTDRRDALKLARNYRAGELTAVWVPDAEHEALRDLVRAREAAKKDQLRARHRLSKFLLRHGRRPPVRVTPWTVKYLEWVKRDVHFTVKAQEATLLDYLHEVEHMTARITRLDDATEEAVKVAPAKMRAVIEGLQALRGIAKISAVTIVAELGEVTRFTKARELMGYAGIVASENSSGERQRRGSITKTGNAHLRRVVVEAAWAYRHRPAIGFTLRKRQENLSEEVKEIAWKAQHRLHARYGKLMAKGKNKGVVVTAVGRELLGFIWAIGVQVEAQQKESLRQAA

SEQ ID NO: 105867 - protein, 353 aa, unidentified
MRYIGVDLHTNSFTACYLEQEKPENIKTFRLQDLGNFIKNLQETDEVALEATGNSCFFYDEVSPYVKRVVVVAPLQFEVIRRSVNKTDKHDARAIAFFLSKDMLPEAKCKSKQCQQLASLLKTRDQLVKSRVSLINKIHGLFNYHGIKIKKEVLTIKAGFECSLGKHDWSHLEKVEIEVISSNLEVIRESLKKLEKEIIAFAQQLPGFNNLISIKGIGAISAAVFVATIGDINDFSNPEKLTAYFGVVPRVSQSNQQCTIGRITKRGSKIGRTSLVQCTWIAIRYSPYLKSFYERVKKSVVLLRLLLLLLGSFSQLFSILLKTTGFSKILQNMKFLIDNNHRRNIYELYNRTK

SEQ ID NO: 105868 - protein, 342 aa, unidentified
MNSVAVVPMDIHKKFSKAVVMDGEGNVTSEERVSHEAPEEMKKFLSQFEPGTDVVMEATFNWPWIADLVEEMGMLPHLAHPPRVREMAKGMAKSDRKDAIFLGKLWLAGEIFPESYLAPPEVRRMRGLFRLRLALVRMRAAIKNTVHGQLHRQGILVEGCTDLFGKKGRRALKSLVMPEYERWQLEQKLRMLDDIVKRIGEIEKTIQKDLRHDPRADILMTLPGVGEITAYSLLAEIGEIERFPNSRALAAYAGLLPLDNESADKDFGKRTQRSCNQYLRTAMLEAVSGAVKSSVRMLSLHSRVKAKNRNKTGKARVAVARELIELVHLVLTTGLWQVCIGW

SEQ ID NO: 105869 - protein, 356 aa, unidentified
MSHDVKYIGMDVHKEAIVIAVLNGSGKLVMETILETKASSILQFIHGLRGELHVTWEEGTWAAWLYDLLQPQVQEVVVCNPRRNALLKEGSKSDKVDARKLADLLRTGMLRPVYHGENGLRTLRELARSYQTISKDLTRVMNRLKALYRGWGIPCAGTQVYAPRYREEWLGKIPQTGVRRRAELLYQQLDGLQTLRRNLRPEFLAESRKQKAAKLLRKIPCIGPIRAGLLIALMQTPYRFRSKRQLWTYSGLGIETHDSAQYRYVGGQLQRSKKPQQIRGLNRNHNHAMKEIFKGAATRASCGTGPFRDFYAALLTKGMKPEMARLTLARKIAAITLTLWKKEERFDVEQLKTQAA
